United States Patent Application Publication US 2026/0117211 A1 - sequence listing, part 3

SEQ ID NO: 8625 - protein, 509 aa, unidentified
  REGION 1..509: note = Human gut metagenome
VPDCHVPAERKQMKVYVIGWNGLGLAPTTPRKARLLLSSGRAEVAFRQPFTIRLNYKTGCAHPDKMSLGIDTGSQHIGASVISLAEEIVISKEEYALRSTMEKRSLLETRKTLRRGRRFRNIRYRHPKFRPGTKRTYLDVPIKRNGHLTHWKEESNDFDSSRPEGWLPPSMQSKLDHHVRIISRYRNALPPDTTIRIEVGRFDVQHMENSQIRGEMYQHGARYESENLKAYIFSRDHYTCQCCQKKAGTRRDDGTTVRLIVHHIDFRSKGASDNPKRLITVCDKCHTGAAHKPGGVLYDWMTKGKTVARGYRDTAVMNILRRRLWKAFPDAEFTYGNITAADRKTLGLGKAHCNDATAIAAHGLEKIRDIPDTTYYRQIRKQKRSLHESTPRKGRKEPNRSAKRNAKNTCRSGNLYLNDKVRIAGQNGWICGFSGTSSVYVKNMEDEYIRMPGKTHKLIPAKGLTARTHCNNWAVYNTKTILYEGHTEALLDLTRLAGLKPGGALIEIL

SEQ ID NO: 8626 - protein, 429 aa, Leptolyngbya sp.; identical to SEQ ID NO: 8055

SEQ ID NO: 8627 - protein, 456 aa, unidentified
  REGION 1..456: note = Marine metagenome
MAVFVLDKKKQPLMPCSEKRARLLLQRGRAVVHKRYPFTIRLKDRVGGKTQPLRLGIDPGSKTTGLALMRETEGEQRHVLCLFELIHRGFQIKKALQQRAAFRRRRRSANLRYRAPRFNNRTKPKGWLAPSLQHRVDTVTAWVKRLSRLAPVTAISQELVRFDTQKLENPEISGVEYQQGTLLGYEVREYLLEKWERECAYCGTGDTPLEIEHVVPRSRGGSNRVSNLTLSCHPCNAEKDSQTLTDFFATNKGLKKRLKANGLSADAQLERVQRQLKQPMRDASAVNATRWALFSALKTTDLPVAVSSGGRTKYNRQRLNIPKTHALDAACVGAFGKLYDWTVPTLTIKAMGRGSYQRTRLTKHGFPRGYLMRQKQVHGFQTGDMVRAIVPTGKKAGTYTGRVAIRKTGSFNIQAEYGAVQGISHKYCTLIQRGDGYGYHFTPFTHLTGGAGQAVA

SEQ ID NO: 8628 - protein, 414 aa, unidentified
  REGION 1..414: note = Human gut metagenome
MPCSPAKARLLLKEKKAIVKRRTPFTIQLTIATGETKQPVSLGVDAGYKHVGLSASTEKAELYASEVELRQDITDLLSARRALRQSRRNCKTRYRAPRFDNRIRTKRKGWLAPSVENRINAHLSRIEAVLRLLPVTTITVETASFDMQLLKNPEISGKEYQEGEQLGFWNVREYVLSRDGHVCQHCHGRSKDPVLNVHHLESRRTGGDSPGNLITLCETCHKELHRGEITLKAKRGQSFRAETFMGIMRWEVLDRLKASHPKLEVQNTYGYRTKHARIVNGIAKSHCADAFCIAGNLGAERLGEFFFQKQTRRNNRQIHKLSVLKHGLRKRNQAPFEIKGFRLFDKVACKGEEGFIFGRRSSGYFDVRKLDGTHISAGISYKKLRLLEKRQTYITEIRKEEALPPLSEGRGLRA

SEQ ID NO: 8629 - protein, 513 aa, unidentified
  REGION 1..513: note = Human gut metagenome
LKKEAAGHQQGKDCRPVRYGPPYRAGMPDGRRKPERKHMVAVVTSTGKPLMPTSAYRARKLLKKGRAVIFKYRPYFTIQLVDRADGEVQEVEYKSDTGSVHVGISVCTEKKELLSEQRDLLENEPEHHNDRKKNRRTRRNRKRYRKPRFDNRKKKPQVGHEKWLPPTLLHKMEVQVRLYREFCRVVPVTSACFEMGKFDTQALKAVLKGDPVPEGEGYQKGERYGTDTLRAAVFLRDGHTCRFCGRSVKDGAVLHVHHVGYWKGDRTNRPANLASACEQCHTPANHGKNGLLYGKEPDFKTLKDASYMTSVRWIMLDEIKKAAPGVRVSVTYGVTTKKKRQELRLPKSHVNDAFSMASFHPKKRADTEYWKKIPRHDRVLQKFYDAVYLDTRDGSKKKGSEMSNGRISRNHKKDNENLHQYRGHKVLKGHDSIRRGASSLKPGSIVMYKGEKMTVHGTHTRYVTDKEGKTVKKVNVQFTCPASDGRKSASMNKCTPVSRVYNTGWKRYWPDKK

SEQ ID NO: 8630 - protein, 419 aa, unidentified
  REGION 1..419: note = Human gut metagenome
MVYVISQDGKPLMPCSDPIARLLLKQGKAKVKKRDPFTIKLTYETTNYTQGLTLGVDTGSGTIGTAVSKDNGDIVYMSEVVVRNDITDKMTQRAKYRRNRRNRKTRYRKARWLNRASSIKKDRFSPTMQSKLHSHVREIEYIQSILPITEMVFETGQFDMQLMKNPSLANPKVRPWGYQKGANYGFENTKAMVLNRDNYTCQCCKGKHKDSKLEVHHIVFRSQGGSDEESNLLTLCHTCHKDLHSGKINPKLSGKLKGNLKYATQMNSIRKQLFRFYPNAIETFGYVTKANRLHLGVDKEHYYDACTIATQGNAFNVKSNLYKKKCVSDGDFQKTKGIRSEQPIVTDKICGFRKFDKVRYFGNDYFIKGRMSTGYAILMDIDGNKIDFSTMPRGYKTPKLSNCKRITARSTVMTQVKVV

SEQ ID NO: 8631 - protein, 443 aa, unidentified
  REGION 1..443: note = Human gut metagenome
LTKDENRPSGRTTGLRAEQAEPAGIRKGDTLKVFVLNMRGKPLMPCSPAKARHMLKAGKAFVVRRTPFTIKLTIATGETKQDVTLGVDAGARHVGISATTEKEEVFASEVALRQDITGLLADRLAFRRARRNRKTRYRAPRFNNRVRSKHKGWLAPSVENRIQAHISRIEAVCRLLPVTKIVIETASFDIQKIRNPEVEGTGYQQGDQLGFWNVREYVLFRDGHICQHCRGRSKDPILNVHHLESRKTGGDAPNNLITLCETCHKAYHAGKIKLKVKRGHSFRAEAFMGIMRWTLLNRMRKAHPSLPVENTYGYLTKHKRIALGLPKTHCADAFCIAGNLKALRRGDFLFQQQTRKHNRQIHKCSILKGGVRKLNQAPFLVKGFRLFDKVRIGGQIGFVFGRRVRGTFNIRRLDKTVIGTDINCKKLSLLETRKTFLTELRKE

SEQ ID NO: 8632 - protein, 428 aa, Moorena sp.; identical to SEQ ID NO: 7923

SEQ ID NO: 8633 - protein, 557 aa, unidentified; identical to SEQ ID NO: 6919
  REGION 1..557: note = Human gut metagenome

SEQ ID NO: 8634 - protein, 529 aa, Burkholderia sp.; identical to SEQ ID NO: 4276

SEQ ID NO: 8635 - protein, 237 aa, unidentified
  REGION 1..237: note = Human gut metagenome
MYDEYNVRQYVLKRDNYTCQCCGAHTTAKKTVKLHVHHLESRKVGGNAPSNLITLCTTCHNNLHKGKITLDGKKRGKTLRDAAFMGIMRNTLLTRLRNELNIPVQNTYGYITKLLREQNDIKKSHVNDARCISKHPLAKPCSVCYRTKAIRHHNRQIHKAKILKGGIRKANQAPYIVKGFRLWDKVLYNEQECFISGRRSSGYFALRKFDGTTITNSISFKKLRLLEPATNYLIERK

SEQ ID NO: 8636 - protein, 460 aa, unidentified
  REGION 1..460: note = Human gut metagenome
MVAVVDLFGKPLMPTNEYRARKLLKQKKAKIFGYRPFTIQLTERKSAEIQPIELCMDTGYIHIGISAKSERHEYLGMQIDTLTDEKLKRDDKRQYRRQRRNRKRYRAPRFDNRRRKEGWIAPSLEHKKEIHIDAIQRICKVMPITDITLEIGNFDTHVLKAVEEGKPLPQGSDYQHGERYGIATLREAVFLRDGYKCQCCEKSVKDGAILHVHHIKYRSQGGTNRMSNLITVCDKCHTQKNHKPGGKLWNWKPKLAEFKGASYMTSIRWTLYNEVTALLPNSSVHITYGAKTKESRRKLDIKKSHVNDAYVMGLFCPKHRTKPVYFKKKRRNNRVLEKFYDAKYIDSRDGKKQSGQELFNGRINRNHRKDSENLHLYRKQKVTKGKRSIRNKHYPIQPHDILLYQKKKYENAGCHNNGSRVILLPEKKSVALKQLTIYQYAGGYYRVPYESNKKEERTGS

SEQ ID NO: 8637 - protein, 469 aa, Burkholderia sp.; identical to SEQ ID NO: 4167

SEQ ID NO: 8638 - protein, 431 aa, Phormidium sp.
MSNFVFVLDTNKRQLDPVHPGKARRLLSTGNAAVFRRYPFTIILKQAYPEIPVQDLELKLDPGSQVTGIAVVQGTKVIFGAELEHRGQQIKDALLSRRQLRRSRRNRKTRYRQARFLNRTRPKGWLPPSLQHRVDTTMTWVNRFRRLAPIARIAQELVRFDLQLIQNPEISGIEYQQGELQGYEVREYLLEKWNRKCAYCGAKNVALEVEHIHPKSKGGTDRVSNLTLACHSCNQSKSNRDIRDFLSSKPDVLNRILNQAKSPLKDAAAVNSTRWALFNALKQTGLPVATGTGGQTKFNRTRLDLPKTHWLDAASVGKIDSLKVLTTKPLLIAAKGHGTRQMCGTDKFGFPKRHRSRVQIHKGFQTGDIITATVTKGKKIGSYVGRVLCRTSGSFDVTTQSGRVSGISHRYCQPIHKRDGYAYAFAHTIGD

SEQ ID NO: 8639 - protein, 416 aa, unidentified; identical to SEQ ID NO: 6135
  REGION 1..416: note = Human gut metagenome

SEQ ID NO: 8640 - protein, 414 aa, unidentified
  REGION 1..414: note = Human gut metagenome
MVYVINKQGQALMPTERFGKVRRLLKNSLAHVVCRIPFTIQLDYDTTDYTQPVSLGVDAGSKHIGISATTSEKELYAADVELRNDIVDKLSTRRELRRTRRSRLRYRKARFNNRVSSKRKGWLAPSVENKIQTHLTVVEKIHKFLPITNIVVETAAFDIQKINNPSISGSGYQQGEQLDFFNVREYVLFRDNHTCQHCKGKSKDKVLNVHHIESRKTGGDSPKNLITLCETCHKAYHRGDFELNVKRGKSFRDSAFMGIMRWSFYDRLKNIYPSVSMTFGYITKNARITNNLPKDHYVDARCISGNPVAKPLGYYFYQKKVRCQNRQIHKSNFLKGGRKKLNQAPFLVKGFRLFDLVEYKNDLYYIFGRRSSGSFDIRKLDGTKVNKGSINCKYLRLIDKRRSILTEKRMQVNL

SEQ ID NO: 8641 - protein, 466 aa, unidentified
  REGION 1..466: note = Human gut metagenome
LSIKPLINIGEGVIYSSICTGLSLQTYQKRKEVPCMVYVLDINGQPLMPTTRHGKVRRLLNSHLAKVVKRCPFTIQLLYQSTKEIQPVSLGVDAGSKHIGMAATTEKKVVYQEELSPRNDVVKLLSARRTLRRTRRNRKTRYRKPRFNNRVHSKHKGWLAPSVEVKIQEHITAIKRICQILPISEIHVEISEFDLQRLKAMEEGRTLPVGTDYQLGEQYDFYNTRQYVLHRDGYTCQCCGTHDNNIKLHVHHIESRQTGGNAPSNLITLCEHCHKALHKGKFELPKGKKRGKTYRDATFMGIMRKTLLERLKKEIDVPVAGTYGYITKYWRERAGLEKSHINDAICISKYPYAKPLDTYYLTKVVRNHNRQIHKSNFSKGGIRKRNQAPYLIKGFRLFDKVLYQGKEYFIFGRRATGYFDIRTLDGTKVNKGSISYKKLRIQDTAKAYLKEARAIPHMNKFTCVLA

SEQ ID NO: 8642 - protein, 456 aa, unidentified
  REGION 1..456: note = Human gut metagenome
MSTCVCVLSNSGERLMPTFRLGKVRHLLKDGKAKIVKHHPFTIQLLYDSKTNTQPIETCEDVGYNYIGISVKSESHEYVSAQYDTLQDEKEHHDDCRKYRRTRRNRLRYRKSRFDNRKRDKGWLAPSLEHKKQLNISLIERYVSVIPITHVTVEVGSFDTMLVKAIQEGKVIPEGADYQKGPRYNLATLREAVFYRDNYVCKVCGRKATEGAILHMHHMFYWKGRHGYQLDELVTVCEKCHTPANHQKGGKLYGFGKDKKFANLSGAAFMNAVRWQIVNALYATYGKEFVTITYGAMTKEKRIALQLEKTHNNDAYAMGDYHPARRCKFRHYQKRRRNNRVLEKFYDATYVDTRTGNKAKGKELFNGRISRNHKKDCENLHKYRSKKVSKGRRSIRRQHYAIQPYDTVRLEGKTYITSGCHNKGTRLLIPVNGKSKSVAISKFQVVCHAGAWIQII

SEQ ID NO: 8643 - protein, 431 aa, Ktedonobacter sp.
MSYVFVIDQEKRPLDPVHPGRARKLLSSGKAAVYRRFPFVLILKHPVSEAHPQPLRLKIDPGSKTTGLAVLNDTSGQVLWAAELVHRGEEVHQALQKRAGVRRGRRSRHTRYRAARFSNRRRKRGWLAPSLCSRMQNVQTWTRRLMRWCPLGAISYEAVRFDTQAIQNPEIKGVAYQHGTLAGLEVKEYLLLKWRHKCVYCQKGDIPLEVEHIVPKRRGGSDRITNLTLACEACNQQKGSQTAQAFGFPHLQAQALQPLKDAAAVNSTRWALYERLKATGLPIEVSTGGQTKWNRKQRGIPKSHWLDAVCVGPSTPERVQWQHVIPLLITARGRQCRQLCNVDGWGFPRSRPKGPSKVFGFQTGDMVQAVVTRGKRMGTYVGRVAIKTDGYFKIIGAHGMVEGIHARYCSPLHRVDGYEYQKGSAALPPQM

SEQ ID NO: 8644 - protein, 430 aa, unidentified; identical to SEQ ID NO: 4817
  REGION 1..430: note = Human gut metagenome

SEQ ID NO: 8645 - protein, 512 aa, unidentified; identical to SEQ ID NO: 4446
  REGION 1..512: note = Human gut metagenome

SEQ ID NO: 8646 - protein, 414 aa, unidentified; identical to SEQ ID NO: 4015
  REGION 1..414: note = metagenome

SEQ ID NO: 8647 - protein, 414 aa, unidentified; identical to SEQ ID NO: 6490
  REGION 1..414: note = gut metagenome

SEQ ID NO: 8648 - protein, 449 aa, Anoxybacillus sp.; identical to SEQ ID NO: 3571

SEQ ID NO: 8649 - protein, 512 aa, unidentified; identical to SEQ ID NO: 4031
  REGION 1..512: note = Human gut metagenome

SEQ ID NO: 8650 - protein, 423 aa, unidentified; identical to SEQ ID NO: 3951
  REGION 1..423: note = Human gut metagenome

SEQ ID NO: 8651 - protein, 394 aa, Psychromonas sp.
MRVFVINKHGESLMPCRPRKAKILIREGKATVIKRNPFTIQLKFGSAGYKQPLTLGVDTGHGEVGISVLSDTKEVFSAIATMRNDISDKMTTRKMYRRQKRNKLRYRAPRFLNRAASTRKGRLAPSVQWKVDAHVRLINQCRSLMPVTKTVLETGTFDMVKMNNPNISNEQYQQGVQYGFENVKAYVLARDNYKCQSGKKGCCDKLEVHHVIYRSQSGSDAPSNLKTLCSKHHKALHDNKWSLTSTKQKSLKPATTMNIIRAQLLSIFPDAIETFGYVTKANRYHHNIEKSHSNDAFVIAGGSNQERSTERKITFKRKNNRALQKNRNGFAPSIRKQRYTIQPQDIIEWNGIKCIAKGIQNKGAYLAFMHGTKRLVKNIKTIRLVFQNKGIVYA

SEQ ID NO: 8652 - protein, 454 aa, Moorena sp.
MRINSVSPARQTSKTLPRQTSHESRRDATMSNYVFVIDTNHRQLNPSTPGVARSLLNARKAAIYRRYPFTIILKKEVTGLVEPCQLKIDPGSRATGLAILQGNRVLWGAELTHRGQSIKNSLESRRSLRRGRRGRKTRYRQPRFLNRTRPKGWLAPSLMHRILTTMTWVNRLIKLCPIQSIAQELVRFDTQVIQNPEISGTQYQQGTLYQYETREYLLEKWGRQCVYCGQEDTPLEVEHIVSRSKGGSNRVSNLTIACVPCNQKKSNRSIEDFLSGKPDLLKRIKAQAKAPLKDAAAVNATRWKLFNALKEMGLPVSVGTGGQTKFNRKQQDLPKAHWIDAAATGKDIPELEFCTSQPLLIQCSGHGTRQMCGTDKYGFPIRYRSKKRIHYGFQTGDIVKAVVTQGKKIGSYMGRVLCRKSGNFDISTKDGRVTGISHKYCTHIHKKDGYNYAF

SEQ ID NO: 8653 - protein, 427 aa, Moorena sp.; identical to SEQ ID NO: 4007

SEQ ID NO: 8654 - protein, 427 aa, Oscillochloris sp.; identical to SEQ ID NO: 5291

SEQ ID NO: 8655 - protein, 442 aa, unidentified; identical to SEQ ID NO: 2903
  REGION 1..442: note = Human gut metagenome

SEQ ID NO: 8656 - protein, 512 aa, unidentified; identical to SEQ ID NO: 3720
  REGION 1..512: note = Human gut metagenome

SEQ ID NO: 8657 - protein, 408 aa, unidentified
  REGION 1..408: note = Human gut metagenome
MVYVQDINGKPMMPTTRHGKVRRLLKDKKAVVVNLCPFTIKLMYVTSDYKQEIVLGVDAGTKHVGLSATTKSKELYSSEVILRNDIVDLLSTRRELRRTRRNRLRYRKPRFDNRIKSRRPGWVAPSVKYKIDAHIRVIDNVCSILPISRIVIEVAQFDTQKIKNHDISGKEYQKGDQLGFWNIREYVLCRDGHKCQYCKGKSKDHVLNVHHIESRKTGGNSPSNLITLCETCHKEYHKGNIDLKIRRGKSLRDAAVMGIMKWKLHEELRSKYNRVSMTFGYVTKYNRINHDIEKYHVSDAFVISKNFNAIRLGYYYKVRLVRRHNRQIHKQKIQKGGIKRLNQSPYEVFGFRLFDRVMFENSYYFIFARRKTGSFNIRGIDGENCRDITYKKLKLSRCKRFMIQKETN

SEQ ID NO: 8658 - protein, 431 aa, Citrobacter sp.; identical to SEQ ID NO: 2435

SEQ ID NO: 8659 - protein, 470 aa, unidentified
  REGION 1..470: note = Human gut metagenome
MSVFVVGLNGCRLMPTSERKARLLLKQGKAFVEQKVPFTIRLNYKTGSTTQLGYLGIDTGSQHIGVSVVREDGTVLHKEEIGLRDSMSKRKLLEAKASLRRGRRYRKTRYRHPKWRPKTKRVYCEVPDRKGRHWQKKKITFTSKRPKGWLPPSLQSKTDHHIRWIKKLQDLLPEGYRLSIELGRFDPARMKNPEIHGDLYQKGPQYDYENVRAYVLDRDRYTCQICKKKGGKLHVHHILYRSHGATDDPQYMDTVCSDCHSAQNHLPGGILYQWMQEQKRFSRGLRDATFMNILRKRLIRAFPEAVFTYGNVTKVDREKLKLPKSHGNDATAIALVKTGITAVKDKESVICIQQVRRKKRSLHEETPRKGRKEPNRTAARNNKNTKAVTVTKRQNKKKVSMTGCLFDRVELNGKKGWISGFTGKSCYVKDADDQYLSTSPKYKQVSLSKLRILHHCGNWIIGAKKTLGKG

SEQ ID NO: 8660 - protein, 415 aa, Bacillus sp.; identical to SEQ ID NO: 2431

SEQ ID NO: 8661 - protein, 418 aa, unidentified
  REGION 1..418: note = Human oral metagenome
MFVYVLDKNGQPLMPTRRFGKVRRLLRDKKAKVVKHCPFTIKLLYEPETKIVQDIVLGVDTGSKYVGVACVGNDKVLYQAQVELRDDIKKKMDSRRMCRRNRRFRKTRYRKCRFLNRRNSIRKDRYCPTLVSKFYGHVREVEFCKKILPIKDTVLETGKFDTQLMEKPWLQEHKWAYQKGVNYGYVNAREHALVRDKYTCQCCGKRNCRVEAHHIVFRSKGGSNDLENYVTLCEDCHKAVHSGEIDLKLKGKRRGTLRYATQMSIIRNMLLKKYSDAIETFGFVTKENRENLGLKKDHYLDACVIASGGVKFEQSDVLYRKRCVSRQDRQLCKGIRGEKRMPTGKVFGFKKFDKVKYLGKECFIKGRRRNGAFVLMTIDGNPIDFRNMGGKQNPHYKSIDRLNTRKSVLCVSRSVEWR

SEQ ID NO: 8662 - protein, 420 aa, unidentified
  REGION 1..420: note = Human gut metagenome
MVYVLNKNNKSVMPCSERKARLLLKQGRAVIYRKDVFTIKLINGSYGYKQHITMGIDCGSKHIGISATTNKKELFSANAELRNDIVKLLSDRRMLRRSRRFRKTRYRKHRFNNRIVKNGWIAPSIKQKIQSHFNLVGFLHKLLPITNIVVETASFDIQKINNPSISGVEYQQGEQLDFFNVREYVLFRDNHICQHCKGKSKDKVLNVHHIESRKTGGDSPNNLITLCETCHKAYHRGEFELNVKRGKSFRDAAFMGIMRWSFYEKLKNIYPSVSMTFGYITKYKRIKLGLDKEHYNDAYCICGNLAAKMLSTHHFIRFIPRHSRVLHMQKFSKGGVRRSASASYWLNGGKPSKSGAMFTMFDKVKFNSVVCFISGSSNGFASLRDINWNKVHGCKTTVTVNKLALVSRRRGSMLFGELCG

SEQ ID NO: 8663 - protein, 414 aa, unidentified; identical to SEQ ID NO: 4347
  REGION 1..414: note = Human gut metagenome

SEQ ID NO: 8664 - protein, 465 aa, unidentified
  REGION 1..465: note = Human gut metagenome
MSTCVCVLSNSGERLMPTFRLGKVRHLLKDGKAKIVKHHPFTIQLLYDSKTNTQPIEICEDVGYNYIGISVKSQSHEYVSAQYDTLQDEKACHDSCRKLRRTRRNRLRYRKPRFDNRKRGEGWLAPSLRHKKELNVNVVKMYCAVMPITHATVEVGSFDTMLVKAIQEGKAIPEGADYQKGPRYNLATLREAVFYRDNYTCQVCGRKVADGAILHMHHMFYWKGRHGDSLNELLTVCEKCHTPANHQKGGKLYGFGENVKFADLSGAAFMNTVRWQIVNELYAAFGKDFVTVTHGAMTKEKRIALRLEKSHNNDAYAMGEFHPNCRCTFEHYEKVRRNNRILEKFYDSRYIDIRTGEIATGKELFNGRINRNHKKDSENLHRYRGKRTYAGHRALLRKKVNLNPGDLVSLNGEVLVVHSTHTNKKGAVNVEFKTPGKSGQKSASLKKLKIVKAADSMHSAWEKIS

SEQ ID NO: 8665 - protein, 465 aa, unidentified
  REGION 1..465: note = Human gut metagenome
MSTCVCVLSNSGERLMPTIRLGKVRRLLKDGKAKIIKHHPFTIQLLYDSKANTQPIEICEDVGYNYIGISVKSQSHEYVSAQYDTLQDEKACHDSCRKLRRTRRNRLRYRKPRFDNRKRGEGWLAPSLEHKKQLNIRLIERYVSVIPITHATVEVGSFDTMLVKAIEEGKATPESADYQKGPRYNLATLREAVFYRDNYICKVCGRKATEGAILHMHHMFYWKGRHGNSLSELITVCEKCHTPANHQKSGKLYGFGENVKFADLSGAAFMNTVRWQIVNELYAAFGKDFVTVTYGAMTKEKRIALHLEKSHNNDAYAMGSFHPVNRCAFEHYEKVKRNNRILEKFYDSQYIDIRTGEIATGKELFNGRISRSHKKDSENLHKYRGKRICKGHRALRRKKVALNPGDLVSLNGEILVVHGTHTKKNGSVNVEFKTPSRGGKKSASLKKLKIVKTSNLMHSAWTKVA

SEQ ID NO: 8666 - protein, 416 aa, unidentified
  REGION 1..416: note = Bioreactor metagenome
MLVYVLNKHGKPLMPCKPSKARKLLKQGKAKITQREPFTIQLIYGSSGYKQPIALGIDAGNKFIGVSATTETQELFSAEVELRNDIVQLLSERRQYRRSRRYRKTRYRKPRFLNRVRSKNKGWLAPSIENKIQTHLKIVEKVHKILPITKIITEVASFDIQKIKNPNIEGVEYQQGEQLGFWNVREYVLWRDNHTCQICKGKSKDNRLNVHHIESRQTGGNAPNNLITLCETCHNKYHKGELKVKLKRGQSFKDAAFMGIMRWTFYNKLKNIYPNVELTYGYITKNTRITHKLPKSHRIDALCISGNPKAKQLDYWYYIKQVRKHNRQIHKAKILKGGIRKLNQAPYLVKGFRLFDKVKYKGQECFIFGRRSSGYFDLRKLDGTVIHRSASYKDLKLLSKRKTLLWERREGVSSPT

SEQ ID NO: 8667 - protein, 512 aa, unidentified
  REGION 1..512: note = Human gut metagenome
MSTVYVLNKDGKPLMPTTRGGHVRHLLKEQKARVVRAKPFTIQLLYETNDVVQPLYLGIDPGRTNIGVAVVKANGTAVFTAHLETRNKEIPKLMQDRKKTRRARRTNGRRCRRQRRAKANGTISKKCVKQTTAQNGSVSKRAKDIGVIKRRLPGCEKDVLCIGIKNKETKFTNRTRPEGWLTPTANQLLQTHINLVKKIQKFLPISDVVLEVNKFAFMRLDNPNIQKWQYQQGPLYKKESLESAVSEIQEHHCLFCKKPIDHYHHVVPQHKNGSNTIGNIVGLCAKHHDLVHKDSAWEKKLAKKSTGLYKKYGALGVLNQIIPTLTNELSSLFPKHSFVTNGKSTYDYRAAHGVSKDHWLDAYCIACSVLPSNVCDSNINNHMPYELKQFRRHDRRVLNNENMNRVYTLNNKAVAINRHKAKDQKTVSLEEFRKEHPDDVCKLKVKEHHPTYRNMNRNFPGSVFLVGKQIHVMQGIASSKDGKATKYNDTSATAIAAGKCKFVAKNSGILFV

SEQ ID NO: 8668 - protein, 407 aa, unidentified
  REGION 1..407: note = Ga0307928_10000810
MYVYVVNKSGTPLMPCKPAKAKHLLKADRAKVLRRTPFTIKLLWDCEESVQEVVAGMDTGTKTIGCAATANGKVIYQSEISVRQDVSRKMMRRRMYRTARRGRKLRYRKPRWQNRASMRRKDRLAPSIKSKVDSHLKEKKFVESILPVSKWIVELASFDIHKISNPNVFGLDYQNGALKGFYNVKAYVLHRDNYQCQKCRTKKGKLHVHHIIFKSNGGTDTPSNLITLCIDCHDKLHKGEFEIRGVRSKTKHATEIGIVKSQLKKQFGKFEETFGYETKFKREQILQLLKTHYNDAVAICSEGEIPIFLDFILIKKCVPKGVYKQTRGRRSEQKVQTGKVFGFKRFDKVRYQENIYFIQGRSGAYAVLSDVLGNNVGFLNPKCPKFEKMERLSSRKSWIMQEVVVDA

SEQ ID NO: 8669 - protein, 455 aa, Halomonas sp.
MAVFVLDKQKRPLMPCSEKRARLLLARGRAVVHKRYPFTIRLKERVAGDTQPLRLGIDPGSKTSGLALVREDAEDRHILCLFDLVHRGFQIKKALVQRASFRRRRRSANLRYRAPRFDNRTRPNGWLAPSLKHRVDTVTAWVNRLTRLAPITAISQELVRFDTQKLENPEISGVEHQQGSLLGYEVREYLLEKWGRECAYCGDQDTPLEVEHVVPRAHGGSHRVSNLTLACHACNQGKGNGTLDAFFTTDKGLKKRLKANSLSADARLARVQRELKRPLRDASAVNATRWALFNALKATGLPVTAGSGGRTRYNRQRLGIPKTHALDAACVGPFGRLHGENCPTQVIKGTGRGSYQRTRLTRHGFPHGYLMRQKQVRGFQTGDMVRAIITTGKKAGTHTGRVAVRKTGSFNIQTEQGVVQGISHKHCLLIQRGDGYGYHLTSSIQPKGGAGQAVV

SEQ ID NO: 8670 - protein, 413 aa, unidentified; identical to SEQ ID NO: 2636
  REGION 1..413: note = Human gut metagenome

SEQ ID NO: 8671 - protein, 415 aa, unidentified; identical to SEQ ID NO: 6534
  REGION 1..415: note = Human gut metagenome

SEQ ID NO: 8672 - protein, 419 aa, Bacillus sp.; identical to SEQ ID NO: 2411

SEQ ID NO: 8673 - protein, 420 aa, unidentified; identical to SEQ ID NO: 5953
  REGION 1..420: note = Human gut metagenome

SEQ ID NO: 8674 - protein, 516 aa, Desulfotignum sp.; identical to SEQ ID NO: 7317

SEQ ID NO: 8675 - protein, 431 aa, unidentified; identical to SEQ ID NO: 3801
  REGION 1..431: note = Human gut metagenome

SEQ ID NO: 8676 - protein, 451 aa, unidentified; identical to SEQ ID NO: 5875
  REGION 1..451: note = Human gut metagenome

SEQ ID NO: 8677 - protein, 513 aa, unidentified; identical to SEQ ID NO: 5221
  REGION 1..513: note = Human gut metagenome

SEQ ID NO: 8678 - protein, 470 aa, unidentified; identical to SEQ ID NO: 2825
  REGION 1..470: note = Human gut metagenome

SEQ ID NO: 8679 - protein, 423 aa, Moorena sp.; identical to SEQ ID NO: 3576

SEQ ID NO: 8680 - protein, 472 aa, unidentified
  REGION 1..472: note = Human gut metagenome
MNTCVCVLSNNGERLMPTFRLGKVRRLLKDGKAKIVKHHPFTIQLLYDSKTNKQPIEICEDVGYNYIGISVKSESHEYVSAQYDTLQDEKEHHDDCRKMRRARRNRLRYRKPRFDNRKRGEGWLAPSLRHKKELNVNVVKMYCAVMPITYATVEVGSFDTMLVKAIQEGKVIPEGADYQKGPRYNLATLREAVFYRDNYVCKVCGRKATEGAILHMHHMFYWKGRHGNSLNELLTVCEKCHTPANHQKSGKLYGFGEDVKFADLSGAAFMNTVRWQIVNELYAAFGKPFVTITYGAMTKEKRIALQLEKSHNNDAYAMGEFHPNHRCAFEHYEKVRRNNRILEKFYDSQYIAIRTGEIATGKELFNGRINRNHKKDSENLHKYRGKRTYAGHRALLRKKVNLNPGDLVSLNGEPLVVLGTHTRKNGAVNVEFETPSKSGRKSASLKKLKIVKAADSIHPAWEKVSQIIQRKE

SEQ ID NO: 8681 - protein, 275 aa, unidentified
  REGION 1..275: note = Human gut metagenome
ILPISLVRVETAEFDTQRLKAMLAGKPLPVGTDYQLGEMYDEYNVRQYVLKRDHYTCQCCGAHNTAKKVVKLHVHHLESRKTGGNAPSNLITLCTTCHKNLHKGKVTLDGKERGKPLRDAAFMGIMRKTLMARLKEELPIPVQGTYGYITKMRREQNDIKKSHTNDARCISKHPLAEPCSVCYRTKAIRHHNRQTHKANFSKKGIRKRSQMPYLVEGFRLWDKVLYKGQECFVSGRRSSGSFALRKLDGTSISKGVTFKKLRLLEPATNYLIERM

SEQ ID NO: 8682 - protein, 442 aa, Lactobacillus sp.; identical to SEQ ID NO: 7095

SEQ ID NO: 8683 - protein, 384 aa, unidentified
  REGION 1..384: note = Human gut metagenome
SQSHEYVSAQYDTLQDEKEHHDDCRKMRRARRNRLRYRKPRFDNRKRSEGWLAPSLEHKKQLNIRLVEQYVSVIPITHATVEVGSFDTMLLQAIQKGESKPEGVDYQKGPRYNLATLREAVFYRDNYTCQVCGRKIADGAILHMHHMFYWKGRHGYQLDELVTACEKCHTPANHQKGGKLFGFGEDKEFANLSGAAFMNAVRWQIVDALHATYGKEFVTITYGAMTKEKRIILGIEKTHNNDAYAMGNCHPAHRCEFGHYQKRCRNNRVLEKFYDATYIDTRTGNKAKGKELFNGRISRNHKKDSEDLHKYRCKKVSKGRRSIRRQRYAIQPYDTVRLESKTYITSGCHNKGTRLLIPANGKSKSVAISKVQVVCHAGAWIQII

SEQ ID NO: 8684 - protein, 429 aa, Salipiger sp.; identical to SEQ ID NO: 7587

SEQ ID NO: 8685 - protein, 419 aa, Moorena sp.
MQNYVFVIDTNKQPLNPISPKKARRLLDKGKAAVFRMYPFTIILKTAIANPTISPCQIKIDPGSKVTGFALVQDDQVIWGMELEHRGGLIKKKLESRSAVRRGRRNRNTRYRKPRFLNRKRPEGWIAPSLEHRVLTIETWVKRLIKFCPINEIWVERVKFDTQKMQNHEINGIEYQQGDLAGYEVREYLLEKWGRECAYCGKQNIPLQIEHIHPKSKGGSDRVNNLCLACEKCNQRKGNRPIEEFLKKKPGLLQKIKNKAKQPLSDAAAVNTTRNRIVKVLKEVKPVVTGTGAQTKYNRTKLGLSKQHWIDAACVGDIKTLVLRTSQPLLVTCKGQGGRQKAALNKYGYPIRHNPLKPIKGWSSGDIAKNLLTGEFGRVNPRSKSNSFNYTAPGKKAISLHLKNLLRVHRKDGYSYGFC

SEQ ID NO: 8686 - protein, 364 aa, unidentified
  REGION 1..364: note = Human gut metagenome
ISLGIDAGSKHIGVSATTKTRVLYEADVELRNDIVDLLSSRRELRRGRRNRKTRYRPARFDNRRREDGWLAPSIRQKIGTHLTVVENICKILPISRITVETASFDIQKIKNPDIQGAEYQQGDQLGFWNNREYVLFRDNHTCQCCKGKSKDKILNVHHIESRKTGGNAPNNLITLCEICHTGYHKGAIQLPKTVKRGMRFKDAAFMGIMRWAFYEALKQQYEPVGTPVHNTYGYITKHTRIAYNLPKEHYVDARCISGNPEASSNGEYYYQKKVRCHNRQIHKLTVLKGGIRKQNQATYLVKGYRLFDKVSYQGKGYFVFGRRQSGFFDIRTLSGEKVNKGSLSCKKLKFIATRTYYLTERRAV

SEQ ID NO: 8687 - protein, 408 aa, unidentified
  REGION 1..408: note = Human gut metagenome
MVYVQDIDGKSMMPTTRHGKVRQLLKDKKAVVINTCPFTIKLMYKTSDYKQEIVLGVDAGTKHVGLSATTKSKELYSSEVILRSDIVDLLSTRRELRRTRRNRLRYRKHRFDNRIKSKRTGWVAPSVRHRIDAHIRVIDNVCSILPISRIIVEVAQFDTQKIKNPDISGNEYQEGDQLGFWNVREYVLARDGHKCQHCKGKSKDPILNVHHIESRKTGGDSPSNLITLCETCHKEYHKGKIDLMVKRGKSLRDAAVMGIMKWKLYEELRSRYDNVSMTFGYITKYNRIKYGIEKSHISDAFIISKNFNALRLEYHYKVRLIRRHNRQIHKQKVLKGGVKKPNQSSFEVFGFRLFDRVMFEGNCYFIFGRRKSGSFNIRDIDGGNQRDITYKKLKLLRCKRFMIQKETN

SEQ ID NO: 8688 - protein, 422 aa, unidentified
  REGION 1..422: note = Anaerobic digester metagenome
MPCKPSKARKLLKQGKAKVVKKEPFTIQLLYGSSGYKQKCIIGIDTGSKNIGIAVTTEDGRVIYKAQVELRQDIKENIETRRRLRRARRNRKTRYRKLRFNNRKKPKGWLPPSIRARIEVHYNLIKRLAQIIPVSEIKVEVAKFDVQAILNPNIHGKEYQKGRMHGFDSVKEYVKTRDGFACHYARLRPDIPCSGKLTVDHIIPRSGGGTDNPTNLVCCCEAHNIAKRNMSYKQFTGKQPPKIEDFRSTVFMNVLRDYLVPKLEEIAPVEYTFGLYTRRTRREWGFEKSHINDAIAIAGIKPRWQDNTWYYIRQVRKKKRSLHEEIPRKGRTKPNREAKRNNKNIKEIVAKNGKWCLWDKVKVITTGQIGFVSGFTGKWVYVQDIHGNYLQLSDKYKQINPNQLVLICRNNNYITQQFISIL

SEQ ID NO: 8689 - protein, 327 aa, unidentified
  REGION 1..327: note = Human gut metagenome
LRVFVLNKRGKPLMPCSPAKARLLLKEKKAIVKRRTPFTIQLTIATGESKQPVSLGVDAGYKHVGLSASTEKAELYASEVELRQDVSDLLSARRALRQSRRNRKTRYRAPRFDNRIRTKRKGWLAPSVENRINAHLSRIEAVLRLLPVTKITVETASFDMQLLKNPDISGKEYQEGEQLGFWNIREYVLCRDGHVCQHCYGRSKDPVLNVHHLESRRTGGDSPGNLITLCETCHKALHRGEITLKAKRGQSFRAEAFMGIMRWEVLNRLKASHPELEVNNTYGYRTKHARIANDIAKSHCADAFCIAGNLGAERLGEFFFQKQTRRN

SEQ ID NO: 8690 - protein, 430 aa, Moorena sp.
MQIQANYVFLLNHDRTFLNMVHPARARELLTKQKAAVYRSYPFAIVLKQQILNPTLKPYRLKIDPGSKWTGFAIQCGEDIVFGMELKHRGLQISADLKQRASVRGSRRSRNLRYRAKRFNRKQPTGWLAPSLRHRVQTVETWIKRFMRYSPITEIEIEQVRFDTQLMQNPEISGVQYQAGELAGYEVKQYLLEKWEQKCSYCGATDTPLEVEHIQAKSKGGSNRVSNLALSCVPCNQKKGNRDIQDFLSGKPDLLQRILAQAKQPLKDAAAVNSTRFAIVRMAKELCDTVKCWTGGRTKFNRTQQGLEKSHSIDAACVGKSGRSIQLRTTQPLIVTCFGHGTRQEIRVNKHGFPAVKNTRVRYKHVKTGDTVKFTLDTDRKNSRAGTYTARVKTPTAKGFEVLINQFRIGVSTIKNVKFIHRQDGYSYRF

SEQ ID NO: 8691 - protein, 442 aa, unidentified; identical to SEQ ID NO: 5088
  REGION 1..442: note = Human gut metagenome

SEQ ID NO: 8692 - protein, 427 aa, Parasutterella sp.; identical to SEQ ID NO: 4733

SEQ ID NO: 8693 - protein, 426 aa, unidentified
  REGION 1..426: note = Human oral metagenome
MLVYVLKQNGQPFMPTERFGKVRRLLKEKKAKVVRREPFTIKLLYEPDTDVVQACYCGVDTGSKHIGVAVVGNDRVLYQSQIELRTDIKKKMDRRRGFRRLRRSRTTRYRKARFLNRRNSIKKDRLPPSVKHKVQAHIDEIEFCKKILPVSDENLILEVSQFDIALMKNPSLTSEEVKKWGYQQGFDYGYSSRREAIRHRDNYTCQCCGKKNCRLEVHHIKFRRDGGTDDEDNLITLCKECHDGVHAGTIELNKKPKKSKNLKYATHMSIIRSQLLKKYPDAIEIFGFVTAENRNHLKLKKDHYIDACVIASGGLEFEHSNIILYKRRVSKGDYQLCKGIRGEQIIPTGKICGFRKFDKVVYLRKEYFIKGRMSSGFAVLMGIDGNKVDFSYMSKGLKTPKLLNCKRVSSRSSCLCITQKIVLNIV

SEQ ID NO: 8694 - protein, 413 aa, unidentified
  REGION 1..413: note = Human gut metagenome
LKVFVLNMRGKPLMPCSPAKARHMLKAGKAVVVRRTPFTIKLTIATGETKQDVTLGVDAGARHVGISATTEKEEVFASEVALRQDITGLLADRLAFRRARRNRKTRYRAPRFNNRVRSKHKGWLAPSVENRIQAHMSRIEAVCRLLPVTKIVIETASFDIQKIRNPEVEGTGYQQGDQLGFWNVREYVLFRDGHICQHCRGRSKDPILNVHHLESRKTGGDAPNNLITLCETCHKAYHAGKIKLKVKRGQSFRAEAFMGIMRWTLLDRVRKTHPELPVENTYGYLTKHKRIALGLPKTHCADAFCIAGNLKALRRGDFLFQQQTRKHNRQIHRCSILKGGVRKLNQAPFLVKGFRLFDKVRIGGQIGFVFGRRVRGTFNIRRLDKTVIGTDINCKKLSLLETRKTFLTELRKE

SEQ ID NO: 8695 - protein, 413 aa, unidentified; identical to SEQ ID NO: 2636
  REGION 1..413: note = Human gut metagenome

SEQ ID NO: 8696 - protein, 436 aa, unidentified
  REGION 1..436: note = Human metagenome
MTRTLTKQTTQACVLDQHGKPLMPTTRLGKIYRLLKTQKAHIVSYEPFTIQLDYEPDTHIIQPMTLGVDSGAIHSGYSVTNEHREYYSAEVISRDDISKRLSDRRMYRQNRRSRKTRYRKPRFKNRKNKKKGWLPPSLEQKVAVQLNEINHLHRYFPIKTIIVEVAEFDIQKIKNPDISGIEYQQGTLYGYNIRNYLLEKHNRKCFYCGKTVSDFEVEHMLPKSRGGSNRIDNLTLSCHDCNQKKDTLTAEEFIKQTLPAKKAAAKLKQLPNEKRLFEYMAYMNATRWALYNAINEKYANVKMTYGYITKYNRIQAGLPKAHHIDAKCITGFATVPSIDQTVVKVKMRRHNRQLHRSTFSKGHIRKTACLPTITFGFQLYDLVMFDDHFYYIKSRRSSGSFALTSVEGLKDENRNYKKLTLLAHTNAYLTNRYVNA

SEQ ID NO: 8697 - protein, 470 aa, unidentified; identical to SEQ ID NO: 2925
  REGION 1..470: note = Human gut metagenome

SEQ ID NO: 8698 - protein, 438 aa, Petrotoga sp.
MEKESVQRVFVLDKNKQPLMPCHPARARELLKKGKAAVFRYHPFTIILKDREGGDTQPIQVKIDPGSKITGVTLVGDFKNGKKVIWGAEIHHRGQSIKKALDTRRGVRRSRRNRKIRYRIARFDNRKRSKGWLPPSLISRVENILTWIKRIRRFSPITGISLELVRFDTQKLQDPEINGIEYQRGTLYGYEIKEYLLEKWGRKCVYCGKENVPLEIEHIVPKSKGGSDRISNLTLACHECNQKKGNQSIEEFLTNNPERLKQIKSESKRPLKDTAALNATRWYIFNQLRGNSLTAGKEELPIEVGTGGRTKYNRETQNYPKKHWIDAACVGESGQNVQIEPDMQVLEIKAMGHGMRRMCFVDKYGFPKKYRPKERTYMGYKTGDIVLAVIPKGKNMGIHIGRIAIRHRPSFLLNGVGDVHPKYLTLLQKNDGYGYQIS

SEQ ID NO: 8699 - protein, 414 aa, unidentified
  REGION 1..414: note = Human gut metagenome
MPCSPAKARLLLKEKKAIVKRRTPFTIQLTIATGEAKQPVSLGIDAGYKHVGLSASTEKAELYASEVELRQDITDRLSARRALRQSRRNRKTRYRAPRFDNRISTKRKGWLAPSVENRINAHLSRIEAVLRLLPVTKITVETASFDLQLLKNPDISGKEYQEGEQLGFWNIREYVLCRDGHVCQHCYGRSKDPVLNVHHLESRRTGGDSPGNLITLCETCHKALHRGEITLKPKRGQSFRAEAFMGIMRWEVLGRLKASHPELEVNNTYGYRTKHARIANDIAKSHCADAFCIAGNLGAERLGEFFFQKQTRRNNRQIHKLSILKGGIRKRNQAPYEIKGFRLFDKVACQGEEGFIFGRRSSGFFDVRKVDGTRISAGISYKKLHLLEKRRTYLTEIRKEEVLPPLPEGRGLRA

SEQ ID NO: 8700 - protein, 443 aa, Moorena sp.
MRVFVLDKNRKPLDPTHPAKARRLLKLGRAKVLRRYPFSIIIKDLEVENCSTHDHQLKIDPGAKTTGLAIIQGNRVIWGAELTHRGEHIREALASRRQLRRSRRNRKTRYRKPRFLNRTRPKGWLPPSLMSRVHNVLTWVKKLIKFCPVTGISQELVRFDTQKMLNPEISGIEYQQGTLYGYELREYLLEKWDRTCAYCGVKNTRLEVEHIKPRSKGGSSRVSNLAIACRDCNQAKGNQEIEQFLSKKPSILKRILSQAKKPLADAAAVNATRWKLHNKLKLIGLPIEVGSGGLTKYNRCRQNLPKTHWLDAANVGKVDTLYIEDYQPLLITAKGHGTRQICRTDKFGFPRLHCSPKKIHKGFQTGDIVRAVVTKGKKIGTYMGRIATRKTGSFDIATAKGKVSGISYKYCQAIHRKDGYSYQFPGTTYVGKGNDSRRFCNQR

SEQ ID NO: 8701 - protein, 466 aa, unidentified; identical to SEQ ID NO: 6823
  REGION 1..466: note = Human gut metagenome

SEQ ID NO: 8702 - protein, 411 aa, Bacillus sp.; identical to SEQ ID NO: 3701

SEQ ID NO: 8703 - protein, 339 aa, unidentified
  REGION 1..339: note = Human gut metagenome
LLSARRALRQSRRNRKTRYRAPRFNDRLRTKRKGWLAPSVENRINAHLSRIETIIRLLPVTKITVETTSFDMQLLKNSDIAGKKYQEGEQLGFWNVREYVLFRDGHVCQHCHGRSKDPVLNVHHLESRRTGGDSPGNLITLCETCHKALHRGEITLKAKRGQSFRAETFMGIMRWEVLDRLKASHPKLEVQNTYGYRTKHARISNGIAKSHCADAFCIAGNLGAERLGEFFFQKQTRRNNRQIHKLSILKHGLRKRNQVPFEVKGFRLFDKVACKGEEGFIFGRRSSGYFDVRKLDGTRISAGISYKKLRLLEKRQTYLTEIRKEEALPPLPEGRGLRA

SEQ ID NO: 8704 - protein, 416 aa, unidentified; identical to SEQ ID NO: 7261
  REGION 1..416: note = Human gut metagenome

SEQ ID NO: 8705 - protein, 442 aa, unidentified; identical to SEQ ID NO: 3234
  REGION 1..442: note = Human gut metagenome

SEQ ID NO: 8706 - protein, 428 aa, Moorena sp.
LMVCVLDRKKRPLMPCTPKRARILLARGRAVVHRVQPFVIRLKDRRVEDSVLQPIALKIDPGSKTTGMALARVEATEEGEVHRALFLCEVQHRGQRVHDHKVTQANARRRRRSANLRHRAPRFDNRALPQGWLPPSILSRVGNVVTWTDRLIRWSPVTRLEVERVRFDTQLLQNPEIDGVQYQHGELAGWEVRAYLLIKYEYRCAYCGKTNLPFEIDHIRPRSRGGSNRVSNLVLACHACNQAKGSQTASEFGHPEVEARAKAPFKDAAAVNASRYKLVEALRVFGLPLGIWTGGRTRWNRARFGVEKSHALDAMCVGELAGVQVRTPNTLTIMATGRGRHCRTNFTKYGFPSSYLTRKKQVRGFKTGDRVRAVVPASFKTAGTHVGRVQVRKSGSFDIETREREVDGVHAKYCSLVQRADGYDYAIS

SEQ ID NO: 8707 - protein, 456 aa, unidentified; identical to SEQ ID NO: 4017
  REGION 1..456: note = Human gut metagenome

SEQ ID NO: 8708 - protein, 593 aa, Streptomyces sp.
LRSGSVPSCAHRRREVTRFPAARPSSDQPQSSRSQDQGGAPMTTFPAGEQTHQAVLPQQPALESVRADTPGSRDETAHGHPAPARGTGREHGRGETDRAGTKARRRHAERAAMVAQAAENGSGDAPTHPPEYAGGSGDSRVFVLSKDGHPLMPCHPARARELLRKGRAVVVRQTPFAIRLKDRTRAQSTVDGLQLRIDPGSKGTGLALTDEKWETGADSRVVTVRRGVFSMELQHRGDQIHHSMGQRAGYRHRRRSANCRYRAPQSNNRVVAKGWLPPSLRHRVDTTFSQVNRLCRYAPITEIHLERTAFDTHSMSAGRRLHGAEPTQGPLAGSTARTYLHARWKSACAYCDATGVPLNIDHVRPRSQGGSNRITNLVLACLPCNKAKDNRSVESFLAHRPDRLAKILGQLKEPLRDAAAMNSTQARLMEALETLGRPVHAWPGRLTMANRLTTGLSKTHTLDALSVGHLDHESGDAIVRFPEQVLITKATGRGSYARTTPDRYGFPRLRRSRTKQHFGYVTGDLVRAIVPSGKWTGAWSGRISVRARGQHSLATPQGRLNVSHWNLRLLQRGDGYGYSTQREASPQAPLKNS

SEQ ID NO: 8709 - protein, 447 aa, unidentified
  REGION 1..447: note = Microbial mat metagenome
MRVLVLDQHKQPLMPCQPARARQLLRDGKAAVYRRYPFTILLKDRAGGEVQPVSLKVDPGSKTTGIALVAHYQRGAVCILALHIEHRGHAIKESLDSRRAIRRSRRNRKTRYRKARFMNRAKPKGWLPPTLMSRVHNVETWTRRLVSWVPISRADVETVRFDTQLMENPDIQGVEYQRGSLMDWELREYLLARHQHQCAYCNGLSKDPILEREHIHPRSLGGSNRLANQVISCRSCNHHKGNHLPEVWMQKCSQKKDRLNQQRATSMQAILKGRRPSMRDAAAVNATRYATGRVIKQHIPDTEFWSGGRTKKNRSDQGYRKDHWIDAACVGSSGSQVTLETQRCLVVSAKGHGSRQQCSMNRYGFPRTTAKGPRSVQGFKTGDIVRAIVPKGRKQGTHTGRIAVRSSGSFNITCDGQRVQGISYRYCTRLHRQDGYGYYYEPKEKAA

SEQ ID NO: 8710 - protein, 292 aa, unidentified
  REGION 1..292: note = Human gut metagenome
MQSKLHSHVREIEYIQSILPVTEMVFETGQFDMQLMKNPSLANPKVRPWGYQKGANYGFENTKAMVLNRDNYTCQCCKGKHKDSKLEVHHIVFRSQGGSDEESNLLTLCHTCHKDLHSGKINPKLSGKLKGNLKYATQMNSIRKQLFRFYPNAIETFGYVTKANRLHLGVDKEHYYDACTIATQGNAFNVKSNLYKKKCVSDGDFQKTKGIRSEQPIVTDKICGFRKFDKVRYFGNDYFIKGRMSTGYAILMDIDGNKIDFSTMPRGYKTPKLSNCKRITARSTVMTQVKVV

SEQ ID NO: 8711 - protein, 423 aa, unidentified; identical to SEQ ID NO: 3951
  REGION 1..423: note = Human gut metagenome

SEQ ID NO: 8712 - protein, 422 aa, unidentified; identical to SEQ ID NO: 5333
  REGION 1..422: note = Human gut metagenome

SEQ ID NO: 8713 - protein, 531 aa, unidentified; identical to SEQ ID NO: 4901
  REGION 1..531: note = Human gut metagenome

SEQ ID NO: 8714 - protein, 421 aa, Clostridium sp.; identical to SEQ ID NO: 8171

SEQ ID NO: 8715 - protein, 442 aa, unidentified; identical to SEQ ID NO: 2903
  REGION 1..442: note = Human gut metagenome

SEQ ID NO: 8716 - protein, 431 aa, unidentified; identical to SEQ ID NO: 3235
  REGION 1..431: note = Human gut metagenome

SEQ ID NO: 8717 - protein, 419 aa, Moorena sp.; identical to SEQ ID NO: 4209

SEQ ID NO: 8718 - protein, 455 aa, Moorena sp.
MVITLDKHKKPLGFTTEKRARKLMEAKRAVIYRYFPTVIILMDTDVRNIINLPTYRIKIDPGSVYTGIAIICNETNKVMFSIQIEHRAKTITELLQTRKASRRNRRNRETHYRHSKWGNGNGNDRPSKEGNLPPSIKSIGDNIINTVKKLRGFINITECSFEAVRFDSQLMDDPDISGREYQQGTLFGYELREYLLEHYRHTCQYCGGASGDSVLEWEHKIPKSRGGTDSIKNATLSCFTCNRDKGSMTPGEWLEYLKSEESGRLAEIRIRHLENMDTVYGSNRYSAWTNTLRKKTEKELFDIFGEVECSSGGKTKYNREKILKLPKDHHIDALAVGSVPPDGYIDCTNGYILHIKAMGRGTRLRGLINECGIINVKWTDRRKRFNGLQTGDIVRVYIPNGKYSGTYTGRVMIRKSGSHDIRTLDGKLVTGTKLSVYRVLQHADGYSYKQERIIV

SEQ ID NO: 8719 - protein, 476 aa, unidentified
  REGION 1..476: note = Human gut metagenome
LEVVGTEGVSHPGLPGKYKHKGGQLMSVAVISKTGERLMPTSEYRARKLLKSGKAIKHSYHPFTIQLTERKTGNIQPIELCMDTGYIHIGISVKSEKHEYLAEQIDTLTDERSRHDACRMYRRQRRNRKRYRQPRFNNRKKDKGWIAPSLEHKKNIHIQAISRINNVMPLTDITMEMGNFDTQVLKAKEEGNPLPQDADYQHGERYGIATLREAVFTRDDYKCQCCGRTIKDGAILHVHHIKYRSQGGTNSISNLATVCDKCHTPKNHKPEGKLYNWKPKLPSFKGATFMTTIRWQLYNEVKTLFPDIDIHITYGAATKERRRELDIDKSHVNDAFVMGQFHPKHRIKAVLYKKKRRNNRCLEKFYDAKYIDSRDGKKRSGQELFNGRINRNHKKDSENLHQYRLQKVTAGKRTVRKQHYKIQPHDIVIYENRKRETTGCHCSGTRVMLLPDKKSVSIKKIKIYRYAGGYFKSTFN

SEQ ID NO: 8720 - protein, 426 aa, Moorena sp.
MNGREEHFTPQGGLTATMFVYVRNQDGYPLMPCTPAKARKLLQAGKAKVVSRCPFTIQLSWQCEGYVQEVRAGLDKGISVTGMACVGRGQALFSAELHHRKDVKEKMTERRDHRKSRRARKWYRPARFDNRASSKRCGRLSPSIRTNVEEVIRVVRQIPLPISFLVIEDIQVDVARLNNPELKGSEYQDPTRLDENLRIACLMRDGYQCQQCGKLHCRLEVHHITYREYGGKDTLANLLTLCETCHHKLHEGKITLKVTGVSGHLDQIAQRTMQGKSYLYATLGAQLPFCTLFGYQTAAYRKARGLSKTHIIDALCLATYHTGELVPEPESNIYSIRFRPRQTRKQFHSLPQKGKGRVRYQVYEELKGFRKGDIVLFKKTWVKQVNAIYAEGRLAFRRVKGEPANARPEDCRLLEREQTILWEKVL

SEQ ID NO: 8721 - protein, 431 aa, unidentified
  REGION 1..431: note = Human gut metagenome
MPNKVYVINKHGRPLMPCSPAKARHLLDEGKAKVKKRTPFTIQLVYGSSGYTQEVILGVDAGSKTIGMSASTTKEELLSAEVKPRNDVVDLLSTRREFRRARRNRKTRYRKPRFDNRVRSKHKGWLAPSVEVKIQEHITAIRRVCGILPVSKVVVETAEFDLQLLKAIADGKPVPQGEDYQQGEMYGHYNVRQYVLWRDGYTCQCCGAHATKKKEVRLHVHHLESRKVGGDAPDNQVTLCESCHEKLHKGLIAEKDFKKRKRKSTRDATFMGIMRKTLMQRLCSELPIPVIETRGYITKATREKLLVLPKSHTNDALAIAQGKQGFNVGYLPGIVQINKIYTIRPVRHHNRQLHKATILKGGIRKSNQTEKYVFGYRLFDKVQFNGQDCFIWGRRTTGIFTIKTINGKMIKDGISFKKLKLAEKSTSYLIA

SEQ ID NO: 8722 - protein, 465 aa, unidentified
  REGION 1..465: note = Human gut metagenome
MNTCVCVLGNNGERLMPTFRLGKVRRLLKDGKAKIVKHHPFTIQLLYDSKTNTQPIEICEDVGYNYIGISVKSKSHEYVSAQYDTLQDEKEHHDDCRMHRRTRRNRLRYRKPRFDNRKRGEGWLAPSLIHKKELNVNVVKMYCAVMSITHATVEVGSFDTMLVKAIQEGKVIPEGADYQKGPRYNLATLREAVFYRDNYVCKICGRKATEGAILHMHHMFYWKGRHGNSLDELLTVCEKCHTPANHQKGGKLYGFGEDVKFADLSGAAFMNTVRWQIVNELYVAFGKPFVTITYGAMTKEKRIALQLEKSHNNDAYAMGEFHPNLRCMFEHYEKARRNNRILEKFYDSRYIDIRTGEIATGKELFNGRINRNHKKDSENLHKYRGKRTYAGHRALLRKKVNLNPGDLVSLNGENLIVHSTHTKKNGAVNVEFETPAKSGQKSASLKKLKIVKAANSIHPAWKKIS

SEQ ID NO: 8723 - protein, 424 aa, Microcoleus sp.
MSNFVFVLDTQKRPLNPIHPGMARKLLTNRKAAVLKRYPFTLILKVEVTAIHKPITLKIDPGSKTTGFALVQGEKVIFGAELTHRGQAIKANLESRRSLRRVRRNRHTRYRPARFLNRTRPKGWLAPSLQHRVETTLTWVTRLMKLAPIASIVQELVRFDLQQLGNPEISGFEYQQGVLCGYEVREYLLNKWDRKCAYCGVINTPLQVEHIHPKAKGGSNRISNLCLACEKCNIKKGTQNIEQFLSKKPEALKRVLSQAKRPLKDATAVNSTRWALFNRLRMTTGLPVSTGSGGLTKFNRTRLNLAKTHWLDAACVGKVESLEILTSKPLLIKATGHGTRQICRTDKFGFPCRYVPRLKFVKGFQTGDIVKAIVTSGKKVGKYVGRVAVRTSGSFNISASELVSGVSHKYCSIIHRKDGYSYAA

SEQ ID NO: 8724 - protein, 411 aa, unidentified; identical to SEQ ID NO: 3762
  REGION 1..411: note = Human gut metagenome

SEQ ID NO: 8725 - protein, 554 aa, Streptomyces sp.
MTTFPVGEQTHLAVLPQQPALESVGADTPGSRDETAHGHPAAVRGTGREHGRGETGGLGTGVRRRHAKNVAPAAKAAENRSGDAPPHDQSYAGGVGAGRVFVISRDGHPLMPCHPARARELLGKGRAVVARQVPFVIRLKDRTLAESEVDGLCLRIDPGSKGTGLALTDEKQETDAQGGSFTGRRGLVSVELRHRGEQIRLCMRQRAGYRRRRRSANRRYRAPRPDNRSRPAGWLPPSLRHRVDTTYAVASRLCRYAPVNEIHVESVAFDVHAMSVGRPLADVEYQRGTLAGIEARSYLRSRWENACAYCDAADVPLNIEHLTPRSRGGSDRISNLVLACVPCNRAKGSMPVEGFLADRPDRLAKILRQARTPLDDAAAMNATRWQLLERVRVLGRPVNPCSGAQTHWNRDAMGLGKTHTVDALCVGAMDHERGDAIVRLPDRVLVVRATGRGSYARTTPDRFGFPRLRRSRVKRHFGFATGDLVRAVVPLGKWAGVWTGRVSVRATGRHSLTATEGRIDVSHRNLRLLQRADGYGYAFRPEGARQHLGKPVEP

SEQ ID NO: 8726 - protein, 420 aa, Moorena sp.
MQNYVFVIDANKQLLNPIYPKKARRLLDKGKAAVFRMYPFTIILKTAIESPTISPCQIKIDPGSKVTGFALVQNGQVIWGMELEHRGGLIKKKLESRRAVRRGRRNRNTRYRKSRFLNRKRPEGWLPPSIEHRVLTTQTWVKRLIKFCPVNEIWVERVKFDTQKMQNPEISGVEYQQGELAGYEVREYLLEKWGRECTYCGKQNVPLQIEHIHPKSKGGSERVSNLCLACEKCNQRKGNKPVEDFLKKKPNLLQKIKTKAKQPLKDAAVVNATRNKLVKVLREVKSVTTGTGAQTKYNRTKLGLPLQHWIDAACVGGIETLVLKTSQPLLVTCFGQGGRQKAALNKYGYPIRHNPLKPIKGWCSGDIAKNLLTGEFGRVNPRSKSNSFNYTVSGKKAISLHVKNLCRVHRKDGYTYGFCQ

SEQ ID NO: 8727 - protein, 423 aa, unidentified
  REGION 1..423: note = Human gut metagenome
MQYVYVHNKQGEPLMPCSPGKARVLLKQQKACVVKRTPFTIKLLYGSAGYKQPITLGVDAGSKHVGLSVSTEKRELYSEKFTPRNDVVELLSTRRQNRRSRRNRKTRYRAPRFNNRVHSKHKGWFAPSVEVKIQEHITVIKRICRILPVTLVRIETAEFDTQRLKAMLAGKPLPVGTDYQLGEMYDEYNVRQYVLKRDNYTCQCCGAHTTAKKAVKLHVHHLESRKIGGNAPSNLITLCTACHDNLHKGNITLDGQKRGKTLRDAAFMGIMRSTLLERLRNELHIPLQNTYGYITKLLREQNDIKKSHINDARCISKHPLAEPCSVRYHAKAIRHHNRQIHKAKILKGGIRKANQAPYIVKGFRLWDKVLYNGQECFISGRRSSGYFALRKLDGTTVTNSISFKKLRLLEPATNYLIERNCSD

SEQ ID NO: 8728 - protein, 512 aa, unidentified; identical to SEQ ID NO: 8121
  REGION 1..512: note = Human gut metagenome

SEQ ID NO: 8729 - protein, 555 aa, Streptomyces sp.; identical to SEQ ID NO: 3041

SEQ ID NO: 8730 - protein, 470 aa, unidentified; identical to SEQ ID NO: 2925
  REGION 1..470: note = Human gut metagenome

SEQ ID NO: 8731 - protein, 479 aa, unidentified
  REGION 1..479: note = Human gut metagenome
MPTTRCGHIRGLLNAGKARVVEREPFTIQLKYETPDVTQPLYLGIDPGRTNVGSAVVREDGECVFTAQLTTRNKDVPKLMKARKQFRMAHRRLKRRCKRQRRAKAAETLSQKGEFQRLLPGYEESILCKGIRNKEARFNNRQRPAGWLTPTANHLLLTHLNMVKKLQKLLPITDVVLEVNRFAFMAMENPSIRRWQYQQGPLYGKGSVEDAVYAQQDGHCLFCGKPIAHYHHVVPQHKNGSETLENRVGLCNEHHDLVHKDRAWDAKMKETKAGLNKKYHALSVLNQIIPALTEQLTAMFPQHAFVTTGKDTADFREDYGIAKEHHLDAYCIACSVLAEPTKVAAPTGKPHRLMQFRRHDRQVCHKENIKRVYLSEGKAVATNRHKAIEQKDDSLEEFRKTHTQQEVSALTVKDHQPVYKDMRRFMPGGVFLFNGKVHTLQRSHGRYKGMPFYYIDTDGSKNHAKGCIFLQQNCGLRWV

SEQ ID NO: 8732 - protein, 415 aa, unidentified; identical to SEQ ID NO: 2764
  REGION 1..415: note = Human gut metagenome

SEQ ID NO: 8733 - protein, 413 aa, unidentified; identical to SEQ ID NO: 2636
  REGION 1..413: note = Human gut metagenome

SEQ ID NO: 8734 - protein, 437 aa, Clostridium sp.
MVYVLNKEGKPLMPTNRYAKIRVLLKSKKAVVVNSKPFTIKLLYDTENFTQSITLGIDSGYLNIGFCAITKEKELISGEVKLLKGMSERLREKAMYRRQRRSRLRYRKPRFDNRKCSKEWLAPSIQHKYDSHIRFIDKLKKLLPITNIIIEVANFDTHKLKNPSIEGAAYQNGEQKDFFNLREYILHRDGHKCQNPNCKNKSAEPILQVHHIGFWKQDRSDRPGNLITLCNKCHTPKNHKEKSFLYGWKPKVRSFKEATFMSMIRWRLVNTLNCKYTYGYITKSNRIILKLEKTHYNDAFCIAGGSNQNRVKPLIFEQIKRNSRSLEKFYDAKVIDIRTNTKVSGVELFNGRRTRNKSLNSENLRKYRGAKISKGQRRIRTKRYFYQPGDLVKYEDKVYTVKGTQNKGKYIALKELKKVPKVELLTPYKFRKGLVCV

SEQ ID NO: 8735 - protein, 420 aa, unidentified; identical to SEQ ID NO: 6212
  REGION 1..420: note = Human gut metagenome

SEQ ID NO: 8736 - protein, 515 aa, Diaphorobacter sp.
MLPQFLALEVAIADTLRVSTKRIAADWLKPITCCATWSRGEARKSPLPPQGEIRSNPMRVFVLAQRGQPLMPCHPARARQLLRQGKAVVHRTMPLVIRLKDRLEGDTQPVRLKLDPGSKGTGLALVREQPSGTLAVLHLFELAHRGRQISEALTARRQMRRRRRGNLRHRAPRFMNRGNKSKGWLAPSLRHRVDTTLAWVTRLQRWTPLTAVSSELVRFDMQALQNPEISGIEYQQGTLAGYELREYLLEKWGRQCAYCGAQDTPLQIEHIRPRANGGSNRVSNLTLACQCCNQKKAALPVEVFLAHRPDALRRILAQARRPLKDAAAVNATRWALANALKGTGLPLELSSGGRTKFNRARLGVPKTHALDAACVGEFSALTGWNQPTLHLQCTGRGSYQRTRLDKFGFPRGYLMRQKQVKGFQTGDLVKAQVPAGKKAGAHRGRVAIRATGSFNIQTGTGVVQGISHRHCRLIQRADGYGYFYQPQIANTDENQGRALHAALSLPALKGGVSRA

SEQ ID NO: 8737 - protein, 460 aa, unidentified; identical to SEQ ID NO: 8636
  REGION 1..460: note = Human gut metagenome

SEQ ID NO: 8738 - protein, 434 aa, Mitsuokella sp.; identical to SEQ ID NO: 2893

SEQ ID NO: 8739 - protein, 414 aa, unidentified; identical to SEQ ID NO: 2588
  REGION 1..414: note = Human gut metagenome

SEQ ID NO: 8740 - protein, 422 aa, unidentified; identical to SEQ ID NO: 4124
  REGION 1..422: note = Human gut metagenome

SEQ ID NO: 8741 - protein, 406 aa, unidentified
  REGION 1..406: note = Human gut metagenome
MVYVQDIYGRPLMPTTRHGKVRRLLKSKKATVVNLCPFTIRLLYDTTGYKQEITLGVDTGTKHVGLSATTKSKELYASEVILRSDVVDLLSTRRELRKIRRYRLRYRKPRFMNRIKSKKRGWIAPSIRQKIDSHIRIIGFVYSILPVSKLIIEVAQFDTQKIKNPEISGKEYQEGEQLGFWNVREYVLARDEHKCQHCKGKSKDPVLNVHHIESRKTGGDSPSNLITLCKTCHKEFHKGNIKLKVNRGESLRDAAVMSIMKWELYDELKSLYPNVKMTFGYITKYNRINHGIEKSHVSDAFVISRNFDSERLGYYYKRKLVRRHNRQIYKMKAPKGGNKRMNQSPFKVFGFRLFDKVMFQGKERFIYARRLRGIFNIRDINGENKKDISYKKLEYVSHGLISIVAG

SEQ ID NO: 8742 - protein, 456 aa, unidentified; identical to SEQ ID NO: 7423
  REGION 1..456: note = Human gut metagenome

SEQ ID NO: 8743 - protein, 462 aa, unidentified
  REGION 1..462: note = Human gut metagenome
MSVLVIGRNGRALMPTNPRKARLLLKKKTASVVCRHPFTIQLLYKTGCATQEGCIGIDTGSQHIGVGITCGDRVILKDEHALRSSMEKRSLLATRAVMRRGRRYRKVRYRKPKWRHHTKRMYFEKANRRGQHWRKVKTTTQSPRLKGWLPPSLQSKCDHHFRIIDRYLKYLPDPITRNLVIEAGRFDMARMNDPTIHGEMYQRGPMYDAENLRAYIFARDNYQCACCKAKAGTTRKADGTTVKLVAHHILFRSRGATDNPKYIISVCDHCHTTKAHQPGGILYSWMENKKKVARGLRDATFMNILRKRLFARYPQAAFTYGNITAADRKQLRLPKSHANDAVAISLFGKEASTVKNICQTMHYKQIRKSKRSLHEAIPRKGRKNPNTKAVRNKKNTTQANGFKLWDSVLADGKKLFICSFTGTSAYLIDKNGCYISQPGKTYKQWPLSKLKRLHPNGNWLMA

SEQ ID NO: 8744 - protein, 512 aa, unidentified; identical to SEQ ID NO: 4350
  REGION 1..512: note = Human gut metagenome

SEQ ID NO: 8745 - protein, 442 aa, unidentified; identical to SEQ ID NO: 2834
  REGION 1..442: note = Human gut metagenome

SEQ ID NO: 8746 - protein, 298 aa, unidentified; identical to SEQ ID NO: 3213
  REGION 1..298: note = Human gut metagenome

SEQ ID NO: 8747 - protein, 460 aa, unidentified; identical to SEQ ID NO: 7734
  REGION 1..460: note = Mouse gut metagenome

SEQ ID NO: 8748 - protein, 319 aa, unidentified
  REGION 1..319: note = Human gut metagenome
LKVFVLNMRGQPLMPCSPAKARHLLKAGKAVVKRRTPFTIQLRIATGETKQNVTLGVDAGAKHVGLSATTEKEEVFASEVELRQDITGLLAARLSLRRDRRHRKTRYRAPRFLNRVRSKHKGWLAPSVENRIQAHMSRIDAVCRLLPVTKIVIETASFDIQKIKDPSVEGTDYQQGDQLGFWNVREYVLFRDGHVCQHCHGRSKDKILNVHHLESRQTGGDAPNNLITLCETCHKAYHAGKIKLKVKRGQSFRAEAFMGIMRWTLLDRMRKAHSGLPVENTYGYLTKNTRITLGLPKTHCVDAYCIAGNLKAVRRGVCL

SEQ ID NO: 8749 - protein, 453 aa, Anaerotruncus sp.
MSVAVLSSTGQKLMPTSNYRARKLLKSGRAAIECYRPIFTIRLTDREEGKTQPIEYACDTGYQHVGVSIKSEKHEFVHAQYDMLSNETERHNDRRKYRRTRRNRKRYRKPRFDNRSRKNQEMAPSLRHRKENQINLFESFCKVMPITSATFEMGKFDTQLLQAIADGKPLPEGKDYQQGSKYLFQTEREAVFSRDHYTCQVCGKSVKDGVILHTHHIGFWKEYRSNRISNLLTVCEHCHTAKNHKPGGALWGLEPQSTNLAAATYMSTVRWAIYRELVLKHQEIDIHNQYGAKTSVTRKSLHLAKTHANDAYCIGSLHPRHRTAELIYQKKRRNNRILAKFYDAKYIDIRDGAKKSGAVLSCGRTNRRESRRSDKNQRIYRGNKCSSGRTSVRKKRYSYQPGDAILFRSQRFTVNGAHCNGTRVILNTGKSVKMADLTCIKMEGGWCFLPAQA

SEQ ID NO: 8750 - protein, 409 aa, Arthrospira sp.
LTPCKPGMARSLLKAGKASVFRRYPFTIILNKEVDANPEPLELKLDPGSKVTGIALKQGNHIIFAAELQHRGQQIKEALLSRRQLRRSRRNRKTRYRPARFLNRTRPEGWLAPSWQHRVDTLMTWVHRFRRLAPVGRITQELVRFDLQLMENPEISGVEYQQGELQGYEIREYLLFKWGRTCAYCGAQNVPLEVEHIQPRSKGGSDRVSNLTMACHSCNQAKGNGDIRDFLSGQPDVLSRLLRQAKSPLKDAAAVNSTRWALFKALKATGLPVTTGTGGQTKFNRLRLNLPKAHWLDAACVGPVESLEVLTSKPLLILAKGHGTRQMCGTNKYGFPNRHRSRRQIHKGFQTGDMVTVLVTAGKKIGSYLGRVLCRASGSFDITTASVRVAGISHKYCQPIHRKDGYAYA

SEQ ID NO: 8751 - protein, 414 aa, unidentified
  REGION 1..414: note = Human gut metagenome
MPCSPAKARHLLKEKKAIVVRRTPFTIQLTIATGETKQPVSLGVDAGYKHVGLSASTEKAELYASEVELRQDVSDLLSARRALRQSRRNRKTRYRAPRFDNRIRTKRKGWLAPSVENRINAHLSRIEAVLRLLPVTRITVETASFDLQLLKNPDISGKEYQEGEQLGFWNVREYVLFRDGHVCQYCHGRSKDPVLNVHHLESRRTGGDSPGNLITLCETCHKALHHGEITLKTKRGQSFRAEAFMGIMRWEVLNRLKVSHPELEVNNTYGYRTKHVRIANGIAKSHCADAFCIAGNLGAKRLGEFFFQKQTRRNNRQIHKLSILKHGLRKRNQAPFEIKGFRLFDKVVCKGEEGFIFGRRSSGFFDVRKLDGTRISAGISYKKLHLLEKRRTYLTEIRKEEALPPLPEGRDLRA

SEQ ID NO: 8752 - protein, 442 aa, unidentified
  REGION 1..442: note = Human gut metagenome
MVTVQQSTHHLPFGRVFIRRNLFMVYVISQDGKPLMPCSDPIARLLLKQGKAKVKKREPFTIKLTYETTNHTQGLTLGVDTGSGTIGTAVSKDNGDIVYMSEVVVRNDITDKMTQRAKYRRNRRNRKTRYRKARWLNRASSIKKDRFSPTMQSKLHSHVREIEYIQSILPVTEMVFETGQFDMHLMKNPNLANPKIKHWGYQKGTNYGFENTKAMVLNRDNYTCQCCKGKHKDSKLEVHHIVFRSQGGSDEESNLITLCHTCHKDLHSGKINLKLSGKVKGNLKYATQMNSIRRQLFRLYPNAIETFGYVTKANRLHLGVGKEHYYDACTIATQGYAFNVKSNLYKKKCVSDGDFQKTKGIRSEQPVVTDKICGFRKFDKVRYFGNDYFIKGRMSTGYAILMDIDGNKIDFGTMPRGYKTPKLSNCKRITARSTVMTQVKVV

SEQ ID NO: 8753 - protein, 493 aa, unidentified; identical to SEQ ID NO: 2644
  REGION 1..493: note = Human gut metagenome

SEQ ID NO: 8754 - protein, 425 aa, unidentified
  REGION 1..425: note = Human oral metagenome
MFVYVISKDGQPLMPTSRFGKVRRLLKNKKAKVIRSCPFTIKLLYEPESLVVQEVVLGQDTGSKHVGTACIADDKVLYQSEVTLRDDIKKKMDRRRALRRNRRQRKTRYRKPRFLNRANSIKKDRLPPSTKSKVQSHIDEIEFCKKILPVSKIVLEVSQFDIHLMKNPSLIFEKVRHWGYQKGFDYGYSSRREAVLNRDNYTCQCCGKKHVRLEIHHIIFRCMGGTDDERNLITLCEKCHKLIHDGVLILTKKPRKLNLKYATQMSIIRSQLLKIYPDAIETFGFVTKENRNNLNLPKGHYIDACVIASAGKKFKQLNWLFKKRRVAKQNRQLCKGVRGERKIPTGKIFGFKRFDLVEYLKELCFIKARRNSGCFTLMDINNNTIDFRDRGGKKEPSYKHLERVNARKSVLCIRKRIGGKCSFIY

SEQ ID NO: 8755 - protein, 501 aa, Moorena sp.; identical to SEQ ID NO: 7018

SEQ ID NO: 8756 - protein, 512 aa, unidentified
  REGION 1..512: note = Human gut metagenome
MPTVYVLNKDGKPLMPTTRCMHVRHLLKNGKARVVKSKPFTIQLLYETDDVVQPLYLGIDPGRTNIGVAVVKTDGAAVFTAHLETRNKEVPKLMKKRKESRCARRTNGRRCRRQRRAKTNGTISKKCVKQTTAQNGSVSKRAKEIGVIKRHLPGCEKDVLCIGIKNKEAKFTNRARPEGWLTPTANQLLQTHINLVKKIQKFLPISDVVLEVNKFAFMQLDNPNIQKWQYQQGPLYQKGSLENAVSEMQEHHCLFCEKPIEHYHHVVPKSENGSNTIANIVGLCTEHHNLVHKDATWQKKLAKEKVGLVKKYGALSVLNQIIPALTKEMNSLFPKHFFVTNGKSTYDYRTAHGVSKDHWLDAYCIACSVLPNDVCDSNINSHVPYELKQFRRHDRRVLHKANMSRVYTLNGKTVATNRHKAIKQATDSLEEFRQSHPGDVCKLKVKEHHPAYRNLNRNYPGSVFLVDGQVHVMQGVSGSHNGKADGYYNTNGNAYPYYKCKFVVKNEGIVFA

SEQ ID NO: 8757 - protein, 431 aa, unidentified
  REGION 1..431: note = Human gut metagenome
MPDKVYVISRLGHPLMPCSPANARHLLDDKKAKVVKRMPFTIRLLYGSTKYIQPIILGVDAGSKTIGLSASTAKEEVFAAEVMPRNDVVENLSTRREFRRARRNRTTRYRKPRSDNRVRSNHERWLAPSVKVKIQEHITSIKRVYTILPISKVVIETAEFDLQLLKAIQEGKPIPEGEDYQKGEMYGSYNVCQYVLWRDNYTCICCGVRGTPKNPVRLHVHHFESRKYGGNAPDNHGTLCDDCHKKFHLGIITDVKLKTRRRQSTRDAAFMGIMRKTLMWRLRTELFIPVAETKGYITKATREKLLVLPKSHTRDALAIAQGRHGFGIKEYAYVEPANHIYTVRAVRHHNRQLHKASILKGGIRKRNQASKYVFGFRLYDKVLYQGKACFVWGRRTSGTFLLRTIDGIKVKDGVSYRNLTLLERSSNYLIA

SEQ ID NO: 8758 - protein, 439 aa, Moorena sp.; identical to SEQ ID NO: 8107

SEQ ID NO: 8759 - protein, 422 aa, unidentified; identical to SEQ ID NO: 3922
  REGION 1..422: note = bioreactor sludge metagenome

SEQ ID NO: 8760 - protein, 447 aa, Marinobacter sp.; identical to SEQ ID NO: 8596

SEQ ID NO: 8761 - protein, 507 aa, Anaerostipes sp.; identical to SEQ ID NO: 2841

SEQ ID NO: 8762 - protein, 443 aa, Anoxybacillus sp.
MVEENITCFMQRKGEYPMVFVLDTNKCPLAPCHEAVARKLLKQGKAAIYKRYPFTIILKEIVDNFRPKTPYRLKIDHGSKHTGLAILRGQEVVWLGQLDHRTDIKERMDKRRAFRRARRNRKTRYRKPRFLNRRRKDGWLPPSLESRVQNIQTWVNRLKKLCPIGYISYENTKFDTQLMRNPEISGIEYQQGTLQGYEVREYLLEKFGRKCCYCGKENVPLEVEHIIPKSRGGTDRIDNLCLACRDCNQRKGSQTAEEFGYPHIQKMVKKTLKDASVVNATRWKVYEVLKQSGCEVECGTGARTKMNRIRLDLPKTHYFDACCVGESTPLQLHFKTKEALFIKAKGRGSRSRTNLDKYGFPRGFLARQKFFFGFQTGDMVKAVIPRGKYQGVWFGEVSCRKTGSFDIKGKDGKRIAQGINYRYVQVIQRFDGYTYRREGMNIA

SEQ ID NO: 8763 - protein, 427 aa, Nostoc sp.; identical to SEQ ID NO: 2670

SEQ ID NO: 8764 - protein, 493 aa, unidentified; identical to SEQ ID NO: 2644
  REGION 1..493: note = Human gut metagenome

SEQ ID NO: 8765 - protein, 442 aa, unidentified; identical to SEQ ID NO: 3161
  REGION 1..442: note = Human gut metagenome

SEQ ID NO: 8766 - protein, 420 aa, unidentified
  REGION 1..420: note = Human gut metagenome
MQYAYVLNKRGEPLMPCSPGKARILLKQQKACVVKRTPFTIKLLHGSAGYKQPITLGVDAGSKHVGLSASTEKRELYSEEFTPRNDVVELLSTRRQNRRSRRNRKTRYRAPRFNNRVHSKHKGWLAPSVEVKIQEHITVIKRICRILPITLVRVETAEFDTQRLKAMLAGKPLPVGTDYQLGEMYDEYNVRQYVLKRDNYTCQCCGAHITAKKTVKLHVHHLESRKVGGNAPSNLITLCTTCHNNLHKGKITLDGKKRGKTLRDAAFMGIMRNALLTRLRNELNIPVQNTYGYITKLLREQNDIKKSHVNDARCISKHPLAKPCSVCYRTKAIRHHNRQIHKAKILKGGIRKANQAPYIVKGFRLWDKVLYNEQECFISGRRSSGYFALRKFDGTTITNSISFKKLRLLEPATNYLIERK

SEQ ID NO: 8767 - protein, 396 aa, unidentified; identical to SEQ ID NO: 4508
  REGION 1..396: note = Human gut metagenome

SEQ ID NO: 8768 - protein, 504 aa, Eubacterium hallii; identical to SEQ ID NO: 3854

SEQ ID NO: 8769 - protein, 420 aa, unidentified
  REGION 1..420: note = Human gut metagenome
MQYVYVLSKHGEPLMPCSPGKARLLLKEKKARVVRRTPFTIKLLYGSAGYKQPITLGVDAGSKHVGLSASTEKRELYREEFTPRNDVVKLLSKRKQYRRSRRNRKTRYRAPRFNNRVHSKHKGWLAPSVEVKIQEHITVIKRICRIIPISLVRVETAEFDTQRLKAMLEGKSLPVGTDYQLGEMYDEYNVRQYVLKRDNYTCQCCGAHTTKKKTVKLHVHHLEGRQVGGNAPNNLITLCVDCHKALHAGKVKLDGKKRGKSFKDAAFMGIMRKTLMARLRDELPIPVQGTYGYITKMRREQNDIKKSHVNDARCISKHPLAEPCSVCYRTKAIRHHNRQTHKANFSKGGTRQRSQMPYVVEGYRLWDKVLYKGQECFVSGRRASGSFTLKKLDGTCISKGVTFKKLRLLEPATNYLIERM

SEQ ID NO: 8770 - protein, 512 aa, unidentified
  REGION 1..512: note = Human gut metagenome
MSTVYVLNKDGKPLMPTTRGGHVRHLLKEQKARVVRAKPFTIQLLYETNDVVQPLYLGIDPGRTNIGVAVVKANGTAVFTAHLETRNKEVPKLMQDRKKARRARRTNGRRCRRQRRAKANGTISKKCVKQDTAQSKNPSKRAKEIGIIKRRLPGYKKDVLCIGIKNKEAKYTNRTRPEGWLTPTANQLLQTHINLVRKIQKFLPISDVVLEVNKFAFMRLDNPDIQKWQYQQGPLYQKGSLENAVSEMQEHHCLFCDKPIDHYHHVVPQSENGSNTIANIVGLCAEHHNLVHKDAAWQKKLAEEKVGLNKKYGALSVLNQIIPALTNKLSVLFPKHFFVTAGKSTHDYRATHGVSKDHWLDAYCIACSVLPSDVCDSNINNHMPYELKQFRRHARRALNNENMNRVYTLNDKAVAINRHKATEQEAASLEEFRKEHPNDVCKLKVKEHHPTYRNMNRNYPGSIFLVGKHVHIMQGIAGSKDGKATTYKDTNANSIAAGKCKFVAKNSGILFV

SEQ ID NO: 8771 - protein, 414 aa, unidentified; identical to SEQ ID NO: 5235
  REGION 1..414: note = Human gut metagenome

SEQ ID NO: 8772 - protein, 422 aa, unidentified
  REGION 1..422: note = Human gut metagenome
MVYVINKQGQALMPTERFGKVRRLLKNSLAHVVCRIPFTIQLDYDTTDYTQPVSLGIDAGSKHIGISATTSEKELYAADVELRNDIVDKLSTRRELRRTRRSRLRYRKARFNNRVSSKRKGWLAPSVENKIQTHLTVVEKIHKFLPITNIVVETASFDIQKIKNPSISGVEYQQGEQLDFFNVREYVLFRDNHTCQHCKGKSKDKVLNVHHIESRKTGGDSPNNLITLCETCHKAYHRGEFELNVKRGKSFRDSAFMGIMRWKLYDRLKNIYPNVSMTFGYITKNTRITNNLPKEHYVDARCISGNPVAKPLGYYFYQKKVRCQNRQIHKANFLKGGRKKLNQAPFLVKGFRLFDLVEYQKELYYIFGRRSNGSFDIRKLDGTKVNKGSINCKYLRLIDKRKSILRIKREFPCLQAGDDSVF

SEQ ID NO: 8773 - protein, 408 aa, unidentified; identical to SEQ ID NO: 6591
  REGION 1..408: note = Human gut metagenome

SEQ ID NO: 8774 - protein, 408 aa, unidentified; identical to SEQ ID NO: 6147
  REGION 1..408: note = Human gut metagenome

SEQ ID NO: 8775 - protein, 414 aa, Moorena sp.
MTNYVFVIDANGKQLAPTKEQKAWYLIRKKGATLVNKYPMVIQLNKVIKDNNICKDEIRCGIDDGGLHVGIALIQRCQTKNKVLFKGTIEQRNDVKHLMQVRKKYRQYHRYHKRYRPARFNNRSSSKRQSRIAPSIFQKRQAIIRVINQLNKWINIKNYWLEDVSIDIRALTDGYKPYSWQYQKSNRLDENIRKAIILRDGCKCMECGKANCRLEVHHIKPRRLNGSNTIDNLITLCKKCHQKTEGKEELFMNKYFSLLGKSKDNKNLNYASHVMIGKNWLREQLSNLGELYLTNGGDTANKRIDWNIEKTHSNDAICITELKPDTTDIKDWIIKAMRRQSKAKTDNVLGIKHRDLVEYKYKNGEIHRGYVTALYPEIKALNFQSPTKHCKKVNARKCKLLWKYNKIYWLDNVN

SEQ ID NO: 8776 - protein, 534 aa, unidentified
  REGION 1..534: note = Human gut metagenome
MPNKVYVINKHGRPLMPCSPAKARHLLDDGKAKVKKRTPFTIQLVYGSSGYTQEVILGVDAGSKTIGMSVSTTKEELLSAEVKPRNDVVDLQSTRREFRRARRNRKTRYRKPRFDNRVRSKRKGWLAPSVEVKIQEHITAIRRVCGILPVSKVVVETAEFDLQLLKAIEEGKPVPQGEDYQKGEMYGHYNVRQYVLWRDNYTCQCCGAHATKKKEVRLHVHHLESRKVGGDAPDNQVTLCESCHEKLHKGLITEGDFKKRKRRSTRDATFMGIMRKTLMQRLCSELPIPVVETRGYITKATREKLLVLPKSHTNDAQAIAQGKQGFNVGYLPGILQIDKIYTIRPVRHHNRQLHKARDPPADGGEALGRAYAEDAGRDRVRRADRRTKERRAGDDQRGRRFAGEAVNGFQFEDLMPHGFDDFPAAHGSTERHKGGTEALDPEGDGYRFDFVENEEGKGDHPHRFLGIVHTVAGRHERRREHLKPREGRIELVPRALCAQEHDEEHDQQPHTESSQRGEDQRQQYFGQDGAPVEG

SEQ ID NO: 8777 - protein, 334 aa, unidentified
  REGION 1..334: note = Human gut metagenome
MVYVLANDGQPLMPTERHGKVCRMLKSGIAKVVKKCPFTIQLQYESERNVQPVALGIDAGSKHVGVSATTKAKVLYESDVELRDDIVKLLATRRQLRRRRRSRKTRYRPARFDNRRRKEGWLTPSIRQKIESHLTVVANVCKILPVSQIIVETASFDIQKIKNPDIQGIEYQQGEQMDFWNIREYVLFRDGHTCQCCKGKSKDKVLNVHHIESRKTGGNAPNNLITLCETCHKGYHNGTVTLPKNIKRGMKFKDAAFMGIMRWTFYNTLKEQYEPDIPVSMTYGYLTKNTRIEHGLPKEHYIDARCISGNPDAVSDGTYYYQKKVRCHNRQIHK

SEQ ID NO: 8778 - protein, 424 aa, Scytonema sp.; identical to SEQ ID NO: 6716

SEQ ID NO: 8779 - protein, 430 aa, unidentified
  REGION 1..430: note = Human gut metagenome
MPKVYVLNRHGRPLMPCTPAKARHLLDAGKAKVRHRTPFTIQLLYGSTGYTQEVILGVDAGSKTIGLSAATETEELFSAEVKPRNDVVELMSARRQFRRARRNRTTRYRKPRFDNRVRSKHKGWLAPSVEVKIQEHMTAIRRACAILPVSKVVVETAEFDLQLLKAVAEGKPVPQGEDYQKGEMYGHYNVRQYVLWRDSYTCCICGVHGSVRKGVPLHVHHLESRRVGGDAPDNLVTLCTACHDKLHKGIIMAADIKKLKRRSTRDATFMGIMRMTLLRRLREQLPVPVVETRGYITKATRENLLVLPKSHANDALAIAHGPQGFRAEHLPNIRQADRLYTIRPVRHHNRQLHKATILKGGVRKTNQAEKYICGFRLYDKVLYNGIECFVWGRRTSGSFLLRQLNGEKVKDGVSYKHLKLLERSQSYLVA

SEQ ID NO: 8780 - protein, 418 aa, unidentified
  REGION 1..418: note = Human metagenome
MVYVINKDGQALMPTERFGKVRRLLKNGLAHVVCRIPFTIRLDYETTHFVQPISLGVDAGSKHIGISATTSKKELYAADVELRNDIVDKLSTRREQRRTRRSRLRYRKARFNNRVSSKHKGWLAPSVENKIQTHLTVVEKIHKFLPITKIIVETASFDIQKIKNPSISSKEYQQGEQLGFFNVREYVLFRDNHTCQHCKGKSKDHILNVHHIESRKTGGNSPSNLITLCESCHKAYHNGKIDIKIKRGASFRDATFMGIARWTTYERLKNIYPNVSMTFGYITKNTRITNGLPKEHYVDARCISGNPKSKPLGYYFYQKKVRCQNRQIHKANFLKGGRKKLNQSPFLVKGYRLFDLVEYQKKLYYIFGRRDSGFFDIRRLDGTKVNKGSISCKRIRLVDIRRNIITERRNSCSIPPTN

SEQ ID NO: 8781 - protein, 414 aa, unidentified
  REGION 1..414: note = Human gut metagenome
MVYVINKQGQALMPTERFGKVRRLLKNSLAHVVCRIPFTIQLDYDTTDYTQPVSLGVDAGSKHIGISATTSEKEMYAADVELRNDIVDKLSTRREQRRTRRSRLRYRKARFNNRVSSKRKGWLAPSVENKIQTHLTVVEKIHKFLPITNIVVETASFDIQKINNPSISGSEYQQGEQLDFFNVREYVLFRDNHICQHCKGKSKDKVLNVHHIESRKTGGDSPNNLITLCETCHKAYHRGEFKLNIKRGKSFRDAVFMGIMRWGFYDRLKNIYPNVSMTFGYITKNARITNNLPKEHYVDARCISGNPTAKPLGYYFYQKKVRCQNRQIHKANFLKGGRKKLNQAPFLVKGFRLFDLVEYQKELYYIFGRRDSGFFDIRKLDGTKVNKGSINCKYLRLVDKRKSILIEKRTQVNL

SEQ ID NO: 8782 - protein, 493 aa, unidentified
  REGION 1..493: note = Human gut metagenome
MAVVYVISASGKPLMPTTRCGHIRGLLNAGKARVVEREPFTIQLKYETPDVTQPLYLGIDPGRTNVGSAVVREDGECVFTAQLTTRNKDVPKLMKARKQFRMAHRRLKRRCKRQRRAKAAETLSQKGEFQRLLPGYEESILCKGIRNKEARFNNRQRPAGWLTPTANHLLLTHLNMVKKLQKLLPITDVVLEVNRFAFMAMENPSIRRWQYQQGPLYGKGSVEDAVYAQQDGHCLFCGKPIAHYHHVVPQHKNGSETLENRVGLCNEHHDLVHKDRAWDAKMKETKAGLNKKYHALSVLNQIIPALTEQLTAMFPQHAFVTTGKDTADFREDYGIAKEHHLDAYCIACSVLAEPTKVAAPTGKPHRLMQFRRHDRQVCHKENIKRVYLSEGKAVATNRHKAIEQKDDSLEEFRKTHTQQEVSALTVKDHQPVYKDMRRFMPGGVFLFNGKVHTLQRSHGRYKGMPFYYIDTDGSKNHAKGCIFLQQNCGLRWV

SEQ ID NO: 8783 - protein, 427 aa, Enterococcus sp.; identical to SEQ ID NO: 5630

SEQ ID NO: 8784 - protein, 431 aa, unidentified; identical to SEQ ID NO: 3235
  REGION 1..431: note = metagenome

SEQ ID NO: 8785 - protein, 441 aa, Sulfobacillus sp.; identical to SEQ ID NO: 4231

SEQ ID NO: 8786 - protein, 512 aa, unidentified; identical to SEQ ID NO: 4031
  REGION 1..512: note = Human gut metagenome

SEQ ID NO: 8787 - protein, 455 aa, unidentified
  REGION 1..455: note = Human gut metagenome
VSFTVRYVLACRFKHIKKRKEVPYMVYVLDIDGQPLMPTTRHGKVRRLLNSHLAKVVKRCPFTIQLLYQSTKETQPVSLGVDAGSKHIGMAATTEKKVVYQEELSPRNDVVKLLSARRTLRRTRRNRKTRYRKPRFNNRVHSKHKGWLAPSVEVKIQEHITATKRICQILPIFDIHVETAEFDLQRLKAMEEGRLLPAGTDYQLGEQYDFYNTRQYVLHRDEYTCQCCGTHDNNVKLHVHHVESRQTGGEAPNNLITLCEHCHKSIHAGKMMLPKGKKRGKSYRDAAFMGIMRNTLLERLRKEVNVLVTMTYGYITKYWREKAGLEKSHINDAICISKHPYARPLETYYLTKAVRHHNRQIHKTKFSKGGIRKRNQAPYLVKGFRLFDKVLYQGESYFIFGRRITGYFDIRTLDGTKVNKGSTSYKKLRIQDTAEAYLTEVRAIPHMNEFTCVLA

SEQ ID NO: 8788 - protein, 582 aa, unidentified
  REGION 1..582: note = Human gut metagenome
MYLDGVFGHLKDAGTCRYSSSLQHRRVYAKSRKTIPGQCLGLQPMRKNRFFVGRYCPTLIRRQHLANLKLIDTLLEKTEYIYVLGADGKPQMPTNRKVRVRSLFKSGLAKIVDTVPFTIRLLYENNAVLQPITLAEDPGRTNIGVAVLTQFGDLVFSAVVETRNKDIKKLMSDRKAHRQASRRGERKARQRLAKKHGSMIKSGMIMRKLPRYAADKFVTCKFIKNTEARFCNRKRIPDWLTPTVNHLVETHINIIRKISKYIPVTDIAVEVNRFAFMQMENPETTGIDFQNGPLKGFNDVKAALRVQQHGKCLMCKNDISDFHHIVPRSKGGSDNIQNQVGLCPKCHKKAHTNENFKQKLADKKVGLLKKYGALSALNQAVPFICKSLLEIYGKDHVYFCTGKDTSLIRTGLGYEKTKDNQIHEVDAYCIGLAAVGADIVKLPKFENIYKIKQFRRQDRSIINYQRERTYYLDGKKIATNRKPRFEQKKDAFSDWYSKRVKSDGKEQADKLTGRVTVKKSIRGYNSKNRLMSGTIFYYNGKRLVLTGQLTGGKYYRAYGDSKTNYPAAKCQVYKQNEGLVFV

SEQ ID NO: 8789 - protein, 414 aa, unidentified; identical to SEQ ID NO: 2588
  REGION 1..414: note = Human gut metagenome

SEQ ID NO: 8790 - protein, 470 aa, Moorena sp.
MEACSVRDKSNWLIRRHRNMQQLLVELKNTPGDAPQVPCSVSGALNREETLSVPRKVLANNNSDEDQHSGKSGQWLNVPVINMRGKPLMPAKPGKARRLLKQGKAIVVQRAPFTIQLCYLTGNYTQDIKLGIDAGYKTIGFSAVTEKKELISGELTLRKRISRLLEQKKHYRRARRNKLWYRKPRFNNRSKPKGWFAPSIQHKLETHLRLIEKLKKILPVTKVTVEVAGFDTHKMQNPEIKGVEYQQGTLFGYEVREYLLEKWARKCAYCGKSNTPLEIEHIIPKIRGGTDRVSNLTLACHKCNQKKGNQTAAEFGHPEIQKKANQTLKATAFMNIVRWRLVNTLKCDWTYGYITKHARIKLDMEKSHANDAFVIAGGTTQSRSKPYKLTQTRRNNRSLQLNRKGFKPSIRRQRYKLQPNDLVKYIKSLCKVKGVHSYGKSVILKDKIGKSFDINVKNVELVKYGKGIQF

SEQ ID NO: 8791 - protein, 409 aa, unidentified
  REGION 1..409: note = Human gut metagenome
MVYVQDIDGNPLMPTTRHGKVRRLLKSYMAVVVNLCPFTIRLKYTTTDYKQEVVLGVDAGTKHVGFSATTKSKELYASEVTLRSDIVDLLSTRRESRRTRRNRLRYRKPKFDNRISSKKEDWIAPSIRQRIDSHLKQISDIHKILPVSKIIIEVAQFDTQKIKNPDIKGEEYQQGEQLGFWNVREYVLFRDNHKCQHCKGKSKDPILNVHHLESRKTGGNSPSNLITLCEACHKDYHNGKFELKIKKSKSLRDAAVMGIMKWRLYEELKSSYKDVKMTFGYITKHNRIQQNIQKSHTSDAFVISKNFEAERLGFSYNIKLTRRHNRQIHKMKILKGGAKKLNQCPFEVFGFRLFDKVKFNNQYYFIYGRRKSGYFSIRDFDGKNNKEISYKKLKLCRVKRSPVCIKENE

SEQ ID NO: 8792 - protein, 470 aa, unidentified; identical to SEQ ID NO: 7775
  REGION 1..470: note = Human gut metagenome

SEQ ID NO: 8793 - protein, 424 aa, Moorena sp.
MSNFVFVLDTTKKPLNPVHPAQARRLLKQGKAAVFRRYPFTIILFEEITETPKNITLKLDPGSQTTGIALVQNNQVIWGAELQHRGQQIQDALTSRRQLRRGRRGRKTRYRQPRFLNRKRSEGWLPPSLQHRVDTTLTWVKRLTRYCPINSLAVELVKFDLQKQENPEISGVEYRQGTLYGWEVREYLLAKFNRTCQYCGATDRPFEIDHIHPRSKGGSDRVSKLTLACHNCNQSKGNQDIKDFLKEKPNLVNHILRQAKTSLKDAAGVNSTRLKLFLSLRELGLPIETGSGGLTKFNRKRLKVPKTHWQDASCLGKIPDDLIFKTNQPLLIQATGHGKRQRCRPNKFGFPISHASRAKLFQGFQTGDLVSALIPKGKFAGLYVGRIAIRFRPSFVLQLPEKKFDVHPKYLTIMHKNDGYNYAF

SEQ ID NO: 8794 - protein, 470 aa, Ruminococcus sp.; identical to SEQ ID NO: 2433

SEQ ID NO: 8795 - protein, 431 aa, unidentified; identical to SEQ ID NO: 4463
  REGION 1..431: note = metagenome

SEQ ID NO: 8796 - protein, 470 aa, Blautia sp.; identical to SEQ ID NO: 2925

SEQ ID NO: 8797 - protein, 512 aa, unidentified
  REGION 1..512: note = Human gut metagenome
MSTVYVLNKDGKPLMPTARCGHVRHLLKEQKARVVTSKPFTIQLLYETDDVVQPLYLGIDPGRTNIGVAVVKADGTAVFTAHLETRNKEIPKLMKKRKDSRRARRTNGRRCRRQRRAKANGTISKKCVKQTTAQNGSVSKRAKEIGVIKRHLPGCEKDVLCIGIKNKEAKFSNRTKSEGWLTPTANQLLQTHINLVKKIRKFLPISDVVLEINKFAFMQLDNPNVQKWQYQQGPLYQKANLEEAVSEMQEHHCLFCKKPIAHYHHVVPQSENGSNTIGNIVGLCTKHHDLVHKDTAWQKKLAKKKTGLNKKYGALSVLNQIIPALTKELGSLFPKHFFATNGKSTYDYRAAHGVRKDHWLDAYCIACSVLPNDVCDKNINSRVLYELKQFRRHDRRALNNENMSRVYTLNENVVATNRHKATKQTTDSLEEFRQNHPDDACKLKVKEHHPTYRNMSRNYPGSVFLVGNQVHVMQGVAGSKDGKATTYKDTNANSIAAGKCKFVAKNSGILFV

SEQ ID NO: 8798 - protein, 427 aa, Scytonema sp.
MCKVFVLDTDFIPLLPIHSAQARQLLRNKKAAVYRRFPFTIILKESRPDSPVSSLRLKIDPGAKFTGIALINETTGEVVFAAELKHRGFAIREALTSRRQLRRGRRARKTRYRAPRFLNRTRPKGWLAPSLQSRVENIETWVNKLCRFAPIKAISQELVRFDMQLMRNPDIKGEEYQQGTLAGYETREYLLEKWGRQCAYCGVKDVPFQVEHIHPRAKGGSNSITNLTLSCDKCNTKKGTKDIKEFLKKDPAKLSKILAQAKRPLADAAAVNTTRWALFRILKETGLPVETGSGGLTKFNRSQQKLEKTHWLDAACVGKSTPKLIIKGAKPLLITANGHGARQSCRTDKFGFPHRHVPREKIHFNFQTGDIVKAVVTTGKKVGNYIGKVAIRSSGSFNISAKNGLVQGISHKFCKRIHAKDGYSYAQ

SEQ ID NO: 8799 - protein, 380 aa, unidentified
  REGION 1..380: note = Clostridiaceae bacterium UBA4052
LVYILSKNGNPLMPTSRHGKVKHLLKDGMAKVVRRTPFTIQLLYDSPEYTQPITLGVDAGSKVVGLSATTEKKELFVSEITLRDDIPELLSTRRQNRRTRRNHLRYRMARFLNRTASKKEGWLAPSIKHKVDSHLKVIGNVHRILPISRIVIETASFDIQKIRNPEISGREYQQGEQLGFWNTREYVLWRDKHECQHCHGKSKDRILNVHHKESRKTGGDSPGNLVTLCETCQKSHHEGRIKLKLTPNKSYRHASFMGIMRWYVYNSLQELYPEVSMTYGYITKNNRIRNNIEKTHSADAYCISGNMNAIRIDEIYNQVFKRKHNRQIHKANFLKGGKKKQNQSAYEVKGFRLFDHVRYRDEECFIFGRRTSGYFDLRKL

SEQ ID NO: 8800 - protein, 451 aa, unidentified; identical to SEQ ID NO: 5203
  REGION 1..451: note = Human gut metagenome

SEQ ID NO: 8801 - protein, 453 aa, Lactobacillus sp.; identical to SEQ ID NO: 7420

SEQ ID NO: 8802 - protein, 418 aa, unidentified
  REGION 1..418: note = Human gut metagenome
MVYVLSQHGQPLMPTENHAKVRALLKHGKAKVIQRCPFTIQLLYESTTHTQKINLGIDAGSKTIGVSATTDSKVLYESEVVLRNDIVELLSGRRALRRSRRNRKTRYRKPRFDNRRRPDGWLAPSIRQKIKTHVTVVENVMKILPVTKIIVETASFDIQKIKNPEIEGAEYQYGEQLDFWNVREYVLFRDGHTCQCCKGKSKDNILNVHHIESRKTGGNAPNNLITLCETCHKAYHKGVITLPKEIHRGMRFRDAAFMGIMRWAFYDRLKELYTPFGVEVINTYGYITKNTRIEHGLPKEHYVDARCISGNPAAKPLGHYYFQKKVRCHNRQIHKNTILKGGIRKRNQAAYLVNGYRLFDKVKYQNQEYFIFGRRSSGFFDIRTLDGTKVNKGSISCKKLQLVEKSKHYLTEQRKVTA

SEQ ID NO: 8803 - protein, 412 aa, unidentified; identical to SEQ ID NO: 3155
  REGION 1..412: note = Human gut metagenome

SEQ ID NO: 8804 - protein, 442 aa, unidentified; identical to SEQ ID NO: 2903
  REGION 1..442: note = Human gut metagenome

SEQ ID NO: 8805 - protein, 413 aa, unidentified; identical to SEQ ID NO: 2636
  REGION 1..413: note = Human gut metagenome

SEQ ID NO: 8806 - protein, 442 aa, unidentified; identical to SEQ ID NO: 2903
  REGION 1..442: note = Human gut metagenome

SEQ ID NO: 8807 - protein, 501 aa, Moorena sp.; identical to SEQ ID NO: 7018

SEQ ID NO: 8808 - protein, 431 aa, unidentified; identical to SEQ ID NO: 4804
  REGION 1..431: note = Human gut metagenome

SEQ ID NO: 8809 - protein, 430 aa, unidentified; identical to SEQ ID NO: 3252
  REGION 1..430: note = Human gut metagenome

SEQ ID NO: 8810 - protein, 470 aa, Anaerostipes sp.; identical to SEQ ID NO: 2825

SEQ ID NO: 8811 - protein, 413 aa, unidentified; identical to SEQ ID NO: 2636
  REGION 1..413: note = Human gut metagenome

SEQ ID NO: 8812 - protein, 410 aa, Rhodococcus sp.; identical to SEQ ID NO: 8146

SEQ ID NO: 8813 - protein, 421 aa, unidentified
  REGION 1..421: note = Human gut metagenome
MRGQPLMPCSPAKARHLLMDKKAVVKRRTPFTLQLTIATGETKQDVTLGVDAGAKHIGLSASTEKEEVFASEVELRQDITGLLAARLAFRRARRHRKTRYRAPRFLNRVHSKHMGWLAPSVENRIQAHMSRIDAICGLLPVTKIVIETASFDIQKIKNPDVEGTDYQQGDQLGFWNVREYVLFRDGHVCQHCRGRSKDKVLNVHHLESRQTGGDAPNNLITLCETCHKAYHAGKIKLKVKRGQSFRAEAFMGIMRWTMLDRVRKAHPDLPVENTYGYLTKNTRITLGLPKTHCIDAYCIAGNLNARRRGVYLYERQMRKHNRQIHKCKVLSKTLKDGTKVGYRKLNQTPYLVKNFRLFDKVRCFGQTGFIFGRRTSGHFDVRTLNRTRLSDCVNSKKLTLLEKRRTFLTELRKEDGASSPV

SEQ ID NO: 8814 - protein, 424 aa, unidentified; identical to SEQ ID NO: 3351
  REGION 1..424: note = Human gut metagenome

SEQ ID NO: 8815 - protein, 476 aa, unidentified
  REGION 1..476: note = Human gut metagenome
LAASGTEGVSHPGLPGKYKHKGGQLMSVAVISKTGERLMPTSEYRARKLLKSGKAIKHSYHPFTIQLTERETGDIQPIELCMDTGYIHIGISVKSEKHEYLAEQIDTLTDERGRHDACRMYRRQRRSRKRYRQARFNNRKRDHGWIAPSLEHKKKIHIQAISRINNVIPITDITLEMGNFDTQVLKANEEGKPLPQGADYQHGERYSIATLREAVFSRDSYKCQCCGRTIKDGAILHIHHIKYRSQGGTNSMSNLATVCDKCHTPKNHKPGGKLYNWKPKLSSFKGATFMTAIRWQLYNEVKALFPDIDIHITYGAATKERRRKLDIDKSHVNDAFVMGQFHPKHRIKAILCKKKRRNNRCLEKFYDAKYIDSRDGKKRSGQELFNGRINRNHKKNSENLHQYRLQKVTAGKRTVRKQHYSVQPHDIIIYESRKRETTGCHCNGARVMLLPDKKSVSIKKIKIYRYASGYFKSTFN

SEQ ID NO: 8816 - protein, 481 aa, unidentified
  REGION 1..481: note = Human gut metagenome
THSAAVVAQAANKVTKAALSNTSANTPAIISAVVKRNLNVGLWFVVVLALLSIFGGVYIIKNIKAPKKARRTRRTNGRRCRRQRRAKANGTISKKCVKQDTAQNGSVSKRAKKIGVIKRHLPGCEKEVLCIGIKNKEAKFSNRVRPEGWLTPTANQLLQTHINLIKKIRKFLPISNVVLEINKFAFMRLDNPNIQKWQYRQGPLYQKASLEEAVSEMQEHHCLFCKKPIAHYHHVVPQSENGSNTIGNIVGLCTKHHDLVHKDTTWQKKLAKKKTGLNKKYGALSVLNQIIPALTKELSSLFPKHFFATNGKSTYDYRAAHSVSKDHWLDAYCIACSVLANDVCDSNINSRVPYELKQFRRHDRRALNNENMSRVYTLNGKVVATNRHKATKQTTDSLEEFRQNHSDDVCKLKVKEHHPTYRNMNRNYPGSVFLIGKQVHVMQGIAGSKNGEATTYKDTNANSIAAGKCKFVAKNSGILFV

SEQ ID NO: 8817 - protein, 420 aa, unidentified; identical to SEQ ID NO: 3247
  REGION 1..420: note = Human gut metagenome

SEQ ID NO: 8818 - protein, 431 aa, unidentified; identical to SEQ ID NO: 2604
  REGION 1..431: note = Human gut metagenome

SEQ ID NO: 8819 - protein, 432 aa, unidentified
  REGION 1..432: note = Human gut metagenome
MLTGLLAEQVDPAGIRKGDTLKVFVLNMRGKPLMPCSPAKARHMLKAGKAVVARRTPFTIKLTIATGETKQDVTLGVDAGAKHVGISATTEKEEVFASEVELRQDITGLLADRLAFRRSRRNRKTRYRAPRFNNRVRSKHKGWLAPSVENRIQAHISRIEAICRVLPITKIVIETASFDIQKIKNPEVEGTDYQQGDQLGFWNVREYVLFRDGHVCQHCRGRSKDPILNVHHLESRKTGGDAPNNLITLCETCHKAYHAGKIKLKTRRGTSFRAEAFMGIMRRTLLDRVRKAHPELSVENTYGYLTKHKRIALGLPKTHCADAFCIAGNLNALRRRDFLYQRQTRKHNRQIHKCSILKGGVRKLHQAPFLVKGFRLFDKVKCTGRIGIIFGRRSTGSFDVRTLDGTRLSAGISSKKLTLLEKRTTFLTQLRK

SEQ ID NO: 8820 - protein, 422 aa, unidentified; identical to SEQ ID NO: 5333
  REGION 1..422: note = gut metagenome

SEQ ID NO: 8821 - protein, 417 aa, unidentified
  REGION 1..417: note = Human gut metagenome
MPCSPAKARLLLKERKAIVKRRTPFTIQLTIATGEAKQPVTLGVDSGYKHIGLSATTEKAELYASEVELRQDITGLLSARLALRRSRRSRKTRYRAPRFDNRVASKREGWLAPSVENRIAAHMSRVEAVMQVLPVTAITVETAAFDTQLLKNPDITGAAFQQGEQLGFWNVREYVLFRDGHVCQHCRGKSKDPILNVHHIESRRTGGDAPNNLITLCETCHKAFHRGKIKLKVRRGKSFKAETFMGIMRWTLFERLKKAHPELNVRNTYGYLTKHKRISYGIAKSHCADAYCIADNLGAKRLEGFFFQKQTRKHNRQIHKLSILKGGLKKKNQAPYEVKGFRLFDKVICKGEEAFIFGRRTSGSFDVRRLDGTRISAGINYKKLRLLEPRTTYLTEFRKEAALPPLHECRGFRAEFL

SEQ ID NO: 8822 - protein, 442 aa, unidentified; identical to SEQ ID NO: 2637
  REGION 1..442: note = Human gut metagenome

SEQ ID NO: 8823 - protein, 428 aa, Moorena sp.
MQRVFVLDHNKQPLMPCHPARARKLLKKGKAAVYRRYPFTIIMTHRVGGDLQPIEVKFDPGSRTTGIALVGHFNRGLEVIWAGNLNHRGIQIKSHLESRRAIRRSRRNRKTRYRQARFLNRMRPAGWLPPSLRSRVDNVKNGMLKLSSLTPVSQIAVETVKFDMQKIQNPEISGLEYQHGELAGYEVREYLLEKWGRKCAYCGAQNVPLEIEHIRASSKGGSNRVSNLTLACNKCNQKKGNQDIKEFLKSQPDRLRKIQSQALKPLKDAAAVNATRYAISNVLKSFGLPIVFSTGGRTKFNRLKLGYQKDHWIDAACVGESGSQIVIPKTITPLTITAKGRGSRQKCSMNKYGFPRTGPKKAKRVKGFQTGDIVKAVVTKGKKIGTYFGRVAVRASGSFDIGSGEERVGSISYKYCCLLQRSDGYEYT

SEQ ID NO: 8824 - protein, 413 aa, unidentified; identical to SEQ ID NO: 2636
  REGION 1..413: note = Human gut metagenome

SEQ ID NO: 8825 - protein, 426 aa, Parasutterella sp.; identical to SEQ ID NO: 3045

SEQ ID NO: 8826 - protein, 514 aa, unidentified; identical to SEQ ID NO: 7895
  REGION 1..514: note = Human gut metagenome

SEQ ID NO: 8827 - protein, 390 aa, Desulfobacter sp.
LKENVLDVASNPLRIKIDPGSRETGIAVINDDSGEIVFAMELKHRGQQIKNNLESRRAIRRSRRNRKTRYRKPRFDNRTRAEGWLPPSLKSRVHNIETWVNRLCRFCNIQAISMELVRFDMQKIQNPEISGVAYQQGELMGYEVREYLLEKWDRTCAYYCGKTDIPLEIEHIVPKSKGGSNRVSNLTLACTACNRKKGNKSLEQFLSRKPRLLKRIQKQSKVPLKDAGAVNATRWDLFRTLKKTGLPVETGSGGLTKFNRTTRGLHKTHWLDAACVGESTPEKIFQIDKAVLIVKANGHGSRQMCRVNKFGFPRTTAKSTEKKVKGFQTGDIVKAVVTSGKKVGTYIGRVAVRKSGSFNIKTVDKTVQGISWKYCSLLHASDGYSYNTTC

SEQ ID NO: 8828 - protein, 582 aa, unidentified; identical to SEQ ID NO: 7020
  REGION 1..582: note = Human gut metagenome

SEQ ID NO: 8829 - protein, 424 aa, Moorena sp.; identical to SEQ ID NO: 8578

SEQ ID NO: 8830 - protein, 420 aa, unidentified; identical to SEQ ID NO: 7011
  REGION 1..420: note = Human gut metagenome

SEQ ID NO: 8831 - protein, 431 aa, unidentified
  REGION 1..431: note = Human gut metagenome
MPNKVYVINKHGRPLMPCSPAKARHLLDAGKAKVKKRTPFTIQLVYGSSGYTQEVILGVDAGSKTIGMSASTKKEEVFAADVTPRNDVVDLMSTRREFRRARRNRKIRYRKPRFDNRVRSKHKGWLAPSVEVKIQEHITSIKRVCRILPVSKVVIETAEFDLQLLKAIADGKPVPQGEDYQKGEMYGHYNVRQYVLWRDGYTCQCCGAHATKKKEVRLHVHHLESRKVGGDAPDNQVTLCESCHEKLHKGLIAEKDFKKRKRKSTRDATFMGIMRKTLMQRLCSELPIHVVETRGYITKATREKLLVLPKSHINDALAIAQGKHGFNVGYLPGILQIDMIYTIRPVRHHNRQLHKATILKGGIRKSNQTEKYVFGYCLFDKVQFNGQDCFIWGRRTTGIFTIKTINGKMIKDGISFKKLKLVEKSTSYLIA

SEQ ID NO: 8832 - protein, 414 aa, unidentified
  REGION 1..414: note = Human gut metagenome
MPCSPAKARLLLKEKKAIVKRRTPFTIQLTIATGESKQPVTLGVDAGYKHVGLSASTEKAELYASEVELRQDITDQLSARLALRRSRRNRKTRYRAPRFDNRIRTKRKGWLAPSVENRINAHLSRIEAVLRLLPVTKISVETASFDMQLLKNPDIAGKEYQEGEQLGFWNVREYVLFRDRHVCQHCYGRSKDPVLNVHHLESRRTGGDSPGNLITLCETCHKALHRGDITLKAKRGKSFRAEAFMGIMRWEVHNRLRALHPGIEVSNTYGYRTKHARIANGIAKSHCADAFCIAGNLGAERLCEFFFQKQTRRNNRQIHKLSILKGGIRKRNQAPFEVKGFRLFDKVACQGEEGFIFGRRSSGFFDVRKLDGTRISAGISCKKLHLLEKRRTYLTEIRKEEALPPLPEGRGLRA

SEQ ID NO: 8833 - protein, 465 aa, unidentified; identical to SEQ ID NO: 3070
  REGION 1..465: note = Human gut metagenome

SEQ ID NO: 8834 - protein, 512 aa, unidentified; identical to SEQ ID NO: 4031
  REGION 1..512: note = Human gut metagenome

SEQ ID NO: 8835 - protein, 373 aa, Moorena sp.; identical to SEQ ID NO: 3006

SEQ ID NO: 8836 - protein, 431 aa, unidentified
  REGION 1..431: note = Human gut metagenome
MPDKVYVISRLGHPLMPCSPAKARHLLDDGKAKVVKRTPFTIKLLYGSTEYTQAVILGVDAGSKTIGLSASTTKEELFAAEVMPRNDVVENLSTRREFRHARRNRTTRYRKPRFNNRVHSKNNGWLAPSVEVKIQEHITSIKRVCAILPISKIVVETAEFDLQLLKAVQDGKPVPEGEDYQKGEMYGSYDVRQYVLWRDNYTCTCCGVKGTDKRPVKLHVHHFESRKHGGNAPDNYGTLCEDCHKKLHLGIITDISLKTRKRPSTRDAAFMGIMRKTLMQRLITGLSIPVAETKGYITKAAREEILKLPKTHTNDALAIAQGRHGFGIREQAYVKPTNRIYTVRPVRHHNRQLHKATMLKGGIRKLNQASKYIFGFRLYDKVLYQGGECFVWGRRRSGSFLLRTIDGTKVKDGVGYRNLTLLERSTNYLIA

SEQ ID NO: 8837 - protein, 512 aa, unidentified
  REGION 1..512: note = Human gut metagenome
MSTIYVLNKDGKPLMPTTRGGHVRHLLKEQKARVVQSNPFTIQLLYETNDVVQPLYLGIDPGRTNIGVAVVKADGTAVFAAHLETRNKKIPKLMQDRKKARRARRTNGRRCRRQRRAKANGTISKKCVKQDTAQSKNPSKRAKKIGVIKRHLPGCKKDVLCVGIKNKEAKYTNRARLEGWLTPTANQLLQTHINLVKKIQKFLPISDVVLEVNKFAFMRLDNPNIQKWQYQRGPLYQKGSLENAVSEMQEHHCLFCEKPIEHYHHVVPKSENGSNTIANIVGLCAEHHNLVHKDVAWQEKLVEEKTGLNKKYGALSVLNQIIPALTKELSFLFPKHSFMTNGKSTHDYRAAHGISKDHWLDAYCIACSVLPIDVCDSTINNCVPYELKQFRRHDRRALNNENMNRVYTLNDKVVATNRHKATEQEAASLEEFRKEHPNDVCKLKVKEHHPTYRNMNRNYPGSVFLVGKQIHVMQGIASSKDGKATKYNDTRATTIAAGKCKFVAKNSGILFV

SEQ ID NO: 8838 - protein, 431 aa, unidentified
  REGION 1..431: note = Human gut metagenome
MPDKVYVISRLGHPLMPCSPAKARHLLDDGKAKVVKRTPFTIKLLYGSTEYTQPVILGVDAGSKTIGLSASTTKEELFAAEVMPRNDVVENLSTRREFRRARRNRTTRYRKPRFNNRVHSKNNGWLAPSVEVKIQEHITSIKRLCAILPISKIVVETAEFDLQLLKAVQDGKPVPEGEDYQKGEMYGSYDVRQYVLWRDNYTCTCCGVKGTDKKPVKLHVHHFESRKHGGNAPDNYGTLCEDCHKKLHLGIITDISLKTRKRPPTRDAAFMGIMRKTLMQRLITGLSIPVAETKGYITKAAREEILKLPKTHTNDALAIAQGRHGFGIREQAYVKPTNRIYTVRPVRHHNRQLHKATMLKGGIRKLNQASKYIFGFWLYDKVLYQGGECFVWGRRRSGSFLLRTIDGTKVKDGVGYRNLTLLERSTNYLIA

SEQ ID NO: 8839 - protein, 428 aa, Moorena sp.; identical to SEQ ID NO: 4440

SEQ ID NO: 8840 - protein, 420 aa, unidentified
  REGION 1..420: note = Human gut metagenome
MQYVYVLNKHGEPLMPCSPGKARILLKQQKACVVKRTPFTIKLLYGSAGYKQPITLGVDAGSKHVGLSASTEKRELYSEEFTPRNDVVELLSTRRQNRRSRRNRKTRYRAPRFNNRIHSKHKGWLAPSVEVKIQEHITVIKRICRILPITLVRVETAEFDTQRLKAMLAGKPLPVGTDYQLGEMYDEYNVRQYVLKRDHYTCQCCGAHNTAEKVVKLHVHHLESRKTGGNAPSNLVTLCTTCHKNLHKGKVTLDGKERDKPLRDAAFMGIMRKTLMARLKEELPIPVQGTYGYITKMRREQNDIKKSHTNDARCISKHPLAEPCSVCYRTKAIRHHNRQTHKANFSKKCIRKRSQMPYLVEGFRLWDKVLYKGQECFVSGRRSSGSFALKKLDGTSISKGVTFKKLRLLEPATNYLIERM

SEQ ID NO: 8841 - protein, 414 aa, unidentified
  REGION 1..414: note = Human gut metagenome
MPCSPAKARLLLKEKKAIVKRRTPFTIQLTIATGETKQPVGLGVDAGYKHVGLSASTDKAELYASQVELRQDITDLLSARRALRRARRNRKTRYRAPRFNNRIRTKRKGWLAPSVENRINAHLSRIEAVLRLLPVTKITVETASFDMLLLKNPDIAGKEYQEGEQLGFWNVREYVLFRDGHVCQHCYGRSKDPVLNVHHLESRRTGGDSPGNLITLCETCHEALHRGEIALKTKRGHSFRAEAFMGMMRWEVLNRLKASHSELEVNNTYGYRTKHARIVNGIDKSHCADAFCIAGNLGAERLCEFFFQKQTRRNNRQIHKLSILKGGIRKRNQTPFEIKGFRLFDKVACKGEESFIFGRRSSGYFDVRKLDGTRISAGISYKKLRLLEKRRTYLTEIRKEEALPPLPEGRGLRA

SEQ ID NO: 8842 - protein, 413 aa, unidentified; identical to SEQ ID NO: 2636
  REGION 1..413: note = Human gut metagenome

SEQ ID NO: 8843 - protein, 414 aa, unidentified
  REGION 1..414: note = Human gut metagenome
MIYVLNYDGQSLMPTDRCGRSRHLLKERKAKVVKRCPFTIQLLYQNTNYTQPISLGVDAGSKYIGMSATTETKEVYASEIELRNDIVKLLSDRRALRRGRRSRKTRYRKPRFQNRKRGEKWLVPSIQHKIQTHLDATEAVCKILPITRITVETASFDIQKIKDPEIKGTGYQQGDQLGFWNVREYVFFRDGHTCQCCKGRSKDKILNVHHIESRKTGGNAPNNLITLCETCHKGYHNGTVKLPKRIHRGMSFKDAAFMGIMRWTFYNELKTIYPDVHMTYGYITKNTRIEHRLPKEHYIDARCISGNPTAAPLGVVYYQKKVRRHNRQIHKLKILKGGIRKQNQADYLVKGFRLFDKVKYQRKEYFTFGRRSSGFFDIRTLDGTKINKGSLSYKKIQFLEAPRGYLIEQRKEMA

SEQ ID NO: 8844 - protein, 420 aa, unidentified
  REGION 1..420: note = Human gut metagenome
MQYVYVLNKHGEPLMPCSSGKARLLLKQQKACVVKRTPFTIKLLFGSTGYKQPITLGVDAGSKHVGLSASTEKRELYCEEFTPRNDVVDLLSTRKQNRRSRRNRKTRYRAPRFDNRVHSKRKGWLAPSVEVKIQEHITVIKRIRRILPITLVRVETAEFDTQRLKAMLEGKPLPVGTDYQLGEMYDEYNVRQYVLKRDHYTCQCCGAHTTTKKTVKLHVHHLESRKVGGNAPSNLITLCTTCHDALHKGKVSLDGKERGKPLRDAAFMGIMRKTLMARLRDELSIPVQGTYGYITKMRREQNDIKKSHVNDARCISKHPLAEPCSVCYRTKAIRHHNRQTHKANFSKGSIRKRSQMPYVVEGYRLWDKVLYKGQECFVSGRRASGSFTLKKLDGTRISKGVTFKKLRLLEPATNYLIERM

SEQ ID NO: 8845 - protein, 461 aa, Parasutterella sp.; identical to SEQ ID NO: 3646

SEQ ID NO: 8846 - protein, 413 aa, Blautia sp.; identical to SEQ ID NO: 2636

SEQ ID NO: 8847 - protein, 425 aa, unidentified
  REGION 1..425: note = metagenome
MENTLKVFVLNMRGQPLMPCSPPKARKLLRAGKAVPVRRTPFVIQLTVPTGETKQPITLGVDAGYKHVGLSATTAKEELLASEVELRQDVTGLLSNRLALRRARRNRKTRYRAPRFDNRVRSKHKGWLAPSVENRIQAHISRIEAVCRVLPITKIVIETASFDIQKIKNPEVEGTDYQQGEQLGFWNVREYVLFRDGHVCQACKGRSKDLILNVHHIESRKTGGDAPGNLITLCEACHKAYHAGKLKQFSPRRGASFRAETFMGIMRWTVLNRLRERHPELPVTNTYGYLTKHKRIVAGLPKTHCADAFCIAGVLDAKRRGEYLFQKQTRRHNRQIHKLTILKGGVRKRHQAPYLVHGFRLFDKVLCKGEVGFIFGRRSSGAFDVRRLNGTKISAGISYKKLSLLEKRKMFLTELRKEGRDSSRV

SEQ ID NO: 8848 - protein, 306 aa, unidentified
  REGION 1..306: note = Human gut metagenome
LAPSVEVKIQEHITSIKRVCRILPVSKVVIETAEFDLQLLKAIEEGKPVPQGEDYQQGEMYGHYNVRQYVLWRDGYTCQCCGAHATKKKEVRLHVHHLESRKVDGDAPDNQVTLCESCHEKLHKGLIAEKDFKKRKRKSTRDATFMGIMRKTLMQRLCSELPIPVIETRGYITKATREKLLVLPKSHTNDALAIAQGKQGFNVGYLPGIVQINKIYTIRPVRHHNRQLHKATILKGGIRKSNQTEKYVFGYCLFDKVQFNGQDCFIWGRRTTGIFTIKTINGKMIKDGISFKKLKLVEKSTSYLIA

SEQ ID NO: 8849 - protein, 424 aa, unidentified; identical to SEQ ID NO: 3351
  REGION 1..424: note = Human gut metagenome

SEQ ID NO: 8850 - protein, 439 aa, Moorena sp.
MVYVLSIDTAPLMPTNNAKAKVLLKTNKAKVKQVKPFTIQLTYKTDTEYTQDVTLGVDSGYLNIGFSAVTEQKELISGEVKLLQNMKERITDRAMYRRNRRQRLRYRKPRFDNRKIEKEWLAPSIQHKLDSHIRFIEKIKSILPITKIILEVANFDIQKIKNPDIQGPEYQQGKQLGFWNLREYILHRDNHTCQNPDCKNKSENPILETHHIIFRSNGGTNTPSNLITLCSKCHTCANHKKGKFLDLWQTTKPKIRSFKDSTFMSMVRWRLKDMIDCEITYGYITKNNRIELGLEKTHYNDAFCIAEGTTQLRSNPIVYTQVKRNNRSLEKYYDAQYIDTRTNQKASASELNCGRRTRNKNENRENLKIFRGTKLSKGQRRIRKQRYFYQPNDLVKYNDKVYTVKGSQNYGRYVALKEIKKVPKIDLLIPYRFRKGFVC

SEQ ID NO: 8851 - protein, 470 aa, unidentified
  REGION 1..470: note = Human gut metagenome
MSVFVVGLNGCRLMPTSERKARLLLKQGKAFVEQKVPFTIRLNYKTGSTTQLGYLGIDTGSQHIGVSVVREDGIVLHKEEIGLRDSMSKRKLLEAKASLRRGRRYRKTRYRHPKWRPKTKRVYCEVPDRKGRHWQKKKITFTSKRPKGWLPPSLQSKTDHHIRWIKKLQDLLPEGYRLSIELGRFDPARMKNPEIHGDLYQKGPQYDYENVRAYVLDRDRYTCQICKKKGGKLHVHHILYRSHGATDDPQYMVTVCSDCHSAQNHLPGGILYQWMQEQKRFSRGLRDATFMNILRKRLIRAFPEAVFTYGNVTKVDREKLKLPKSHGNDATAIALVKTGITAVKDKESVICIQQVRRKKRSLHEETPRKGRKEPNRTAARNNKNTKAVTVTKRQNKKKVSMTGCLFDRVELNGKKGWISGFTGKSCYVKDADDQYLSTSPKYKQVSLSKLRILHHCGNWIIGAKKTLGNG

SEQ ID NO: 8852 - protein, 456 aa, Halomonas sp.
MAVFVLDKKKQPLMPCSEKRARLLLARGRAVVHKRYPFTIRLKNRVGGEAQPLRLGIDPGSKTTGLALMRETEGELRHVLCLFELIHRGYQIKKALQQRAAFRRRRRSANLRYRAPRFNNRIKPKGWLAPSLQHRVDTVMAWVNRLSKSAPITGISQELVRFDTQKLESPEISGVEYQQGTLLGYEVREYLLEKWGRECAYCGTADTPLEIEHMVPRSRGGSNRVSNLTLSCHPCNAEKDSQTLTDFFATNKGLKKRLKANGLSADAQLERVQRQLKQPMRDASAVNATRWALFSALKTTDLPVAVSSGGRTKYNRQRLNIPKTHALDAACVGAFGKLYDWTEPTLTIKAMGRGSYQRTRLTKHGFPRGYLMRQKQVHGFQTGDMVRAIVPTGKKAGTHTGRVAIRKTGSFNIQAEHGAVQGISHKYCTLIQRSDGYGYYVTLFSNLTGEAGRAVA

SEQ ID NO: 8853 - protein, 465 aa, unidentified; identical to SEQ ID NO: 6381
  REGION 1..465: note = Human gut metagenome

SEQ ID NO: 8854 - protein, 427 aa, Sharpea sp.
MVYVLNQHGQPLMPTENHAKVRILLKSKKARVVKRCPFTIQLLYKSTEYTQNISLGVDAGSRHVGLSATTKDKVLFESDVELRNGIVGLLSARRQNRRARRSRKTRYREPRFDNRRRKDGWLAPSVQNKVDTHLTAIRRVHEILPVSRIIVEVASFDIQKIKNSDISGTEYQQGEQMGFWNVREYVLFRDGHECQCCHGKSKDRILNVHHIESRKTGGDAPNNLITLCETCHTGYHRGTVKLPKSIHRGMRFRDAVFMGIMRWAFYGRLKEIYPDVHLTYGYITKNTRIRHGLPKDHCIDARCISGHPDAVSYGTVYYQKKARCHNRMIHKNGILKGGIRKRNQAPYEVMGFRLFDKVKWKGRECFIFGRRSTGRMDLRLLDGAKVNASVGYKNLHLLEMRKNMLVEERRKAVPPTGKPVGFPARHL

SEQ ID NO: 8855 - protein, 311 aa, unidentified
  REGION 1..311: note = Human gut metagenome
MSVAVMSKTGMRLMPTSEYRARKLLKSKKATVYRYNPFTIQLTERETGDVQTVELCMDTGYLHIGTSVKSEKHEYLGVQIDTLTDEKQKHDACRMYRRQRRSRKRYRQSRFNNRKRSDGWIAPSLEHKKDIHIQTISRICNAMPITNITLEMGNFDTQVLKALEENRPLPQGTDYQHGERYGIATLREAVFARDKYTCQCCRKTIADGAILHVHHIIYRSRGGTNRMSNLATVCDRCHTPANHKPGGRLYNWKPKIASFKGATFMTAVRWKMYNEVKSKFSDINIHITYGAETKEQRRLLISPNRTSMMLL

SEQ ID NO: 8856 - protein, 431 aa, unidentified
  REGION 1..431: note = Human gut metagenome
MPDKVYVISRLGHPLMPCSPANARHLLDDKKAKVVKRMPFTIRLLYGSTKYIQPIILGVDAGSKTIGLSASTAKEEVFAAEVMPRNDVVENLSTRREFRRARRNRTTRYRKPRSDNRVRSNHERWLAPSVKVKIQEHITSIKRVCTILPISKVVIETAEFDLQLLKAIQEGKPIPEGEDYQKGEMYGSYNVCQYVLWRDNYTCICCGVRGTPKNPVRLHVHHFESRKYGGNAPDNHGTLCDDCHKKFHLGIITDVKLKTRRRQSTRDAAFMGIMRKTLMWRLRTELFIPVAETKGYITKATREKLLVLPKSHTRDALAIAQGRHGFGIKEYAYVEPANHIYTVRPVRHHNRQLHKASILKGGIRKRNQASKYVFGFRLYDKVLYQGKACFVWGRRTSGTFLLRTIDGIKVKDGVSYRNLTLLERSSNYLIA

SEQ ID NO: 8857 - protein, 442 aa, unidentified; identical to SEQ ID NO: 4522
  REGION 1..442: note = Human gut metagenome

SEQ ID NO: 8858 - protein, 457 aa, unidentified
  REGION 1..457: note = Human gut metagenome
MDAVAVISASGKPLMPTNPVRARKLIKKGKAVIYKYRPLFTIRLTERTDGDIQTIEYCCDTGYQHIGLSIKSRKHEYVNEQRDLLPNETERHNGSRKYRKARRRRKLRHRACRRDNRHDNQICKDGYAPSIRNKRDQHISLYRSYTEILPVGRAVFEMGQFDTQVLKAIEKGEPLPQGKDYQHGERYGYATLREAVFARDSYTCICCGKNAFKDKRILCIHHLGFRIGDRTNRLANLATVCTKCHTPKNHQPKGKLYNLKPELKDFKGATFMTMVRWDMLDKLKAVSKGIRVDVTYGAVTKEARRDLKIKKSHANDAYCMGSFHPSHRTDLKRYEKCRRNNRVLSKFYDATYIDIRDGKKKKANALGCNRTKRRESRRSEKNERIYRGKKVSKGRIVLRTKRAVIRPGDIVYVGKKKYIVASSKNLGKQLKLADGSLLTTSKVTKIIHCGGWKTVTL

SEQ ID NO: 8859 - protein, 465 aa, unidentified
  REGION 1..465: note = Human gut metagenome
MNTCVCVLSNNGERLMPTFRLGKVRHLLKDGKAKIVKHHPFTIQLLYNSKTNIQPIEICEDVGYNYIGISVKSESYEYVSAQYDTLQDEKEHHDDCRKMRRARRNRLRYRKPRFDNRKRSEGWLAPSLEHKKQLNISLVERYVSVIPITHATVEVGSFDTMLLQAIQKGEAKPEGADYQEGPRYNLATLREAVFYRDNYACQVCGRKITDGAILHMHHMFYWKGRHGYKLDELVTACEKCHTPANHQKGGKLFGFGEDKEFADLSGAAFMNAVRWQIVNALHTTYSKEFVTITYGAMTKEKRIALQLEKSHNNDAYAMGEFHPSRRCAFEHYEKVRRNNRILEKFYDSRYIDIRTGKETAGKELFNGRISRNHKKDSENLHKYRGKRVYKGHRALMRKKINLNPGDVVSLNGETLVVHGTHTDKKGAVNVEFKAPAKNGQKSASLKKLKIVKTANSMHSAWEKVS

SEQ ID NO: 8860 - protein, 448 aa, Moorena sp.; identical to SEQ ID NO: 8365

SEQ ID NO: 8861 - protein, 546 aa, Streptomyces sp.
LIANVLRHTRQEVTRSPTHGDTPGSRDETAHGHPATARGTGGTHGRGETGGPSARVRRRHAEVTAPAVAEAANGDGDVPTGCDTYAGGTGAARVFVLSKDGKPLMPCHPARARELLGKGRAVVARQAPFAIRLKDRTHSESDVDGVQLRVDPGSKGTGFALTDEKMETDSCGRNVVVRRGLVTVELRHRGDQIQRSMQQRAGYRHRRRSANCRYRPRRSQNRARAQGWLPPSLQHRVDTTASLVTRMCRYAPVSEIHLEHVAFDTHSMSAGRALRGADHQHGSLVGTHARAYLRTKWGSACAYCGATDVPLNIDHLQPRSRGGSDRISNLVLACVPCNQAKGSRPVAVFLAHEPERLAKVLKQVRVPLRDAAAMNTTRWGLLGALTALGLPVRCWSGSLTRQNRTATGLPKTHSLDALCVGALGREARNAIVRVPGHLLVLNAVGRGSYARTTPDRFGFPRLRRARGKQHFGFISGDLAQATVPSGKWAGTWVGHIAVRARGQHSLATPVGRINVSHRNLRLLQRGDGYSYARRDVIVEDPCEKSA

SEQ ID NO: 8862 - protein, 451 aa, Marinobacter sp.
LENDMAVFVLDRQKNPLMPCSEKRARLLLTRKRAVVVRAYPFTIRLKDRAGGVVQKVILKIDPGSKETGLAVSRVSAQGEYVLCLIELIHRGRQIRKALDQRRGFRSRRRGQLRYRAPRFNNRTKPKGWLAPSLQHRVDTTTSVIKRLRALVPVTSVSQELVRFDLQQMENPEISGVEYQQGTLLGYEVREYLLEKWGRECAYCGETDTPLEIEHIVPKSNGGSNRISNLAIACHDCNKEKDTQTLAVFFQTSKRLKDKQPRLSQVLIQCKRPLRDAAAVNSTRWALFQSLKNTELPVDVGTGGQTKFNRQRLGIPKTHALDAACVGVVEHVFDWEKPTLRIKATGRGSYKRTRLTKHGFPRGYLMREKSVYGFQTGDMIRAIVPTGKKEGIWLGRVAIRKTGSFNIQTSSGAVQGISHRHCQLMQRADGYGYHLQPTPQKGGGKQESLSC

SEQ ID NO: 8863 - protein, 415 aa, unidentified
  REGION 1..415: note = Human gut metagenome
MVYVLDKNGQPLMPTDRHRKVRLMLQSGQAKVIKRCPFTIQLTYNTGHQAQEISLGIDAGSKHIGVSATTKTRVLYEADVELRNDIVDLLSSRRELRRGRRNRKTRYRPARFDNRRREDGWLAPSIRQKIGTHLTVVENICKILPISRITVETASFDIQKIKNPDIQGAEYQQGDQLGFWNNREYVLFRDNHTCQCCKGKSKDKILNVHHIESRKTGGNAPNNLITLCEICHTGYHKGAIQLPKTVKRGMRFKDAAFMGIMRWAFYEALKQQYEPVALVHNTYGYITKHTRIEHNLPKEHYVDARCISGNPDAFPSGEYYYQKKVRCHNRQIHKLTILKGGIRKQNQATYLVKGYRLFDKVSYQRKEYFVFGRRKSGFFDIRTLSGKQVNKGSLSCKKLKFIATRMYYLIERRAV

SEQ ID NO: 8864 - protein, 423 aa, unidentified; identical to SEQ ID NO: 3951
  REGION 1..423: note = Human gut metagenome

SEQ ID NO: 8865 - protein, 456 aa, unidentified
  REGION 1..456: note = Human gut metagenome
MSTCVCVLSNSGERLMPTFRLGKVRRLLKDGKAKIVKHHPFTIQLLYDSKTNTQPIEICEDVGYNYIGISVKSKSHEYVSAQYDTLQDEKEHHDDCRKMRRTRRNRLRYRKPRFDNRKCDKGWLAPSLEHKKQLNISLIERYVSVIPITHATVEVGSFDTMLLQAIQKGKAKPESADYQKGPHYNLATLREAVFYRDNYTCQICKRKIADGAILHMHHMFYWKGRHGYQLDELATVCEKCHTPANHQKGGKLFSFGEGKEFADLSGAAFMNAVRWQIVDALYTTYDKEFVTITYGAMTKEKRIALQLEKTHNNDAYAMGDYHPACRCKFRHYQKRRRNNRVLEKFYDATYIDARTGNKAKGKELFNGRINRNHKKDSENLHKYRSKKVSKGRRSIRRRRYAIQSYDTVRLEGKTYITSGCHNKGTRLLIPVNGKSKSVAISKVQVVCHAGAWIQII

SEQ ID NO: 8866 - protein, 420 aa, unidentified
  REGION 1..420: note = Human gut metagenome
MQYVYVLSKHGEPMMPCSPGKARLLLKRQKACVVRRTPFTIKLLYGSAGYKQPITLGVDAGSKHVGLSASTEKRELYREEFTPRNDVVELLSTRRQNRRSRRNRKTRYRAPRFDNRVHSKHKGWLAPSVEVKIQEHITIIKRICKILPISLVRVETAEFDTQRLKAMLAGKPLPVGTDYQLGEMYDEYNVRQYVLKRDNYTCQCCGAHTTAKKLVKLHVHHLESRKTGGNAPSNLVTLCTTCHKNLHKGRVTLDGKERGKPLRDAAFMGIMRKTLMARLKEELPIPVQGTYGYITKMRREQNDIKKSHTNDARCISKHPLAEPCSVCYRTKAIRHHNRQTHKANFSKKGIRKRSQMPYLVEGYRLWDKVLYKEQECFVSGRRSSGSFTLKKLDGTSVSKGVTFKKLRLLEPATNYLIERM

SEQ ID NO: 8867 - protein, 479 aa, Acidithiobacillus sp.
MFVFVMDQYGRPGHPTRRMDWVRKQLKRKRAKLVGGGISGKPAVLVLREQSFNRNETVNRQFFVTLDTGFRNIGYAVTEWLVNGTLRVLLKGTLAARTPEIRGLMDERAMYRRTRRYNRRVNVKKKGQSPKHRPPRYESRGKRDSVTLKHGLETHRNLYARLARLVPLPNHQVTQGFESVFFDLRALAHGKPRTGSGYQVSPLGKGTGEKTHRFVVRRDGGCVICGSRDRLQDHHLRKRSKQGSDRASNRVTLCEDCHADVHAGLIALPITDGTQWRDASAVNAVCGKLRKQSMVLNIVPVPVVQSVAARRRLGLEKTHALDAVSVAAAMTGAGRVDQQDAVNLDLTQYRRHRRAHIHAQRDRRYYLPGVSAPVAHNRRKRCDQGDVDSLAEFRKKRPADVGRLTVRKSVRLYTPNRAKAPAVGGDVWTWRGKSFVVQGIKNRGRYLHSAELQPLVEKTYVPVSQAKRYLRNTGMVPCR

SEQ ID NO: 8868 - protein, 470 aa, unidentified
  REGION 1..470: note = Human gut metagenome
MSVFVVGLNGCRLMPVSERKARLLLKGGKASVYRKVPFTIKLNYKTGSTVQPGYLGIDTGSQHIGVSVVRKDGTVLHKEEIGLRDSMSKRKLLESRASSRRGRRYRKTRYRHPKWKPKTKRIYNEKADRKGRHWKKQKNTFTSKRQAGWLPPSLQSKTDHHIQWIRKLLDLLPEGYRLSIELGRFDPARMKDPEIHGELYQKGPQYDYENVRAYVLARDGYTCRVCKKKGGKLHVHHILYRSRGASDNPKYMAAVCSKCHTTENHLPGGILYQWMQDQKKFTRGLRDATFMNILKKRLRKAFPDAVFTYGNITKADREKLELPKSHGNDATAIALVKTEVKSVKDEEPVIHIQQVRRKKRSLHEETPRKGRKEPNRTASRSDKNTKSVTVTKGSGEKKASMTACLFDRVELDGKKGWITGFTGTSCYVKDKEDNYICTSPKYKQVSISRLRILHHCGNWAIGAEKPLGKG

SEQ ID NO: 8869 - protein, 411 aa, unidentified
  REGION 1..411: note = Human gut metagenome
LRVFVLNKRGKPLMPCSPAKARLLLKEKKAIVKRRTPFTIQLTIATGETKQPVGLGVDAGYKHVGLSASTDKAELYASQVELRQDITDLLSARRALRRARRNRKTRYRAPRFNNRIRTKRKGWLAPSVENRINAHLSRIEAVLRLLPVTKITVETASFDMLLLKNPDIAGKEYQEGEQLGFWNVREYVLFRDGHVCQHCYGRSKDPVLNVHHLESRRTGGDSPGNLITLCETCHEALHRGEIALKTKRGHSFRAEAFMGMMRWEVLNRLKASHSELEVNNTYGYRTKHARIVNGIDKSHCADAFCIAGNLGAERLCEFFFQKQTRRNNRQIHKLSILKGGIRKRNQAPFEIKGFRLFDKVACKGEESFIFGRRSSGYFDVRKLDGTRISAGISCKKLRLLEKRRTYLTEIR

SEQ ID NO: 8870 - protein, 325 aa, unidentified
  REGION 1..325: note = Human oral metagenome
MDSRRMYRRSRRNRKTRYRKCRFLNRGNSVKVGRYCPTIVSKCYGHEREIAFCKKILPIKDLIFETGKFDTQLMEKPWLQEHKWAYQKGVNYGYANAREHALVRDNYTCQCCGKKNCRVEVHHIVFRRNGGSDSLENLITLCGDCHKSVHLGEIDLKLKGKRRGTLRYTTQMSTIRCMLLRKYPDVIETFGFVTKANRENLGLKKDHYIDACVIASGGLEFEQLGVLYQKKCVPTQSRVLTKGARDEKKIPTGKVHGFKRYDKVKYLGKTCFVKGRRVRGGFVLMDITGDTLDFRNIGGKQNPSYKYIKRISARRGILCITSAMY

SEQ ID NO: 8871 - protein, 465 aa, unidentified; identical to SEQ ID NO: 4641
  REGION 1..465: note = Human gut metagenome

SEQ ID NO: 8872 - protein, 431 aa, unidentified
  REGION 1..431: note = Human gut metagenome
MDAWDIIVILNKRGKPLMPCSPAKARLLLKEKKAIVARRTPFTIQLTIATGEAKQPVSLGVDAGYKHVGLSASTEKAELYASEVELRQDVSDLLSARRALRQSRRSRNTRYRAPRFDNRIRTKRKGWLAPTVENRINVHLSRIETVLRLLPVTKITVETASFDTQLLKNPDIAGKEYQEGEQLGFWNVREYVLFRDGHVCQHCHGRSKDPVLNVHHLESRRTGGDSPGNLITLCETCHKALHRGEIKLKAKRGRSFRAETFMGIMRWGVLNRLKASHPKLEVHNTYGYRTKHARIANGIAKSHCADAFCIAGNFGAKRLGEFFFQKQTRRNNRQIHKLSILKGGIRKRNQAPFEVNGFRLFDKVACQGEEGFIFGRRSSGFFDVRKLDGTRISAGISYKKLHLLEKRRTYLTEIRKEEALLALPEGRSLRA

SEQ ID NO: 8873 - protein, 456 aa, unidentified
  REGION 1..456: note = Human gut metagenome
MNTCVCVLSNNGERLMPTFRLGKVRRLLKDGKAKIVKHHPFTIQLLYDSKTNKQPIEICEDVGYNYIGISVKSESHEYVSAQYDTLQDEKEHHDDCRKMRRARRNRLRYRKPRFDNRKRSEGWLAPSLKHKKELNVNIVKMYCAVMPITHATVEVGSFDTMLVKAIQEGKAIPEGADYQKGPRYNLATLREAVFYRDNYVCKVCGRKATEGAILHMHHMFYWKGRHGYKLDELVTACEKCHTPANHQKGGKLFGFGEDKEFADLSGAAFMNAVRWQIVNALHTTYSKEFVTITYGAMTKEKRIALQLEKSHNNDAYAMGDFHPVHRCGFRHYQKRRRNNRVLEKFYDATYIDTRTGNKAKGKELFNGRISRNHKKDSENLHKYRSKKVSKGRRSIRRRRYAIQPYDTVRLEGKTYITSGCHNKGTRLLIPVNGKSKSVAISKVQVVCHAGAWIQII

SEQ ID NO: 8874 - protein, 428 aa, Moorena sp.
MQNYVLVIDTDKQPLNPISPKKARRLLDKGKAAVFRMYPFTIILKAAIANPTISPCQIKIDPGSKVTGFALVQDDQVIWGMELEHRGGLIKKKLESRSGVRGGRRNRNTRYRKPRFLNRKRPEGWIPPSLEHRVLTIETWVRRLTKFCPVNEIWIEIVKFDTQKMQDPEINGVEYQQGELAGYEVREYLLEKWGRECAYCGKQNIPLQIEHIHPKSKGGSDSAKPTLRERVSNLCLACEKCNQRKGNRPIEEFLKKKPGLLQKIKNKALSPLRDAAAVNTTRNKVVKVLNEIKPVVTGTGAQTKYNRTKLGLPKQHWIDAACVGDVEALVLRTYQPLVVTCKGQGGRQKAALNKYGYPIRHNPLKPIKGWSSGDIAKNLLTGEFGRVNPRSKSNSFNYTVPGKKAISLHVKNLLRVHRKDGYTYGFCR

SEQ ID NO: 8875 - protein, 332 aa, unidentified
  REGION 1..332: note = Human gut metagenome
LRVFLEQTRKTADAGYKHVGLSASTEKAELYASQVELRQDITDLLSARRALRRARRNRKTRYRAPRFDNRIRTKCEGWLAPSVENRINAYLSRIEAVLRLLPITKITVETASFDTQLLKSPDIAGEEYQKGEQLGFWNVREYVLFRDGHVCQHCHGRSKDPVLNVHHLESRRTGGDSPDNLLTLCETCHKALHRGEITLKTKRGQSFRAQAFMGIMRWVVLDRLKASHPKLEVQNTYGYRTKHARISNGIAKSHCADAFCIAGNLGAERLGELFFQKQTRRNNRQIHKLSILKCGIRKRNQAPFEAKGFRLFDKVARKGEEGFIFGRRSSKT

SEQ ID NO: 8876 - protein, 414 aa, unidentified
  REGION 1..414: note = Candidatus Thiomargarita nelsonii
MLVFVLNQHSKPLMPCKPSKAKKLLKASKAKVVNRTPFTISLLFGSSGYKQPITAGMDTGSQKIGVAAIANGQVIYQSEIEIRQDISKKMQQRQMYRRTRRGRKTRYRPARWLNRASMRQNGRLAPSVQSKVHSHLREKRFVESLLPVTAWHVETAHFDIHKIVNPDVSGKAYQEGEQKGFYNVKAYVLHRDGYKCKSGQKGNHSKKLHVHHIQFKSNGGTDIPSNLITLCETCHDALHLGEFELKTRKTKTKHATEMGIIKSQLIKSDWDFAETFGYETKFKREQVLQLPKTHYNDAIAISCEEGELVKPLGQVLYKKHIAKGDYQQTTGKRSEKTIPTGKLFGLKKFDLVSTSFGIGFIKGKRSSGYFALMDIFNNTVTASVNVKKYCQRLTARTGTLIQEVAIPPLSPIGT

SEQ ID NO: 8877 - protein, 512 aa, unidentified
  REGION 1..512: note = Human gut metagenome
MSTVYVLNKDGKPLMPTTRGGHVRHLLKEQKARVVRTKPFTIQLLYETDDVVQPLYLGIDPGRTNIGVAVVKTDGTAVFTAHLETRNKEIPKLMQGRKKARRTRRTNGRRCRRQRRAKANGTISKKCVKQTTAQNGSVSKCAKEIGVIKRHLPGCEKDVLCVGIKNKEAKFSNRTRQEGWLTPTANQLLQTHINLIKKIRKFLPISNVVLEINKFAFMRLDNPNIQKWQYRQGPLYQKASLEEAVSEMQEHHCLFCKKPIAHYHHVVPQSENGSNTIGNIVGLCTKHHDLVHKDTTWQKKLAKKKTGLNKKYGALSVLNQIIPALTKELSSLFPKHFFATNGKSTYDYRAAHSVSKDHWLDAYCIACSVLANDVCDSNINSRVPYELKQFRRHDRRALNNENMSRVYTLNGKVVATNRHKATKQTTDSLEEFRQNHSDDVCKLKVKEHHPTYRNMNRNYPGSVFLIGKQVHVMQGIAGSKNGEATTYKDTNANSIAAGKCKFVAKNSGILFV

SEQ ID NO: 8878 - protein, 442 aa, unidentified; identical to SEQ ID NO: 3333
  REGION 1..442: note = Human gut metagenome

SEQ ID NO: 8879 - protein, 424 aa, Enterococcus sp.
MRVFVRNMQGKPLMPCSNRKARLLLKEGKAKIYQYNPFTIQLCYASREYVQECHIGIDTGTKHIGMAVTSEDKVLFKGEIELRQDVKSNLDTRRSYRRDRRNRKTRYRKARFLNRKKKESWLPPSIENRINHTFKWINKLVALLPNPKLHIEVGKFDVAKMINPNVQGVDYQHGQTYGFYNVRYFVFARDNYTCQCCKKSKNKILQTHHIVYRSNGGSNRADNLITVCTDCHTYENHQKGGILYQWQENRKKTKQYKEPPFMNVLRKRIFTQYPNAIITYGSETTPKRKELGLEKTHYNDAIVISGITKIKENPNEWLLIKQFRKKKRSLHEATARKGRKEPNRLQKRNAKNTPYYKGFYLNDKVRVFNQVGHITGFTSGGAYIKNSENEYITLPNKSYKQIGISNIRLLHHNNNWQYIHKHIA

SEQ ID NO: 8880 - protein, 449 aa, Allochromatium sp.
MAVFVLDKQKKPLMPCTEKRARLLLERGRAVVVRLAPFTIRLKDRIGGALQPLRLKLDPGSRVTGLALVRESETCDPDTGAIDRLEHGLWFGELAHRGQIIREALTLRRHFRRARRSRKTRYRAPRFLNRPRRAGWLPPSLQHRLDTTVNWVQRLRRLAPITALSQELVRFDTQAMQNPEISGVEYQQGELAGYEVREYLLEKWRRTCAYCGATHVPLEIEHIVPRAKGGSDRVSNLTLACRPCNQRKGNRSIEDFLQRQPARLHQIQAQAKAPLQDAAAVNATRWALFAALTATGLPVETASGGRTKYNRTRLDIPKTHALDALCVGAVDQVRDWNRPVLAIRATGRGAYRRTRTFNNGFPRGYLMRHKRIHGFQTGDWVRAEVPTGKKAGVHVGRVAVRQTGSFNIQTQAGTVQGISYRHCRLLQRADGYGYSFKLKPEMEAARRAA

SEQ ID NO: 8881 - protein, 432 aa, unidentified; identical to SEQ ID NO: 4691
  REGION 1..432: note = Human oral metagenome

SEQ ID NO: 8882 - protein, 502 aa, unidentified
  REGION 1..502: note = gut metagenome
MAIIYVQDCHGKPLAPTTRGGHVRRLLDSKQARVVCSNPFTIRLVYEVDPCTQRFILGIDPGRTNIGVAVVAADGDCVFSAKAETNNKDVPKRMKERKSQRKASRQGERKRRQRRARINGTCFDERKRILPGCKEPITNHYITNTEARFMNRARPKGWLTPTANQLLQSTISLVRKGCKLLPITDVVLELNKFAFMAMDNPGIQRWEYQKGPLYGYGSVEAAVYAQQDGHCIFCEQAIANYHHVIPVSKGGSDTLENRAGLCGCHHDLVHKEQSWADKLAELKAGMNKHYAALSVLNQIILRLADELGKMFPGHAFATNGWSTKQFRDAHGIPKDHNTDADCIACSILENPTIKLPEKVYELRKFRRHDRAQISRMEDRNYYLPGADPKTGKPKKVLAAKNRHKRTEQKTDSLEEFRAAHPNDVGRLMVARGGPKHKDPNRVLPGAIFQVETSSGNVEQLVLQGSHGRDKNGQPLYLEFVGQGNFRPNRCKYVARGRGWQFV

SEQ ID NO: 8883 - protein, 414 aa, Parasutterella sp.
MPCSPAKARLLLKEKKAIVVRRTPFTIQLTIATGEAKQPVSLGVDAGYKHVGLSASTEKAELYASEIELRQDITDLLSARRELRRARRNRKTRYRAPRFDNRIHTKRKGWLAPSVENRINAHLSRIEAVLRLLPVTKITVETASFDMQLLKNPDISGKEYQEGEQLGFWNVREYVLFRDGHVCQHCHGRSKDPVLNVHHLESRRTGGDSPGNLITLCETCHKALHRGEITLKAKRGQSFRAEAFMGIMRWEVLNRLKASHPELEVNNTYGYRTKHARISNGIAKSHCADAFCIAGYLGAKRLGKFFFQKQTRRNNRQIHKLSILKHGLRKRNQAPFEIKGFRLFDKVASKGEEGFIFGRRSSGYFDVRKLDGTRISAGISYKKLHLLEKRQTYITEIRKEKALPPLPEGRGLRA

SEQ ID NO: 8884 - protein, 379 aa, unidentified
  REGION 1..379: note = Human gut metagenome
VNESNNIQKLSEYGMIAPDGTWYPCEFGELRYRKPRFDNRKRDEGWLAPSLEHKKQLNISLIERYVSVIPITHATVEVGSFDTMLLQSIQKGEAKPEGADYQKGPRYNLATLREAVFYRDNYTCQVCKRKITDGAILHMHHMFYWKGRHGYQLDELVTACEKCYTPANHQKGGKLFGFGKDKKFANLTGAAFMNAIRWQIVNALYATFGKEFVTITYGAMTKEKRIALQLEKSHNNDAYAMGKLHPSRRCTFVHYEKIKRNNRVLEKFYDATYIDARTGNKAKGKELFNGRISRDHKKDSENLHKYRNKKVSRGRRSIRRQRYAIQPYDTVRLEGKTYITSGCHNKGTRLLIPVNGKSKSVAISKVQVVCHAGAWIQII

SEQ ID NO: 8885 - protein, 502 aa, Moorena sp.; identical to SEQ ID NO: 2616

SEQ ID NO: 8886 - protein, 413 aa, unidentified; identical to SEQ ID NO: 3476
  REGION 1..413: note = Human gut metagenome

SEQ ID NO: 8887 - protein, 406 aa, unidentified; identical to SEQ ID NO: 2752
  REGION 1..406: note = Human gut metagenome

SEQ ID NO: 8888 - protein, 439 aa, Bacillus sp.
MMAYVISLSGKPLDPTHPAKARKLVRKGKANVLQVNPFTIQLTYETTEYTQDITLGIDSGYQHIGFSAVSEKKELISGELHLLQGMTNRIEERRSYRRTRRRRLRYRQPRFDNRKRIEGWLAPSIQHKLDSHIRFIKKMKTLLPIKNVIIEVANFDIQKIKNPDISGVDYQQGEQMGFWNVREYVLHRDHHKCQNPNCKNKAKEPILQVHHIVYRDNGGSDAPSNLITLCTKCHTSANHKKGKFLYEWQINKPKLNRFKDSTFMSMVRWRLAAIEGTKTTYGYITKNSRIQFNLEKTHYNDAYVIAGGSTQLRCEPIHYQQVRRNNRSLEKFFDAKYIDVRTGGKSTGKELDSGRRTRNKNENSENSRVYRREKISNGQRRIRTQRYFYQPNDLVRFEGQICRVVGTMNKGKSVKLDIGKSPNPAKLTPYKFAKGMVAI

SEQ ID NO: 8889 - protein, 433 aa, Scytonema sp.
MSKVFVLNTDKRPLDPVHPAQARQLLRNKKAAVFKQFPFTIILKESCPDTAVQPLRIKIDPGAKATGLAIVNDSTGEVIFAAELQHRGFAIRESLTSRRQLRRSRRNRKTRYRQARFHNRKRPNGWLPPSLMSRVYNIETWTKRLCKLAAITAISQELVRFDTQLMQNPDIKGKEYQQGTLAGYETREYLLEKLARKCAYCDKQDVPLQIEHIHPRAKGGSNRISNLTLSCEKCNIKKGTKALKDFLDKEPERLKKIEAQIKKPLADTAAVNATRFKLLEVLKCTELPVETGSGGLTKFNRTKLALPKTHYFDAVCVGESTPDKLIIKGVKPLIIKATGHGSRQMAVTDKLGFPKSHKTRSKFHFGFRTGDIVKANVLKGKNAGIHLGRVSTRKTGQFDIHTGTKKVQIINQKYCKILHRHDGYLYSLSSIVH

SEQ ID NO: 8890 - protein, 429 aa, Lyngbya sp.; identical to SEQ ID NO: 3068

SEQ ID NO: 8891 - protein, 418 aa, unidentified
  REGION 1..418: note = Human gut metagenome
MVYVINKQGQALMPTERFGKVRRLLKNGLAHVMYRIPFTIQLDYDTTNFIQPISLGIDAGSKHIGISATTSEKELYAADVELRNDIVEKLSTRREQRRTRRNRLRYRRARFNNRVSSKRKGWLAPSIENKIQTHLTVVEKIHKFLPITNIIVETAAFDIQKIKNPSISGKEYQQGEQLNFFNVREYVLHRDGHQCQHCKGKSKDPILNVHHIESRKVGGNSSQNLITLCESCHKAYHKGEIELEVKRGTSFRDSAFMSTMRWSFYKKLKNIYPNVSMTFGYITKHTRITNGLSKSHYVDARCISGNPTAKPLEYYFYQKKVRCQNRQIHKANFLKGGRKKLNQAPYLVKGYRLFDLVEYQKDLYYIFGRRGSGFFDIRKLDGTKVNKGSLSCKQMRLIDIRKTIIIEKRMQGAISPIN

SEQ ID NO: 8892 - protein, 420 aa, unidentified; identical to SEQ ID NO: 4588
  REGION 1..420: note = Human gut metagenome

SEQ ID NO: 8893 - protein, 424 aa, Petrotoga sp.
MLVYILNKYGKPLMPCKPSKARKLLKDGKAKVVRKEPFTIQLLYGSSGYKQPITLGIDAGSKTVGLSATTENKELFAAEVEIRDDIPKLISQKRQYRRDRRFRKTRYRKPRFLNRVHSKNKGWLAPSVEHKIKSHIKLIDLVHSILPITKIVVEVASFDIQKIKNPNIEGKQYQQGEQLDFWNVREYVLWRDNYTCQHCKGKSKDKRLNVHHIESRQIGGNAPSNLITLCETCHKDYHDGKIKLDFKRGQKFKGATSMNIMRWTLYNRLKDLYSNVHLTYGYITKNTRIQNSLTKTHIIDALCISGHPQAKQLEYYYHIKEVRRHNRQIHKANILKGGTRKLNQAPYLVHGFRLFDKIKYNGIECFIFGRRSTGYFDIRKLDGTVIHRSAKSKDLILVSKTKTLLWERRENSAFLSSLKRASAS

SEQ ID NO: 8894 - protein, 414 aa, unidentified; identical to SEQ ID NO: 2588
  REGION 1..414: note = Human gut metagenome

SEQ ID NO: 8895 - protein, 397 aa, Desulfurobacterium sp.
MLKTKQMKVFVVDAEVKPLLPTTPARARILLKKGKAKVYRMISFTIQLNRTVDNAAGEFTAAVDDGAKWIGIAVKGKNEVVFTANVRLRQDVSRKVKERAMYRRTRRSRLRHRPIRFLNRKRAKDWLPPSIRYRKEVVLRVLNDLQKFLNITKVVIEQVKFDVSSLIAGRKLTGTEYQQKRYEGKSFREKVLKRDNYTCQICEKKENLEAHHIIPRSKGGTNFVENGITLCKDCHRAVHEGRIRITANVLSLKAPSIVQQGKLWLYRKLKELFEKVEITFGYLTRKKREELGLPKDHYADACAMLNCNKILSPVYFIIPRRRRPEINNPTKKHDEYRGFRHFDLVVAYHRTKRKVVGCVRSLKKSGLAIRTKFSDNFVAGYTKSKLLWRPRRLVYVL

SEQ ID NO: 8896 - protein, 496 aa, Streptomyces sp.; identical to SEQ ID NO: 4777

SEQ ID NO: 8897 - protein, 495 aa, Moorena sp.
MSTTLARGESGGSMAGEVIHQRRHKVMAYVAVLSASGKSLMPTTAYKARKLLKSGRAKIYSYRPLFTIQMQDREEGTTQPIEMKVDTGAQYIGVSVCSEKHEYWNRRYDMLPNEKEMHDEARKNRRNRRQKLRYRAPRFDNRTHGHNRKEDKWFTPSLKHRENIHIQLAAKICAVVPVTDAYFEMGQFDIQVLKAYEAGKPIPVGDDYQKDERYGYATLREAIFARDNYTCQVCGAKLDDKHHPILRMHHIGYWKHDHSNRMGNLMTVCIKCHTAANHKPGGKLYGLEPELPTFKGAAFMNTVRWNMFTQLKKTLPNVKCHITYGAMTKLKRSELNTRKTHSNDAYCMGTLHPKWRTDFQHYQKVRRNNRVLSKFYDAQYIDTRDGEKMSGAQLSCGRTKRSESRHSIKNLRGYRGRRATSKGKKPKISKGHISTRRHKYAFNTGDIVIVQGKKLTVSGTQHYGEYVVFRDKTHVAAKAKEVTMYRHGDGWVRVV

SEQ ID NO: 8898 - protein, 397 aa, unidentified
  REGION 1..397: note = Human gut metagenome
MSTCVCVLSNSGERLMPTFRLGKVRRLLKDGKAKIVKHHPFTIQLLYDSKTNTQPIEICEDVGYNYIGISVKSQSHEYVSAQYDTLQDEKACHDSCRKLRRTRRNRLRYRKPRFDNRKRGEGWLAPSLKHKKELNVNVVKMYCAVMPITHATVEVGSFDTMLVKAIQEGKAIPEGADYQKGPRYNLATLREAVFYRDNYTCQVCGRKIADGAILHMHHMFYWKGRHGYQLDELVTACEKCHTPANHQKGGKLFGFGEDKEFANLSGAAFMNAVCWQIVDALHATYGKEFVTITYGAMTKEKRIILGIEKTHNNDAYAMGDYHPVHRCVFRHYQKRRRNNRVLEKFYDATYIDTRTGNKAKGKELFNGRISRNHKKNSEDLHKYRSKKVSKGRRSIRR

SEQ ID NO: 8899 - protein, 448 aa, Clostridium sp.
MVYVISINNKPLMPCTPAKARILLKQNKAIVKELKPFTIQLTYKTKTEYTQEITLGVDSGYNNVGFSAITNDKELLVGEIKLLQGMKERLSERAMYRKQRRSRLRYRKPRWNNRIKSKPKGWLAPSLQHKLDSHIKFINYLYSILPITKCIVEIANFDIQKIKNPDIQGEEYQQGEQLGFWNLREYILHRDNHKCQNPNCKNKSKNPILEVHHIKYKSLGGQDSPSNMITLCNKCHTSPNHKKGRFLYDWCQEDKKVRGFKDATFMSMIRWYLVNQLKEKYNNVSFTYGYITKNHRITNNIEKSHCNDAFCIAKGINQIRNNEVWNITQVRRNNRSLEKFYDAKYIDIRNGKKVSGSELNNGRRSRNKNYNTKNLHEYRGQKVSRGQRRIRKDKYFYQPNDLVKYEGRIYTVKGTQNKGKYVALKEVKKVPKVELLASYKFNNGFVWS

SEQ ID NO: 8900 - protein, 470 aa, unidentified; identical to SEQ ID NO: 2825
  REGION 1..470: note = Human gut metagenome

SEQ ID NO: 8901 - protein, 431 aa, unidentified
  REGION 1..431: note = gut metagenome
MPNKVYVINKHGRPLMPCSPAKARHLLDAGKAKVKKRTPFTIQLVYGSSGYTQEVILGVDAGSKTIGVSALTKKEELFAANVIPRNDVVDLLSTRREFRRARRNCKTRYCKPRFDNRVRSKHKGWLAPSVEVKIQGHITAIRRVCGILPVSKVVVETAEFDLQLLKAIEKGKPVPQGEDYQQGEMYGHYNVRQYVLWRDNYTCQCCGAHATKKKEVRLHVHHLESRKVGGDAPSNLITLCDSCHEKFHKGIITAANLKKRKRRSMRDATFMGIMRKTLIQRLRAELTIPVAETRGYITKTTREKLLVLPKSHTNDALAIALGKHGFNVGYLPEIAQIDKIYTIRPVRHHNRQLHKATILKGGIRKSNQTGKYVFGYRLFDKVQFNGQDCFIWGRRTTGIFTIKTINGKMIKDGISFKKLKPVEKSTSYLIA

SEQ ID NO: 8902 - protein, 420 aa, unidentified
  REGION 1..420: note = metagenome
MQYVYVLNRHGEPMMPCSPGKARLLLKQQKACVVKRTPFTIKLLYGSAGYKQPITLGVDAGSKHVGLSASTEKRELYSEEFTPRSDVVELLSTRRQNRRSRRNRKTRYRVPRFDNRVHSKHKGWLAPSVEVKIQEHITVIKHICKILPISLVRVETAEFDTQRLKAMLAGKPLPVGTDYQLGEMYDEYNVRQYVLKRDHYTCQCCGAHNTAKKVVKLHVHHLESRKTGGNAPSNLITLCTTCHENLHKRKVTLDGKERGKPLRDAAFMGIMRKTLMARLKEELPIPVQGTYGYITKMRREQNDIKKSHTNDARCISKHPLTEPCSVCYRTKAIRHHNRQTHKANFSKKGIRKRSQMPYLVEGFRLWDKVLYKGQECFVSGRRSSGSFALKKLDGTSISKGVTFKKLRLLEPATNYLIERM

SEQ ID NO: 8903 - protein, 431 aa, unidentified
  REGION 1..431: note = Human gut metagenome
MPNKVYVINKHGRPLMPCSPAKARHLLDAGKAKVKKRTPFTIQLVYGSSGYTQEVILGVDAGSKTIGMSVSTTKEELLSAEVKPRNDVVDLLSTRRESRRARRNRKTRYRKPRFDNRVRSKHKGWLAPSVEVKIQEHITAIRRVCGILPVSKVVVETAEFDLQLLKAIADGKPVPQGEDYQQGEMYGHYNVRQYVLWRDGYTCQCCGAHATKKKEVRLHVHHLESRKVGGDAPDNQVTLCESCHEKLHKGLIAEKDFKKRKRKSTRDATFMGIMRKTLMQRLCSELPIPVVETRGYITKATREKLLVLPKSHTNDALAIAQGKQGFNVGYLPGIVQINKIYTIRPVRHHNRQLHKATILKGGIRKSNQTEKYVFGYRLFDKVQFNGQDCFIWGRRTTGIFTIKTINGKMIKDGISFKKLKLVEKSTSYLIA

SEQ ID NO: 8904 - protein, 442 aa, unidentified; identical to SEQ ID NO: 3333
  REGION 1..442: note = Human gut metagenome

SEQ ID NO: 8905 - protein, 338 aa, unidentified
  REGION 1..338: note = Human gut metagenome
LKHKKELNVNVVKMYCTVMPITHATVEVGSFDTMLVKAIQEGKVIPEGADYQKGPRYNLATLREAVFYRDNYVCKICGRKATEGAILHMHHMFYWKGRHGNSLNELLTVCEKCHTPANHQKSGKLYGFGEKIKFADLSGAAFMNTVRWQIVNELYVAFGKPFVTITYGAMTKEKRIALQLEKSHNNDAYAMGEFHPNLRCMFEHYEKARRNNRILEKFYDSRYIDIRTGEIATGKELFNGRINRNHKKDSENLHKYRGKRTYAGHRALLRKKVNLNPGDLVSLNGENLIVHSTHTKKNGAVNVEFETPAKSGQKSASLKKLKIVKAANSIHPAWKKIS

SEQ ID NO: 8906 - protein, 512 aa, unidentified; identical to SEQ ID NO: 8756
  REGION 1..512: note = Human gut metagenome

SEQ ID NO: 8907 - protein, 408 aa, unidentified; identical to SEQ ID NO: 7674
  REGION 1..408: note = Human gut metagenome

SEQ ID NO: 8908 - protein, 428 aa, unidentified
  REGION 1..428: note = Human oral metagenome
MKGVMLMVYVLSLDGQPLMPIRRHGKVRRLLNSKKAKVVCKEPFTIQLLFDTEKNVSCLTLKVDTGSKYVGAGVTDDNACVYYVSEVEIRNDIHMKMERRAMYRRARRNRKLRYRKARWLNRHNSIKKDRFSPTITSKFNSHIREIEYVKSILPISELVLETGTFDPNLLNHKDEAFNRHWGYQKGPNYGFKNSQEACFNRDSYKCQCCKTKKGTLNAHHIIYRSNGGADTLDNLITLCKDCHKKLHGGELQEFESKLVGKKKGQLKHATQMNSIRIQLLKYYPNATETFGFITKANREWLGLEKTHWMDTVSMGLTTQPIFLVDRVYKNKHIAKWQYQLYQGQNSNKKLPRGKVCGFLNKDIVEYRNQLYLIKGLMSTGYCRLSNIDGIEQKFENPKTVKLNACKRVSARSTTRCISQKIVPNIAIA

SEQ ID NO: 8909 - protein, 417 aa, unidentified; identical to SEQ ID NO: 5520
  REGION 1..417: note = Human gut metagenome

SEQ ID NO: 8910 - protein, 470 aa, Anaerostipes sp.; identical to SEQ ID NO: 2949

SEQ ID NO: 8911 - protein, 512 aa, unidentified
  REGION 1..512: note = Human gut metagenome
MSTVYVLNKDGKPLMPTTRCGHVRRLLKEQKAQVVTSKPFTIQLLYETDDVVQPLYLGIDPGRTNIGVAVVKIDGTAVFTAHLETRNKEIPKLMKKRKDSRRARRTNGRRCRRQRRAKANGTISKKCVKQTTAQNGSVSKRAKKIGVIKRHLPGCEKEVLCIGIKNKEAKFSNRARPEGWLTPTANQLLQTHINLVKKIQKFLPISDVVLEINKFAFMRLDNPNVQKWQYQQGPLYQKASLEEAVSEMQEHHCLFCKNTIDHYHHVVPQHKNGSNTIGNIVGLCAKHHDLVHKDTSWQEKLAKKKTGLNKRYGALSVLNQIIPALTKELSSLFPKHFFATNGKSTYDYRAAHGVSKDHWLDAYCIAGSVLPNDACDNNINSHVPYELKQFRRHDRRALHKENMSRVYTLNGKSVATNRHKAIKQTTDSLEEFRQRQPNDVCKLKVKEHHPEYRNPKRNFPGCVFLVGKHTHVMQGTSGSHNGKADGYYDTNGNSYSSGKCKFVAKNKGIVFA

SEQ ID NO: 8912 - protein, 418 aa, unidentified; identical to SEQ ID NO: 4327
  REGION 1..418: note = Human gut metagenome

SEQ ID NO: 8913 - protein, 413 aa, unidentified; identical to SEQ ID NO: 2636
  REGION 1..413: note = Human gut metagenome

SEQ ID NO: 8914 - protein, 457 aa, unidentified; identical to SEQ ID NO: 3236
  REGION 1..457: note = metagenome

SEQ ID NO: 8915 - protein, 428 aa, unidentified
  REGION 1..428: note = Human gut metagenome
LEIILKVAVLSMRGQCLMPCSPRKARVLLREKKAVVKQKSPFTIQLTIPTGETKQEVTLGVDAGSKHIGISATTAKTELFASEVELRQDVTGLLADRRALRRSRRARKTRYRAPRFNNRVRSKHKGWLAPSIENRIQAHLSRIEAVLKLFPVTKIVIETASFDIQKIKNPAITGKGYQQGELLDFFNLREYILWRDNHTCQHCKGKSKDKVLQVHHLESRRTGGNATNNLITLCKTCHEKSHTGEITLNIKRGRSFKDAAFMNIMRPAFVARLRKAHPGMLIEETYGYITKYQRIKLKLPKTHCADAFCIAGNLHATRSDVYLYQKQTRKHNRQIHKVNAIKGGIRKLNQAPYIVKGFRLFDKVKCFGKKCYGKEGFIMGRRQDGGFDIRTIDGQHISKSVSPKKLKLIQKRKTFLTAIKKEGASSPV

SEQ ID NO: 8916 - protein, 470 aa, unidentified
  REGION 1..470: note = Human gut metagenome
MSVFVVGLNGCRLMPVSERKARLLLKGGKASVYRKVPFTIKLNYKTGSTVQPGYLGIDTGSQHIGVSVVQKDGTVLHKEEIGLRDSMSKRKLLESRASSRRGRRYRKTRYRHPKWKPKTKRTYNEKADRKGRHWKKQKNTFTSKRQAGWLPPSLQSKTDHHIQWIRKLLDLLPEGYRLSIELGRFDPARMKDPEIHGELYQKGPQYDYENVRAYVLARDGYTCRVCKKKGGKLHVHHILYRSRGASDNPKYMAAVCSKCHTTENHLPGGILYQWMQDQKKFTRGLRDATFMNILKKRLRKAFPDAVFTYGNITKADREKLELPKSHGNDATAIALVKTEVKSVKDEEPVIHIQQVRRKKRSLHEETPRKGRKEPNRTASRSDKNTKSVTVTKGSGEKKASMTACLFDRVELDGKKGWITGFTGTSCYVKDKEDSYICTSPKYKQVSISRLRILHHCGNWAIGAEKPLGKG

SEQ ID NO: 8917 - protein, 431 aa, unidentified; identical to SEQ ID NO: 5579
  REGION 1..431: note = Human gut metagenome

SEQ ID NO: 8918 - protein, 414 aa, unidentified
  REGION 1..414: note = Human gut metagenome
MPCSPAKARLLLKEKKAIVKRRTPFTIQLTIATGETKQPVSLGVDAGYKHVGLSASTEKAELYASEVELRQDITDLLSARRALRQSRRNRKTRYRAPRFDNRIRTKRKGWLAPSVENRIDAHLSRIEAVLRLLPVTKITVETASFDLQLLKNPDISGKEYQEGEQLGFWNIREYVLCRDGHVCQHCYGRSKDPVLNVHHLESRRTGGDSPGNLVTLCETCHKALHRGEITLKAKRGQSFRAEAFMGIMRWEVQNRLKASHPELEVNNTYGYRTKHARIANDIAKSHCADAFCIAGNLGAERLGEFFFQKQTRRNNRQIHKLSILKGGIRKRNQAPFEVNGFRLFDKVACKGEEGFIFGRRSSGFFDVRKLDGTCISAGISYKKLHLLEKRRTYLTEIRKEEALPPLPEGSGLRA

SEQ ID NO: 8919 - protein, 426 aa, unidentified
  REGION 1..426: note = Human gut metagenome
MVYVQNRLGQPLMPTKDHRKVRLLLDRGAAVVVKRTPFTIRLTTRSKTYVQPIILGVDAGSKTIGLSASTEAEELFAAEVTPRNDVVDNLSTRREFRRARRNRKTRYREPRFNNRVRSKHKGWLAPSVEVKIQEHITAVKRVCAVLPVGKVVVETAEFDLQLLKAVEAGLPVPRGEDYQKGEMLGHYNIRQYVLWRDGYTCRCCGTHGKGVKFHVHHLESRKTGGNAPDNLVTLCDGCHKKFHKGIITPDILKKRKCRSTRDAAFMGIMRKTLMERLRAELAIQVVETKGYITKYTRVELLKLDKTHTNDALAIAQGRRGFGVEELTTIPQSDYIYRIRPVRHHNRQLHKATILPGGIRKSNQAPRYVRGFRLFDKVSYLGEDCFIWGRRSSGSFLLKLLDGTKVKDGVGYKRISLLERSASYLIS

SEQ ID NO: 8920 - protein, 494 aa, unidentified
  REGION 1..494: note = Human gut metagenome
MDMVYVLNKDGKPLMATTRGGRVRYLLKEKKARVVSSTPFTIRLNYDTPDITQDLILGIDPGRTNIGVAVVKEDGQCVFSAHLETRNKEVPLLMKKRAAFRRNHRTLDRRRKRQRRAIAAGTTVESNTIERLLPGYEKPVVCHYIRNKEARFNNRSRPAGWLTPTANHLLQTHINLIAKIAKFLPITKVVVELNRFAFMAMDNPNIRRWEYQQGSLYGLGSVEDAVYAQQDGHCLFCKEPIDHYHHVVPRHKGGSETLANRCGLCERHHALVHKDKAWAGKLVTQKEGMNKKYHALSVLNQIIPSLMEYLGDEMLYDVYATDGRSTKGFRIAKNVPKEHYTDAYCIACSILDTNIKVSAPVEPFELKQFRRHDRQACHQQRVDRKYYLDGKQVATNRHKAIEQKSNSLEEFRETYGDAAVSQLTVKPHPPQYKDITRIMPGAVMNFCGAVGILLGSDGFHNGKPDYYKSTKEEKVRMRRCALLAQNAGMVFIPA

SEQ ID NO: 8921 - protein, 413 aa, unidentified; identical to SEQ ID NO: 4858
  REGION 1..413: note = Human gut metagenome

SEQ ID NO: 8922 - protein, 419 aa, unidentified
  REGION 1..419: note = Human gut metagenome
MVYVISQDGKPLMPCSDPIARLLLKQGKAKVKKRDPFTIKLTYETTNYTQGLTLGVDTGSGTIGTAVSKDNGDIVYMSEVVVRNDITDKMTQRAKYRRNRRNRKTRYRKARWLNRASSIKKDRFSPTMQSKLHSHVREIEYIQSILPITEMVFETGQFDMQLMKNPSLANPKVRPWGYQKGANYGFENTKAMVLNRDNYTCQCCKGKHKDSKLEVHHIVFRSQGGSDEESNLLTLCHTCHKDLHSGKINPKLSGKVKGNLKYATQMNSIRKQLFRFYPNAIETFGYVTKANRLHLGVDKEHYYDACTIATQGNAFNVKSNLYKKKCVSDGDFQKTKGIRSEQPIVTDKICGFRKFDKVRYFGNDYFIKGRMSTGYAILMDIDGNKIDFSTMPRGYKTPKLSNCKRITARSTVMTQVKVV

SEQ ID NO: 8923 - protein, 494 aa, unidentified; identical to SEQ ID NO: 5675
  REGION 1..494: note = Human gut metagenome

SEQ ID NO: 8924 - protein, 425 aa, Moorena sp.
MENTLKVFVLNMRGQPLMPCSPPKARKLLRAGKAVPVRRTPFVIQLTVPTGETKQPISLGVDAGYKHVGLSATTAKEELLASEVELRQDVTGLLSDRLALRRSRRNHKTRYRAPRFDNRVRSKHKGWLAPSVENRIQAHISRIEAVCRVLPITKIVIETASFDIQKIKNPEIEGEGYQQGEQLGFWNVREYVLFRDGHVCQACKGRSKDLILNVHHIESRKTGGDAPGNLITLCETCHKAYHAGKLKQFSPRRGASFRAETFMGIMRWTVLNRLRERHPELPVTNTYGYLTKHKRIVAGLPKTHCADAFCIAGVLDAKRRGEYLFQKQTRRHNRQIHKLTILKGGVRKRHQAPYLVHGFRLFDKVLCKGEVGFIFGRRSSGAFDVRRLDGTKISAGISYKKLSLLEQRKMFLTELRKEGRDSSRV

SEQ ID NO: 8925 - protein, 407 aa, unidentified
  REGION 1..407: note = Human gut metagenome
HLLDDKKAKVVKRMPFTIRLLYGSTKYIQPIILGVDAGSKTIGLSASTAKEEVFAAEVMPRNDVVENLSTRREFRRARRNRTTRYRKPRSDNRVRSNHERWLAPSVKVKIQEHITSIKRVCTILPISKVVIETAEFDLQLLKAIQEGKPIPEGEDYQKGEMYGSYNVCQYVLWRDNYTCICCGVRGTPKNPVRLHVHHFESRKYGGNAPDNHGTLCDDCHKKFHLGIITDVKLKTRRRQSTRDAAFMGIMRKTLMWRLRTELFIPVAETKGYITKATREKLLVLPKSHTRDALAIAQGRHGFGIKEYAYVEPANHIYTVRPVRHHNRQLHKASILKGGIRKRNQASKYVFGFRLYDKVLYQGKACFVWGRRTSGTFLLRTIDGIKVKDGVSYRNLTLLERSSNYLIA

SEQ ID NO: 8926 - protein, 423 aa, Arthrospira sp.; identical to SEQ ID NO: 3143

SEQ ID NO: 8927 - protein, 442 aa, Blautia sp.
MVYVLNKEGQPLMPTNRHGKVRRLLKTKKAKVIKRCPFTIQLLYDTTNHTQNITLGVDAGSKHIGLSATTKNKVLFEADVELRNDISKLLEARYTFRRSRRNRKTRCRKKRFDNRVSSKHKGWLAPSIEHKIQSHFAMVEKVHRILPITKIVVETASFDTQLLKAQLEGKPIPEGTDYQNGELAGWNIREYIFHRDNYTCQWCRGKSKDPVLVTHHHAYWKGDHTNKPSSLITLCNTCNDSKYHKKEANRLWGWEPKITNSYKHAVFMGVTRWTFYNRLKEIYPNVSMTYGYITKNTRIENNLPKTHYVDARCISGHPEAKSNGEYFYYKKVRCHNRQLHKANTLKGGIRKRNQAEYTVKGFRLFDRVEYQNNEYFIFGRRTSGFFDIRTLDGQKVNKGSISFKKLKLKETNKTYLIERRMADTGVSLAPLTTEVTSLRQTG

SEQ ID NO: 8928 - protein, 491 aa, Pseudomonas sp.; identical to SEQ ID NO: 3597

SEQ ID NO: 8929 - protein, 413 aa, unidentified; identical to SEQ ID NO: 2636
  REGION 1..413: note = Human gut metagenome

SEQ ID NO: 8930 - protein, 415 aa, unidentified
  REGION 1..415: note = Human gut metagenome
MPCSPAKARHLLKAGKAVVKRRTPFTIQLRIATGETKQNVTLGVDAGAKHVGLSATTEKEEVFASEVELRQDITGLLAARLSLRRDRRHRKTRYRAPRFLNRVRSKHKGWLAPSVENRIQAHMSRIDAVCRLLPVTKIVIETASFDIQKIKDPSVEGTDYQQGDQLGFWNVREYVLFRDGHVCQHCHGRSKDKILNVHHLESRQTGGDAPNNLITLCETCHKAYHAGKIKLKVKRGQSFRAEAFMGIMRWTLLDRVRKAHPGLPVENTYGYLTKHTRITHGLPKTHCVDAYCIAGNLKAVRRGVYLHQRQMRKHNRQIHKFTVLSKRLEDGTKIGYRKLNQSPYLVHGFRLFDKVRCLGQIGFIFGRRSSGYFDVRRLDGVKLSPSISWRKLTLLEKRSTYLTELRKQDGASSPV

SEQ ID NO: 8931 - protein, 408 aa, Moorena sp.
MPCSPRKARLLLKQKKAKVIKRTPFTIQLIYGSSGYKQAVSLGVDAGSRTIGLSATTVKKVLYEAEVELRNDITKLLADRRELRRSRRYRKTRYRKPRFDNRRRPEGWLAPSVRNKIEAHTKAVQMVCKMLPVTKITIEVASFDIQKLKNPEISGVEYQQGEQLGFWNVREYVLWRDGHQCQGRPGCRNKVLNVHHIESRKTGGDAPNNLITLCDQCHKDYHTGKLKLNLKRGQSFKDAAFMGIMRWMVYNRLKTIYPYVRLTYGYITKHTRIANGLEKNHRTDARCVSGNPQAQPDNTWYYFKQVRKQNRQLHKANPIKRGIWKANKAPKYLFGYQLFDKVLYEGQECFIFGRRASGYFDLRKLDGTRVSPSVSCKKLKLLERASIFLCERRNSDFLPGMNSGVSVA

SEQ ID NO: 8932 - protein, 428 aa, unidentified
  REGION 1..428: note = Human gut metagenome
LKVFVLNMRGQPLMPCSPAKARHLLKAEKAVVKRRTPFTIQLRIATGETKQNVTLGVDAGAKHVGLSATTEKEEVFASEVELRQDITGLLATRLSLRRDRRHRKTRYRAPRFLNRVRSKHKGWLAPSVENRIQAHMSRIDAVCRLLPVTKIVIETASFDIQKIKDPSVEGTDYQQGDQLGFWNVREYVLFRDGHVCQHCHGRSKDKILNVHHLESRQTGGDAPNNLITLCETCHKAYHAGKIKLKVKRGQSFRAEAFMGIMRWTLLDRVRKAHPGLPVENTYGYLTKHTRITHGLPKTHCVDAYCIAGNLKAVRRGVYLHQRQMRKHNRQIHKFTVLSKRLEDGTKIGYRKLNQSPYLVHGFRLFDKVRCLGQIGFIFGRRSSGYFDVRRLDGVKLSPSISWRKLTLLEKRSTYLTELRKQDGASSPV

SEQ ID NO: 8933 - protein, 423 aa, unidentified; identical to SEQ ID NO: 2741
  REGION 1..423: note = Human gut metagenome

SEQ ID NO: 8934 - protein, 420 aa, unidentified
  REGION 1..420: note = Human gut metagenome
MQYVYVLNRHGEPLMPCSPGKARLLLKQQKACVVKRTPFTIKLLYGSAGYKQPITLGVDAGSKHVGLSASTEKRELYREEFTPRNDVAELLSTRKQNRRSRRCRKTRYRAPRFDNRVHSKHKGWLAPSVEVKIQEHITIIKRICKILPISLVRVETAEFDTQRLKAMLAGKPLPVGTDYQLGEMYDEYNVRQYVLKRDHYTCQCCGAHNTAKKVVKLHVHHLESRKTGGNAPSNLITLCTTCHKNLHKGKVTLDGKERGKPLRDAAFMGIMRKTLMARLKEELPIPVQGTYGYITKMRREQNDIKKSHTNDARCISKHPLAEPCSVCYRTKAIRHHNRQTHKANFSKKGIRKRSQMPYLVEGFRLWDKVLYKGQECFVSGRRSSGSFALRKLDGTSISKGVTFKKLRLLEPATNYLIERM

SEQ ID NO: 8935 - protein, 456 aa, unidentified
  REGION 1..456: note = Mouse gut metagenome
MGTLHLLASWCPWRHSWQVSGFILAAILMGRRASWMPYVLNQHGHPLMPCSPAKARHLLKDGKAKLMKRAPFTIQLLYGSSGYRQDVTLGVDAGSKHIGLSAVAADGQEVFAAEVTPRNDIVGNLSTRREFRRARRNRKTRYRKPKFNNRVRSKHKGWLAPSVEVKIQEHITVICRVCRLLPVTKVVDETAEFDLQLLKTIADGKSVPQGEDYQKGEMLGSYNVRQYVLWRDGYTCQCCGKHGHGVKLHVHHKESRKTGGDAPDNQTTLCDSCHEKFHKGVITLDKLKKRGRQSTRDAAFMGIMRKTLMLRLRQQLDIPVCETRGYITKYTRGERLHLPKSHINDALAIAIGPNGAQSVARADQRYTIKPVRHHNRQLHKATTLKGGIRKSNQAPKYVKGFRLFDKVLFEGMECFIWGRRSSGSMLLRRLDGSKVKDGAGFRKLTLLERSSYYLVS

SEQ ID NO: 8936 - protein, 392 aa, Moorena sp.; identical to SEQ ID NO: 7999

SEQ ID NO: 8937 - protein, 416 aa, unidentified
  REGION 1..416: note = Human gut metagenome
MVYVLGQDGHPLMPTCRHGKVKRMLKSRMAKVVKKCPFTIQLQYESTTHTQKINLGIDAGSKTIGVSATTETKVLYESEVALRNDIVELISGRRALRSSRRNRKTRYRKPRFDNRKRPDGWLAPSVRQKIETHITVVENVMKILPVTKIIVETASFDIQKIKNPEIEGVGYQHGEQLDFWNVREYVLFRDGHTCQCCKGKSKDNILNVHHIESRKTGGNAPSNLITLCETCHKAYHKGIITLPKEIHRGMRFRDAAFMGIMRWAFYDRLKELYNLLGVEVINTYGYITKNTRITYDLPKEHYVDARCISGNPAAKPMDYYYLQKKVRCHNRQIHKCKINKGGTRKRNQAAYEVKGFRLYDQVLWKGQKCFIFGRRSTGRMDLRLLDGTHVNASVGYKNLKLLSMRKNYLIEQRKAG

SEQ ID NO: 8938 - protein, 426 aa, Moorena sp.; identical to SEQ ID NO: 3294

SEQ ID NO: 8939 - protein, 403 aa, unidentified
  REGION 1..403: note = Human gut metagenome
MYRLITEAGIPLIPERLHDTKKRKEASRMSEYIYVIGVDGDPQMPTKRKRHVEQLLQTGRARIFRQIPFTIQLTYENKPVLQPVTIAEDPGRSNIGMAVVSLSGELLSAAVVQTRNKEIVKLMEKRKQHRRASRNGERKARQRLAKKCHTMIKTGFLMRKLPMYGKDKRVRCNVIKNTEAKFCNRKREDGWLTPSAEHLVRTHINLIHKMQKFLPITDVAIEINRFAFLSLEDPSISGVDFQNGPLKGYDDLNAAVEALQDGHCLMCNSPIEHRHHIVPRSMQGSNTIGNIAGLCCKCHERVHKDSAFEDSLKKKKAGLNKRYAAVSALNQAIPFICKRLEQEFGKEHVHYCSGRDTSMVRRSLGYHKTKEEQLHEVDAWCIAVLSLQQIPEKAPSFDHVHEI

SEQ ID NO: 8940 - protein, 431 aa, unidentified
  REGION 1..431: note = Human gut metagenome
MPNKVYVINKHGRPLMPCSPAKARHLLDEGKAKVKKRTPFTIQLVYGSSGYTQEVILGVDAGSKTIGMSVSTTKEELLSAEVKPRNDVVDLLSTRREFRRAQRNRKTRYRKPRFDNRVRSKHKGWLAPSVEVKIQEHITAIRRVCGILPVSKVVIETAEFDLQLLKAIADGKPVPQGEDYQQGEMYGHYNVRQYVLWRDGYTCQCCGAHATKKKEVRLHVHHLESRKVDGDAPDNQVTLCESCHEKLHKGLIAEKDFKKRKRKSTRDATFMGIMRKTLMQRLCSELPIPVIETRGYITKATREKLLVLPKSHTNDALAIAQGKQGFNVGYLPEIAQIDKIYTIRPVRHHNRQLYKATILKGGIRKSNQTKKYVFGYRLFDKVQFNEQDCFIWGRRTTGIFTIKTINGKMIKDGISFKKLKLAEKSTSYLIA

SEQ ID NO: 8941 - protein, 464 aa, unidentified; identical to SEQ ID NO: 6330
  REGION 1..464: note = Human gut metagenome

SEQ ID NO: 8942 - protein, 442 aa, unidentified; identical to SEQ ID NO: 5957
  REGION 1..442: note = Human gut metagenome

SEQ ID NO: 8943 - protein, 470 aa, unidentified
  REGION 1..470: note = Human gut metagenome
MSVFVVGLNGCRLMPTSERKARLLLKQGKAFVEQKVPFTIRLNYKTGSTTQLGYLGIDTGSQHIGVSVVREDGTVLHKEEIGLRDSMSKRKLLEAKASLRRGRRYRKTRYRHPKWRPKTKRVYCEVPDRKGRHWQKKKITFTSKRPKGWLPPSLQSKTDHHIRWIKKLQDLLPEGYRLSIELGRFDPARMKNPEIHGDLYQKGPQYDYENVRAYVLDRDRYTCQICKKKGGKLHVHHILYRSHGATYDPQYMVTVCSDCHSAQNHLPGGILYQWMQEQKRFSRGLRDATFMNILRKRLIRAFPEAVFTYGNVTKVDREKLKLPKSHGNDATAIALVKTGITAVKDKESVICIQQVRRKKRSLHEETPRKGRKEPNRTAARNNKNTKAVTVTKRQNKKKVSMTGCLFDRVELNGKKGWISGFTGKSCYVKDADDQYLSTSPKYKQVSLSKLRILHHCGNWIIGAKKTLGKG

SEQ ID NO: 8944 - protein, 415 aa, unidentified
  REGION 1..415: note = Human gut metagenome
MVYVISKENKPLMPCSNAIARLLLKQGKAKVKSKQLFTIKLLYETTNYTQDLTLGVDTGSGTIGTAVSTNNSKIVYASEVVIRNDITDKMTQRAKYRRNRRNRKTRYRKARFLNRKNSIRADRFNPTMVSKLYSHVKEIEYIKSILPIKTLVLEIGQFDPHLMQNPELKYKPWGYQKGKNYGFANTKEMVLNRDNYTCQYCKGKRKNSKLEVHHIIYRSNHGSDDENNLITLCQTCHKLLHNGEIKLNLKGKSKGTLKYATQMNSIRKQLLRIYPEAIETFGFVTKDNRLNINVDKHHYLDACVIATGGKEFQICCNIYKKRCISKGDFQQTKGVRSEQKLNTKKICGFRKFDKVKYFGKEYFIKGRMSTGYAVLMDIEGKKIDFSDMPKGYKSVKLNNCKRISARKSQLITLYS

SEQ ID NO: 8945 - protein, 425 aa, unidentified
  REGION 1..425: note = metagenome
MPTHNGAKVRVLLKQKRAKVVSKCPFTIKLLYESTSFTQPLTLGVDTGSKYVGSAVINDTTSEIIYEAQTELRGDIKSKMDRRRQFRRARRNKLRYRPARFNNRKSSKRENRYSPTLMSKFQGHVREIKFVMSILPIKDVVLEVGEFDPQLLQDPTLAFHKWDYQRGELYQQENFKQAAKARDDYKCQCCGKKNCRLEVHQLLPRSRGGSDKLVNLITLCSDCHHLAHSSEEQLLSFQKKFGKKARGTLKYATQMNVLRHMLQKEYPDFELTYGFVTKEMRRVFCLEKSHMIDACCIASRGVIFKNENFNEYKKKCVPKGNYPRTGVHGCKFVILPKGKIAGFKRYDKVLYNNKEYFIVGRVSIGYIYLIDIDNNRVQTKITKRSTGEKHMSKAKIKVSLAKKVASAKSCVCTRIFQIERTTHIV

SEQ ID NO: 8946 - protein, 465 aa, unidentified; identical to SEQ ID NO: 8068
  REGION 1..465: note = Human gut metagenome

SEQ ID NO: 8947 - protein, 438 aa, unidentified
  REGION 1..438: note = Human gut metagenome
MFFLAAPKRKEASMRMLNVFVLNRHGRPLMPCTPAKARRLLKAGKAKVKKITPFTIQLLYGSTGYTQEVILGVDAGSKTIGISCGTKDKELFSGEVIPRNDVVEKLSTRREFRHARRNRKTRYRQPRFNNRVKSKHKGWLAPSVEVKIQEHITVIKRICNLLPVSKVIVEGAEFDLQFIKAVEEGKPVPQGEDYQKGEMLGHYNVRQFVLWRDGYKCYNCGAHKDVDLRAHHLESRKIGGDAPNNLITLCKKCHDLFHKGAIQLEPHRGTSYRDTTFMGIMRKTLFSRLRAELNILVYETRGYITKYTREYQMHLPKSHVNDALAICHGPHGFNDGEKAIVERAPHVYLIKPVRHHNRQLHKATILKGGIRKSNQSPKYVKGFRLFDKVRYDGQDCFVWGRRTTGSFLLRKLTGEKVKDGVGYKHLKLLERSQSYLIA

SEQ ID NO: 8948 - protein, 512 aa, unidentified; identical to SEQ ID NO: 4031
  REGION 1..512: note = Human gut metagenome

SEQ ID NO: 8949 - protein, 524 aa, Moorena sp.
MEILRIDWKDICPTGQSGLPQKELFMRPVYVLDMNGKPLMPTCRFGKVRRMLKSGEAKVVDTLPFTIQLDRPTKTHVVQSVTLGCDPGRTNIGLAAVRSDGTDLYRSHCETRNKEIVDLMDTRRAARRASRRGERLTRKRLAAKHETATTFPDGRKLPGYEKPIMLKDIINTEARFNNRVRPAGWLTPTATQLLRTHLNLIKRISRILPVSDIALEINKFAFMQLDEPDKNKWNIDFQHGPLYGTGGLKAVVRQLQNDTCLLCQENVIEHFHHLIPRSKRGDNTINNIAGLCQRCHEAVHKSADTAEKLSTLKKGQTKRYGGTSVLNQIIPKLVEELGKTYHEHLHLTYGWQTKEFRTKHKLEKTHDTDAYCIAAGTMQTVKPNIRTDVYEIKQFRRHNRANIHHQTERTYKLNGQTVARNRRKRTDQKTDSLAEWFENTVKQYGQQKAEHLRAGLKVRKSTRYYNSKDRVMPGAVFQYEGNRYVVTGQLSGGQYYRAYGKGNHNFPVKKIRIISLNRGLVYVA

SEQ ID NO: 8950 - protein, 427 aa, Parasutterella sp.; identical to SEQ ID NO: 3787

SEQ ID NO: 8951 - protein, 449 aa, Allochromatium sp.; identical to SEQ ID NO: 5642

SEQ ID NO: 8952 - protein, 424 aa, Enterococcus sp.; identical to SEQ ID NO: 8320

SEQ ID NO: 8953 - protein, 428 aa, unidentified
  REGION 1..428: note = Human gut metagenome
MQYAYVLNKRGEPLMPCSPGKARILLKQQKACVVKRTPFTIKLLHGSAGYKQPITLGVDAGSKHVGLSASTEKRELYSEEFTPRNDVVELLSTRKQNRRSRRNRKTRYRAPRFNNRVHSKHKGWLAPSVEVKIQEHITVIKRICRILPVTLVRVETAEFDTQRLKAMLAGKPLPVGTDYQLGEMYDEYNVRQYVLKRDNYTCQCCGAHTTAKKTVKLHVHHLESRKVGGNAPSNLITLCTTCHNNLHKGKITLDGKKRGKTLRDAAFMGIMRKTLLARLHEELPIPVQGSYGYITKMRREQNDIKKSHVNDARCISKHQLAEPCSVCYRTKAIRHHNRQTHKANFSKDGIRKRSQMPYVVDGYRLWDKVLYEGQECFVSGRRASGSFTLKKLDGTRISKGVTFKKLRLLEPATNYLIERIRTGNSSHD

SEQ ID NO: 8954 - protein, 456 aa, unidentified
  REGION 1..456: note = Human gut metagenome
MSTCVCVLSNSGERLMPTIRLGKVRRLLKDGKAKIVKHHPFTIQLLYDSKTNTQPIEICEDVGYNYIGISVKSQSHEYVSAQYDTLQDEKACHDSCRKLRRTRRNRLRYRKPRFDNRKRGEGWLAPSLRHKKELNVNVVKMYCAVMPITHATVEVGSFDTMLLQAIQKGESKPEGVDYQKGPRYNLATLREAVFYRDNYTCQVCGRKIADGAILHMHHMFYWKGRHGYQLDELVTACEKCHTPANHQKGGKLFGFGEDKEFANLSGAAFMNAVRWQIVNALYATYGKEFVTITYGAMTKEKRIILGIEKTHSNDAYAMGDYHPAHRCVFRHYQKRRRNNRVLEKFYDATYIDARTGNKAKGKELFNGRINRNHKKDSENFHKYRSKKVSKGRRSIRRQRYAIQPYDTVRLEGKTYITSGCHNKGTRLLIPVNGKSKSVAISKVQVVCHAGAWIQII

SEQ ID NO: 8955 - protein, 536 aa, unidentified; identical to SEQ ID NO: 4526
  REGION 1..536: note = Human gut metagenome

SEQ ID NO: 8956 - protein, 472 aa, unidentified
  REGION 1..472: note = Human gut metagenome
VVGNNLLSIKPLINIGEGVIYSSICTGLSLQTYQKRKEVPYMVYVLDIDGQPLMPTTRHGKVRRLLNNHLAKVVKRCPFTIQLLYQSTKETQPVSLGVDAGSKHIGMAATTEKKVVYQEELSPRNDVVKLLSARRALRSSRRSRKTRYRKPRFNNRVHSKHKGWLAPSVEVKIQEHITAIKRICQILPISDIHVETAEFDLQRLKAMEEGRPLPVGTDYQLGEQYDFYNTRQYVLHRDGYTCQCCGTHDNNIKLHVHHIESRQTGGDAPNNLIILCEHCHKALHEGKLELPKGKKRGKSYRDVTFMGVMRKTLLERLKKEIDVPVEGTYGYITKYWRERAGLEKSHIHDAVCISKYPYAKPLDIYYLTKTVRHHNRQIHKSNFSKGGIRKRNQAPYLVKGFRLFDKVLYQGKEYFIFGRRATGYFDIRTLDGTKVNKGSISYKKLRIQDTAKAYLKEARAIPHMNKFTCVLA

SEQ ID NO: 8957 - protein, 420 aa, unidentified; identical to SEQ ID NO: 6806
  REGION 1..420: note = Human gut metagenome

SEQ ID NO: 8958 - protein, 423 aa, Moorena sp.; identical to SEQ ID NO: 5719

SEQ ID NO: 8959 - protein, 539 aa, Nocardiopsis sp.
MAEGRLYQHQPSPSKEVTLMATFRVGPKTHPGVLPQRQALESESADAPRIGHETGLRHRRQAVPGADHVRGETTSTSPGAGGVTSNPVGKQGREAHTKKTQAYVFVLDQNGVPLQPCHPARARKLLTKKRAVVARHTPFTIRLTDRTAAESEIDGVEIGIDPGSQHTGIAVFTARAGERRGRYALQLDHRGAQIKKKLGQRAGYRRRRRSANLRHRAPRFSNRARPRGWLAPSLRHRVETTTSWVDRLCRWAPVRGVHVERLAFDTHALSAGKPLEGVEYQQGTLAGFEVREYLLAKFDRACVYCGATNVPLNLDHVYPRSRGGSDRVSNLVLACVPCNQTKADRPVEEFLSGKPQTLARVLGQARTPLRDAAAAQSTRWALWRALDQRLPTHVGSGGRTKFNRTRNQLPKTHTLDALAVGKVEAITRIVARVMVAGCAGRGRYARTAPDRHGFPRLRAARQKQYFSFTTGDLVRAVVPSGKRAGTHTGRVLVRARGSFDITTGHGRQAGINHKHIRLLQRADGYAYTFRKEEGVSSRP

SEQ ID NO: 8960 - protein, 439 aa, unidentified
  REGION 1..439: note = Human metagenome
MVVVIDKHKRPCNTISAAYARILLFSKQAVIYKRFPFTIRLRNDNAVLKNRNYTIKIDPGSRTTGIAITDNQDSVVMLANLEHRGHIIKKNLDSRRAVRNSRRQRKTRYREARFDNRTRPKGWLAPSVKSRADNVINFVKKYKKFLNITKVMIERVSFDTAQMSSDEKLWGIDYQQGNLYNKNLKEFIFSKTKGRCSYCGGKATEIDHVIPRSNGGTNSTYNLVASCRSCNEKKSNLSLKEFGKLMNKDYSQLEPKKLPKDATIVQSARNYMVKEIAKLVPDTTTHDAWLTKYNRDQLGLPKQHYYDALSVGETPTKFNFLTDKILQISAKGRGSRQMCSMDKFGFPRTSAKASKSVKGFQTGDIVKAIVPFGSKAGEYLGKVAVRSSGSFNIQTKTKVIQGIGYRYCHIVQRSDGYSYDYKERDFLSDINNRASVAII

SEQ ID NO: 8961 - protein, 470 aa, unidentified; identical to SEQ ID NO: 2825
  REGION 1..470: note = Human gut metagenome

SEQ ID NO: 8962 - protein, 439 aa, Aeromonas sp.; identical to SEQ ID NO: 5240

SEQ ID NO: 8963 - protein, 442 aa, unidentified
  REGION 1..442: note = Human gut metagenome
MVTVQQSTHHLPFGRVFIRRNLFMVYVISQDGKPLMPCSDPIARLLLKQGKAKVKKREPFTIKLTYETTNYTQGLTLGVDTGSGTIGTAVSKDNGDIVYMSEVVVRNDITDKMTQRAKYRRNRRNRKTRYRKARWLNRASSIKKDRFSPTMQSKLHSHVREIEYIQSILPVTEMVFETGQFDMHLMKNPSLANPKVRPWGYQKGANYGFENTKAMVLNRDNYTCQCCKGKHKDSKLEVHHIVFRSQGGSDEESNLLTLCHTCHKDLHSGKINPKLSGKVKGNLKYATQMNSIRKQLFRFYPNAIETFGYVTKANRLHLGVDKEHYYDACTIATQGNAFNVKSNLYKKKCVSDGDFQKTKGIRSEQPIVTDKICGFRKFDKVRYFGNDYFIKGRMSTGYAILMDIDGNKIDFSTMPRGYKTPKLSNCKRITARSTVMTQVKVV

SEQ ID NO: 8964 - protein, 300 aa, unidentified; identical to SEQ ID NO: 6603
  REGION 1..300: note = Human gut metagenome

SEQ ID NO: 8965 - protein, 442 aa, unidentified; identical to SEQ ID NO: 2834
  REGION 1..442: note = Human gut metagenome

SEQ ID NO: 8966 - protein, 442 aa, unidentified; identical to SEQ ID NO: 8056
  REGION 1..442: note = Human gut metagenome

SEQ ID NO: 8967 - protein, 479 aa, Acidithiobacillus sp.; identical to SEQ ID NO: 8867

SEQ ID NO: 8968 - protein, 461 aa, unidentified; identical to SEQ ID NO: 4910
  REGION 1..461: note = Human gut metagenome

SEQ ID NO: 8969 - protein, 419 aa, unidentified; identical to SEQ ID NO: 5677
  REGION 1..419: note = Human gut metagenome

SEQ ID NO: 8970 - protein, 554 aa, Streptomyces sp.; identical to SEQ ID NO: 8725

SEQ ID NO: 8971 - protein, 406 aa, unidentified
  REGION 1..406: note = Human gut metagenome
MVYVQDINGKPLMPTTRHGKVRRLLKDKKAVVVNLCPFTIKLMYVTSDYKQEIVLGIDAGTKHVGLSATTKSKELYSSEVILRNDIVDLLSTRRELRRTRRNRLRYRKPRFDNRIKSRRPGWVAPSVRYKVDAHIRVIDNVCSILPISRIVVEVAQFDTQKIKNPEISGKEYQEGDQLGFWNVREYVLARDGHKCQYCKGKSKDHVLNVHHIESRKTGGNSPSNLITLCETCHKEYHKGNIDLKIKRGSSLRDAAVMGIMKWKLYEELRSRYNRVSMTFGYVTKYNRINHDIEKSHVSDAFVISKNFDAIRLGYYYKVRLVRRHNRQIHKQKIPKGGIKRLNQSPFEVFGFRLFDRVMFENNCYFIFARRKTGSFNIRDINGKNKRDITYKKLKLSRCKRFMIEKS

SEQ ID NO: 8972 - protein, 423 aa, unidentified; identical to SEQ ID NO: 4024
  REGION 1..423: note = Lachnospiraceae bacterium UBA7767

SEQ ID NO: 8973 - protein, 442 aa, unidentified; identical to SEQ ID NO: 3161
  REGION 1..442: note = Human gut metagenome

SEQ ID NO: 8974 - protein, 416 aa, unidentified
  REGION 1..416: note = Human gut metagenome
MTNCENYAFVLDAEGKQLSPTKEKKAWYLIRKKRAILVSKYPMVIQLNKIVSNDNICKDEIRCGIDDGGLHVGIALVQKCQTKNKTLFKGTIEQRNDVKHLMKVRWDYRRYRRYHKRYRPKRINNRSSSKRTDRIAPSILQKRQATLRVITQLNKWINITSYWLEDVAIDVRVLTDGFSSYGWQYQKSNRLDENIRKAVILRDGCRCMECGQSNCRLEVHHIKPRRLNGANTLGNLITLCESCHQKTEGKEEQYMQHYFNILESSDNKNLNYASYVMIGKTWLRKQLSQLGVLNLTTGGNTANKRIDWNIEKSHSNDAVCITDLQPDSCNVKDWIIKPMRRQSKAKTDNVLGIKHRDLVSYVYKNGELHIGYVTALYPELNALNFQSPTKHCKKVNVRKCRVLWKYNKIYWLDSVS

SEQ ID NO: 8975 - protein, 414 aa, unidentified; identical to SEQ ID NO: 2588
  REGION 1..414: note = metagenome

SEQ ID NO: 8976 - protein, 413 aa, unidentified; identical to SEQ ID NO: 2636
  REGION 1..413: note = Human gut metagenome

SEQ ID NO: 8977 - protein, 413 aa, Moorena sp.
MTSYSFVLDADGKPLSPTKEVKAWYMIRVGKATLVSKYPMMIQLKRSIPEDEICKDEIRCGIDDGGLHVGIALVQKCKTKNKVLFKGTIEQRNDVKHLMEVRRGYRRYHRQHKRYRKARFDNRSSSRREERIAPSILQKRQTITRVIHHLNKWINITTYWLEDVAIDIRTLTDGYKPYRWQYQKSDRLDENIRKAVILRDGCKCVECSKTNTVLEVHHIKPRRLTGSNTLGNLITLCSRCHQKTEGNEEQYMQHYFDMLNSSDNKNLNYASYVMIGKSWLRERLSELGILHLTTGGNTANKRIDWGIKKSHSNDAICITDLSPDTADVLEYTIKPMRRQSKAKTDNVLGIKHRDLVEYTFKNGETHRGYVTALYPEQTALNFQSPTKHCKKVNAKKCRLLWKYNKIYWLQNIV

SEQ ID NO: 8978 - protein, 412 aa, unidentified
  REGION 1..412: note = Human gut metagenome
MTNVKEYAFVLDAEGKQLSPMRIEKAWYKIRHNQAKLVNKYPMVVQLYKVVPEDEICKDEVRCGIDDGGLHVGIALVQRCQTKNKVLLKGTIEQRNDVKKKIEQRKMYRKHRRYYKKYREERFNNRVSSKRKGRIAPSILQKRQATMRVINQLNKWINISGYWLEDVAIDIRAMTDGYKPYAWQYQKSNRLDENIRKAVILRDGCKCMECGKSNCRLEVHHIKPRRNNGSNTMSNMITLCSKCHNKTEGKEGQFMDRYFSMINGSDNKHLNYASHVMIGKTWLREQLSNLAPLHLTTGGDTANKRIDWSIEKSHSNDAICITGLTPDIVDVKDWVLKPIRRKCKGKTGSVNGFRYRDYVQYTYRNGKTYKGYVTALYPKKNALNFKSQTKSCDGVRTNKCKLLWRFNKIYWL

SEQ ID NO: 8979 - protein, 424 aa, unidentified; identical to SEQ ID NO: 5075
  REGION 1..424: note = Human gut metagenome

SEQ ID NO: 8980 - protein, 428 aa, unidentified
  REGION 1..428: note = Human gut metagenome
MVYVLNRQGKPIMPCKEAKARKLLKQNKAKIAKHEPFTIQLLFDCENQIQDINLGIDAGSKHIGISATTEKQVLYEADVELRNDIVDKLSSRHEVRRTRRNRLRYRPARFDNRVKSKHKGWLAPSIEQKINTHIQVIKHLYEILPITNLIVETAQFDVQKINNPEISEKEYQRGEQLGFWNVREYVLHRDNHECQCCHGKSKDVILNVHHIESRKTGGDAPNNLITLCETCHKAYHKGEIKLNFKRGKSYRDAAFMGIMRKTLFNRLCVVYSNVYETYGYITKNTRIENNLPKAHYIDARCISGNPKANPLDYYIYQKCVRKQNRQIHKNNFLKGGRKKNNQLIGSIFGFELFDTVKYQNKQYFVFGKRKSGYLNIRNLDGEKVNNGSISYKKLKRIKHNSTKLTERRRQFLRAPKGDAVSLPNILWQ

SEQ ID NO: 8981 - protein, 512 aa, unidentified; identical to SEQ ID NO: 7502
  REGION 1..512: note = Human gut metagenome

SEQ ID NO: 8982 - protein, 411 aa, Sulfobacillus sp.; identical to SEQ ID NO: 7761

SEQ ID NO: 8983 - protein, 450 aa, Moorena sp.; identical to SEQ ID NO: 4205

SEQ ID NO: 8984 - protein, 424 aa, unidentified; identical to SEQ ID NO: 3351
  REGION 1..424: note = Human gut metagenome

SEQ ID NO: 8985 - protein, 430 aa, Microvirga sp.; identical to SEQ ID NO: 7723

SEQ ID NO: 8986 - protein, 442 aa, unidentified; identical to SEQ ID NO: 8268
  REGION 1..442: note = Human gut metagenome

SEQ ID NO: 8987 - protein, 443 aa, Anoxybacillus sp.
MVEENMTCFMQRKGENPMVFVLDTNKRPLAPCHEAVARKLLKQGKAAIYKRYPFTIILKEIVDNFRPKTPYRLKIDYGSKHTGLAIVRGQEVVWLGQLDHRTDIKERLDKRRAFRRARRKRKTRYRKPRFLNRRRKDGWLPPSLESRVQNIQTWVERLRKICPIEHISYENAKFDTQLMRNPEINGVEYQQGTLQGYEVREYLLEKFGRKCCYCGKEGVPLEIEHIIPKSRGGTDRVDNLCLACHDCNQRKGSKTAEEFGYPHIQEMVKKTLKDASVVNATRWKVYEVLKQSGCEVECGTGARTKMNRIRLGLPKIHYFDACCVGESTPLQLHFKTKEALFIKAKGRGSRSRTNLDKYGFPRGFLARQKFFFGFQTGDMVKAVIPRGKYQGVWFGEVSCRKTGSFDIKGKDGKRIAQGINYRYVQVIQRFDGYTYRREGMNIA

SEQ ID NO: 8988 - protein, 311 aa, Microcoleus sp.
MCKVFVLDSEKRPLDPIHSARARQLLRNKKAAIYRRFPFVIILKDSHPDSSVTTLRLKLDPGAQTTGIALVSDATGEVVFAAELKHRGFAIREALTSRRQLRRSRRTRKTRYRQPRFLNRKRSEGWLAPSLQSRVHNIKTWVKKLCKFALIAAISQELVRFDMQLMRNPDLQGKEYQQGLLAGYETREYLLEKWGRQCAYCGVKNVPFQVEHIHPRAKGGTNSVTNLTLSCEKCNTKKGTKDIKEFLKKEPRLLSQILAQAKRPLADAAAVNTTRFALLFVLKATGLPVETGSGGLTKFNRNIKTYPKLTG

SEQ ID NO: 8989 - protein, 428 aa, Sutterella sp.; identical to SEQ ID NO: 3486

SEQ ID NO: 8990 - protein, 459 aa, unidentified
  REGION 1..459: note = Freshwater metagenome
MQKLQAKLKNTPSDTSQVTCSGTSLLNRDQTSYPIIDAQCIEDVLACNDPDVNQSQNTGSLKDVFVFVISIDGKPLMPCKPAKCKRLLKSGRAKVITRFPFTIQLNFECENVTQEVNLGIDTGFGNIGFSATTEKNELICGTVILDGRTKERLEEKSMYRRGRRNRHHWYREPRFDNRSKPEGWLPPSVNRRYQTHLTLINKLKKILPVSNVTLEIAKFDIQKIENPSIEGVQYQQGDLYQYQNIRSYLMSREKGKCQFCGQDFKSQPSHIHHITPVSLGGNNRVSNLSILHKKCHDKLHKNHLEKQLKANSKGYKQSTFMSIIQKRFWKDIPDLKVTFGNITFVDRNKINLPKTHYNDAFVISGASNQPRTNPLEIKQVHRNNRVLQVNRKGFKPSIKREKSKVNPGDIFWVNKMRYVCKGMFNYGKQILFGTMKKKEYLSFAKVTNVFRFGSFVWNI

SEQ ID NO: 8991 - protein, 433 aa, Moorena sp.
MYVYVINKHGQPVMPCRHRTARVLLQKHKATVVKQVPFTIRLLYGSSGYRQPISLGMDAGSKHIGIAATTEKKVLYAEELSPRNDVVKLLSVRRQNRKTRRNRKTRYRQARFDNRVHSKYKGWLAPSVEVKIQEHISAVLRIQKMLPLSEIHVETAEFDIQRLKAMEEGKPVPVGTDYQNGEMYDQYNVRQYVLFRDDYKCQCCGRHDDGVKLHVHHKESRQTGGDTPNNLITLCKDCHKALHAGTIQLPGDKSKRGKSYRDSAFMGIMRKAMVVQLRELIDIPVTETYGYITKCHRENAGLPKSHINDAIMISRNFETVSDDTYYISKAVRHHNRQLHKNTILKGGVRKRNQAPHVVKNFRLFDLVRYENGFYYVFGRRKSGFMDIRTLDGKKVNNGSVSYKRLKVISASKGMLVERKKAIPLADSSASFLA

SEQ ID NO: 8992 - protein, 468 aa, Petrotoga sp.; identical to SEQ ID NO: 3825

SEQ ID NO: 8993 - protein, 507 aa, unidentified
  REGION 1..507: note = Human gut metagenome
MSEYIYVLGMDRNPQMPTKRKRHVEKLLQTGRARIFRQVPFTIQLTYENEPVLQPVTIAEDPGRSNIGMAVVSLSGELLSAAVVQTRNKEIAKLMEKRKQHRRASRNGERKARQRLAKKCHTMFKAGFLMRKLPMYGKDKRVKCHVIRNTEARFCNRKRKDGWLTPSAEHLVRTHINLVHKMQKFLPITDVAVEINRFAFLSLEDPSVSGVDFQNGPLKGYDNLNAAVEDLQDGHCLMCKDPIEHRHHIVPRSIQGSNTIENIAGLCCKCHEKVHKNAAFEKRLKKKKAGLDKQYAAVSVLNQAIPFICKRLEQEFGKEHVHYCSGRETAMVRRSFGYHKTKEEPLHEVDAWCIAVLSLQQVPEKAPEFDHVHKIMQFRRQDRSRIKAQTSRTYYYEGKKVAKNRKKAEGQKEDSLQEWRECQITLYGEEQARKMTSQLKVRKSIRRYNRLDRLMPGAVFYYKGTRYVMRGQHGNGRYLQAVGMGNKDFPVKDCKIVIQNEGLVFLS

SEQ ID NO: 8994 - protein, 406 aa, unidentified; identical to SEQ ID NO: 7406
  REGION 1..406: note = Human gut metagenome

SEQ ID NO: 8995 - protein, 415 aa, unidentified; identical to SEQ ID NO: 2674
  REGION 1..415: note = Human gut metagenome

SEQ ID NO: 8996 - protein, 514 aa, unidentified
  REGION 1..514: note = Human gut metagenome
MSTIYVLNKDGKPLMPTTRCGRVRHLLKEQKARVVTSNPFTIQLLYETDDVVQPLYLGIDPGRTNIGVAVVKTDGTAVFTAHLETRNKEIPKLMQGRKKARRARRTNGRRCRRQRRAKANDTISKKCVKQDTAQSGSASKRAKKIGVIKRHLPGCEKGVLCIGIKNKEAKFSNRTRPEGWLTPTANQLLQTHINLVKKIRKFLPISDVVLEINKFAFMQLDNPNIQKWQYQQGPLYQKASLEEAVSEMQEHHCLFCKKPIAHYHHVVPQSENGSDTIGNIIGLCTKHHDLVHKDTAWQKKLAKKKTGLNKKYGALSVLNQIIPALTKGLGSRFQGHFYVTTGKSTYDYREVHGVSKDHWLDAYCIACSVLPNDVCDSDINNRVPYELKQFRRHDRRALHKANINRVYTLNGKSVATNRHKAIKQTTDSLEEFRQCQPDDVCKLKVKEHHPEYRNPERNFPGCVFLVGKHTHVMQGTSGSHNGQADGYYDTNGNSYSSGKCKFVAKNEGVVFTLN

SEQ ID NO: 8997 - protein, 311 aa, Methanosarcina sp.
MPTNPAKARILLKAGKAKMVSRIPFTIKLNYNSKGYTQPVVAGMDSGSKKIGCAAVGNGKILYQSETEIRQDVSGKMQQRAMYRRTRRSRNTRYRPARFDNRRNSQREGRIPPSIRSKLESHFREKKFVESILPVTEWKVELASFDTHKITNPDVSGIGYQNGDQKGFYNLKAYVLSRDNHTCQHCKSKSKDPKLHCHHIIFRSQNGTDTPENLITLCSTCHQKLHEGKIKLFGNVSKTKHATDVGIIKSQIKKSEWNFKETFGYETKYKREQILELPKTHYNDGVAICCDFDQKVTTNPTIYFKKTCFKG

SEQ ID NO: 8998 - protein, 535 aa, unidentified; identical to SEQ ID NO: 6116
  REGION 1..535: note = Human gut metagenome

SEQ ID NO: 8999 - protein, 406 aa, unidentified
  REGION 1..406: note = Human gut metagenome
MVYIKDIDGRPLMPTKRHGKVRWLLKENKAVVINLCPFTIQLTYKSTDHKQPVTLGIDAGAKHIGFSATAEKEELFACETTLRTDIVDLLSTRLQNRRTRRSRLRYRKPRFNNRGSSKKKGWVAPSVKQRIDSHLNEVNEIHKILPITKIVIEVAQFDTQKMKNHDISGSDYQNGEQLGFWNVREYVLFRDGHKCSHCKGKSKDPVLNVHHLESRKTGGDSPSNLVTLCESCHKAFHKGEIELKKKRGKSLRDAAVMGIMKWKLYEELKSRYDNVSMTFGYITKYNRIKYGIEKSHTSDAFVISRNLNAKRIERQYLKRLVRRHNRQIHKMKILKGGKKKNNQAPFEVFRFRLFDKVLYNNEICFIYGRRKSGNFNIRDFNGENPKDVSYKKLKLIRGKMHPIILK

SEQ ID NO: 9000 - protein, 428 aa, unidentified
  REGION 1..428: note = Human gut metagenome
MFAAVIETRNKEIKKLMADRKAHRQASRRGERRARQRLAKKYGTIIKAGMAMRKLPQYAADKFVACKFIRNTEARFCNRKRRPDWLTPTVNHLVQTHLNVIKKISRYLPVTDIAIEVNRFAFMQMENPNASGVDFQNGPLKGFNDVKAAIREQQHGKCLMCKNDIEHFHHMVPRNKGGSDTIQNQVGLCPKCHAKVHTDTSFRKKLGDKKSGLLKKYGALSALNQAIPFICKGLLEEYGEKHVRFCTGKETSLIRTSLGYEKTNENQMHEVDAYCIGLAMLGVKNIKFQQFDNTYKIKQFRRQNRSIIHHQTERSYYLGKQKIATNRKPRFEQTGDALSDWYEKQLKTCENGEAGKLLSALKVKKSSRFYNSKGRLMPGTIFFYNGQRHVISGQLTGGRYLRAYGDTKTNYPISKCKILKHNEGLVFI

SEQ ID NO: 9001 - protein, 431 aa, unidentified
  REGION 1..431: note = Human oral metagenome
MLVYVLKQNGQPFMPTERFGKVRRLLKEGKAKVVRREPFTIRLLYEPETDVIQECYCGVDTGSQHIGVAVVGNDKVLYQSQTELRNDIKRKMDARRVYRRNRKSRKTRYRKPRYLNRGNSTRSDRLPPSVRHKVQAHIGEIEFCKKILPIKDENIILEVSQFDTALMKNPSLMNEKIKHWGYQKGFNYGYSSRRKAVLHRDNYTCQCCGKKNCRLEAHHIKFRSNGGTDDEENLITLCKECHDGVHVGTVVLNKKPKKSRGLKHATHMSIIRTQLLKKYPEAIETFGFVTSENRNHLKLEKDHYIDACVIASGGLEFKELDVIYRKRRVSIQDRVLAKGVRGEQKLPTGKIFGFKKFDKVEYLGETCFIKGRRSSGAFVLMDIDNNSIDFRDRGGKQNPSYKCIERVNTRKSVLCIKERIEREVRFIPTLS

SEQ ID NO: 9002 - protein, 358 aa, unidentified
  REGION 1..358: note = Human gut metagenome
MLVASISATTSEKELYAADVELRNDIVEKLSTRREQRRTRRNRLRYRKARFNNRVSSKRKGWLAPSIENKIQTHLTVVEKIHKFLPITNIIVETAAFDIQKIKNPSISGKEYQQGEQLNFFNVREYVLHRDGHKCQHCKGKSKDPILNVHHIESRKVGGNSSQNLITLCKSCHKAYHEGKIELKVKRGTSFRDSAFMSTMRWSFYKKLKNIYLNVSMTFGYITKNTRITNGLPKNHYVDARCISGNPTAKPLEYYFYQKKVRCQNRQIHKANFLKGGRKKLNQAPYLVKGYRLFDLVEYQKDLYYIFGRRDSGFFDIRKLDGTKVNKGSLSCKQMRLIDIRKTIIIEKRMQGAIPPTN

SEQ ID NO: 9003 - protein, 417 aa, unidentified
  REGION 1..417: note = Human gut metagenome
MPCSPAKARLLLKEKKASVKRRTPFTIQLTIATGEAKQPVTLGVDSGYKHIGLSATTEKAELYASEVELRQDITDLLSARLALRCSRRSRKTRYRAPRFDNRVASKREGWLAPSVENRIAAHMSRVEAVMRVLPVTAITVETAAFDTQLLKNPDIAGAAYQQGEQLGFWNVREYVLFRDGHVCQHCRGKSKDPILNVHHIESRRTGGDAPNNLITLCETCHKAFHRGEIELKVRRGKSFKAETFMGIMRWTLFERLKKAHPELRVRNTYGYLTKHKRISHGIAKSHCADAYCIADNLGAKRLEGFFFQKQTRKHNRQIHKLSILKGGLRKKNQAPYEVKGFRLFDKVICKGEEAFIFGRRTSGSFDVRRLDGTRISAGINYKKLRLLEPRTTYLTEFRKEAALPHLHECRGFRAEFL

SEQ ID NO: 9004 - protein, 431 aa, unidentified; identical to SEQ ID NO: 4306
  REGION 1..431: note = Human gut metagenome

SEQ ID NO: 9005 - protein, 423 aa, Arthrospira sp.; identical to SEQ ID NO: 3301

SEQ ID NO: 9006 - protein, 424 aa, unidentified
  REGION 1..424: note = Human gut metagenome
MRVFVFNMRGRPLMPCSQRKARLLLRENKAMIYKYHPFTIQLTYTTGETKQDCHIGIDTGSKYIGAAVRSEDKVFWKGEIELRQDIRSNLDTKRIYRRSRRNRKTRYRKPRFLNRKRREEWLPPSLQSRINHTFHWIDTLSSLVPNPILHIEVGKFDVAKMINPEIHGVDYQHGQTYGFFDERYFVFARDNYTCQCCGKSKNKILNTHHIIYRSNGGTNRVDNLITVCTDCHTSQNHRKGGIFYQWQEQHKKVKQYKEPPFMNTLRKRIFVAYPDAEITYGSETTPKRKAMKLDKTHYNDAIVISGINEIKENPEEWLLIKQFRKKKRSLHEATARKGRKKPNRNQTRNSKNTPYYKGFYLNDKVSVFGKSGYITGFTSNAAYIKDENNDYITLPNKTYKQVSINKMKLECHNNNWQYIIKNAV

SEQ ID NO: 9007 - protein, 413 aa, unidentified
  REGION 1..413: note = Human gut metagenome
MTSYAFVLDANGKQLAPAKEQKAWFLIRKKRAALVSKYPMVIQLKKEIPENEICKDEIRCGIDDGGLHVGIALVQKCKTKNKVVFKGTIEQRNDVKHLMEVRRSYRHYHRYHKRYRPARFDNRKSSKRKKRIAPSILQKRQAIIRVIHWLNKWINITNYWLEDVSIDIRALTDGYKPYRWQYQKSNRLDENIRKAAILRDGGKCMECGKSNCRLEVHHIKPRRRNGSNTLDNLITLCESCHQKTEGQEELYMDRYFSLLKSSDNKNLNYAQHVMIGKMWLRKQLSGLGVLYLTSGGDTANKRIDWNIEKSHTNDAVCITDLQPDTCDIKEWAIKPMRRQSKAKTDHVLGIHHRDLVEYTFKNGETHRGYVTALYPDQKAINFQSQTKHCKKVNARKCKLLWNYSKIYWFENAS

SEQ ID NO: 9008 - protein, 494 aa, unidentified; identical to SEQ ID NO: 6841
  REGION 1..494: note = Human gut metagenome

SEQ ID NO: 9009 - protein, 431 aa, Klebsiella sp.; identical to SEQ ID NO: 2435

SEQ ID NO: 9010 - protein, 425 aa, Nostoc sp.
MQTNYVFLVDTNKQPLNPIHPARARELLNKNKAAIYRQFPFTLVLHKAIDNPVVRLLTLKLDPGSKTTGIALLDGENVIWAAELQHRGWSIKDALNSRRSLRRSRRSRKTRYRMARFDNRKRPEGWLPPSLMHRVLTVETWVKRLCRYAPIAQTVMELVKFDTQKMQNPEIDGIEYQQGQLAGYEVRQYLLEKWGRKCVYCDKEGVPLQIEHIHPKSKGGSNRVSNLALSCKRCNLKKGTQLVDEFLKKDAKRLEKIKQQAKKPLKDAAAVNATRWTLFHTLKGILPTTTGTGAQTKYNRTLFQLEKQHWIDAACIGDIKAIKLLTLQPLLIKANGWGTRQMAGTNKYGFPIRHRTRQSLHFGFQTGDIVKAVVLSGKKVGQYVGRVLCRARGSFDIVTKTGRVGDINHRFCKPIHKKDGYSYAF

SEQ ID NO: 9011 - protein, 459 aa, unidentified
  REGION 1..459: note = Human gut metagenome
MSNSICVISKNGERLMPTFRPGRVRHLLKDGKAKIVKHQPFTIQLLYDSNNYTQPIEICEDVGYNYIGISVKSTTHEYVSAQYDTLQDEKEHHDSCSKYRRTRRNKLRYRKARFNNRKRKEGWLAPSLEHKKQLNINLIEWYMSVIPITHTTVEVGSFDTMLLQAIQKGEAKPEGTDYQQGPRYNLATLREAVFYRDNYTCAVCGRSSMKDGAILHMHHMLYWKGRHGYQLDELVTVCEKCHTSPNHQKSGVLFGFGENKKFANLSGAAFMNAVRWQIVNALYATYGKDFVTVTYGAMTKERRILLGIEKTHNNDAYAMGDYHPAHRCEFKHYQKRRRNNRVLEKFYDATYIDARTGNKAKGKELFNGRINRNHKKDSENLHKYRARKTAKGRRSIRNKRYTIQSGDTILYAGKKHITSGCFNKGSWLRISVNGTVKSIAVSKVKLINHIGAWKEDTSI

SEQ ID NO: 9012 - protein, 323 aa, unidentified
  REGION 1..323: note = Human gut metagenome
TRYRAPRFDNRIRTKRKGWLAPSVENRINAHLSRIEAVLRLLPVTTITVETASFDMQLLKNPEISGKEYQEGEQLGFWNVREYVLSRDGHVCQHCHGRSKDPVLNVHHLESRRTGGDSPGNLITLCETCHKALHRGEITLKAKRGQSFRAEAFMGIMRWEVLNRLKASHPEQEVQNTYGYRTKHARIENGIAKSHCADAFCIAGNLGAERLGEFFFQKQTRRNNRQIHKLSVLKHGLRKRNQAPFEIKGFRLFDKVACKGEEGFIFGRRSSGYFDVRKLDGTHISAGISYKKLRLLEKRQTYITEIRKEEALPPLSEGRGLRA

SEQ ID NO: 9013 - protein, 512 aa, unidentified; identical to SEQ ID NO: 8121
  REGION 1..512: note = Human gut metagenome

SEQ ID NO: 9014 - protein, 435 aa, unidentified
  REGION 1..435: note = Human gut metagenome
LAKETLTDHLAEVYMNKVFVLNQFGKPLMPYHPAQARIMLKEKKAFVKRKTPFTIQLTIPVKEKLYPITLGVDAGYRHIGLSATTEKEELYASEIETRADVSALLSTRRQCRRGRRNRKTRYRAPRFNNRVHSKHKGWLAPSVENIIAAHISRIEDVLKLLPVTKIVIETASFDIQLIRNPEISGAQYQQGEQLGSWNTREYVLCRDGHTCQHCHGKSKDQILQVHHLESRRTGGDAPNNLITLCKTCHEALHRGKIELKAKRGRSFRAETFMNIMRWTVLERLKVAHKELEIQHTYGYITKHTRISLGLEKTHRADAFCIAGNLHAQRLDCCLYQKQIRRHNRQIHKMKILEGGIRKLNQAPYEVHGFRLYDKVLCNGEAGFIFGRRTSGYFDVRRLDGTRISASISFRKLRLIERRKTYLTEIRKEEGVSSPA

SEQ ID NO: 9015 - protein, 557 aa, unidentified
  REGION 1..557: note = Human gut metagenome
MIYNLGSTRERGFMKQKKQKVMVYILNKKGKPLMPTTRCGHVRKLLDSKKAVVVNSNPFTIRLKYDTPNGVQDVFAGIDSGRENIGSGASNEDGDCLYLGELRTSNKSIKMKMTERVGFRRERRKHDRQNKQRKARKDHTEIQNGNDDICRTTISCKSVQISYPVAEESVTHKIIRGKEGKFANRHRDEGWITPSARQLVQMHMNDLKSMCKILPISHVTLERVAFDFQKLENENIKAWEYGKGKLYGYDSPEEYIHDVQDGKCLVCGKPHIDYLHHIIPRSKGGSDKVSNIAGLCYDCHYGPIGVHNCQDTQDRLPELKNEVNKQYKVSLLNSVMTVLIEEMDKFCKANSIIFSICEGHDTAKVRDMYDLQKDHCFDGFAISLVGRNVESVDVIPDRIYQKQRYKKKSKNIIQKRNCREYYDGKKLVAVNRHKGTDQKADSLEEYMNTYAETHTADECKNQFESLTVKPARRTYTFHKEGRICPFHIGDKVRYEKKNKIKGNTKVDTFICEGIYFSKDENKAEVEHNKTKSKKMKFCRTIESGCIPYIDYRKLALI

SEQ ID NO: 9016 - protein, 475 aa, Ferroplasma sp.
MEKNMKERQKLDRRDTYTPADAPQVRGNCDHALNREETLSVHGLKTPSNTPDVDIQSGMTGQDLRVPVINMRNEPLMPTSPGKARRLLKHNRARVISSNPFTIQLLYATGETKQPVTLGIDAGYKHIGFSVVTEKRELISGEAVMRTDMPKLNVEKSMYRRGRRNRLWYRQPQFINRGNNSKGWFAPSIAHKLQTHIRLIEKLKKILPVSKVIIEVASFDQQKMKNPEISGIEYQQGELQGYEIREYLLEKFHRKCVYCRKTNVPMEIEHLTPRSRNGPDTVDNLAISCHECNQKKNNLTAEEFGYPEVRKRALKSLKDATFMNIVRWKLTQLTGSAYTFGYITKKNRISLGLDKSHANDAFVIAGGTTQARSTVFDVTQRRRNNRSLQINRKGFRPSIRRRRYPLQPGDVVEFGESRYGVVGVHSYGNYVIIMNGEKKMDVNIKKVKLVKYGKGLRFTTQFLPTLSHMVSLEGS

SEQ ID NO: 9017 - protein, 442 aa, unidentified; identical to SEQ ID NO: 2637
  REGION 1..442: note = Human gut metagenome

SEQ ID NO: 9018 - protein, 512 aa, unidentified; identical to SEQ ID NO: 3720
  REGION 1..512: note = Human gut metagenome

SEQ ID NO: 9019 - protein, 428 aa, Moorena sp.
MSNFVFVLDKNKQPLDPTHPAKARKLLKVGRAKIYRQYPFTIIMQDLEVNNCVTHDHQLKIDPGSKTTGLAILQENRVLFGAELSHRGSQIREALTSRRQLRRGRRSRKTRYRQPRFLNRTRSKGWLPPSLQSRIDNIMTWINRLSKFCPITGISQELVKFDLQKLENPEISGKEYQQGDLQGYEIREYLLEKWGRQCAYCGIQNIPLEVEHIYPKSKGGSNRISNLTLACHDCNQKKGSQELKDFLSGKPDLLRRIQSQAKKPLADATAVNATRWKLYNCLKETGLDVETGSGGLTKFNRTRQNLPKTHWLDASCVGKSTLGNLKVLPSKPLIIKAKGHGRRQRCRTDRFGFPKSHAPSKKCFQGFQTGDTCRAIIPKGKFKGKFIGRIAIRFRPCFRISVKDKKPFDVHPKYLHTVQQADGYEYQA

SEQ ID NO: 9020 - protein, 442 aa, unidentified; identical to SEQ ID NO: 3218
  REGION 1..442: note = Human gut metagenome

SEQ ID NO: 9021 - protein, 426 aa, unidentified; identical to SEQ ID NO: 3614
  REGION 1..426: note = Human gut metagenome

SEQ ID NO: 9022 - protein, 403 aa, Halomonas sp.
PTLLAADPGSKETGLALMRLENNATEEKAPATRHVLCLFQLVHRGFQIRQALEQRAGFRRRRRSKNLRHRKPRFDNRTRKKGWLPPSLQHRVDTTMAWVDKLCRWAPVTHLSMELVRFDMQKMENPEISGVEYQQGTLLGYEVREYLLEKWGRECAYCGTGDTPLEIEHVVAKSRDGSSRVANLTIACHDCNQAKDSQWLADFFATNKGLKKRLKANGLSAEVRLECVQRQLKLPLRDATAVNATRWALFGAMKSTGLPVAVGSGGRAQYNRQRLGIPKTHALDAACVGKFDTLKGWRVPTLVIKAMGRGSYQRTRLDKYGFPRGYLMRQKQVQGFQTGDRVRAVVPSGKKAGTHTGRVAIRKTGSFNIQTEQGAVQGIFWRYCTLLQRGDGYGYHPLPTIQS

SEQ ID NO: 9023 - protein, 416 aa, unidentified
  REGION 1..416: note = Human gut metagenome
MVYVLSQNGQPLMPTENHAKVRVFLKQGKAKVVQRCPFTIQLLYESTTHTQKINLGIDAGSKTIGISATTDSKVLYEAEVVLRNDIVELLSGRRALRRSRRNRKTRYRKPRFDNRKKPDGWLAPSIRQKIETHVTVVENITKILPMTKIIVETASFDIQKIKNPEIEGAEYQHGEQLDFWNVREYVLFRDGHTCQCCKGKSKDNILNVHHIESRKTGGNAPNNLITMCETCHKAYHKGIITLPKEIHRGMRFRDAAFMGIMRWAFYDRLKELYNPLGVEVINTYGYITKNTRITYDLPKEHYVDARCISGNPAAKPMDYYYLQKKVRCHNRQIHKCKINKGGTRKRNQAAYEVKGFRLYDQVLWKGQKCFIFARRSTGRMDLRLLDGTHVNASVGYKNLKLLSMRKNYLIEQRKAG

SEQ ID NO: 9024 - protein, 518 aa, Anaerostipes sp.; identical to SEQ ID NO: 3878

SEQ ID NO: 9025 - protein, 428 aa, Moorena sp.; identical to SEQ ID NO: 4442

SEQ ID NO: 9026 - protein, 426 aa, Scytonema sp.; identical to SEQ ID NO: 2715

SEQ ID NO: 9027 - protein, 480 aa, unidentified
  REGION 1..480: note = Human gut metagenome
LYTKPLDNIGEGSLPPSGEINLKGMTFMVYVKSIGGKALMPTSNAKARKLLKQKKAKVVSLRPFVVKLTYKTKTEYTQKLNLGVDSGYSNIGFSVIDAKQEYIAGEVKLLEGMKKRLLEKASYRRIRRSRLRYRKARWNNRVKSKKKGWLAPSLKHKLDTHIKFIDYLKNILPIGKITIEVANFDIQKMKDDLISGIDYQNGDMFGFWNVREFVLHRDGHKCQNPNCKHKDKKEQILKVHHIRYRSEGGSDRPENLITLCSKCHTPVNHRKGKFLYDWCVNGKKVRGFKEATFMSMIRWYLVNELKSKHNNVSITYGYITKNHRIQNGIEKSHLNDAFAIAKGTNQARTKDRFLVIQDRLKNRSLEKFYDSKIIDIRTEKKVSGGDLNCGRSTRNKNLNTENLRKYRGVKISKGQRRIRKQKYFYQPNDLVKYDGKVYTVKGTQNEGKYIALKEIKKVPKVELLIPYVFKKGLNWSYRLC

SEQ ID NO: 9028 - protein, 413 aa, unidentified; identical to SEQ ID NO: 3476
  REGION 1..413: note = Human gut metagenome

SEQ ID NO: 9029 - protein, 444 aa, unidentified
  REGION 1..444: note = Human metagenome
MLVYVISKDGQPLMPISRCGKVRRLLRDKKAKVVRRCPFAIKLLFEPENDFVGECYCGVDTGSKHVGIAVVSNDRVLYQSQIELRDDIKRKMEQRRMFRRNKRSRKTRYRKPRFLNRGNSTKSDRIPPSVKHKVQAHIDEIEFCKKILPISDIILEVSQFDTALMKNPSLINEKIKKWGYQQGFNYGYSSRRSAILNRDNYTCQCCGKKNCRLEVHHIRFRSNGGTDDEENLITLCEDCHKGVHAGTVVLNKKPKKSKNLKYATHMSIIRSQLLKKYPNAIETFGFVTSENRNHLGLEKIHYIDACVIASGGLPFELSDVLYQKRRVSKQDRQLCQGMHGERKIPTWKVLGFKKFDLVEYMGELCFVKGRRSSGSFVLMDINSRLIDFRDKGGKQNPSYKSLKRVSARRSILCISKRTERLDRLIESSVYERLGIAELIPRRVE

SEQ ID NO: 9030 - protein, 421 aa, unidentified; identical to SEQ ID NO: 4361
  REGION 1..421: note = Human gut metagenome

SEQ ID NO: 9031 - protein, 515 aa, Actinoplanes sp.
LHTRSKTHQPVLPQRAALESVSADKPTRVHETGRGHRDSVAVPGVRHGRGEPATPVAPGRRRHPDGQPSGGRGLATPPTHPVVLVLDKHGRPLQPCTPARARTLLGAGRAVVHRHTPFVVRLKDRTIEQSTIQGAEVGIDPGSKATGIAMFTAKEGNRAGLFAIEVRHRGGQIRDKLTARAGRRRGRRSRNLRYRAPRFTNRARPTGWLAPSLRHRVETTMSWVTRLLRWAPITRLHVERVAFDTQLLQDPNVSGVAYQSGELAGYEIREYLLEKWKRRCAYCQATNVPLNSDHIEPRSRGGSDRVSNLTLACIPCNQEKGSLPVEVFLTDRPAVLARIRRQAKAPLRDAAAATSTRWALWSALTGTGLPVRVATGGRTKWNRHRTGAPKTHTLDAMHVGELASMMRWPSTTMVATSAGRGSYSRARTDRYGFPRLRLPRTKRVHGFATGDLVRAVVPTGVKRGTHTGRVAVRSTGRFNIRTSAGLIQGIDHRHVRLLQRADGWAYTRRPEPARA

SEQ ID NO: 9032 - protein, 431 aa, unidentified
  REGION 1..431: note = Human gut metagenome
MPDKVYVISRLGHPLMPCSPAKARHLLDDGKAKVVKRTPFTIKLLYGSTEYTQPVILGVDAGSKTIGLSASTTKEELFAAEVMPRNDVVENLSTRREFRRARRNRTTRYRKPRFNNRVHSKNNGWLAPSVEVKIQEHITSIKRVCAILPISKIVVETAEFDLQLLKAVQDGKPVPEGEDYQKGEMYGSYDVRQYVLWRDNYTCTCCGVKGTDKKPVKLHVHHFESRKHGGNAPDNYGTLCEDCHKKLHLGIITDISLKTRKRPSTRDAAFMGIMRKTLMQRLITGLSIPVAETKGYITKAAREEILKLPKTHTNDALAIAQGRHGFGIREQAYVKPTNRIYTVRPVRHHNRQLHKATMLKGGIRKLNQASKYIFGFRLYDKVLYQGGEYFVWGRRRSGSFLLRTIDGTKVKDGVGYRNLTLLERSTNYLIA

SEQ ID NO: 9033 - protein, 406 aa, unidentified; identical to SEQ ID NO: 4271
  REGION 1..406: note = Human gut metagenome

SEQ ID NO: 9034 - protein, 456 aa, Moorena sp.
LAAFVLDRNGKPLMPCTEKRARLLLVRRRARVHRVVPFTIRIIDRDIRTSDVQPLRIKLDPGSRVTGIALVRDFTFSDGLRGAAVLNLFDLIHRGAQISKMLTVRRAMRRARRYRKTRYRAARLNNRRRSAGWLAPSLRHRLETTIAWVHRLRRFAPVVAISTELVRFDMQAMENPDIRGVEYQQGTLAGYELREYLLEKWGRQCAYCDATGRPLQIDHIKARALGGSNRVSNLTLACKSCNQEKDSVPLTTFLRYDSRRAARILAHARAPLRDAAAVNMTRWALFGALKATGLQVEPSTGGRTKFNRAHLSVPKTHALDAACVGEVDMLRDWRRPTLAIRCTGRGAYRRTRLTASGFPRGYLMRQKRACGFQTGDLVRAKVPRGKKTGTYVGRVAIRASGSFNIQCAAQVIQGISHRYCTVMQRGDGYGYSFVAQFPKESENWGDATRRALSLPA

SEQ ID NO: 9035 - protein, 427 aa, Enterococcus sp.; identical to SEQ ID NO: 2410

SEQ ID NO: 9036 - protein, 477 aa, unidentified; identical to SEQ ID NO: 5307
  REGION 1..477: note = Human gut metagenome

SEQ ID NO: 9037 - protein, 429 aa, unidentified
  REGION 1..429: note = Human oral metagenome
MLVYVLKQNGQPFMPTARFGKIRRLLKAKKARVVRREPFTIKLLYEPETDVVQECYCGVDTGSRHIGVAVVSNDKVLYQSQTELRSDIKQKMDARKQARRFRRSRKTRYRKPRFLNRSNSTKGDRLPPSVKHKVQAHIDEIEFCKKILPVSDLIVEVSQFDTALMKDPRLISEKVKHWGYQQGFNYGYSSRREAILHRDNYTCQCCGKKNCRLEVHHVKFKSDGGTDDEENLLTLCEDCHKGVHAGTVVLNKKPKKSKNLKYATHMSIIRSYLLKKYPNAIETFGFVTSENRNHLKLEKDHYIDACVVASGGLEFKELDVIYKKRRVSVQDRVLTKGVRGEQKLPTGKIFGFKKFDKVEYLGKTCFIKGRRSSGSFVLMNIDNKSIDFRDRGGKQNPSYRSIERVNTRRSILCISERIKGKERLIPVLS

SEQ ID NO: 9038 - protein, 465 aa, unidentified
  REGION 1..465: note = Human gut metagenome
MSTCVCVLSNSGERLMPTFRLGKVRHLLKDGKAKIVKHHPFTIQLLYDSKTNTQPIEICEDVGYNYIGISVKSQSHEYVSAQYDTLQDEKACHDSCRKLRRTRRNRLRYRKPRFDNRKRGEGWLAPSLRHKKELNVNVVKMYCAVMPITHATVEVGSFDTMLVKAIQEGKAIPEGADYQKGPRYNLATLREAVFYRDNYTCQVCGRKVADGAILHMHHMFYWKGRHGDSLNELLTVCEKCHTPANHQKGGKLYGFGENVKFADLSGAAFMNTVRWQIVNELYAAFGKDFVTVTYGAMTKEKRIALRLEKSHNNDAYAMGEFHPNCRCTFEHYEKVRRNNRILEKFYDSRYIDIRTGEIATGKELFNGRINRNHKKDSENLHRYRGKRTYAGHRALLRKKVNLNPGDLVSLNGEVLVVHSTHTNKKGAVNVEFKTPGKSGQKSASLKKLKIVKTTDSMHSAWEKIS

SEQ ID NO: 9039 - protein, 328 aa, unidentified
  REGION 1..328: note = Human gut metagenome
RRNRKTRYRAPRFDNRIRTKRKGWLAPSVENRINAHLSRIEAVLRLLPITKITVETASFDMQRLKNPDISGKEYQEGEQLGFWNVREYVLFRDGHVCRHCHGRSKDPVLNVHHLESRRTGSDSPDNLITLCVTCHKALHRGEITLKAKRGQSFRAQAFMGIMRREVLNRLKASYPELKVHETYGYLTKHARIANGIVKSHGADAFCIAGNLGAERLGEFFFQKQTRRNNRQIHKLSILKGGIRKRNQAPFEAKGFRLFDKVACQREEGFIFGRRSSGSFDVRKLDGTRISVGISCKKLRLLEKRRTYLTEIRKEEALPPLPEGRGLRA

SEQ ID NO: 9040 - protein, 427 aa, unidentified
  REGION 1..427: note = uncultured cyanobacterium
MSKVFVIDTDKRPLDPIHSAQARQLLRNKKAAVFRQFPFTIILKESRPDSPVSPLRLKIDPGAKFTGIALVNDSTGEVIFAAELKHRGFAIRDALTSRRQLRRSRRAKKNRYRQPRFLNRTRPEGWLAPSLQSRVENIKTWVKKLRQFAPIGAISQELVRFDMQLMTNPDIQGREYQQGTLAGYETREYLLEKWGRQCVYCGVKDVPFQVEHIQPRAKGGSNSITNLALSCEKCNTKKGTKDIKDFLKKDPSKLEKILKQAKRPLADAAAVNTTRFALLEVLKATGLPVETGSGGLTKFNRSQQKLQKTHWIDAACVGQSTPILNIKGVKPLLITANGHGTRQSCRTDKHGFPNRHCSRTKFHFGFQTGDIVKSVVKTGKKIGEYIGRIATRATGSFNISTRNGLVQGISYKTCKTIHQKDGYGYSN

SEQ ID NO: 9041 - protein, 512 aa, unidentified; identical to SEQ ID NO: 4031
  REGION 1..512: note = Human gut metagenome

SEQ ID NO: 9042 - protein, 456 aa, unidentified
  REGION 1..456: note = Human gut metagenome
MSTCVCVLSNSGERLMPTFRLGKVRRLLKDGKAKIVKHHPFTIQLLYDSKTNTQPIEICEDVGYNYIGISVKSESHEYVSAQYDTLQDEKEHHDDCRKYRRTRRNRLRYRKPRFDNRKRSEGWLAPSLEHKKQLNIRLIERYVSVIPITHATVEVGSFDTMLLQAIQKGESKPEGVDYQKGPRYNLATLREAVFYRDNYTCQVCGRKIADGAILHMHHMFYWKGRHGYQLDELVTACEKCHTPANHQKGGKLFGFGEDKEFANLSGAAFMNAVRWQIVDALHATYGKEFVTITYGAMTKEKRIALQLEKTHSNDAYAMGDYHPVHRCVFRHYQKRRRNNRVLEKFYDATYIDTRTGNKAKGKELFNGRISRNHKKNSEDLHKYRSKKVSKGRRSIRRQRYAIQPYDTVRLESKTYITSGCHNKGTRLLIPANGKSKSVAISKVQVVCHAGAWIQII

SEQ ID NO: 9043 - protein, 430 aa, Thioploca sp.
MPCHPARARKLLKKRKAAVLRRYPFTIILKHRVGGDLQPVEIKFDPGSRTTGIALVGHFDRGSEVIWAGNLNHRGLQIKSNLDSRRSIRRSRRNRKTRYRPARFLNRRRPKGWLPPSLWSRVDNVKNLMLKLSRLAPITQIAVETVRFDTQQMQNPEISGVEYQQGELAGYELREYLLEKWGRQCAYCGAKNVPLEVEHIQARSQGGTDRVSNLTLACTSCNLQKGNKDIKEFLKHKPKRLKTIQTFAKAPLKDAAAMNATRNAIGNVLKGFGLPITISSGGRTKFNRTQQGYPKDHWIDAACVGESGNNVIIPKAITPLIITAKGRGSRQKCSMNQYGFPRTGPKKKKRVKGFQTGDIVKAIVTSGKKIGTYVGRVMVRKTGCFDIYTGFGRISSLSYRFCRLIQRTDGYEYSTDLCPIKKGSGKYFNS

SEQ ID NO: 9044 - protein, 456 aa, unidentified; identical to SEQ ID NO: 3956
  REGION 1..456: note = Human gut metagenome

SEQ ID NO: 9045 - protein, 341 aa, Pseudoalteromonas sp.; identical to SEQ ID NO: 6143

SEQ ID NO: 9046 - protein, 417 aa, unidentified
  REGION 1..417: note = Human gut metagenome
MPCSPAKARLLLKEKKAIVKRRTPFTIQLTIATGEAKQPVALGVDSGYKHIGLSATTEKAELYASEVELRQDITDLLSARLALRRSRRSRKTRYRAPRFDNRVASKRKGWLAPSVENRIAAHMSRVEAVMRVLPVTAITVETAAFDTQLLKNPDIAEAAYQQGEQLGFWNVREYVLFRDGHVCQHCRGKSKDPILNVHHIESRRTGGDAPNNLITLCETCHKAFHRGEIKLKVKRGKSFKAETFMGIMRWTLFERLKKAHPELRVRNTYGYLTKHKRISHGIAKSHCADAYCIADNLGAKRLEGFFFQKQTRKHNRQIHKLSILKGGLRKKNQAPYEVKGFRLFDKVICKGEEAFIFARRTSGSFDVRRLDGTRISAGINYKKLRLLEPRTTYLTEFRMEAALPPLHECRGFRAEFL

SEQ ID NO: 9047 - protein, 413 aa, unidentified; identical to SEQ ID NO: 2636
  REGION 1..413: note = Human gut metagenome

SEQ ID NO: 9048 - protein, 430 aa, unidentified; identical to SEQ ID NO: 4310
  REGION 1..430: note = Human gut metagenome

SEQ ID NO: 9049 - protein, 411 aa, unidentified; identical to SEQ ID NO: 2663
  REGION 1..411: note = Human gut metagenome

SEQ ID NO: 9050 - protein, 512 aa, unidentified
  REGION 1..512: note = Human gut metagenome
MSTIYVLNKDGKPLMPTTRGGHVRHLLKEQKARVVQSNPFTIQLLYETNDVVQPLYLGIDPGRTNIGVAVVKADGTAVFAAHLETRNKKIPKLMQDRKKARRARRTNGRRCRRQRRAKANGTISKKCVKQDTAQSKNPSKRAKEIGVIKRHLPGCKKDVLCVGIKNKEAKYTNRARLEGWLTPTANQLLQTHINLVKKIQKFLPISDAVLEVNKFAFMRLDNPNIQKWQYQQGPLYQKGSLENAVSEMQEHHCLFCEKPIEHYHHVVPKSENGSNTIANIVGLCAEHHNLVHKDVAWQEKLVEEKTGLNKKYGALSVLNQIIPALTKELSFLFPKHSFMTNGKSTHDYRAAHGISKDHWLDAYCIACSVLLIDVCDSTINNCVPYELKQFRRHDRRALNNENMNRVYTLNDKVVATNRHKATEQEAASLEEFRKEHPNDVCKLKVKEHHPTYRNMNRNYPGSVFLVGKQIHVMQGIASSKDGKATKYNDTRATTIAAGKCKFVAKNSGILFV

SEQ ID NO: 9051 - protein, 456 aa, Halomonas sp.; identical to SEQ ID NO: 5803

SEQ ID NO: 9052 - protein, 465 aa, unidentified
  REGION 1..465: note = Mouse gut metagenome
QPLSLISSQSQLHIPLLLLPPPLLLKEGKAIIYSHKPFAIQLTYDVTPHNQPIEICVDTGYKHIGVSVKSESREYASAQYDLLPNEKEKHDTQRKNRCNRRNRKRYRKSRFDNRRASKKSGWIAPSLKNKADRHVDIIKRIAAVVPIISITVEMGEFDTQVLKAVTEGKPVPEGKDYQQGARYGIETLRAAVFQRDGYKCLFCGRGIDDGVILHVHHAYFWRSQHGDSLNELASCCEKCHTSANHKPGGKLWGYDKYLPRYAGAAFMNTVRWYIYNQIKDQIQGADVHITYGTATKLARKEYGVDKSHANDAYAMGVFHPEARAKTEYFEKKRRNNRILEKFYDASYVDIRDGKTKKATALGCERTNRKEPRMSEKNLRGFRGKKRSRGRRTIRQQRYSIRSGDRLLVASQSRVSKGVQNKGAVVALLGKPGWKNTVAVKNVQVIYHTGGWEKVAAPKIKSKKKN

SEQ ID NO: 9053 - protein, 279 aa, unidentified
  REGION 1..279: note = Human gut metagenome
VVVETAEFDLHLLKAIADGKPVPQGEDYQKGEMYGHYNVRQYVLWRDNYTCQCCGTHPSKKKEVRLHVHHLESRKVGGDAPDNQVTLCESCHEKLHKGLIAEKDFKKRKRKSTRDATFMGIMRKTLMQRLCSELPIPVVKTRGYITKATREKLLVLPKSHTNDALAIAQGKRGFNVGYLPEIAQIDKIYTIRPVRHHNRQLHKATILKGGIRKSNQTEKYVFGYRLFDKVQFNGQDCFIWGRRTTGIFTIKTINGKMIKDGISFKKLKLVEKSTSYLIA

SEQ ID NO: 9054 - protein, 332 aa, Parasutterella sp.
  SITE 14: note = misc_feature - Xaa can be any naturally occurring amino acid
MLSASPATSAPKGXPRFDNRIRTKRKGWLAPSVENRIDAHLSRIEAVLRLLPVTKITVETASFDLQLLKNPDISGKEYQEGEQLGFWNIREYVLCRDGHVCQHCYGRSKDPVLNVQHLKSRRMGGDSPGNLITLCETCHKALHRGEITLKVKRGQSFRAEAFMRIMRWEVLNRLKASHPELEVNNTYGYRTKHARIANDIANSHCADAFCIAGNLGAERLSEFFFQKQTRRNNRPIHKLSILKGGLRKRNQAPYEIKGFRLFDKVACQGEEGFIFGRRSSGYFDVRKLNGTHISAGISYKKLRLLEKRQTYLIEIRKEEALPPLPEGRGLRA

SEQ ID NO: 9055 - protein, 406 aa, unidentified; identical to SEQ ID NO: 6072
  REGION 1..406: note = Human gut metagenome

SEQ ID NO: 9056 - protein, 453 aa, Moorena sp.; identical to SEQ ID NO: 7420

SEQ ID NO: 9057 - protein, 416 aa, unidentified
  REGION 1..416: note = Human gut metagenome
MVYVLDKNGQPLMPTDRHRKVRLMLQSGQAKVIKRCPFTIQLNYDSGHQTQEISLGIDAGSKHIGVSTTTKIKVLYEVDVELRNDIVDLLSSRRELRRGRRNRKIRYRQAKFNNRRRGNGWLAPSIRQKIGTHLTVVENICKMLPISRIMVETASFDIQKIKNPDIQGAEYQQGDQLGFWNIREYVLFRDNHTCQCCKGKSKDKILNVHHIGSRKTGGNAPNNLITLCETCHTGYHKGTVQLPKAIKRGMRFKDAAFMGIMRWAFYEALKQQYEPVGTPVHNTYGYITKHTRIAYNLPKEHYVDARCISGNPEASSNGEYYYQKKVRCHNRQIHKLTVLKGGIRKQNQATYLVKGYRLFDKVSYQGKGYFVFGRRQSGFFDIRTLSGEKVNKGSLSCKKLKFIATRTYYLTERRAV

SEQ ID NO: 9058 - protein, 427 aa, Enterococcus sp.; identical to SEQ ID NO: 5630

SEQ ID NO: 9059 - protein, 420 aa, Moorena sp.
MQNYVFVIDANFQPLNPIIPKKARRLLDKGKAAVFRMYPFTIILKTSINNPTISPCKIKIDPGSKVTGFALVQDGQVIWAMELEHRGGLIKKKLSSRSAVRRGRRNRNTRYRKPRFLNRKRPEGWLPPSLEHRILTTQTWVKRLIKFCPVNEIWVERVKFDAQKMQNPEISGIQYQQGELAGYEVREYLLEKWGRKCTYCGKKSVPLQIEHIYPKSKGGSERVSNLCLACEKCNQRKGNKPIEDFLKKKPSLLQKIKTKALSPLKDAAAVNTTRNKLVKVLQKTKPVVTGTGAQTKYNRTKLGFPKEHWIDAACVGNIEALTLKTFQPLLVTCKGQGGRQKAALNKYGYPIRHNPLKPIKGWCSGDIAKNLLTGEFGRVNPRSKSNSFNYTVSGKKAISLHVKNLCRVHRKDGYTYGFCQ

SEQ ID NO: 9060 - protein, 509 aa, unidentified
  REGION 1..509: note = Human gut metagenome
MPDTNYIYVLGADGKPQMPTKRKRHVKRLLNTGKARIACHVPYTIQLLYKNEPVLQPVMLAEDPGRTNIGLAVLSRKGELLLSAVVETRNREIVKLMADRKKARRASRNGERKARQRLAKRFGTMFEAGMLMRKLPMYAADKFVTCNYIKNTESRFCNRKRPDGWLTPTANQLLKTHINLIHKIQKYLPVMDVAIEVNRFAFMSLENPAISGVDFQNGPLKGFDSLHDAVNDLQHGKCLLCGGKIEHYHHIIPRSQRGSNTIGNIAGLCMECHGKVHKDIEYQKELKDLKKGLDKRYGALSALNQAMPFICKSLESEFGKAHVSYCTGRDTAKMRNSFGFQKTKKNQLHEVDAWCIGILAQNNAPDRLPDFEQTHYIRQFRRQDRSLIRCQTERTYKLDGKTVAKNRKKRTDQKDDSLEDWYNKQIALHGKREAECMLSRLTVKKSKRHYNDPIRILPGAVFIYNGKRYVLSGRLSNGKYFRAVGDSKTNYPVGKCRIVKQNEGLVFIY

SEQ ID NO: 9061 - protein, 421 aa, unidentified
  REGION 1..421: note = Human gut metagenome
MRGQPLMPCSPAKARHLLMDKKAVVKRRTPFTLQLTIATGETKQDVTLGVDAGAKHIGLSASTEKEEVFASEVELRQDITGLLAARLAFRRARRHRKTRYRAPRFLNRVHSKHRGWLAPSVENRIQAHMSRIDAICGLLPVTKIVIETASFDIQKIKNPDVEGTDYQQGDQLGFWNVREYVLFRDGHVCQHCRGRSKDKVLNVHHLESRQTGGDAPNNLITLCETCHKAYHAGKIKLKVKRGQSFRAEAFMGIMRWTMLDRVRKAHPDLPVENTYGYLTKNTRITLGLPKTHCIDAYCIAGNLNARRRGVYLYQRQMRKHNRQIHKCKVLSKTLKDGTKVGYRKLNQTPYLVKNFRLFDKVRCFGQTGFIFGRRTSGHFDVRTLNRTRLSDCVNSKKLTLLEKRRTFLTELRKEDGASSPV

SEQ ID NO: 9062 - protein, 519 aa, unidentified
  REGION 1..519: note = Human gut metagenome
VKAGLVDQPKFFENYVADRFKTHLGMLPQFRALEASEADKHWVRTKRSEAKCRSVQHWRGELLRPQGRSMSRASARRIVRFVFVLDKKHRPLMPCRPARARRLLRAGRARVVKRFPFVIRLVDRTVEQSEVQPVLIKLDPGSRETGAAVVRDDEKKRHHALAFFVIKHRGGAIRDALKARSAFRRRRRSQNFRCRSPRFLNRVKPKGWLPPSLRHRVETTLSFVRRMCRYLPVSGIATELVKFDSQKLQNPEVSGVKYQQGTLFEYEVREYLLEKFGRKCVYCGAEGVPLNIDHVVPRAKGGSNRVSNLVLACVSCNQKKGARSLEDFLKGKPEVLARVRRELKTPLRDAAAVNATRWVLFNELKATGLPVETGSGALTKLNRHAFGVEKEHWLDALCVGRLNGVVTRKGLNALEIRCMGRGSRQRTRLTKYGFPRGYLMRQKCVHGFATGDMVEANVPKGKKAGLWRGRVAVRVSGSFNIQTPKGVIQGVGWKHCRLISHNDGYGYAWLGHAPHSSPA

SEQ ID NO: 9063 - protein, 412 aa, Oribacterium sp.
MVYVLNKNGQPLMPTENYAKVRVLLKQGKARVIKKCPFTIQLMYCSTNHTQKITLGIDSGSRHIGISATIKDKVLFEANVELRNDIVDLISARRELRRSRRNRKTRYRKTRFDNRRRLDGWIAPSVKQKADSHVTMIAKVHKILPVTDIVVETASFDIQKIKNPDISGTGYQHGDQTDFWNVREYVLFRDGHICQCCKGRSKDKILNVHHIESRKAGGDAPNNLITLCETCHKGYHKGTVKLPKTIHRGMSFRDAAFMGIMRWAVYEKLKVIYPSVKNTYGYITKNIRIENGLPKDHHVDARCISGNPKAVGDGTVYYYKKVRCHNRQIHKCTINKGGIRKRNQAPYEVKGFRLYDKVLWKNQVCFIFGRRSTGRMDIRLLDGTHINASVGYKNLRLLDIRGNYLIEQKKTG

SEQ ID NO: 9064 - protein, 459 aa, Moorena sp.
LAVFVLDKTGKALMPCTEKRARLLLARGRARVHRVMPFVIRLVDRTAAASNLQPLRIKLDPGSKTTGGALVRDTDVLDPSTGEMQRGAAVLNLFELVHRGRQISAALTARRAMRRRRRGNLRYRAPRFLNRTRTEGWLPPSLQHRVDTIMAWVRRISRWAPVAALSSELVRFDMQALDYPDIEGAEYQQGTLAGYEVREYLLEKWGRVCAYCDTTNMPLQAEHIVARARGGSNRISNLTLGCAPCNQKKAALPVEVFLAKDPKRLSAILAKAKRPLKDAAAVNATRWVLANALKTTGMPVELASGGQTKFNRTRFAVLKTHALDAVCVGAVAAVSGWRTPTLVVKCAGRGSYQRTRLDQYGFPRGHLTREKRVHGFQTGDLVRAEVPSGQKAGTHIGRVAVRATGYFNIQSAGEVVQGVAHRHCQLVQRSDGYGYSRQLYPKETQEKAVLRTARYPFPA

SEQ ID NO: 9065 - protein, 430 aa, unidentified
  REGION 1..430: note = Human gut metagenome
MPKVYVLNRHGRPLMPCTPAKARHLLDAGKAKVRHRTPFTIQLLYGSTGYAQEVILGVDAGSKTIGLSAATETEELFSAEVKPRNDVVELMSARRQFRRARRNRTTRYRKPRFDNRVRSKHKGWLAPSVEVKIQEHMTAIRRACAILPVSKVVVETAEFDLQLLKAVAEGKPVPQGEDYQKGEMYGHYNVRQYVLWRDSYTCRICGMHGSVRKGVPLHVHHLESRRVGGDAPDNLVTLCTACHDKLHKGIIMAADIKKRKRRSTRDATFMGIMRMTLLRRLREQLPVPVVETRGYITKATRENLLVLPKSHTNDALAIAHGPQGFRAEYLPNIRQADRLYTICPVRHHNRQLHKATILKGGVRKANQAEKYICGFRLYDKVLYNGIECFVWGRRTSGSFLLRQLNGEKVKDGVSYKHLKLLERSQSYLVA

SEQ ID NO: 9066 - protein, 517 aa, Nocardiopsis sp.; identical to SEQ ID NO: 6685

SEQ ID NO: 9067 - protein, 415 aa, unidentified
  REGION 1..415: note = Human gut metagenome
MENKIEYCFVVDKNNRPLAPTKVNKGWYLVRKGRAKIKSRYPMVIQLEKEVEPDEDDESHMVCGIDDGSIHVGLAIVQKCPTKNKVVFKGTMEQRRDVKHLIDIRRGHRRYHRCHKRYRQVRFNNRSSSKRSNRLAPSIKQKKDAVLRVLYQLNKWCNIQEYFLEDVCIDIRAMADGYKPCGWQYQKSNRLDENLRKAAILRDNYKCQECGKSNCMLEVHHIRARKYGGADTIGNLITLCKKCHDKTKGRERDFENRYFDMIKSRPKRFDYAMHVMQGKTYLREKISELGMLHLTNGGDTANKRINWNIEKSHSNDAICITDSIPDTCDVKEWIIKPIRRKSKAKTDNVLGIKHRDLVSYTYKNGKTYTGYVTALYPEQLVLNFQSKTKHCKKANARKCRLLWRFNNIYWLEQCV

SEQ ID NO: 9068 - protein, 431 aa, Escherichia sp.; identical to SEQ ID NO: 3801

SEQ ID NO: 9069 - protein, 415 aa, unidentified
  REGION 1..415: note = gut metagenome
MVYVLNINGVPLMPTDRHGKVRKLLKAKKAKVVKRTPFTIQLLYVSTEYTQPLTLGVDAGSKHIGISVTSSNKEVHCGQVEPRQDVSKLLDARRKARRSRRNHLRYRQPRFNNRVESKHKGWLAPSVECKINTHIKVIEDITKILPITNIVVEVAEFDTQKLLNSDVQGVEYQRGPLYQSNLRQYVLARDNYTCQWCKGKSKSKILHLHHWNYWNNDHSNKPSSLITLCDVCNDSKNHKENGFLYGWKPKITNNFRDVALMNCMRWALYNRLKEIYPNVKMTYGYITKAMRSEHNMPKSHVNDALCITGNPDVTRMNTMYLSKKNRVHNRQIHKANKLPRGRLKLNQAPYIVKGFRLNDKVLYNGAICFITGRRKTGYFGLKNIEGQTLSNSAKWKDLTLLEKAKYYSIERISRS

SEQ ID NO: 9070 - protein, 442 aa, unidentified; identical to SEQ ID NO: 2903
  REGION 1..442: note = Human gut metagenome

SEQ ID NO: 9071 - protein, 434 aa, Anoxybacillus sp.; identical to SEQ ID NO: 3421

SEQ ID NO: 9072 - protein, 413 aa, unidentified; identical to SEQ ID NO: 2636
  REGION 1..413: note = Human gut metagenome

SEQ ID NO: 9073 - protein, 414 aa, unidentified
  REGION 1..414: note = Human gut metagenome
MPCSPAKARLLLKEKKAIVKRRTPFTIQLTIATGETKQPVSLGVDAGYKHVGLSASTEKAELYASEVELRQDITDLLSARRALRQSRRNRKTRYRAPRFDNRIRTKRKGWLAPSVENRINAHLSRIEAVLRLLPVTKITVETASFDLQLLKNPDISGKEYQEGEQLGFWNIREYVLCRDGHVCQHCYGRSKDPVLNVHHLESRRTGGDSPGNLITLCETCHKALHRGEITLKAKRGQSFRAEAFMGIMRWEVLGRLKASHPELEVNNTYGYRTKHARIANDIAKSHCADAFCIAGNLGAERLGEFFFQKQTRRNNRQIHKLSILKGGIRKRNQAPFEVNGFRLFDKVACQGEEGFIFGRRSSGFFDVRKLDGTRISAGISYKKLHLLEKRRTYLTEIRKEEALPPLPEGRGLRA

SEQ ID NO: 9074 - protein, 422 aa, unidentified
  REGION 1..422: note = Human gut metagenome
LNKRGKPLMPCSPAKARLLLKEKKAIVVRRTPFTIQLTIATGETKQPVSLGVDAGYKHVGLSASTEKAELYASEVELRQDITDLLSARRALRQSRRNRKTRYRAPRFDNRIRTKRKGWLAPSVENRINAHLSRIEAVLRLLPITKITVETASFDMQRLKNPDISGKEYQEGEQLGFWNVREYVLFRDGHVCRHCHGRSKDPVLNVHHLESRRTGSDSPDNLITLCETCHKALHRGEITLKAKRGQSFRAQAFMGIMRREVLNRLKASYPELKVHETYGYLTKHARIANGIVKSHGADAFCIAGNLGAERLGEFFFQKQTRRNNRQIHKLSILKGGIRKRNQAPFEAKGFRLFDKVACQGEEGFIFGRRSSGSFDVRKLDGTRISAGISCKKLRLLEKRRTYLTEIRKEEALPPLPEGRGLRA

SEQ ID NO: 9075 - protein, 413 aa, unidentified; identical to SEQ ID NO: 2636
  REGION 1..413: note = Human gut metagenome

SEQ ID NO: 9076 - protein, 431 aa, unidentified
  REGION 1..431: note = Human gut metagenome
MPDKVYVISRLGHPLMPCSLAKARHLLDDKKAKVVKRMPFTIRLLYGSTKYIQPIILGVDAGSKTIGLSASTAKEEVFAAEVMPRNDVVENLSTRRELRRARRNRTTRYRKPRSDNRVRSNHERWLAPSVKVKIQEHITSIKRVCTILPISKVVIETAEFDLQLLKAIQEGKPIPEGEDYQKGEMYGSYNVCQYVLWRDNYTCICCGVRGTPKNPVRLHVHHFESRKYGGNAPDNHGTLCDDCHKKFHLGIITDVKLKTRRRQSTRDAAFMGIMRKTLMWRLRTELFIPVAETKGYITKATREKLLVLPKSHTRDALAIAQGRHGFGIKEYAYVEPANHIYTVRPVRHHNRQLHKASILKGGIRKRNQASKYVFGFRLYDKVLYQGKACFVWGRRTSGTFLLRTIDGIKVKDGVNYRNLTLLERSSNYLIA

SEQ ID NO: 9077 - protein, 512 aa, unidentified
  REGION 1..512: note = Human gut metagenome
MSTVYVLNKDGKPLMPTTRGGHVRHLLKEQKARVVRAKPFTIQLLYETNDVVQPLYLGIDPGRTNIGVAVVKANGTAVFTAHLETRNKEIPKLMQDRKKARRARRTNGRRCRRQRRAKANGTISKKCVKQTTAQNGSVSKRAKDIGVIKRRLPGCEKDVLCIGIKNKETKFTNRTRPEGWLTPTANQLLQTHINLVKKIQKFLPISDVVLEVNKFAFMRLDNPNIQKWQYQQGPLYKKESLESAVSEIQEHHCLFCKKPIDHYHHVVPQHKNGSNTIGNIVGLCAKHHDLVHKDSAWEKKLAKKSTGLYKKYGALGVLNQIIPTLTNELSSLFPKHSFVTNGKSTYDYRAAHGVSKDHWLDAYCIACSVLPSNVCDSNINNHMPYVLKQFRRHDRRVLNNENMNRVYTLNNKAVAINRHKAKDQKTVSLEEFRKEHPDDVCKLKVKEHHPTYRNMNRNFPGSVFLVGKQIHVMQGIASSKDGKATKYNDTSATAIAAGKCKFVAKNTGILFV

SEQ ID NO: 9078 - protein, 470 aa, unidentified; identical to SEQ ID NO: 8190
  REGION 1..470: note = Human gut metagenome

SEQ ID NO: 9079 - protein, 442 aa, unidentified; identical to SEQ ID NO: 3234
  REGION 1..442: note = Human gut metagenome

SEQ ID NO: 9080 - protein, 484 aa, Streptomyces sp.
MDETGAGRHNTAAGTGHVRGETLGSSPAAERVTSDRSVREKGREAHPYVFVLDKHGAPLQPCSSARARKLLRAGRAVVHRHTPFVIRLKDRTVAESVVDGVEIGIDPGSRHTGIAVFTAVKGERRGRFALQLDHRGATVHKNMLRRAAFRRRRRVANLRYRAPRFNNRAVTPGWLPPSLRHRVDTSLAWMERLTSWAPVRTVHMERAVFDTHALTQGKESLDGIEYQQGTLVGYEAREYLLTKWRHACAYCGATGVPLNIDHIRPRSRGGTDRISNLTLACIPCNQAKGNAPVEEFLAHSPQRLAKILAEAKAPLTDAAAVNSTRWALWRGLDARWRTHVSSGGRTKWNRIRNFLPKTHALDALAVGTVDAITRHPLQVLTAGCTGRGTYTRTRTDKHGFPRLRLPRKKTVHGFQTGDFVRAVVPTGKKAGTHTGRVAVRTKGSFNITTRHGTVQSIHHRHVRLLQRADGYTYTTEKETGRPQT

SEQ ID NO: 9081 - protein, 417 aa, unidentified
  REGION 1..417: note = Human gut metagenome
MIYVRSKEGSVLMPTERCGKIGYLLRHGKAHVVSRVPFVVQLDYDSTTYTQDVSLGIDAGSKHIGVSASSEKKEMLAAQVELRSDIVKLLSTRRELRRTRRNHKTRYRKSRFDNRKKKDGWLAPSVEQKIESHLKVIRLVHKLLPITKTAIEVAQFDDQKIKNPDIKGDEYQQGEQMGFWNVREYVLARDGHKCVHCKGKSKDPILNVHHLESRKTGGNSPSNLVTLCETCHKAYHRGEFDLKIKRGSSLRDAAVMNIMRWAVYERAKAEFGNVHLTYGYITKHTRIENGVTKTHAADAFCIAKNVHAMRLSSFFMCRCVPRHTRALHVANPKKGGIRRNTIASHKIGKSNFQRFDMVRWMGKECFIFGSTHGRPVLRDIDGLQVANQPSVNIKTIKFLKRLKNNILMEEKKFRRLN

SEQ ID NO: 9082 - protein, 350 aa, Moorena sp.
MVNVLFVYMVNCHGQPLMPCSPRKARLLLKAGKAKIVKMVPFTLQLLYGSSGYKQEVALGIDAGTQHIGVCATTEKTVLFEAEVQPRTDIQELLATRRQFRRARRKRKTRYRQARFQNRKKPQGWLAPSVRHKVDAHLKVIKLVHKLLPVRRITIEVAQFDIQKIRNPDIEGEGYQQGPQLGFWNVREYVLFRDGHACQWCKGKSKDRILNVHHIESRKTGGDRPDNLITLCETCHDLIHRTHQEYKITRKRHGFRDATQMGIIRWKIYEQARASFPHVHLTYGYITKQTRIEHGLEKSHVVDARCISGHPLAASDGTWHLVKFIRRNNRQLHKATIRKGGKRQRNTAPK

SEQ ID NO: 9083 - protein, 525 aa, unidentified
  REGION 1..525: note = Human gut metagenome
LANLKLIDELLEKTEYIYVLGTDGKPQMPTNRKVRVRSLFKSGLAKIVDTVPFTIRLLYENDAVLQPITIAEDPGRTNIGAAVLTQLGDLVFSAVVETRNKSIKKLMSDRKAYRQASRRGERKARQRLAKRHGSMIKAGMIMRKLPQYAADKFVTCKIIKNTEARFCNRKRMPDWLTPTVNHLVQTHINLLNQIDVSLNKMVQTHINLIKKVEKYLPITDVAIEVNRFAFMQMENPDASGVDFQNGPLKGFDDVKAAICEQQHGKCLMCKNDIEHFHHIVPRSKGGSDTIQNQAGLCKKCHAKVHTDAEFQAKFKDKKEGLIKKYGALSALNQAIPFICKELLEIYSVEHVHFCTGKDTSLIRSSLGYEKTKDNQMHEVDAYCIGLAAIGADKAKRPDFNNVFKIKQFRRQDRQLVHYQKERTYYLDGKKIATNRNPRFEQKGDALSDWYKEQIKIYGQYEAEKMRSRLTVKKSKRSYNTTKRLMPGCVFYYDGQRHVMAGQSSYGRYQKIFLLQNVKSYSLMQD

SEQ ID NO: 9084 - protein, 400 aa, unidentified
  REGION 1..400: note = Human gut metagenome
LQFYRKEHGIMQYVYVLNKHGEPLMPCSPGKARLLLKQQKACVVKRTPFTIKLLFGSAGYKQPITLGVDAGSKHVGLSASTEKRELYSEEFTPRSDVVELLSTRRQNRRSRRNRKTRYRVPRFDNRVHSKLKGWLAPSVEVKIQEHITVIKHICKILPISLVRVETAEFDTQRLKAMLAGKPLPVGTDYQLGEMYDEYNVRQYVLKRDHYTCQCCGTHNTAKKVVKLHVHHLESRKTGGNAPSNLVTLCTTCHKNLHKGRVTLDGKERGKPLRDAAFMGIMRKTLMVRLKEELPIPVQGTYGYITKMRREQNDIKKSHVNDASCISKHPLAEPCSVCYRTKAIRHHNRQTHKANFSKGGIRKRSQMPYVVEGYRLWDKVLYKGQECFVSGRRASGSFTLK

SEQ ID NO: 9085 - protein, 512 aa, unidentified
  REGION 1..512: note = Human gut metagenome
MSTVYVLNKDGKPLMPTTRGGHVRHLLKEQKARVVRTKPFTIQLLYETNDVVQPLYLGIDPGRTNIGVAVVKTDGTAVFTAHLETRNKEIPKLMQGRKKARRARRTNGRRCRRQRRAKVNGTLSKKCVKQTTAQNGSVSKRAKKIGVIKRHLPDCEKEVLCIGIKNKEAKFSNRTRQEGWLTPTVNQLLQTHINLVKKIQKFLPISDVVLEVNKFAFMQLDNPNIQKWQYQQGPLYQKASLEEAVSEMQEHHCLFCKKPIDHYHHVVPQHKNGSNTIGNIVGLCAKHYDLVHKDTTWQKKLAKKKTGLNKKYGALSVLNQIIPALTKELSSLFPKHFFATNGKSTYDYRAAHGVSKDHWLDAYCIACSVLPNDVCDSDINNRVPYELKQFRRHDRRALHKENMSRVYTLNGKSVATNRHKATEQTTDSLEEFRQCQPDDVCKLKVKEHHPEYRNPKRNFPGCVFLVGKHTHVMQGPSGSHNGKADGYYDTNGNSYSSGKCKFVAKNEGIVFT

SEQ ID NO: 9086 - protein, 421 aa, unidentified
  REGION 1..421: note = Human gut metagenome
MRGQPLMPCSPAKARHLLKAGKAAVRRRTPFTIQLRIATGETKQSVTLGVDAGAKHVGLSAATEKEEVFASEVELRQDITGLLAARLSLRRDRRHRKTRYRAPRFLNRVRSKHKGWLAPSVENRIQAHMSRIDAVCRLLPVTKIVIETASFDVQKIKNLEVEGTGYQQGDQLGFWNVREYVLFRDGHVCQHCHGHAKDKILNVHHLESRQTGGDAPNNLITLCETCHKACHAGKIKLKVKRAQSFRAEAFMGIMRWTLLDRVRKAHPGLPVENTYGYLTKHTRIPHGLPKTHCVDAYCIAGNLKAVRRGVYLHQRQMRKHNRQIHKFTVLSKRLEDGTKIGYRKLNQSPYLVHSFRLFDKVRCLGQIGFIFGRRSSGYFDVRRLDGVKLSPSISWRKLTLLEKRSTYLTELRKQDGASSPV

SEQ ID NO: 9087 - protein, 423 aa, Moorena sp.
MRVFVFNMRGEPLMPCTQRKARLLLKTGKAKIYKYNPFTIQLKYVTGENKQECHVGIDTGSKYIGLAVTSENKVLFKGEVELRQDVKSKIDTKRIYRRSRRNRKTRYRRCRFLNRKRFGKWLPPSLQNRINHTFKWIDKLCSFIPESILHIEVGKFDIAKMINSEVHSVDYSQGQTYGYQGERYFIFARDNYTCQVCGERNKPLQTHHIIYVSNGGTNRVDNQITVCKNCHNSTNHKNGGIFYKWQKEHKKVKQYKEPPFMNVLRQQILNQYPQALITYGFETTIKRKNIGLEKTHYNDAIVISGVSTISENLHEWLLIRQFRKKKRSLHEGVPRKGRKEPNRIQKRNSKNTPYYRGFYLNDKVSVFGKSGYITGFTNSGAYVKGVDGEYIVLPNKSYKRVNIASLKFICHNNNWQYITKNAV

SEQ ID NO: 9088 - protein, 351 aa, unidentified
  REGION 1..351: note = Human gut metagenome
LGIDAGAKHIGFSATAEKEELFACETTLRTDIVDLLSTRLQNRRTRRSRLRYRKPRFTNRGSSKKKGWVAPSVKQRIDSHLNEVNEIHKILPITKIVIEVAQFDTQKMKNHDISGSDYQNGEQLGFWNVREYVLFRDGHKCSHCKGKSKDPVLNVHLESRKTGGDSPSNLVTLCESCHKAFHKGEIELKKKRGKSLRDAAVMGIMKWKLYEELKSRYDNVSMTFGYITKYNRIKYGIEKSHTSDAFVISRNFNAKRIERQYLKRLVRRHNRQIHKMKILKGGKKKNNQAPFGVFRFRLFDKVLYNNEICFIYGRRKSGNFNIRDFNGENPKDVSYKKLKLIRGKMHPIILK

SEQ ID NO: 9089 - protein, 410 aa, Bacillus sp.
MTYCFVLDAQGRKLSPTKENRAWYLIRMQKAILKNKFPMVIQLKKEIPVAKIDLTPVHLGIDDGSKFVGIAVVQECKRKNKPLFKGTIELRTDVKDKMTVRRGYRRYRRYHKKYRPDRFNNRSSSKIEGRLAPSIKQKKDSILRVINQLHKWIRIHYVSLEDVLIDIRALEKGHKPYKWEYQQSNRLDENIRKAAVLRDHNCCQDCGITNTRMEVHHIIPRRLNGSDSINNLITLCSTCHGHVTGDELHHSRRLLKKVKGRNISYNDAMHVMQGKSYLQNELKKIAPISLTTGGDTANKRIDWEIDKSHANDGIVICNLKVKPNQCELKNWTIKTMRKRSSKKIESANGFHHRDFVKYTKRNGETYLAYITAIYPKKNQCNMTTIDGKILKRYGLSRLSLIWRFSKIFWL

SEQ ID NO: 9090 - protein, 413 aa, unidentified; identical to SEQ ID NO: 5215
  REGION 1..413: note = Human gut metagenome

SEQ ID NO: 9091 - protein, 420 aa, unidentified; identical to SEQ ID NO: 5136
  REGION 1..420: note = Human gut metagenome

SEQ ID NO: 9092 - protein, 456 aa, unidentified
  REGION 1..456: note = Human gut metagenome
MSTCVCVLSNSGERLMPTFRLGKVRRLLKDGKAKIVKHHPFTIQLLYDSKTNTQPIEICEDVGYNYIGISVKSESHEYVSAQYDTLQDEKEHHDDCRKYRRTRRNRLRYRKPRFDNRKRSEGWLAPSLEHKKQLNIRLIERYVSVIPITRATVEVGSFDTMLLQAIQKGESKPEGVDYQKGPRYNLATLREAVFYRDNYTCQVCGRKIADGAILHMHHMFYWKGRHGYQLDELVTACEKCHTPANHQKGGKLFGFGENKEFANLSGAAFMNAVRWQIVNALYATYGKEFVTITYGAMTKEKRIILGIEKTHNNDAYAMGDYHPAHRCVFRHYQKRRRNNRVLEKFYDATYIDARTGNKAKGKELFNGRINRNHKKDSENFHKYRSKKVSKGRRSIRRQRYAIQPYDTVRLEGKTYITSGCHNKGTRLLIPANGKSKSVAISKVQVVCHAGAWIQII

SEQ ID NO: 9093 - protein, 406 aa, unidentified; identical to SEQ ID NO: 4271
  REGION 1..406: note = Human gut metagenome

SEQ ID NO: 9094 - protein, 442 aa, unidentified; identical to SEQ ID NO: 3161
  REGION 1..442: note = Human gut metagenome

SEQ ID NO: 9095 - protein, 451 aa, unidentified
  REGION 1..451: note = Human gut metagenome
MSVAVISKTGERLMPTSEYRARKLLKSGKAIKYSYHPFTIQLTERKTGNIQPIELCMDTGYIHIGISVKSEKHEYLTEQIDTLTDERSRHNARRMYRSQRRNRKRYRQPRFNNRKKDKGWIAPSLKHKKNIHVQAISRINNVMPLTDITMEMGNFDTQVLKAKEEGRPLPQGVDYQHGERYRIATLREAVFARDGYKCQCCGRTIKDGAILHVHHIKYRSQGGTNSISNLATVCDKCHTPKNHKPGGKLYGWKPKLPSFKGATFMTTIRWQLYNEAKALFPDIDIHITYGAATKERRRELNIDKSHINDAFVMGQFHPRHRIKAVLYKKKRRNNRCLEKFYDAKYIDSRDGKKRSGQELFNGRINRNHKKDSENLHQYRLQKVTAGKRTVRKQHYSVQPHDIIIYESRKRETTGCHCNGARVMLLPDKKSVSIKKIKIYRYAGGYFKSTFN

SEQ ID NO: 9096 - protein, 456 aa, unidentified
  REGION 1..456: note = Human gut metagenome
MNTCVCVLSNNGERLMPTFRLSKVRRLLKDGKAKIVKHHPFTIQLLYDSKTNKQPIEICEDVGYNYIGISVKSESHEYVSAQYDTLQDEKEHHDDCRKMRRARRNRLRYRKPRFDNRKRSEGWLAPSLEHKKQLNISLVERYVSVIPITHATVEVGSFDTMLLQAIQKGETKPEGADYQEGPRYNLATLREAVFYRDNYTCQVCGRKITDGAILHMHHMFYWKGRHGYKLDELVTACEKCHTPANHQKGGKLFGFGEDKEFADLSGAAFMNAVRWQIVNALHTTYSKEFVTITYGAMTKEKRIALQLEKSHNNDAYAMGDFHPVHRCGFRHYQKRRRNNRVLEKFYDATYIDARTGNKAKGKELFNGRISRNHKKDSENLHKYRSEKVSKGRRSIRKRRYAIQPYDTVRLKGKTYITSGCHNKGTRLLIPVNGKSKSVTISKVQVVCHAGPWIQII

SEQ ID NO: 9097 - protein, 451 aa, unidentified
  REGION 1..451: note = Ga0315285_10064038
MQKFKEKLKNTPKDAHQVLCSVNHQLNREETLSEDGIVRSLNNPDGDHFQHTESSLKALVYVISKEGNPLMPCTYAKAIRMLKKGAASVIKRIPFTIQLNFFCENKVQEIILGVDTGYKNIGISAVSNSKELLSVNVELRIDISEKLKERAMYRRNRRNKLWYREPRWNNRANAKQEGRLMPSVLQKVNTHITIIERIKKILPISKIIIETGLFDMAKMNNDGIRNWEYAKGVQYGFENTKAYVLSRDSHKCYFNDKCSDKLHVHHIKFRKDGGSDNPNNLITLCEKHHKQLHDDKIKLDKVGKFKKLKAATVMNIIRKSLLEYFPEAIETFGYETKVKSRELGIEKSHINDAFVIAGGSIQDRSKSFTMIQKRKNNRCLQLNRKGFKPSIKKQRSKIQPLDLFWVKGKEYVCKGMFNYGKYICYGSTKLKEYFKIELVEKHYYQGSLVWN

SEQ ID NO: 9098 - protein, 420 aa, unidentified; identical to SEQ ID NO: 6507
  REGION 1..420: note = Human gut metagenome

SEQ ID NO: 9099 - protein, 398 aa, unidentified
  REGION 1..398: note = Human gut metagenome
VKKRTPFTIQLVYGSSGYTQEVILGVDAGSKTIGMSASTTKEELFSAEVKPRNDVVDLLSTRREFRRERRNRKTRYRKPRFDNRVRSKHKGWLAPSVEVKIQEHITSIKRVCRILPVSKVVIETAEFDLQLLKAIADGKPVPQGEDYQKGEMYGHYNVRQYVLWRDNYTCQCCGAHATKKKEVRLHVHHLESRKVGGDAPDNQVTLCESCHEKLHKGLIAEKDFKKRKRRSTRDATFMGIMRKTLMQRLCSELPIPVVKTRGYITKATREKLLVLPKSHTNDALAIAQGKRGFNVGYLPEIAQIDKIYTIRPVRHHNRQLHKATILKGGIRKSNQTEKYVFGYRLFDKVQFNGQDCFIWGRRTTGIFTIKMINGKMIKDGISFKKLKLVEKSTNYLIV

SEQ ID NO: 9100 - protein, 423 aa, unidentified
  REGION 1..423: note = Human oral metagenome
MLVYVLKQNGQPFMPTERFGKVRRLLKEGKAEVVRREPFTIKLLYEPETDVVQECYCGVDTGSKHIGVAVVGDDKVLYQSQTELRNNIKKKMDSRRMYRHNKRSRKTRYRKPRFLNRRNSIKKDRLPPSVKHKVQSHIDEIEFCKKILPVSDLILEVSQFDTALMKNPSLMNEKVRHWGHQQGFNYGYSSRREAILHRDNYTCQCCSKKNCRLEVHHIKFRSNGGTDDEENLITLCEDCHKGVHAGTVVLNKKPKKSKGLKHATHMSIIRSWLLKEYPNAIETFGFVTAENRNHLQLEKDHYIDACVIASGGLEFKELDVIYRKRRVSVQDRVLTDGIRDEKKLPTGKVHGFKKYDKVKYLGEICFVKGRRNSGAFVLMNIDNNSIDFRDRGGKLNPSYKSIKRMNARKSILCINQVVERKVY

SEQ ID NO: 9101 - protein, 413 aa, unidentified
  REGION 1..413: note = Human gut metagenome
MTNYAFVLDADNKQLTPTKEQKAWFLIRKKRATLVSKYPMVIQLKKKIPDKEICKDEVRCGIDDGGLHVGVALVQKCHTRNKVIFKGVIEQRNDVKHLMDVRRGYRRYHRYHKRYRPARFNNRNSSKREGRIAPSILQKRQATTRVINQLNKWINITNYWLEDVAIDIRALTDGYKPYRWQYQKTNRLDENIRKAVILRDGCKCMECGKSNCRLEVHHIKPKRLKGSNTLGNLITLCAKCHQKTESVEELYMDRYFALLNSSDNKNLNYAQHVMIGKKWLREQLSNLGMLHLTNGGDTANKRIDWDITKSHSNDAICITDLKPDTCEIKEWVIKPMRRQSKAKADNVLGIKHRDLVEYTFRNGETHRGYVTALYPEQNAINFQSPTKHCKKVNARKCKVLWKYSKIYWLDNVS

SEQ ID NO: 9102 - protein, 413 aa, unidentified; identical to SEQ ID NO: 2636
  REGION 1..413: note = Human gut metagenome

SEQ ID NO: 9103 - protein, 442 aa, unidentified; identical to SEQ ID NO: 2903
  REGION 1..442: note = Human gut metagenome

SEQ ID NO: 9104 - protein, 450 aa, Clostridium sp.
MVYVIDINGNPLMPTNEAKARKLLKNKKAIVKELKPFTVQLNYETSNYTQRITLGIDSGYLNIGFSAITDKKELIVGEVKLLQGIKDRIQEKAMYRRQRRNRLRYRKARWNNRTKSKHKGWLAPSLQHKLDSHIKFIDSLYNVLPITKCVVEIANFDIQKIKNPNISGEEYQQGEMMGFWNLREYILHRDNHKCQNPNCKNKSKEQILEIHHIKYRSEGGSDSPNNLITLCSKCHTSPNHKKGKFLYDWCINGKKVRGFKDATFMSMIRWYLINTLKEKHSNISITYGYITKNHRITHKIKKTHYNDAFAIAKGINQIRNNDIFNVSQARRNNRSLEKFYDCKIIDVRTGNKVSGGDLNCGRRTRNKNHSTENLRIYRGEKISKGQRRIRKQKYFYQPNDLVRYEGKIYTVKGSQNGGKYVALKEIKKVPKVDLLTPYKFQKGFVYEIYK

SEQ ID NO: 9105 - protein, 555 aa, Streptomyces sp.; identical to SEQ ID NO: 3041

SEQ ID NO: 9106 - protein, 443 aa, Anoxybacillus sp.; identical to SEQ ID NO: 7070

SEQ ID NO: 9107 - protein, 468 aa, unidentified; identical to SEQ ID NO: 5936
  REGION 1..468: note = Freshwater metagenome

SEQ ID NO: 9108 - protein, 634 aa, Nocardiopsis sp.; identical to SEQ ID NO: 3305

SEQ ID NO: 9109 - protein, 557 aa, unidentified; identical to SEQ ID NO: 3108
  REGION 1..557: note = Human gut metagenome

SEQ ID NO: 9110 - protein, 406 aa, unidentified; identical to SEQ ID NO: 4082
  REGION 1..406: note = Human gut metagenome

SEQ ID NO: 9111 - protein, 450 aa, Cupriavidus sp.
VAVCVLDRQGRPLMPCSEKRARLLLARGRARVHRVVPFVIRIVDRRQADGHLQSLRVKLDPGSKVTGIALVRELPVADDGNGDSAPGAVVLSLIELVHRGRSISEALTARRMFRRRRRGANLRYRAARFQNRSRAPGWLPPSLKHRVDTTLTWVARLRRWAPVTVLSCELVRFDPQALEQPEIAGVEYQQGTLFGYELREYLLEKWGRRCAYCDRRDLPLQIEHIQARATGGTDRVSNLTLACGPCNQAKGAQPIDRFLARQPARLVKILAHAKRPLKDAAAVNATRWALVSALKSTGLPVQLASGGRTKFNRMRLFIPKTHALDAVCVGRLSHAHAWHRPTLTITCTGRGSYQRTRLDRYGFPRGYLMRGKTVHGFRTGDAVRATVPTGKNAGEHAGRVAVRASGSFNIQAKPSLVQGISHRHCRLMQRADGYGYQFQPTDSITQDGPG

SEQ ID NO: 9112 - protein, 436 aa, Deinococcus sp.
MALTRNKETMSNRVFVLNPDKSPRMPCIPKRARKMLEAGKAAVWRRYPFTIILKSEAGRQSQPLTLKLDPGSKTTGMALVLEGKTGRQVVWGAELHHRGHAVRDNLTKRRQLRSARRSRKLRHRPARFLNRTRPEGWLPPSLMHRVLTVISWAKRLDRFTMLDSFSMELVSFDTQKMMNPDIQRQDYQKGTLFGTECRAYLMHKWEGKCAYCGRKAEEVEHLVPRSRGGSNRISNLVMSCRKCNNLKDNQTLEEFLKRKPAQLRRIQAQQQASLADTAAVNATNYRLLDELKRFGYPVETGSGAQTSFNRQQQEYDKAHWIDAACVGNSGEQVRVPHLRPLQIKCMGRGNRQMCRTDKYGFPNKHRTRQKVFFGFQTGDICRAIVTTGKKIGAYVGRISVRATGSFALFLGAGKVDGINKRFFQTLQRQDGYSYSF

SEQ ID NO: 9113 - protein, 442 aa, unidentified
  REGION 1..442: note = Human gut metagenome
MVTVQQSTHHLPFGRVFIRRNLFMVYVISQDGKPLMPCSDPIARLLLKQGKAKVKKREPFTIKLTYETTNHTQGLTLGVDTGSGTIGTAVSKDNGDIVYMSEVVVRNDITDKMTQRTKYRRNRRNRKTRYRKARWLNRASSIKKDRFSPTMQSKLHSHVREIEYIQSILPVTEMVFETGQFDMHLMKNPSLANSKVRPWGYQKGANYGFENTKAMVLNRDNYTCQCCKGKHKDSKLEVHHIVFRSQGGSDEESNLLTLCHTCHKDLHSGKISPKLSGKVKGNLKFATQMNSIRKQLFRFYPNAIETFGYVTKANRLHLGVDKEHYYDACTIATQGNAFNVKSNLYKKKCVSDGDFQKTKGIRSEQPIVTDKICGFRKFDKVRYFGNDYFIKGRMSTGYAILMDIDGNKIDFSTMPRGYKTPKLSNCKRITARSTVMTQVKVV

SEQ ID NO: 9114 - protein, 414 aa, unidentified
  REGION 1..414: note = Human gut metagenome
MPCSPAKARLLLKEKKAIVKRRTPFTIQLTIATGETKQPVGLGVDAGYKHVGLSASTDKAELYASQVELRQDITDLLSARRALRRARRNRKTRYRAPRFNNRIRTKRKGWLAPSVENRINAHLSRIEAVLRLLPVTKITVETASFDLQLLKNPDISGKEYQEGEQLGFWNIREYVLCRDGHVCQHCYGRSKDPVLNVHHLESRRTGGDSPGNLITLCETCHKALHRGEITLKPKRGQSFRAEAFMGIMRWEVLGRLKASHPELEVNNTYGYRTKHARIANDIAKSHCADAFCIAGNLGAERLGEFFFQKQTRRNNRQIHKLSILKGGIRKRNQAPYEIKGFRLFDKVACQGEEGFIFGRRSSGFFDVRKVDGTRISAGISYKKLRLLEKRRTYLTEIRKEEVLPPLPEGRGLRA

SEQ ID NO: 9115 - protein, 444 aa, unidentified
  REGION 1..444: note = Human oral metagenome
MGEIVNFILKERSAIMLVYVLDMNGQPLMPTHNGAKVRVLLKQKRAKVVSKCPFTIKLLYESTSFTQPLTLGVDTGSKYVGSAVINDATSEVLYESQTELRDDIKAKMERRRQFRRTRRDKLRYRPKRFNNRKASKRKDRYSPTLISKFQGHVREIKFINSILPISSTILEIGEFDPHLLQDPSLAYRKWDYQKGELYQQENFKQAAKARDGYKCQCCGKRGCRLEVHHLIPRSRGGSDKLANLITLCADCHHLAHSSEEQLIVFQKKFGKKTKGTLKYATQMNVLRHMLQREYPDAELTYGFITKEMCRVFGLEKSHMIDACCIASRGVLFKNKNANKYKKKCVPKGDYTRTDMCGRKFTILPKGKIVGFRRYDKVLYNNKEYFVVGRMSRGHVYLIDIDNNRVQVERTKRNTGEKYMSKAEIKVSLVRKIASSRTCLCTINK

SEQ ID NO: 9116 - protein, 414 aa, unidentified; identical to SEQ ID NO: 4264
  REGION 1..414: note = Viral metagenome

SEQ ID NO: 9117 - protein, 420 aa, Bacillus sp.
MTHCFVLDAQGRKLSPTKEKRAWYLIRKQKAILKCKFPMVIQLVREVPEEEIDTTPIHLGIDDGSKLAGIALVQECGTENKPVFKGTIELRIDVKEKLAVRRGHRRYRRQHKKYRPARFDNRSSSRKEGRIPPSIRQKKDSVLRVVRQLTKWVRIDQIFLEDVLIDNRALEKGYKPYRWEYQQRNRLDENIRKAAILRDRNTCQDCGATNTRMEVHHITPRRLHGSDSIHNLITLCSKCHEKIAGEELLHSQRFYQKIKGKSISFRDAMHVMQGKTYLQKALREIAPLNLTTGGDTANKRIDWDIEKTHANDSIVICNLRVNPEQCEMKDWVIKPMKKRSSKKIKSANGIYHRDFVRYTKRNGESYIAYITALYPERNQCNMTTIDGKVLKRYGLSRLSLLWRFNRIYWLINSNEGGESW

SEQ ID NO: 9118 - protein, 570 aa, Streptomyces sp.; identical to SEQ ID NO: 5250

SEQ ID NO: 9119 - protein, 410 aa, Bacillus sp.; identical to SEQ ID NO: 8195

SEQ ID NO: 9120 - protein, 466 aa, unidentified
  REGION 1..466: note = Human gut metagenome
LSIKLLINIGEGVIYSSICTGLSLQTYQKRKEAPCMVYVLDINGQPLMPTTRHGKVRRLLNSHLAKVVKRCPFTIQLLYQSTKEIQPVSLGVDAGSKHIGMAATTEKKVVYQEELSARNDVVKLLSARRTLRRTRRNRKTRYRKPRFNNRVHSKHKGWLAPSVEVKIQEHITTIKRICQILPISEIQVETAEFDLQRLKAMEEGRTPPVGTDYQLGEQYDFYNTRQYVLHRDGYTCQCCGTHDNNIKLHVHHIESRQTGGDAPNNLIILCEHCHKALHEGKLELPKGKKRGKSYRDATFMGVMRKTLLERLKKEIDVPVEGTYGYITKYWRERAGLEKSHIHDAVCISQYPYAKPLDIYYLTKTVRHHNRQIHKSNFSKGGIRKRNQAPYFVNGFRLFDKVLYKGKEYFIFGRRATGYFDIRTLDGTKVNKGSISYKKLRIQDTAKAYLKEARAIPHMNKFTCVLA

SEQ ID NO: 9121 - protein, 455 aa, unidentified
  REGION 1..455: note = Human gut metagenome
MVFVLDRHHKPLMPCHPARARRLLGKGRARIHKLYPFTIRLVDRELKDSTVQPVVLKLDPGSKETGMALVREDETKTHHALYFVNLKHRGSEIKQSLLQRRNFRRSRRSRNLRYRAPRFLNRTRPQGWLAPSLRHRVDTTLAWVERLRRLAPVATLEMELVKFDTQKMQNPEIDGVAYQQGKLAGFEVREYLLEKFGRKCIYCGAEGVPLNIDHIVPKSAGGSNRVSNLVPACVDCNQKKNNLPFEVFLKGDKAKINRIRSQLKTPLKDAASVNTTRWQLFEALKLTGLSLTTATGARTKYNRHQFGVPKEHWLDALCVGETAAVRGWQPLGVLVVKCTGRGAYKRTRLTKDGFPRGYLTRTKRFFGFGTGDMVVATVFASKKKGSYKGRVAVRKSGSFAIQTASRKVDGISYRYCRLLSRADGYGYSWHSSKSLINSTKETALLPRINTQVSAP

SEQ ID NO: 9122 - protein, 424 aa, Moorena sp.
MSNFVFVLETNRKPLTPCTPGMARSLLKAGKAAVFRQYPFTIILNKEVQATPEPLTLKLDPGSKTTGLAILINHRVIWAAELTHRGQQIKDSLQSRRAIRRNRRNRKTRYRPARFLNRTRPDGWLAPSLQHRVETTITWVNRISRFAPVSSIVQELIRFDLQFIQNPEISGVEYQQGELQGYEVREYLLNKFNRQCAYCGAKDTALEVEHIQPRSRGGSDRVSNLTLACHPCNQRKGNQDVKDFLSGKPDVLKRVLAQAKTPFKDAAAVNTTRWALFNALNATGKPVATGSGGLTKFNRTRLGLPKTHWLDAACVGNTPMLEVLTTQPLQIKATGHGTRQMCRTDRFGFPSRYVPRFKFVQGFQTGDIVKAIVTSGKKIGVYVGRVAVRSSGSFNVSTAQGLVQGVSHKYCTPIHKKDGYAYGY

SEQ ID NO: 9123 - protein, 372 aa, unidentified
  REGION 1..372: note = Human gut metagenome
LSKVKTMRVFVFNMRGRPLMPCSQRKARLLLRENKAMIYKYHPFTIQLTYTTGETKQDCHIGIDTGSKYIGAAVRSEDKVFWKGEIELRQDIRSNLDTKRIYRRSRRNRKTRYRKPRFLNRKRRDEWLPPSLQSRINHTFHWIDTLSSLVPNPILHIEVGKFDVAKMINPEIHGVDYQHGQTYGFFDERYFVFARDNYTCQCCGKSKNKILNTHHIIYRSNGGTNRVDNLITVCTDCHTSQNHRKGGIFYQWQEQHKKVKQYKEPPFMNTLRKRIFVAYPDAEITYGSETTPKRKAMKLDKTHYNDAIVISGINEIKENPEEWLLIKQFRKKKRSLHEATARKGRKKPNRNQTRNSKNTPYYKGFYLNDKVS

SEQ ID NO: 9124 - protein, 465 aa, unidentified
  REGION 1..465: note = Human gut metagenome
MSTCVCVLSNNGERLMPTIRLGKVRHLLKDGKAKIIKHHPFTIQLLYDSETNIQPIEICEDVGYNYIGISVKSQSHEYVSAQYDTLQDEKDCHDSCRKMRRTRRNRLRYRKPRFDNRKHDKGWLAPSLEHKKELNVNVIKMYCEVMPITHATVEVGSFDTMLVKAIEEGKATPESTDYQKGPRYNLASLREAVFYRDNYTCQVCGRKANEGAILHVHHMFYWKGRHGNSLNELVTVCEKCHTPANHQKGGKLYGFGENIKFANLSGAAFMNTVRWQIVNELYAAFGKPFVTFTYGAMTKEKRIALHLDKSHSNDAYAMGNFHPVDRCAFEHYEKVKRNNRILEKFHDSRYIDIRTGKEAKGKELFNGRISRSHKKDSENLHKYRGKRIRKGYRALRRKKVALNSGDLVSLNGETLIVHGTHTNKKGNVRVEFKVAALNGKKSASLKKLKIVKTSTPMHSAWAKVS

SEQ ID NO: 9125 - protein, 439 aa, Ktedonobacter sp.
MSKVFVLDTNHQPLNPVHPGEARLVLKQGKAAIWRRFPFTVILKYAVPAPQVEPLRVKLDPGSKTTGIAVLHDASGEVIFAAELSHRGHKITEALATRRARRRGRRQRKTRYRKPRFDNRRKKGEGWLPPSQISRLSNVLTWVRRLSGLCPITACSMELVKFDMQQMETPEISGGQYQQGTLAGYEVREYLLEKWGRQCAYCGAKDVPLEIEHINPRSKSRDDRVCNLTLACHPCNEKKGTQDIRDFLKHQPDLVQKILAQAKAPLKDAAAVNVTRWALYRRLQALGLPIECGSGGLTKSNRTMRGLPKSHWMDAACVGQSTPKVLKTTGVMPLLIVAQGHGSRQVTNGDRYGFPKGKPKQGGRVKGFRTGDMVKAVVLTGTKKGAYTGRVLVRASGSFDIVTKTARVAGISFTSCRVVQRSEGYRYALGTPVPEPQIR

SEQ ID NO: 9126 - protein, 426 aa, Anabaena sp.
MSKVFVIDTDKRPLNPIHSAQARQLLRNGKAAVFRSFPFTLILKELCSKTVLPLRLKIDPGAKHTGIALINDASGEVVFAAELKHRGFAIRDALTSRRQLRRFRRARITRYRKPRFLNRTRPLGWLAPSLQSRIENIKTWVKKLSKIAHVVAISQELVRFDMQLMANPDIQGREYQQGTLAGYETREYLLEKWDRQCAYCGVKDVPFQVEHIHPQAKGGSNSITNLALSCEKCNTKKGTKDIKDFLKKDPSKLEKILKQAKRPLADAAAVNTTRFVLLEVLKATGLPVETGSGGLTKFNRSQQKLAKTHWIDAACVGQLTPILNIKGVKPLLITANGHGTRQSCRTDKYGFPNRHCSRTKFHFGFQTGDIVKSVVKTGKKVGEYIGRIATRTTGSFNISTRNGLVQGISYKTCKTIHKKDGYGYSS

SEQ ID NO: 9127 - protein, 438 aa, Petrotoga sp.; identical to SEQ ID NO: 8698

SEQ ID NO: 9128 - protein, 464 aa, unidentified
  REGION 1..464: note = Human gut metagenome
MVIALDKNKRPAGFLTEKRCRKLFEQKRAVRYRMFPMVVILKDIDVRTFTQTLPEYRLKIDPGAKYDGFAIIDPVRDTVVFTLQVEHRAGQVKQNLDARRQARRNRRSRETVYRKNKFAQGGTFTQTGNEGKLPPSIQSILANTETWVKRLSRWVNLTSVSLEAVRFDTQLLDDPAIEGKEYQQGTLQGTEIREYLLDRYQHTCQYCGGVSGDPVLEWEHIRPRSRGGSDSIKNATLACHRCNQDKGSMTPEEWAGQLKTQKTKLSRARLQGIEKVLAGKRNGGSSRYCAWVNITRKELERFLFACFGKVECASGGRTKYNRTRLGFPKDHQYDAACVGKVPEQGHTDLTHGYYTLAKAVGHGSHFRGKINSCGIIIQKLPPREKNVFGFMNGDIVAADIPKREKRPYKYEGHHVGRVMTRARGEFDIRTTDGRLIGANHRYVTKIQNADGYQYAQYRTPGVSG

SEQ ID NO: 9129 - protein, 625 aa, Streptomyces sp.; identical to SEQ ID NO: 5044

SEQ ID NO: 9130 - protein, 440 aa, unidentified
  REGION 1..440: note = Human gut metagenome
MSTGLRAEQAEPAGICKGETLKVFVLNMRGKPLMPCSPAKARHMLKAGKAVVARRTPFTIKLTIATGETKQDVTLGVDAGAKYVGISATTEKEEVFASEVELRQDITGLLADRLAFRRARRNRKTRYREPRFNNRVRSKNKGWLAPSVENRIQAHISRIEAVCRVLPITKIVIETASFDIQKIKNPEVEGTGYQQGDQLGFWNVREYVLFRDGHVCWHCRGRSKDLILNVHHLESRKTGGDAPNNLITLCETCHKAYHAGKIKLKARRGTSFRAEAFMGIMRWTLLDRVRRAHPELPVENTYGYLTKHTRIVLGLSKTHCADAFCIAGNLNALRRGDFLYQRQTRKHNRQIHKCSILKGGVRKLNQAPFLVKGFRLFDKVKCKGRIGIIFGRRSSGSFDVRTLDGARLSAGISSKKLMLLEKRTTFLTQLRKENGASSPS

SEQ ID NO: 9131 - protein, 431 aa, unidentified; identical to SEQ ID NO: 4463
  REGION 1..431: note = Human gut metagenome

SEQ ID NO: 9132 - protein, 441 aa, unidentified
  REGION 1..441: note = Fermentation metagenome
MELRITYCKVEYFQGVDTLVYVISIDGKPLMPCKPVIARLLLKQHKAKVIKKYPFTIKLLYKTKTEYTQPLTLGIDTGSSKIGSAVVDENNNVLYLSQVEVRNDITDKMKQRAKYRRNRRNRKTRYRKARWLNRKNSIKEDRFSPTIVSKINSHLKEINFVKSILPIQNVILETATFDPHALKNPAVLHNKWLYQKGVNYGFANTRAYVLDRDNYTCQYCKGKSKDSKLEVHHIIFRSQSGSDESKNLITLCKTCHGKLHNGKINLKKNGKVKGQLKHATQMNSIRQQLLRLLPEATETFGFITKEHRQLMKLPKEHYYDAVAIACLNNIENTGLIGVNFKTKNILFKRCIADGDFQQTKGVRSEQRIITGKIQGFRKLDKVEYQSKEYFIKGRMSTGYAILMDIEGNKINLKPIPKFEKMKRMQARKSWIISQETIQNIC

SEQ ID NO: 9133 - protein, 442 aa, unidentified; identical to SEQ ID NO: 4522
  REGION 1..442: note = Human gut metagenome

SEQ ID NO: 9134 - protein, 431 aa, unidentified
  REGION 1..431: note = Human gut metagenome
MPNKVYVINKHGRPLMPCSPAKARHLLDAGKAKVKKRTPFTIQLVYGSSGYTQEVILGVDAGSKTIGMSASTTKEELLSAEVKPRNDVVDLLSTRREFRRARRNRKTRYRKPRFDNRVRSKHKGWLAPSVEVKIQEHITAIRRVCGILPVSKVVVETAEFDLHLLKAIADGKPVPQGEDYQKGEMYGHYNVRQYVLWRDDYTCQCCGAHATKKKEVRLHVHHLESRKVGGDAPDNQVTLCESCHEKLHKGLIAEKDFKKRKRRSTRDATFMGIMRKTLMQRLCSELPIPVVKTRGYITKATREKLLVLPKSHTNDALAIAQGKRGFNVGYLPEIAQIDKIYTIRPVRHHNRQLHKAAILKGGIRKSNQAGKYVFGYRLFDKVQFNGQDCFIFGRRTSGYFVVKTIDGKVIHNSASFKKLKLVERASNYLIA

SEQ ID NO: 9135 - protein, 520 aa, unidentified
  REGION 1..520: note = Human gut metagenome
MNYLDFVLMVDKNKVPCIPIKESTAAYLLRHNKAKIINHDPTVIQRFDEYSADYEIRNIFELKIDSGYLNIGFSVSDSEHEYLAGQVNLLQGMSERLTVRASNRKFKRARLRYRKNKNVDYKTVHNSTYKNGNQDGWIAPSIQHKIDSHIRLIKKIAQWVPIDRIIIEVAKFDIQKMIADLDGRIISGKDYQNGEMKGYENVTAYVRDRDKHTCQMCLSSGKVKNKNNDTIEVHHIIPRAAGGTNRPSNLICLCHHHHRLVHSNNNNNKYFNELQNKKMPDTYKDSTFMNIVRYKIYNALCADFKDVELAYGYETKINRRLIGLPKFHYTDAVCLKEWKNISLTKFIYIVDQKRCNDRKMESFFDAKYIDIRDGKTKSGTELCYTRLDNASSWRTTCKNEVDNLRQYREKKVEKGKQRRECHFYCLKAGDLIFIKSGNHKGNLAEVKTMQIHKGKYKIFFTYKNQKVDNPTISLSPEEYGQLKKNECSKVKIVRTRRGMIWRKYNRLEYENTYKDQYDKN

SEQ ID NO: 9136 - protein, 407 aa, Moorena sp.; identical to SEQ ID NO: 4077

SEQ ID NO: 9137 - protein, 239 aa, unidentified
  REGION 1..239: note = Human gut metagenome
LQFYRKEHGIMQYVYVLNKHGEPLIPCSPGKARLLLKQQKACVVKRTPFTIKLLFGSAGYKQPITLGVDAGSKHVGLSASTEKRELYSEEFTPRSDVVELLSTRRQNRRSRRNRKTRYRVPRFDNRVHSKHKGWLAPSVEVKIQEHITVIKHICKILPISLVRVETAEFDTQRLKAMLAGKPLPVGTDYQLGEMYDEYNVRQYVLKRDHYTCQCCGTHNTAKKVVKLHVHHLESRKTGG

SEQ ID NO: 9138 - protein, 443 aa, Anoxybacillus sp.; identical to SEQ ID NO: 3426

SEQ ID NO: 9139 - protein, 457 aa, unidentified
  REGION 1..457: note = Human gut metagenome
VWLYQAVYNLGEGFLPSSEERTAFYWLLIYRKEHGIMQYVYVLNKHGEPLMPCSPGKARLLLKQQKACVVKRTPFTIKLLYGSAGHKQPVALGIDAGSKHVGLSASTEKRELYREEFTPRNDVVELLSTRRQNRRSRRNRKTRYRAPRFDNRVHSKHKGWLAPSVEVKIQEHITVIKRICRILPITLVRVETAEFDTQRLKAMLKGKPLPVGTDYQLGEMYDEYNVRQYVLKRDNYTCQCCGAHPTEKKPIRLHVHHIESRHVGGNAPNNLITLCVACHKALHEGKITLDKGKKRGKPLRDAAFMGIMRNTLLARLKDELNIPVKQTYGYITKLLREKNKIPKSHVNDARCIAKAPNAKPCDTMLYTRALRHHNRQIHKAKILKGGIRKKNQAPYLVKGFRLWDKVRYNGEECFITGRRSSGYFALKKYDGTVISNSASYKKLMLLEAATNYITERS

SEQ ID NO: 9140 - protein, 419 aa, Anaeromusa sp.
MFMNLVYVLDHNRKPLMPTTPAKARILLRQGKAKVIRKLPFTIKLLQESTTTYTQPLTHGIDTGSKTIGSAVIRPKGNVLYLSEIEIRNDIAGKMKDRSKYRRNRRNRKTRYRQARWRNRKNSIKTNRFSPTMTSKINSHIKEINFVKSILPITKTILETATFDPHALKNPEVLTNKLLYQQGINYGFANTKAYVLTRDQYTCQHCKGKSKDHRLEVHHILYRSEGGSDDQENLITLCKPCHDKVHSNEITLKLKGKKKGQLSHATQMNTIRVQLLKQLPTVQETFGFITKEHRQQHTNEKKHYIDAIFIATQGAKPIYKTSQLILKKCIPDGDYQQTKGIRSEQRIPTGKIQGFRKFDKVTYQGSYYFIKGRMSTGYAILMDAQYQTVKLKPIPKFQKMQRDSARRSWIISQKTIANI

SEQ ID NO: 9141 - protein, 415 aa, unidentified; identical to SEQ ID NO: 6534
  REGION 1..415: note = metagenome

SEQ ID NO: 9142 - protein, 450 aa, Moorena sp.; identical to SEQ ID NO: 2935

SEQ ID NO: 9143 - protein, 388 aa, unidentified
  REGION 1..388: note = gut metagenome
LVYGSSGYTQEVILGVDAGSKTIGVSALTKKEELFAANVIPRNDVVDLLSTRREFRRARRNCKTRYRKPRFDNRVRSKHKGWLAPSVEVKIQGHITAIRRVCGILPVSKVVVETAEFDLQLLKAIEKGKPVPQGEDYQQGEMYGHYNVRQYVLWRDDYTCQCCGAHTTKKKEVRLHVHHLESRKTGGDAPSNLITLCDSCHEKLHKGLIAEKDFKKRKRRSTWDATFMGIMRKTLMQRLCSELPIHVVETRGYITKATREKLLVLPKSHINDALAIAQGKHGFNVGYLPGILQIDMIYTIRPVRHHNRQLHKATILKGGIRKSNQTGKYVFGYRLFDKVQFNGQDCFIWGRRTTGIFTIKTINGKMIKDGISFKKLKPVEKSTSYLIA

SEQ ID NO: 9144 - protein, 415 aa, unidentified
  REGION 1..415: note = Ga0373625_0010177
MPTNRQGKVRHLLKDGLAKVVQRTPFTIQLLYDSDEYTQPITLGVDAGSKTIGLSATLVPPSNGRTETDKKELFSAEVQLRTDIVDLLSTRRQNRRTRRSHKTRYRKARFQNRKKDKGWLAPSIRHKIDTHLTMVDKIHKILPITKIIVEVAQFDIQKIKNPEISGVEYQQGAQLDFFNVREYVLYRDDHKCQLCNGKSKDKILNVHHIESKKTGGNAPNNLITLCETCHKKHHEGNITLKVKRGHIFKDPVFMGIMRWAFYNTLKEKYPNVLMTYGYLTKNTRIANKLPKDHRTDALCITGNPTVIGLDTWYFYKKVRCQNRQIHKNTINKGGSRKINQSPFIVLGFRLFDKVKYNDQECFVFGRRVSGSFDIRLLDGTTVNAGVGYKKVQVLEQRKTILIERRRAIPPVPSES

SEQ ID NO: 9145 - protein, 441 aa, Moorena sp.
MTRAIGETAPNCVFVLDTDRMPQTPVHSAVARQMLRAKTAAVFTCHPSTIILKTAVPALLAAHTHRLKIDPGSKTTGLALLDGATVVWAAELTHRGQRIRDALLSRRAMRRNRRQRNTRYRQPRFDNRTRPDGWLPPSLTSRVAHVMTWVERLARLCRITSLSQELVRFDMQRMQHAESAGVEYQHGELAGYEVREYLLEKWHRTCAYCHKTGVPLQVEHVIPKARGGSDRVSNLTLACGPCNQQKSTQTAAEFGFPAVQAQGKLPLKDAAAVNTTRWALYRALQTTGLPVETGTGGRTKYNRSRLGIAKSHWGDAACVGASTPDTLCVRGIQRLGIRAMGHGTRQMCRTDAHGFPKSHRARQKRYFGMQTGDIVQAVVPKGKYAGTWTSRVVVKASGWFDLVIYGKKASVHQKHCTRLWAADGYTYTLPAVAGTAMSSPR

SEQ ID NO: 9146 - protein, 515 aa, Blautia sp.
MTALEERLSKTEYIYVLGFDGKPQMPTRRKRHVLKLLKTGRARIAEDIPFTIRLTYRNAPVLQPVTLAEDPGRTNIGAAVLSPLGDLLFAAVIETRNKEIKKLMTDRQKSRQASRRGERKARQRLAKRYGSMVKSGMVMRKLPMYAADRFVTCKFIRNTQARFCNRKRCPDWITPTVQHLMQTHLNIIRKISRYLPVTDIAFEVNRFAFMHMENPEAMGVDFQNGPLKGYGDVKEAIRTQQHGKCLMCKKPISHFHHIVPRSRGGSDTIQNLAGLCPECHTKVHTDTAFRKDFDEKKSGQLKKYGALSALNQAVPFICKKLLEEYGEEHVHFCRGLDTSLIRTALGFEKTKKNQMHEVDAYCIGLAALEVNEVETPAFDHTFQIRQFRRQDRSIIHHQTGRSYYQGKEKVAQNRKPGFEQKTTALSQWYKEQVRIHGEKEAEKLRSQLWVEKSCRHYNDMDRFLPGAVFLYEGKRYVLSGRITNGKYLRACGQGMKNFPAAECTFIRHNAGLVFI

SEQ ID NO: 9147 - protein, 241 aa, unidentified
  REGION 1..241: note = Human gut metagenome
MFVDMVYVQDIDGKPMMPTTRHGKVRRLLKDKKAVVVNLCPFTIRLTYVTSDYKQEIVLGVDAGTKHVGLSATTKSKELYSSEVILRNDIVDLLSTRRELRRTRRNRLRYRKHRFNNRIKSRRPGWVAPSVRYKIDAHIRVIDNVCSILPISRIVIEVAQFDTQKINNPNISGKEYQEGNKLGFWNVREYVLARDGHKCQYCKGKSKSKILNVHHLESRKTGGDSPSNLITLCETCHKEYH

SEQ ID NO: 9148 - protein, 440 aa, Moorena sp.
  SITE 410: note = misc_feature - Xaa can be any naturally occurring amino acid
  SITE 422: note = misc_feature - Xaa can be any naturally occurring amino acid
  REGION 437..438: note = misc_feature - Xaa can be any naturally occurring amino acid
LKNETNQTKNRVLVIDKNKQPLMPCHPARARQLMRKGRAAVYRRYPFTIIIKEREGGDTQPTALKFDPGAKTTGIAVVVDCKRGKRCVFAAELEHRGWQIKEGLEKRRAIRRSRRHRKTRYRKPRFKNRTKPKGWLPPSLQSRVDNIASWTKKLRSRIPVSSLSMERVRFDAQKLVNPEISGVEYQQGTLFGYEIREYLLEKWGRKCAYCSKKDVPLQIEHMTPKSRGGSNRIGNLTLSCEKCNQKKNTKTAEEFGFSGLREKSCKPLRAAAAMNATRNAIYSVLKATGLSLETGTGGRTKYNRSKQGYAKEHWLDAMCVGESGENVFVEKQHEVLELKAMGRGSRQMCRVDRYGFPRTKAKSEKRVRGFQTGDIIRAVVPKGKKKGVYEGRVAVRKSGSFNIKQGKQKXVQGIGWKHCKIXQQIDGYSYKNRMGVXXPL

SEQ ID NO: 9149 - protein, 460 aa, Fischerella sp.
MRGESKNKAGLNSSCDKSNQRINNTTKPALFSSQYARQNFVFVLDTNKQPVNPIPPKRARELLTKQKAAVYRMYPFTLILKHAVPNPTPKPLTIKLDPGSKFTGIAVLSGDDVIWVAELEHRGWQIKNALESRCSLRRSRRHRKTRYRQPRFDNRKRFEGWLPPSLMHRVLTIETWVKRLCRYAPITQIVMELVKFDTQALQNPEIDGVEYQQGELFGYEVREYLLEKWGRKCAYCDKEGVPLQIEHMHPRAKGGSNRVSNLTLSCERCNTKKGTKSIDEFLKKDASRLEKIKQQAKKPLKDAAAVNATRWALFRTLKDILPTTTGTGGRTKYNRVRFELPKQHWIDAACVGQVERLNLLTQQPLRIKCTGWGTRQMCGTNKYGFPIRHRERKQVHFGFRTGDIAKVVVTEGSKIGQYVGRVLCRARGSFDIVTKSGRVGDIHYRFCKTIHKKDGYSYAF

SEQ ID NO: 9150 - protein, 457 aa, unidentified; identical to SEQ ID NO: 4299
  REGION 1..457: note = Human gut metagenome

SEQ ID NO: 9151 - protein, 415 aa, unidentified
  REGION 1..415: note = Human gut metagenome
LMPCSPAKARLLLKEKKAIVKRRTPFTIQLTIATGETKQPGSLGVDAGYEHVGLSASTEKAELYASEVELRQDITDLLSARRALRQSRRNRKTRYRAPRFDNRIRTKRKGWLALSLENRINAHLSRIEAVLRLLPVTKITVETASFDLQLLKNPDISGKEYQEGEQLGFWNIREYVLCRDGHVCQHCYGRSKDPVLNVHHLESRRTGGDSPGNLITLCETCHKALHRGEITLKAKRGQSFRAEAFMGIMRWEVHNRLRALHPGIEVSNTYGYRTKHARIANGIAKSHCADAFCIAGNLGAERLCEFFFQKQTRRNNRQIHKLSILKGGIRKRNQAPFEVKGFRLFDKVACQGEEGFIFGRRSSGFFDVRKLDGTRISAGISCKKLHLLEKRRTYLTEIRKEEALPPLPEGRGLRA

SEQ ID NO: 9152 - protein, 456 aa, Halomonas sp.
MAVFVLDKQKRPLMPCSEKRARLLLERGRAVVHKRYPFCIRLKDRVGGDTQPLRLGIDPGSKTTGLALMRESDGEQCHVLCLFDLVHRGFQIKKALAQRAAFRRRRRSKNLRYRAPRFDNRTRKAGWLPPSLQHRVDTIMAWVERLSRLAPITGISQELVRFDTQKMENPEISGVEYQQGTLLGYEVREYLLEKWGRECAYCGATETALEIEHVVPRTSGGSNRVSNLTIACHDCNQAKDSLPLATFFATDKGLKKRLKANGHTADARLERVQRELKRPLRDASAVNATRWALFNALNAIGLPVAVGTGGRTKFNRKRLDIPKTHALDAACVGVFDTLHDWTVPTLTIKCTGRGSYQRTRLTKHGFPRGYLMRQKQVQGFQTGDMVKAVVPCGKKAGTHTGRVAVRKTGSFNIQTDHGAVQGISHKHCTVIQRGDGYGYHHTPSIHHKGGAGQTVA

SEQ ID NO: 9153 - protein, 396 aa, unidentified; identical to SEQ ID NO: 4508
  REGION 1..396: note = Human gut metagenome

SEQ ID NO: 9154 - protein, 354 aa, unidentified
  REGION 1..354: note = Human metagenome
ALPIFCGIDDGSTHVGLAIVQKCLTKNKVVFKGTIEQRQDVKRLMDVRRGYRRYHRCHKRYRQARFNNRSSSKRTCRLAPSIKQKKDAILRVLYQLNSWIDIQEYYLEDVCIDIRAMTDDYKPYRWQYQKSNRLDENLRKATILRDGCRCQECGKSNCILEVHHIRARRYGGADTIGNLITLCKKCHDKTESREKDFEEGYFNMIKSKPKRFDYAMHVMQGKTYLREKISELGILHLTNGGETANKRIEWNIVKSHSNDAICITDGIPDTCDIKEWIIKPMRRKSKAKTDNVLGIKHRDLVSYTYKSGETHTGYVTALYPEQLALNFQSKTKHCKKVNARKCRLLWKFNKIYWL

SEQ ID NO: 9155 - protein, 423 aa, Arthrospira sp.; identical to SEQ ID NO: 2894

SEQ ID NO: 9156 - protein, 419 aa, unidentified; identical to SEQ ID NO: 6355
  REGION 1..419: note = Human gut metagenome

SEQ ID NO: 9157 - protein, 472 aa, Psychromonas sp.
VKPVSLSLNLSITLSKRNLPAQAENVLKGNLVQRVFVLSNTQQPLMPCHPARARELLRQNKAAVFKRYPFTIVLHDRETGYIQPIEVKLDPGSKTTGIALNLHGKKGIKTVWAANLSHRGHQITEAITARSQQRRARRSRNLRYRKPRFLNRAKPKGWFAPSILSRVHNCETWIYRLIKMAPVTLSAIETVRFDMQLMENPNIAGLEYQRGTLLGFELREYLLQRDNHTCQYCGGASGDKILNIDHKHPRAKGGSDRLANLILSCHSCNGDKNATLIPDWLKQVKKSKSKLNIARAKRLPGIIANKVNALRDAAAVNATRYKIGDIVKASGLPVTFWSGGRTKKNRTEQGYQKDHWIDAACVGESGERVFIAKSLKPILISATGHGSRQMCRVDKYGFQRTSAKKNSCVAGFSTGDIVKAVVPGGKNKGTYTGRIAVRASGYFNLKSENIVIQGIKHQHCQILHERDGYNYH

SEQ ID NO: 9158 - protein, 426 aa, Beggiatoa sp.
MQSVFVLDLEKNPLMPCHPARARKLLRKGRAAVYKRYPFTIILKDRVGGELQPVELKFDPGSKTTGIAVVGQFELGQEVVFGANLEHRGQQIKQDLKSRRANRSARRNRKTRYRPARFNNRCRTLGWLPPSLMSRVFNVETWTKRLQKLVPITSIAVETVRFDTQKMQNPEISGIEYQQGVLAGYEVREYLLEKCAYCGKTNVPLEIEHIQPKSKGGSDRISNLTIACVPCNQKKGNRPVEDFLKRKPKILKKVKAQTKKSLKDTAAVNATRYAIGNVLKKTKLPVTFWSGARTKFNRTSQNYPKYHWIDAACVGETGASVCIPDTLKPLTIVAMGHGTRQMCRVDKYGFPRTSAKKQKVIKGFQTGDLVKAVVTSGKKIGTYFGRIAVRTTGYFNITTKNGETTQGISWKCCQMLQGVDGYNYII

SEQ ID NO: 9159 - protein, 415 aa, unidentified; identical to SEQ ID NO: 5047
  REGION 1..415: note = Human gut metagenome

SEQ ID NO: 9160 - protein, 336 aa, unidentified
  REGION 1..336: note = Human gut metagenome
ARRALRQSRRNRKTRYRAPRFDNRIRTKRKGWLAPSVENRINAHLSRIKAVLRLLPVTKITVETASFDLQLLKNPDISGKEYQEGEQLGFWNVREYVLFRDGHVCQHCHGRSKDPVLNVHHLESRRTGSDSPDNLITLCETCHKALHRGEITLKAKRGQSFRAQAFMGIMRREVLNRLKASYPELKVHETYGYLTKHARIANGIVKSHGADAFCIAGNLGAERLGEFFFQKQTRRNNRQIHKLSILKGGIRKRNQAPFEAKGFRLFDKVACQGEEGFIFGRRSSGFFDVRKLDGTRISAGISCKKLRLLEKRRTYLTEIRKEEALPPLPEGRGLRA

SEQ ID NO: 9161 - protein, 421 aa, Moorena sp.; identical to SEQ ID NO: 5881

SEQ ID NO: 9162 - protein, 426 aa, Pseudoflavonifractor sp.; identical to SEQ ID NO: 2797

SEQ ID NO: 9163 - protein, 438 aa, Moorena sp.; identical to SEQ ID NO: 3630

SEQ ID NO: 9164 - protein, 427 aa, Nostoc sp.; identical to SEQ ID NO: 2670

SEQ ID NO: 9165 - protein, 411 aa, unidentified; identical to SEQ ID NO: 3917
  REGION 1..411: note = Human gut metagenome

SEQ ID NO: 9166 - protein, 483 aa, Moorena sp.
MLNKNSVFVLNNNKVSCDPIHPAKARKLLSEGKAAVFRNYPFTIILKSESKPTKNYRIKVDPGAKFTGLALLSNSNIIWCAELEHRGFQISESLIKRRQVRRFRRNRKTRYRQPRFLNRTRPNGWLAPSLISRVQNIKSWVDKLIKLVPVSAISMELVKFDTQKIVNPEIQGTEYQKGELFSYEVREYLLEKFNRTCVYCGTKEAVFNLDHFHPKSRGGSDKVSNLVLSCVQCNQNKRARLPTEFLSDRPKLLALINKQRKLPLADAAAVNATRWKLKLVLESTGLEIETGSGGLTKYNRKRNGISKSHWTDAACVGTSTPDSLNISNYQPLIIKAMGRGNRQMVKPDKYGFPKTKPKLRQKSFYGFQTGDIVKAVVTKGKKIGTYVGRVAVRKTGNFNIKTQTETVQEISYKYCKIIHKSDGYIYSFGELVKQESTNFVKKVVKVLDTPIQLNLFDTSELTTVGVSVAKQSTSKSQKEKEKV

SEQ ID NO: 9167 - protein, 451 aa, unidentified
  REGION 1..451: note = Human gut metagenome
MSVAVMSKTGMRLMPTSEYRARKLLKSKKATVYRYNPFTIQLTERETGDVQTVELCMDTGYLHIGTSVKSEKHEYLGVQIDTLTDEKQKHDACRMYRRQRRSRKRYRQSRFNNRKRSDGWIAPSLEHKKDIHIQTISRICNAIPITNITLEMGNFDTQVLKALEENRPLPQGTDYQHGERYGIATLREAVFARDKYTCQCCRKTIADGAILHVHHIIYRSRGGTNRMSNLATVCDRCHTPANHKPGGRLYNWKPKIASFKGATFMTAVRWKMYNEVKSKFSDINIHITYGAETKEQRRAFDITKSHVNDALVMGQFHPKHRSRPVCYKKKRRNNRCLEKFYDAKYIDSRDGKKRSGQELFNGRINRNHKKDSENLHQYRQQKVSAGRRTIRKQHYSIQPHDIIVFNRQQFETFGCHCNGARAILLPQKKSVAIKKLSVHKYAGGYFKSDFT

SEQ ID NO: 9168 - protein, 353 aa, unidentified
  REGION 1..353: note = seawater metagenome
MPNYQNYVFVVDTLGQPLSPTHRARARKLLKQGLAAVFRTYPFTIILKKTVENPGNEALRLKLDPGASVTGIALVNQSRDTVIWAAELTHRGDRIRAKLTARRVVRRHRRCRKTRYRQARFNNRKRQEGWLAPSLKHRVETTLTWVNRLISSRPITDISMELVRFDTQKLPNPEISGVEYQQGVLFGYELREYLLTKWQHQCAYCGGQNIPLEIEHIQPKSQGGFDRVSNLGIACHKCNQKKGSQPVEQFLLPKPEILKRCSVQAQAPLKNAAAVNSTRWALFNRLKPTGLPIEIGTGGLTKYNRTVQGLPKTHWLDAADCVGKSTHPPVENQNSPAITNYLFWARWPSKSGS

SEQ ID NO: 9169 - protein, 493 aa, unidentified; identical to SEQ ID NO: 2644
  REGION 1..493: note = Human metagenome

SEQ ID NO: 9170 - protein, 425 aa, Anabaena sp.
MSNFVLVLDTNKKPLTPIHPGDARFLLNQQKAAVFRRFPFTIILKEPKSHVPTQPIELKIDPGSKTTGFALVQNNKVIWGMELQHRGLAIKESLETRKGVRRGRRSRHTRYRQARFLNRTKPQGWLAPSLSHRVLTINTWVKRLCNFAPITDIVQELARFDLQQLENPEISGFEYQQGELQGYEVREYLLNKWNRKCAYCTAENVPLQVEHIKPKAKGGTNRISNLCLACEKCNIKKGTQDIEKFLVKKPELLKQILSQAQRTLKDASAVNSTRWALFNKLKETGLPITTGSGGLTKFNRTRLGLPKTHWIDAACVGKVETLKILTTKILTVKSTGHSCRRFCRINKFGFPCTEPKKIFTHVSTGDFVKATLHKDRKNITSGKYVSRVKTPTKNGCEIVINGFRVEFSTMKDITKVHCSDGYSYV

SEQ ID NO: 9171 - protein, 512 aa, unidentified
  REGION 1..512: note = Human gut metagenome
MSTVYVLNKDGKPLMPTTRCGHVRYLLKEKKARVVASKPFIIQLLYETDDVVQPLYLGIDPGRSNIGVAVVKTDGMAVFTAHLETRNKEIPKLMKKRKDSRRARRTNGRRCRRQRRAKANGTISKKCVKQTTAQNGSVSKRAKEIGVIKRHLPGCEKDVLCIGIKNKEAKFNNRTRPTGWLTPTANQLLQTHINLVKKIQKFLPISDVVLEVNKFAFMQLDNPNIQKWQYQKGPLYQKESLKSAVSEMQEHHCLFCKKKIDHYHHVVPQHKNGSNTIDNIVGLCTQHHDLVHKDATWQKRLAKKKTGLNKKYGALSVLNQIIPTLTKELSSLFLKHFFVTNGKSTYDYRAAHGVNKDHWLDAYCIACSVLPNDTCDKIINSRVPYEFKQFRRHDRRALNNENMSRVYTFNGKMVATNRHKATEQTTDSLEEFRQRQPNDVCNLKVKEHHPTYRNMSRNYPGSIFLVEKQVHIMQGIAGSKDGEATTYKDTNANSIAAGKCKFVAKNSGILFV

SEQ ID NO: 9172 - protein, 427 aa, Parasutterella sp.; identical to SEQ ID NO: 4733

SEQ ID NO: 9173 - protein, 474 aa, unidentified
  REGION 1..474: note = Mouse gut metagenome
MSVFVISKNSERLMPTNRLGKVRHMLKDGRAIIYQRNPFTIQLTYETTEYVQPVELCQDTGYQHIGTSVKSESEEYVAAQHDLLLSEKGNHDDCRKYRRDRRNRKRYRAPRFDNRRAAKKPGWIAPSLRNKADRHIDIIRRYIAVAPITSVTIEIGQFDPQVLKAVAEGKPIPTGIAYQHGPMYGIDTLREAVFQRDKHTCIFCGRGLKQGAVLHTHHVYFWRDQHGDSLDELATCCEKCHTPKNHKKGGKLWGYDKKLPRYSGAAFMNTVRWYIYNQLQEYFPDTEIHITYGAATKRARLDLGLDKSHVNDAFAMGKLHPGKRAKAQLFVKRRRNNRCLEKFYDAKYIDVRDGKVKTGAELGCQRINRRELRISDKSQRIYRGKKKSSGRRSVRKQRYSIRPGDVLICNNRKTTAEGVHCNGTRVTIERQSYSIKNITLLYHMGGWIKTTINGKISKTTTSNYERRHGDSSLH

SEQ ID NO: 9174 - protein, 512 aa, Ruminococcus sp.
  SITE 512: note = misc_feature - Xaa can be any naturally occurring amino acid
MTTLEERLSKTEYIYVLGFDGKPQMPTRRKRHVLKLLKTGRARIAEDIPFTIRLTYRNAPVLQPVTLAEDPGRTNIGAAVLSPLGDLLFAAVIETRNKEIKKLMADRKKSRQASRRGERKARQRLAKRYGSMVKSGMIIRKLPMYAADKFVTCKFIRNTQARFCNRKRCPDWITPTVQHLVQTHLNIIRKISRYLPVTDIAFEVSRFAFMHMENPEAIGVDFQNGPLKGYGDVKEAIRTQQHGKCLMCKKPIAHFHHIVPRSRGGSDTIQNLAGLCTEFHTKVHTDTAFRKDFDEKKSGQLKKYGALSALNQAVPFICKKLLEEYGEEHVHFCRGLDTSLIRTALGFEKTKKNQMHEVDAYCIGLAALEVNEVETPAFDHTFQIRQFRRQDRSIIHHQTGRSYYQGKEKVAQNRKPGFEQKTTALSQWYEEQVRIHGEKEAEKLRSQLRVEKSCRHYNDMDRFLPGAVFLYEGKRYVLSGRITNGKYLRACGQGMKNFPAAECTFIRHNAGX

SEQ ID NO: 9175 - protein, 450 aa, Moorena sp.; identical to SEQ ID NO: 2935

SEQ ID NO: 9176 - protein, 424 aa, unidentified; identical to SEQ ID NO: 3351
  REGION 1..424: note = Human gut metagenome

SEQ ID NO: 9177 - protein, 472 aa, Cupriavidus sp.; identical to SEQ ID NO: 3767

SEQ ID NO: 9178 - protein, 456 aa, unidentified; identical to SEQ ID NO: 4017
  REGION 1..456: note = Human gut metagenome

SEQ ID NO: 9179 - protein, 536 aa, unidentified; identical to SEQ ID NO: 4526
  REGION 1..536: note = Human gut metagenome

SEQ ID NO: 9180 - protein, 430 aa, unidentified; identical to SEQ ID NO: 4817
  REGION 1..430: note = Human gut metagenome

SEQ ID NO: 9181 - protein, 453 aa, unidentified; identical to SEQ ID NO: 5967
  REGION 1..453: note = Human gut metagenome

SEQ ID NO: 9182 - protein, 415 aa, unidentified
  REGION 1..415: note = Human gut metagenome
MVYVLDKNGQPLMPTDRHRKVRLMLQSGQAKVIKRCPFTIQLNYDSGHQTQEISLGIDAGSKHIGVSTTTKIKVLYEVDVELRNDIVDLLSSRRELRRGRRNRKTRYRQAKFNNRRRGNGWLAPSIRQKIGTHLTVVENICKMLPISRIMVETASFDIQKIKNPDIQGAEYQQGDQLEFWNVREYVLFRDGHTCQCCKGKSKDKILNVHHIESRKTGGNAPNNLITLCETCHTGYHKGTVQLPKAIKRGMRFKDAAFMGIMRWAFYEALKQQYEPVALVHNTYGYITKHTRIAYNLPKEHYVDARCISGNPEASSNGEYYYQKKVRCHNRQIHKLTVLKGGIRKQNQATYLVKGYRLFDKVSYQGKGYFVFGRRQSGFFDIRTLSGEKVNKGSLNCKKLKFIATRTYYLTERRAV

SEQ ID NO: 9183 - protein, 434 aa, Moorena sp.
MDNRVFVLSRTRKPLMPCHPARARKLLRTGRAAVFRRMPFTIILLDREDGDTQPLEGKYDPGANTTGIALVALFKRGRRVIWAANLHHRGLQIEEKMTERRGFRRNRRKRHCRYRPARYNNRARPKGWLPPSLTSRVENVRTWHRRLMSRAPVSEVHIETVRFDTQKLQNPEIEGVEYQRGELFGYEVREYLLEKWGRECAYCGAEQVPLEIEHIVPKSRGGSDRVSNLTLACRACNQAKGNRDVREFLANDPERLAKILAQAKAPLKGAAAVNSTRYAIGEAIKASDLPVSFWSGGRTKRNRLSQGYQKDHWIDAACVGASGESVFVPKGFLPLEIQARGRGHRRVHNNDDFGFPRGAPRKCKRVQGFQTGDLVELVCKRGKSAGRHVGRLTSIRARGWFVLRKGGRNHDRPAREFRLLARADGYEYTTGTTG

SEQ ID NO: 9184 - protein, 431 aa, unidentified
  REGION 1..431: note = Human oral metagenome
MLVYVISKDGQPLMPISRCGKVRRLLKNRQAKVVRRCPFTIKLLFEPEHNFVRECYLGVDTGSKHVGVAVVSNDRVLYQSQTELRANIKKKIDYRRMYRRYRRYRKTRYRKCRFLNRRNSIKKDRLPPSVQHKVQAHIDEIEFCKKILPVLDENIILEVSQFDTALMKNSSLMNEKIKHWGYQQGFNYGYSSRRKAVLHRDNYTCQCCGKKNCRLDVHHIIYRTNGGSNDETNLITLCKECHTKVHKGIITIDKKPKKMKLKHATHMSIIRNRLLKVYPQAIETFGFVTSENRHHLGLEKAHYIDACVIASGGLEFEPSDTVYYKRRGSCNERKLTKGVRDEQKLPVGKIQGFRRFDKVKYFGKEYFIMSRITRGGYAFLMDIFNNKIDFSDKPKGWRWPKLLNCKRISARRSTLCMLTTKIVSENKNSNQ

SEQ ID NO: 9185 - protein, 506 aa, unidentified
  REGION 1..506: note = Human gut metagenome
MVCVVSNTGKRLMPTTEYKARKLMEKGRAKIYQYDPFTIIILDREDGYTQFVELKCDTGDKHIGMSICSEKHEYVSVEVNPLKDEKEKHNDQKKYRRTRRNRKRYRKPRFDNRKRKEDWLAPSLEHKVEIHKHWIEKYIKVMPIEKVILETGTFDTQRLKAINDGKTLPVGTDYQRGEQYDFYTMRDAVFSRDHYTCQCCKKSMNTNKNMVLRTHHIGYWKGDRSNRVSNLLTVCDKCHTQVNHQPSGKLYGLQPKSKKLPEAAFMNSVRYILVDEIYKLQEKLNVSFEVETTYGSMTKLKRKELGIAKSHVNDAYVMGEFHPKHRCQSEQYQKKRRNNRILSKFYDAKYIDSRDNSIKTGKELSSGRTNRNHKRDSENLHQYRKQKVTKGKTTIRKNHYPFQPKDIVLYDGKKYKVNGTNNKGKSVQLYIEERVSIEEITLAKKKKNMQTEEIECGDKVIYEKKIYTVKNIINTKHVLLSGLISTKPENLKHLKYSNGYDKVEIV

SEQ ID NO: 9186 - protein, 515 aa, unidentified; identical to SEQ ID NO: 5111
  REGION 1..515: note = Human gut metagenome

SEQ ID NO: 9187 - protein, 431 aa, unidentified; identical to SEQ ID NO: 8838
  REGION 1..431: note = Human gut metagenome

SEQ ID NO: 9188 - protein, 536 aa, unidentified; identical to SEQ ID NO: 4526
  REGION 1..536: note = Human gut metagenome

SEQ ID NO: 9189 - protein, 412 aa, unidentified; identical to SEQ ID NO: 4932
  REGION 1..412: note = Human gut metagenome

SEQ ID NO: 9190 - protein, 423 aa, Moorena sp.; identical to SEQ ID NO: 5218

SEQ ID NO: 9191 - protein, 415 aa, Bacillus sp.; identical to SEQ ID NO: 2671

SEQ ID NO: 9192 - protein, 419 aa, unidentified; identical to SEQ ID NO: 3670
  REGION 1..419: note = Human gut metagenome

SEQ ID NO: 9193 - protein, 443 aa, Chromatium sp.; identical to SEQ ID NO: 6630

SEQ ID NO: 9194 - protein, 466 aa, unidentified
  REGION 1..466: note = Human gut metagenome
LSIKPLINIGEGVIYSSICTGLSLQTYQKRKEVPCMVYVLDINGQPLMPTTRHGKVRRLLNSHLAKVVKRCPFTIQLLYQSTKEIQPVSLGVDAGSKHIGMAATTEKKVVYQEELSPHNDVVKLLSARRTLRRTRRNRKTRYRKPRFNNRVHSKHKGWLAPSVEVKIQEHITAIKRICQILPISEIHVEISEFDLQRLKAMEEGRTLPVGTDYQLGEQYDFYNTRQYVLHRDGYTFQCCGTHDNNIKLHVHHIESRQTGGDAPSNLITLCEHCHKALHKGKLELPKGKKRGKTYRDATFMGIMRKTLLERLRKEVDVPASGTYGYITKYWRERAGLEKSHINDAICISKYPYAKPLDTYYLTKAVRNHNRQIHKSNFSKGGIRKRNQAPYLVKGFRLFDKVLYQGKEYFIFGRRATGYFDIRTLDGTKVNKGSISYKKLRIQDTAKAYLKEARAIPHMNKFTCVLA

SEQ ID NO: 9195 - protein, 470 aa, unidentified; identical to SEQ ID NO: 7284
  REGION 1..470: note = Human gut metagenome

SEQ ID NO: 9196 - protein, 281 aa, unidentified
  REGION 1..281: note = Human gut metagenome
VWLYQAVYNLGEGFLPSSEERTAFYWLLIYRKEHGIMQYVYVLNKHGEPLMPCSPGKARLLLKQQKACVVKRTPFTIKLLYGSAGYKQPITLGVDAGSKHVGLSASTEKRELYREEFTPRNDVVDLLSTRRQNRRSRRNRKTRYRAPRFDNRVHSKHKGWLAPSVEVKIQEHITVIKRICRILPITLVRVETAEFDTQRLKAMLKGKPLPVGTDYQLGEMYDEYNVRQYVLKRDTYTCQCCGVSVKTTSRSSPGCRSIFANLRSAWGTRPPGTGAPVASAT

SEQ ID NO: 9197 - protein, 418 aa, unidentified; identical to SEQ ID NO: 4327
  REGION 1..418: note = Human gut metagenome

SEQ ID NO: 9198 - protein, 417 aa, unidentified
  REGION 1..417: note = Human gut metagenome
MPCSPAKARLLLKEKKAIVKRRTPFTIQLTIATGEAKQPVTLGVDSGYKHIGLSATTEKAELYASQVELRQDITDLLSARLALRRSRRSRKTRYRAPRFNNRMASKHKGWLAPSVENRIAAHLSRVEAVMRVLPVTAITVETAAFDTQLLKDPDIAGGAYQQGEQLGFWNVREYVLFRDEHVCQHCRGKSKDSILNVHHIESRRTGGDAPNNLITLCETCHKAFHREEIELKVKRGKSFKAETFMGIMRWTLFERLKKAHPELSVRNTYGYLTKHKRISHGIAKSHCADAYCIADNLGAKRLEGFFFQKQTRKHNRQIHKLLILKGGLKKKNQAPYEVKGFRLFDKVICKSEEAFIFGRRTSGSFDVRRLDGTRISAGISYKKLRLLEPRTTYLTEFRKEAALPPLHKCRGFRAEFL

SEQ ID NO: 9199 - protein, 511 aa, unidentified; identical to SEQ ID NO: 2813
  REGION 1..511: note = Human gut metagenome

SEQ ID NO: 9200 - protein, 457 aa, unidentified
  REGION 1..457: note = Human gut metagenome
MDAVAVISASGKPLMPTNPMRARKLIKKGKAVIYKYRPLFTIRLTERTDGDIQTIEYCCDTGYQHIGLSIKSRKHEYVNEQRDLLPNETERHNDSRKYRKARRRRKLRHRACRRDNRHDNQICKDGYAPSIRNKRDQHISLYRSYTEILPVERAVFEMGQFDTQVLKAIEKGEPLPQGKDYQHGERYGYATLREAVFARDDYTCICCGKNSFKDKRILCVHHLGFRIGDRTNRLANLATVCTKCHTPKNHQPKGKLYNLKPELKDFKGATFMTMVRWDMLDKLKVVSKDIQVDVTYGAATKEARRDLKIKKSHANDAYCMGSFHPSHRTDLKRYEKCRRNNRVLSKFYDATYIDIRDGKKKKANALGCNRTKRRESRRSEKNERIYRGKKVSKGRIVLRTKRAVIRPGDIVYVGKKKYIVASSKNLGAQLKLADGSLLTTSKVTKIIHCGGWKTVTL

SEQ ID NO: 9201 - protein, 515 aa, unidentified; identical to SEQ ID NO: 8359
  REGION 1..515: note = Human gut metagenome

SEQ ID NO: 9202 - protein, 406 aa, unidentified
  REGION 1..406: note = Human gut metagenome
MRSKPLMPCSPAKARHMLKAGKAVVVRRTPFTIKLTIATGETKQDVTLGVDAGARHVGISATTEKEEVFASEVALRQDITGLLADRLAFRRARRNRKTRYRAPRFNNRVRSKHKGWLAPSVENRIQAHMSRIEAVCRLLPVTKIVIETASFDIQKIRNPEVEGTGYQQGDQLGFWNVREYVLFRDGHICQHCRGRSKDPILNVHHLESRKTGGDAPNNLITLCETCHKAYHAGKIKLKVKRGQSFRAEAFMGIMRWTLLDRVRKTHPKLPVENTYGYLTKHKRIALGLPKTHCADAFCIAGNLKALRRGDFLFQQQTRKHNRQIHKCSILKGGVRKLNQAPFLVKGFRLFDKVRIGGQIGFVFGRRVRGTFNIRRLDKTVIGTDINCKKLSLLETRKTFLTELRKE

SEQ ID NO: 9203 - protein, 424 aa, unidentified; identical to SEQ ID NO: 3232
  REGION 1..424: note = metagenome

SEQ ID NO: 9204 - protein, 544 aa, unidentified
  REGION 1..544: note = Human gut metagenome
MKQKKQKVMVYILNKKGKPLMPTTRCGHVRKLLNSKKAVVVNSNPFTIRLKYDTPNGVQDVFAGIDSGRENIGSGVSNEDGDCLYLGELRTSNKSIKMKMTERVGFRRERRKHDRQNKQRKARKDHTEIQNGNADICRTTISCKSVQISYPAAEKSVTHKIIRGKEGKFANRHRDGDWITPSARQLVQMHMNDLKSMCKILPISHVTLERVAFDFQKLENENIKVWEYGKGKLYGYDSPEEYIHDVQDGKCLVCGKPHIDYLHHIIPRSKGGSDKVSNIAGLCYDCHYGPMGVHNCQNTQDRLPELKSEANKQYKVSLLNSVMPVLIEEMDKFCKANSIMFSICEGHDTAKVRDMYDLQKDHCIDGFAISLVDRNVKSVDVMPDRIYQKQRYKKKSKNIIQKRNYREYYDDKKLVAINRHKGTDQKADSLEEYMNTYAETHTTDECKKHFDSLVVKPARRTYTFHKEWRICPFHIGDKVRYEKKNKIKGNTKVDTFICEGIRFVKDENKAEVKHNKTKSKKMKFCRVLESGCTPYVDYRKLALM

SEQ ID NO: 9205 - protein, 443 aa, Anoxybacillus sp.; identical to SEQ ID NO: 4812

SEQ ID NO: 9206 - protein, 438 aa, Moorena sp.
MNQVFVLDTTKQPLNPVHPGYARLLLKQGKAAVYRRYPFTIRLSRRVEQPILSPLRIKVDPGSKTSGLALVNDASGDVVWAAELTHRGEQIKRDLDRRRAIRRKRRQRKTRYRKPRFTNRRKRRGTLPPSLESRVCNVLTWVCRLMKVCPVTNISQELVRFDTQALETPDIEGAQYQRGQLSGYEVREYVLLKWKHQCAYCDARDVPLELDHIDPRSRHGSNRVSNLTLACTPCNQRKSNQDVRQFLRDEPERLARILAQMKAPLRDAEAVNATRWMLNARLKTLGLPVECGSGGRTKCNRITRELPKTHWLDAVCVGRSTPESLIIKNIVPLQIRATGHGSRQMCRMDKYGFPRTGSKQHKRVQGFQTGDLVRAVVTSGTKQGTYVGKVAVRSRGTFNISTAHGVVTDIPHRFCVLVARSDGYSYQQGKEAAFLPSA

SEQ ID NO: 9207 - protein, 465 aa, unidentified
  REGION 1..465: note = Human gut metagenome
MSTCACVLSKNGERLMPTIRLGKVRHLLKDGKAKIIKHHPFTIQLLYDSETNIQPIEICEDVGYNYIGISVKSQSHEYVSAQYDTLQDEKSCHDACRRMRRTRRNRLRYRQKRFDNRKRDKGWLAPSLKHKKELNVNVIKMYCEVVPITHATVEVGSFDTMLVKAIEEGKATPEGADYQKGPRYNLATLREAVFYRDNYTCQVCGREASEGAILHVHHMFYWKGRHDNSLSELITVCEKCHTPANHQKGGKLYGFGEDIKFANLSGAAFMNTVRWQIVNELYAAFGKPFVTFTYGAMTKEKRIALHLEKSHNNDAYAMGEFHPNCRCTFEHYEKVRRNNRILEKFYDSRYIDIRTGEIATGKELFNGRINRSHKKDSENLHKYRGKRIRKGYRALRRKKVALNPGGLVSLNGEILTVHGTHTKKNGSVNVEFKTPSKSGKKSTSLKKLKIIKTISPMRSAWDKVS

SEQ ID NO: 9208 - protein, 413 aa, unidentified
  REGION 1..413: note = Human gut metagenome
MTSYAFVLDANGKQLAPAKEQKAWFLIRKKRAALVSKYPMVIQLKKEIPENEICKDEIRCGIDDGGLHVGIALVQKCKTKNKVVFKGIMEQRNDVKHLMEVRRSYRRYHRYHKRYRLARFDNRKSSKRKKRIAPSILQKRQAIIRVIHWLNKWINITNYWLEDVSIDIRALTDGYKPYRWQYQKSNRLDENIRKAAILRDGGKCMECGKLNCRLEVHHIKPRRRNGSDTLDNLITLCESCHQKTEGQEELYMDRYFSLLKSSDHKKPYYAQHVMIGKEWLRKQLSSLGVLYLTNGGDTANKRIDWNIEKSHANDAVCITNLQPDTYDMKEWTVKPMRRQSKAKTDNVFRNKHRDLVEYTFKNGETHRGYVTALYPEQKAINFQSSTKHCKKVNARKCKLLWKYSKIYWFENAS

SEQ ID NO: 9209 - protein, 414 aa, unidentified; identical to SEQ ID NO: 6921
  REGION 1..414: note = Human gut metagenome

SEQ ID NO: 9210 - protein, 427 aa, Moorena sp.; identical to SEQ ID NO: 5902

SEQ ID NO: 9211 - protein, 475 aa, unidentified
  REGION 1..475: note = Human gut metagenome
MVITLDKNKRPLGFMSERRCRILLEKKRAVLYRYFPTIVILKDVDARKLSGLSSYRIKIDPGAKYTGIAIVMDDTNEFMYAMQIEHRGEQIKKNLDTRRSARRNRRSRETGYRRPKWGNRCTAKEQRQSYDSRRDENWLPPSVKSTADNIISWIRRLCRWINITNCSIESVRFDTQLMENPEIEGVEYQQGTLYGYEVKEYLLEKYGHTCQYCGGKSNDPILEWEHMLPRSRGGSDRLKNASLACHNCNQDKGNHTLEEWQTILQDRIPKERGKQKELDQIRQKFVQQVMERKAPVKGLRYAAWVNSSRRYSQRHLYLRFPELECSSGGRTKYNRNLLKYPKEHHYDALCVGEIPEDGFVDRTHGYYLYAKATGRGTRLRGQINQCGVIIRKWMDRSKTAFGFQTGDLVVADVPKDTKYKYKGHFSGRVMIRKSGSFDIRTLSGELVTVNAKFCRLLQNNSGYQMMIKRAIPLGN

SEQ ID NO: 9212 - protein, 346 aa, unidentified
  REGION 1..346: note = Human gut metagenome
MVYVQDINGKPLMPTTRHGKVRRLLKDKKAVVVNLCPFTIKLMYVTSDYKQEIVLGVDAGTKHVGLSATTKSKELYSSEVILRNDIVDLLSTRRELRKARRNRLRYRKPRFDNRVKSKRPGWIAPSVKYKVDAHIRVVENVCSILPISRIVIEVAQFDTQKIKNPEISGKEYQEGDQLEFWNTREYVLARDGHKCQYCKGKSKDSILNVHHIESRKTGGDSPSNLITLCETCHKEYHKGNIDLKIRRGKSLRDAAVMGIMKWRLYEELKSRYDRVFMTFGYITKHNRIKYGIEKSHTSDAFVISKNINAKRIERQYLKRLIRRHNRQIHKMKILKGGEEEKQSSSF

SEQ ID NO: 9213 - protein, 401 aa, unidentified
  REGION 1..401: note = Human gut metagenome
RRQRRAKANGTISKKCVKQTTAQNGSVSKRAKEIGVIKRHLPGCEKEVLCIGIKNKEAKFSNRVRPEGWLTPTANQLLQTHINLVKKIQKFLPISDVVLEVNKFAFMQLGNPNIQKWQYQQGPLYQKASLEEAVSEMQEHHCLFCKKPIDHYHHVVPQHKNGSNTIGNIVGLCAKHHDLVHKDTTWQKKLAKKKTGLNKKYGALSVLNQIIPALTKELSSLFPKHFFATNGKSTYDYRAAHGVSKDHWLDAYCIACSVLPNDVCDSDINNRVPYELKQFRRHDRRALHKENMSRVYTLNGKSVATNRHKATEQTTDSLEEFRQCQPDDVCKLKVKEHHPEYRNPKRNFPGCVFLVGKHTHVIQGTSGSHNGKADGYYDTNGNSYSSGKCKFVAKNEGIVFT

SEQ ID NO: 9214 - protein, 348 aa, Enterococcus sp.
VTLREDKNNSIKKKMDQRRMYRRNRRSCKTRYRKARFNNRKNSKRKERFSPTMTSKLHSHQKEIEFIKSILPIAKLIFETGTFDPRLMKNPSLANPKVKPWGYQQGPNYGFENTKARVLVRDNHTCQICNKKPKNERLEVHHIVFRSQGGSDEENNLVTLCHSCHVELHKGLIHPNFEGSLKSALKYATQMNSIRIQLLKLYPDAIETFGYVTKANRLNLGLPKEHYVDAAVIATAGNQVKFACNLMIKRCIPKGDFQRTKGVRSEKTIPKGKIDGFKKYDKVRYFGNEYFIKGRRTSGYFTLMDIYGQTISFNHMSKGQKTPKAKNCHRISARKSWIVTTKKLENIA

SEQ ID NO: 9215 - protein, 376 aa, unidentified
  REGION 1..376: note = Human gut metagenome
PVSLGVDAGYKHVGLSASTENAELYASEVELRQDVSDLLSARRALRQSRRNRNTRYRAPRFDNRIRTKRKGWLAPSVENRINAHLSRIETVIRLLPVTKITVETTSFDMQLLKNSDIAGKKYQEGEQLGFWNVREYVLFRDGHVCQHCHGRSKDPVLNVHHLESRRTGGDSPGNLITLCETCHKALHRGEITLKAKRGQSFRAETFMGIMRWEVLDRLKASHPKLEVQNTYGYRTKHARISNGIAKSHCADAFCIAGNLGAERLGEFFFQKQTRRNNRQIHKLSILKGGIRKRNQAPYEIKGFRLFDKVACQGEEGFIFGRRSSGYFDVRKLNGTRISAGISCKKLRLLEKRQTYLTEIRKEEALPPLPEGRGVRA

SEQ ID NO: 9216 - protein, 460 aa, Streptomyces sp.; identical to SEQ ID NO: 6819

SEQ ID NO: 9217 - protein, 358 aa, unidentified
  REGION 1..358: note = Human gut metagenome
VLGVDAGTKHVGLSATTKSKELYSGEVILRNDIVELLSTRRESRRTRRNRLRYRKPRFENRVKSKRLGWVAPSVRHRIDAHIRIINNVCSILPVSRVIVEVAQFDTQKIKNPEISGKEYQEGDQLGFWNVREYVLARDGHKCQHCKGKSKDPILNIHHIESRKTGGDSPSNLITLCETCHKEFHKGNIKLKVKRGKSLRDAAVMSIMKWELYDELKSLYPNVKMTFGYITKYNRINHGIEKSHVSDAFVISRNFDSERLGYYYKLKLVRRHNRQIHKMKIPKGGKKRMNQSPFKVFGFKLFDKVMFQGEERFIYARRLSGQFKIKDIDGNNERNISYKKLRYVSHGLISIKTNLFLSQ

SEQ ID NO: 9218 - protein, 425 aa, unidentified; identical to SEQ ID NO: 6631
  REGION 1..425: note = bioreactor sludge metagenome

SEQ ID NO: 9219 - protein, 450 aa, Moorena sp.; identical to SEQ ID NO: 2935

SEQ ID NO: 9220 - protein, 414 aa, unidentified
  REGION 1..414: note = Human gut metagenome
MPCSPAKARLLLKEKKAIVKRRTPFTIQLTIATGETKQPVSLGVDAGYKHVGLSASTEKAELYASEVELRQDITDLLSARRALRQSRRNRKTRYRAPRFDNRIRTKRKGWLAPSVENRINAHLSRIEAVLRLLPVTKITVETASFDLQLLKNPDISGKEYQEGEQLGFWNIREYVLCRDGHVCQHCYGRSKDPVLNVHHLESRRTGGDSPGNLITLCETCHKALHRGEITLKPKRGQSFRAEAFMGIMRWEVLDRLKASHPKLEVQNTYGYRTKHARISNGIAKSHCADAFCIAGNLGAERLGEFFFQKQTRRNNRQIHKLSILKGGIRKRNQAPYEIKGFRLFDKVACQGEEGFIFGRRSSGFFDVRKVDGTRISAGISYKKLHLLEKRRTYLTEIRKEEALPPLPEGRGVRA

SEQ ID NO: 9221 - protein, 502 aa, Moorena sp.; identical to SEQ ID NO: 2616

SEQ ID NO: 9222 - protein, 431 aa, unidentified; identical to SEQ ID NO: 4463
  REGION 1..431: note = Human gut metagenome

SEQ ID NO: 9223 - protein, 414 aa, unidentified; identical to SEQ ID NO: 2588
  REGION 1..414: note = Human gut metagenome

SEQ ID NO: 9224 - protein, 418 aa, Methanobrevibacter sp.
MFVYVLNMHGESLMPCKPRKARVLLKEKKAKVVNRTPFTIQLLYRSSGYKQPVNLGVDAGSKYIGLSATTNKKELFKATVELRQDIPKLLESRKIQRRNRRSKLRYRPARFNNRGKKGKLAPSIQHKIDTHLTIIKRICNIIPIENIIVETAEFDVHKLKNPSVSGVDYQHGDAKGFYNVKSAVLSRDNYTCQICGAKNTKLQVHHIRFRSDGGSNRMDNLVTLCKECHDKVHTGELKYTKKVKSFKHSTHMNIIGKRLVQSLKNEFSNVFETFGYLTKYTREKLGLVKSHCNDAFVISHNLDAEQSNVEYSYKKVRRHNRQIHKFKPSKGGKRKCNQSPYIVNGFRRYDKVLYNDKECFITGKRSNGYFQLKTFDGTVISQGVSSKRLKLLEPIKGWLIDWRLAIPPRPKEVGVSLP

SEQ ID NO: 9225 - protein, 413 aa, unidentified
  REGION 1..413: note = Human gut metagenome
MTSYAFVLDVNGKQLAPTKEQKAWFLIRKKRAALVSKYPMVIQLKKEIQGNEICKDEIRCGIDDGGLHVGIALVQKCKTKNKVVFKGTIEQRNDVKHLMEVRRGYRRYHRYHKRYRQARFNNRKSSKREGRIAPSILQKRQATIRVINQLNKWINITNYWLEDVSIDIRVLTDGYKPYCWQYQKSNRLDENIRKAAILRDGGKCMECGKSNCRLEVHHIKPRRRNGSNTLDNLITLCESCHQKTEGQEELYMDRYFSMLKSSDHKNLNYAQHVMIGKKWLRKQLSSLGVLYLTNGGDTANKRIDWNIEKSHANDAVCITDLQPDTYDMKEWTMKPMRRKSKAKTDNVLGIRHRDLVEYTFKNGETHRGYVTALYPEQKAINFQSPTKHCKKVNARKCKLRWKYSEIYWFENVS

SEQ ID NO: 9226 - protein, 555 aa, Moorena sp.
MYVRVIAKDGTPLMPTKRFGKVRHLLETGNAVAIKTRPFTIRLKYETTKYVQDLYGGIDTGRENIGSAVSKENGENVYLADTRSNNGSIHSQMYDRAGFRRERRRHDRQNKQRKAKHDHTEMQNGDKDKVRTTHDCISRKVSYPGAEEPVTHKVIQGKEGKFNNRKRPEGWITPSARQLVQVTMNEVKFMCDTMPIKQLSVERVSFDFQKLANVHIRKWQYSKGPLYGYNSYKDYIYDEQKGKCPFCGEELVHYHHMKPRHKRGTDTVQNIIGVCESCHEMIHCGEITDDMLHEAKDSVVRSFEVSLLNSVMPALIDAMKQFCDQRGIHLVVTDGKTTSDARDKYHIQKDHSTDAYCISLTGCDIDPANAKLDDHIFRKRRFKKKSKNIISARNQRVYYDGKEPVAYNRHRAMDQKTDSLEQYIAKFRLAHTSAEADKHFRSLTVKPARRTYTFHKNGTPAVIHAGDVVRYVKYNKTYGNTKTETFVALSCDMSGEGRVKYGNGNKAKKLKFCRTIAPGALQCVGVERTDVYLRAAALEETKRKTVRAGRKKIAG

SEQ ID NO: 9227 - protein, 442 aa, Lactobacillus sp.; identical to SEQ ID NO: 3489

SEQ ID NO: 9228 - protein, 470 aa, unidentified
  REGION 1..470: note = Human gut metagenome
MSVFVVGLNGCRLMPTSERKARLLLKQGKAFVEQKVPFTIRLNYKTGSTTQLGYLGIDTGSQHIGVSVVREDGTVLHKEEIGLRDSMSKRKLLEAKASLRRGRRYRKTRYRHPKWRPKTKRVYCEVPDRKGRHWQKKKITFTSKRPKGWLPPSLQSKTDHHIRWIKKLQDLLPEGYRLSIELGRFDPARMKNPEIHGNLYQKGPQYDYENVRAYVLDRDRYTCQICKKKGGKLHVHHILYRSHGATDDPQYMVTVCSDCHSAQNHLPGGILYQWMQEQKRFSRGLRDATFMNILRKRLIRAFPEAVFTYGNVTKVDREKLKLPKSHGNDATAIALVKTGITAVKDKESVICIQQVRRKKRSLHEETPRKGRKEPNRTAARNNKNTKAVTVTKRQNKKKVSMTGCLFDRVELNGKKGWISGFTGKSCYVKDADDQYLSTSPKYKQVSLSKLRILHHCGNWIIGAKKTLGKG

SEQ ID NO: 9229 - protein, 544 aa, unidentified; identical to SEQ ID NO: 3572
  REGION 1..544: note = Human gut metagenome

SEQ ID NO: 9230 - protein, 433 aa, Clostridium sp.; identical to SEQ ID NO: 7140

SEQ ID NO: 9231 - protein, 280 aa, unidentified
  REGION 1..280: note = Human gut metagenome
VKYKVDAHIRVVENVCSILPISRIVIEVAQFDTQKIKNPEISGKEYQEGDQLEFWNTREYVLARDGHKCQYCKGKSKDSILNVHHIESRKTGGDSPSNLITLCETCHKEYHKGNIDLKIRRGKSLRDAAVMGIMKWRLYEELKSRYDRVFMTFGYITKHNRIKYGIEKSHTSDAFVISKNINAKRIERQYLKRLIRRHNRQIHKMKILKGGKKKNNQAPFEVFGFRLFDKVLYNNKIFFVYGRRKSGSFNIRDFNGENSKDVSRKKFKLIRGKRHPIILK

SEQ ID NO: 9232 - protein, 560 aa, Streptomyces sp.; identical to SEQ ID NO: 6854

SEQ ID NO: 9233 - protein, 512 aa, unidentified
  REGION 1..512: note = Human gut metagenome
MSTVYVLNKDGKPLMPTTRCGHVRHLLKEQKARVVTSKPFTIQLLYETDDVVQPLYLGIDPGRTNIGVAVVKADGTAVFTAHLETRNREIPKLMKKRKDSRRTRRTDGRRCRRQRRAKANGTISKKCVKQDTAQNGSVSKRAKKIGVIKRHLPGCEKEVLCIGIKNKEAKFSNRVRPEGWLTPTANQLLQTHINLVKKIQKFLPISDVVLEINKFAFMRLDNPNIQKWQYQQGPLYQKASLEEAVSEMQEHHCLFCKKPIAHYHHVVPQSENGSNTIGNIVGLCTKHHDLVHKDTAWQKKLAKKKTGLNKKYGALSVLNQIIPALTKELSSLFPKHFFATNGKSTYDYRAAHGVSKDHWLDAYCIACSVLADDVCDNNINSHVPYELKQFRRHDRRALHKENMSRVYTLNGKSVATNRHKATEQTTDSLEEFRQRQPNDVCKLKVKEHHPEYRNPKRNFPGCVFLVGKHTHVMQGTSGSHNGKADGYYDTNGNSYSSGECKFVAKNGGIVFA

SEQ ID NO: 9234 - protein, 480 aa, unidentified
  REGION 1..480: note = Human gut metagenome
LHTKPLDNIGEGSLPPSGEINLKGMTFMVYVKSIDGKALMPTSNAKARKLLKQKKAKVVSLRPFVVKLTYKTKTEYTQKLNFGVDSGYSNIGFSVIDAKQEYIAGEVKLLEGMKKRLLEKASYRRIRRSRLRYRKARWNNRVKSKKKGWLAPSLKHKLDTHIKFIDYLKDILPIGKITIEVANFDIQKMKDDLISGIDYQNGDMFGFWNVREFVLHRDGHKCQNPNCKHKDKKEQILKVHHIRYRSEGGSDRPENLITLCSKCHTPANHKKGKFLYDWCVNGKKVRGFKEATFMSMIRWYLVNELKSKHNNMSITYGYITKNHRIQNGIEKSHLNDAFAIAKGTNQARTKERFLVIQDRLKNRSLEKFYDSKIIDIRIGKKVSGGDLNCGRSTRNKNLNTENLRKYRGVKISKGQRRIRKQKYFYQPNDLVKYDGKVYTVKGTQNEGKYIALKEIKKVPKVELLIPYVFKKGLNWSYGLC

SEQ ID NO: 9235 - protein, 428 aa, Moorena sp.; identical to SEQ ID NO: 4771

SEQ ID NO: 9236 - protein, 473 aa, Actinoplanes sp.; identical to SEQ ID NO: 2808

SEQ ID NO: 9237 - protein, 413 aa, unidentified
  REGION 1..413: note = gut metagenome
MVYVISKNGQPLMPTENYAKIRVLLKNKKAKIIKRCPFTIQLAYDSKNYTQDITLGVDAGSKHIGLSATTKDKVLFESDVELRNDIVDLLSTRRQNRRTRRNHKTRYRKPRFNNRRRKDGWLAPSIQNKVDTHLTVIRRVHEILPITKIIVEVASFDIQKIKNPTISGIEYQQGEQLDFWNVREYVLFRDGHTCQCCKGKSKDKILNVHHIESRHTGGNAPNNLITLCETCHSGYHKGIVKLPNTIKRGMSFRDATFMGIMRWYFYNKLKEAYPNVSLTYGYITKNTRIENGLSKNHYIDARCISGNPLAVSDGTVYYQKKIRCHNRQIYKNTILKGGIRKRNQADYEIKGFRLFDTIRYKGNTYIIFGRRNSGFFDIRTLDGIKVNNGSVSCKKMQLIQPNSNYLIEIRKCA

SEQ ID NO: 9238 - protein, 456 aa, unidentified; identical to SEQ ID NO: 7939
  REGION 1..456: note = Human gut metagenome

SEQ ID NO: 9239 - protein, 537 aa, unidentified
  REGION 1..537: note = Human gut metagenome
MQYVYVVDKHGKALMPTTRYRHVRKLLKSGKVVAICNKPFTIRLKYESSTYTQDLWEGIDTGRQNIGDAVSNEKGENVYLADVRTNNKSIKSNMQDRAGFRRERRRHDRQSKQRKAKHDGTEIQNGDDDTVRTKHSCKSIKISYPTADEPVIHKVIRGKEGKFANRKRPEGWITPSARQVIQITMNEIRQTARILPVNHINLERVSFDFQKLENQDIRRWEYGKGALYGYKTYKDYIWDEQHGKCACCGKPITQYHHIIHRAEGGINSVKNIIGLCNGCHNKIHASKDAEDKLKELKEGVRQRYYVGLLNSVIPALIEEVSAYCDEHGIEFTVTDGKTTAETREKYGLSKDHCTDAYAISLADRDVKSVSVSDRIYEKRRFKKKSGNIIAKRNQRVYKFDGKIIAYNRHKATNQKDDSFEEYMTKYAETHTDKECRQHVAQIEIIPAKRTYTYHKQGLVAPCHAGDIVRYEKHNKIKGNTKKDTFVATSVEMNGEGHIKYGDACGSRKIKFCRPIDSGCLQAVHNYQADEYLRKIAE

SEQ ID NO: 9240 - protein, 398 aa, Anoxybacillus sp.
AAIYKRYPFTIILKEIVDNFRPKTPYRLKIDHGSKHTGLAILRGQEVVWLGQLDHRTDIKERMDKRRAFRRARRNRKTRYRKPRFLNRRRKDGWLPPSLESRVQNIQTWVNHLKKLCPIGYISYENTKFDTQLMRNPEINGVEYQQGTLQGYEVREYLLEKFGRKCCYCGKENVPLEVEHIIPKSRGGTDRVDNLCLACHDCNQRKGSKTAEEFGYPHIQKQVKESLKDASAVNSTRWKVYEVLKQSGCEVECGTGARTKMNRIRLDLPKTHYFDACCVGERTPNHLYFKTKEVLFIRAKGRGSRSRTNLDRYGFPRGYLARQKFFFGFQTGDMVKAVIPRGKYQGVWFGEVACRKTGSFDIKGKDGKRIAQGINYRYVQVIQRFDGYTYRREGMNIA

SEQ ID NO: 9241 - protein, 512 aa, unidentified
  REGION 1..512: note = Human gut metagenome
MSTVYVLNKDGKPLMPTTRGGHVRHLLKEQKARVVRTKPFTIQLLYETDDVVQPLYLGIDPGRTNIGVAVVKADSTAVFTAHLETRNEEIPKLMQGRKKARRARRTNGRRCRRQRRAKANGTISKKCVKQTTAQNGSASKRAKEIGVIKRHLLGCEKDVLCIGIKNKEAKFSNRTRPEGWLTPTANQLLKTHINLVKKIRKFLPISDVVLEINKFAFMRLDNPNIQKWQYQQGPLYQKASLEEAVSEMQEHHCLFCKKSIAHYHHVVPQSENGSNTIGNIVGLCTKHHDFVHKDTAWQKKLAKKKTGLNKKYGALSVLNQIIPALTKELSSLFPKHFFATNGKSTHDYRIAHGVSKDHWLDAYCIACSVLPNDTCDRTINSRVPYELKQFRRHDRRALHKENMSRVYTLNGKSVATNRHKAAEQTTDSLEEFRQRQPNDVCKLKVKEHHPTYRNMNRNYPGSIFLIGKQVHVMQGIAGSKDGEATTYKDTNANSIAAGKCKFVAKNSGILFV

SEQ ID NO: 9242 - protein, 362 aa, unidentified
  REGION 1..362: note = Human gut metagenome
LSASTEKAELYASEVELRQDVSDLLSARRALRQSRCNRKTRYRAPRFDNRIRTKRKGWLAPSVENRINAHLSRIETVLRMLPVTKITVETASFDMQLLKNPDISGKEYQEGEQLGFWNVREYVLFRDGHVCQHCHGRSKDPVLNVHHLESRRTGGDSPGNLLTLCETCHKALHRREIKLKTKRGQSFRAEAFMGIMRWEVLNRLKASHPELEVHNTYGYRTKHTRIVNGIDKSHCADAFCIAGNLGAKRLGEFFFQKQTRRNNRQIHKLSILKHGLRKRNQAPFEVKGFRLFDKVVCQGEEGFIFGRRSSGSFDVRKLDGTRISAGISYKKLRLLEKRRTYLKEIRKEEALPPLPEGRSLRA

SEQ ID NO: 9243 - protein, 452 aa, Moorena sp.
MTSLYIIVEVTITGASPGEVFMTTYNSVFVLDTTKKPLTPCQPARARALLRDGKAAVWRTVPFTIILKVAMPDAIVKPISCKIDPGSKQTGLALVDSDGRVVFAAVLEHRGNAIKAGLESRRSIRRGRRARNTRYRQARFLNRIRPEGWLPPSLQHRVETTLTWVKRFRRLCGVVEIAVERVKFDMQLMRNPEISGVEYQQGTLLGFTVREYLLEKWGRKCAYCGAENTPLQVEHIHPKANGGSSAVSNLALACEPCNKKKGTQDIKVFLKNKPELLKKVVAQAKRPLSAAAAVNATRNKLFVELLNTCLPVETGTGAQTKFNRTRLDYPKEHWIDAACVGESGATVTLNPELKPLLIKATGHGTRQMCTTDKFGFPRRAAKGGKAVNSVSTGDYARIVQPKGKYIGSYVGRISSINTTTNFVTMKVFGKTISFNSKLVTIIQKADGYAYAH

SEQ ID NO: 9244 - protein, 428 aa, unidentified; identical to SEQ ID NO: 5036
  REGION 1..428: note = Human gut metagenome

SEQ ID NO: 9245 - protein, 420 aa, unidentified
  REGION 1..420: note = Human gut metagenome
MQYVYVLNKHGEPLMPCSPCKARLLLKQKKACVIKRTPFTIKLLYGSTGYKQPVTLGIDAGSKHIGISATTEKYELYREEATPRNDVVDLLSARRAFRRSRRNRKTRYRAPRFSNRVHSKHKGWLAPSVEVKIQEHITLIKRVCRILPVTLVRVETAEFDTQRLKAMLESKPLPVGTDYQLGEMYDEYNVRQYVLKRDNYTCQCCDAHSTKTKAVKLHVHHLESRKVGGNAPNNLVTLCKDCHKALHAGKAKLNGRKRGKPLKDAAFMGIMRKTLMERLCKELKISIQGTYGYITKYLREKHDIPKSHTNDARCISRHPLAVPCDACYYTKAVRHHNRQLHKATILKGGIRKANQAPYMVKGYRLWDKVSYNGTECFITGRRTSGYFALKKLDGTVVSNSASYKKLRLLEVATNYITERR

SEQ ID NO: 9246 - protein, 555 aa, Streptomyces sp.; identical to SEQ ID NO: 6474

SEQ ID NO: 9247 - protein, 427 aa, Parasutterella sp.; identical to SEQ ID NO: 6030

SEQ ID NO: 9248 - protein, 423 aa, Moorena sp.; identical to SEQ ID NO: 3576

SEQ ID NO: 9249 - protein, 414 aa, Parasutterella sp.; identical to SEQ ID NO: 2850

SEQ ID NO: 9250 - protein, 512 aa, unidentified
  REGION 1..512: note = Human gut metagenome
MSTVYVLNKDGKPLMPTTRGGHVRHLLKEQKARVVRAKPFTIQLLYETNDVVQPLYLGIDPGRTNIGVAVVKANGTAVFTAHLETRNKEIPKLMQDRKKARRARRTNGRRHRRQRRAKANGTISKKCVKQTTTQNGSVSKRAKEIGIIKRHLPGCEKDVLCIGIKNKETKYTNRERPEGWLTPTANQLLQTHVNLVKKVQKLLPISDVVLEVNKFAFMRLDNPDIQKWQYQQGPLYKKESLESAVSEMQEHHCLFCKKPIDHYHHVVPKSENGSNTIANIVGLCAEHHNLVHKDVAWQEKLAEEKTGLNKKYGALSVLNQIIPALTKELSSLFPKHFFVTNGKSTYDYRAAHGVSKDHWLDAYCIACSVLPNDTCDKTINSRVPYELKQFRRHDRRALNNENMSRVYTFNGKMVATNRHKATEQTTDSLEEFRQRQPNDVCNLKVKEHHPTYRNMNRNYPGSVFLVGNQVHVMQGIAGSKDGEATTYKDTNANSIAAGKCKFVAKNSGILFV

SEQ ID NO: 9251 - protein, 368 aa, Geobacillus sp.
LFVYIINKHGKPLMPCSPRKARLLLKQKKAKVVRRTPFTIQLLYGSSGYKQPVSLGVDMGTRHVGISATTKKDVLFEAEAQLRTDIVELLAIRRQFRRSRRNRKTRYREARFLNRRKPEGWLPPSIQHKINSHIKLIDLVHNILPATSVTIEVAAFDTQKLKNLNIRGVEYQQGEQMGFWNVREYVLYRDNHTCQYCKGKKKDPVLQVHHIESRKTGGDSPDNLITLCKTCHHEIHEKGLEHIFQRKRPPMRDASQMTAMRWAMFSRIREKYSHANITYGYITKCIRIANGLSKSHMVDARCISGNPLAKPSGTVYLLKFVRKNNRQLHKATILKGGKRKSNKAPRFVKGFQLFDKVVYERKECFIFG

SEQ ID NO: 9252 - protein, 480 aa, unidentified
  REGION 1..480: note = Human gut metagenome
LYTKPLDNIGEGSLPPSGEINLKGMTFMVYVKSIDGKALMPTSNAKARKLLKQKKAKVVSLRPFVVKLTYKTKTEYIQKLNLGVDSGYSNIGFSVIDAKQEYIAGEVKLLEGMKKRLLEKASYRRIRRSRLRYRKARWNNRVKSKKKGWLAPSLKHKLDTHIKFIDYLKNILPIEKITIEVANFDIQKMKDDLISGIDYQNGDMFGFWNVREFVLHRDGHKCQNPNCKHKDKKEQILKVHHIRYRSEGGSDRPENLITLCSKCHTPANHKKGKFLYDWCVNGKKVRGFKDATFMSMIRWYLVNELKSKHNNVSITYGYITKNHRIQNGIEKSHLNDAFAIAKGTNQARTKDRFLVIQDRLKNRSLEKFYDSKIIDIRTEKKVSGGDLNCGRSTRNKNLNTENLRKYRGAKISKGQRRIRKQKYFYQSNDLVKYDGKVYTVKGTQNEGKYIALKEIKKVPKVELLIPYVFKKGLNWSYGLC

SEQ ID NO: 9253 - protein, 490 aa, unidentified; identical to SEQ ID NO: 3566
  REGION 1..490: note = Human gut metagenome

SEQ ID NO: 9254 - protein, 416 aa, Moorena sp.; identical to SEQ ID NO: 4794

SEQ ID NO: 9255 - protein, 464 aa, unidentified; identical to SEQ ID NO: 3455
  REGION 1..464: note = Human gut metagenome

SEQ ID NO: 9256 - protein, 423 aa, unidentified; identical to SEQ ID NO: 4024
  REGION 1..423: note = Lachnospiraceae bacterium UBA7287

SEQ ID NO: 9257 - protein, 406 aa, unidentified; identical to SEQ ID NO: 2874
  REGION 1..406: note = Human gut metagenome

SEQ ID NO: 9258 - protein, 420 aa, unidentified; identical to SEQ ID NO: 2681
  REGION 1..420: note = Human gut metagenome

SEQ ID NO: 9259 - protein, 411 aa, unidentified; identical to SEQ ID NO: 6901
  REGION 1..411: note = Human gut metagenome

SEQ ID NO: 9260 - protein, 407 aa, unidentified; identical to SEQ ID NO: 3417
  REGION 1..407: note = metagenome

SEQ ID NO: 9261 - protein, 465 aa, unidentified
  REGION 1..465: note = Human gut metagenome
MSTCVCVLSNSGERLMPTFRLGRVRHLLKDGKAKIIKHHPFTIQLLYDSKTNTQPIEICEDVGYNYIGISVKSESHEYVSAQYDTLQDEKEHHDDCRKYRRTRRNRLRYRKPRFDNRKRSEGWLAPSLEHKKQLNIRLIERYVSVIPITRATVEVGSFDTMLLQAIQKGESKPEGVDYQKGPRYNLATLREAVFYRDNYTCQVCGRKIADGAILHMHHMFYWKGRHGNSLSELITVCEKCHTPANHQKSGKLYGFGENVKFADLSGAAFMNTVRWQIVNELYAAFGKDFVTITYGAMTKEKRIALRLEKSHNNDAYAMGEFHPNHRCTFEHYEKVRRNNRILERFYDSRYIDIRTGEIATGKELFNGRINRNHKKDSENLHKYRGKRTYAGHRALLRKKVNLNPGDLVSLNGEVLVVHGTHTNKNGAVNVEFKVPAKNGQKSASLKKLKIVKTTDSMHSAWEKIS

SEQ ID NO: 9262 - protein, 442 aa, unidentified; identical to SEQ ID NO: 2637
  REGION 1..442: note = Human gut metagenome

SEQ ID NO: 9263 - protein, 456 aa, Halomonas sp.; identical to SEQ ID NO: 2773

SEQ ID NO: 9264 - protein, 423 aa, unidentified
  REGION 1..423: note = Human metagenome
MLVYVISKDGQPFMPTSRFGKVRRLLKEGKAKVVRREPFTIRLLYEPETDVVQECYCGVDTGSKHIGVAVVGNDKVLYQSQTELRSDIKRKMDRRRIYRRNRRSRKTRYRKPRFLNRGNSTKSDRIPPSVKHKVQAHIDEIEFCKKILPIADLILEVNQFDTALMKNPNLMNEKIKRWGYQQGFNYGYSSRRSAILHRDNYTCQCCGKKNCRLEVHHVKFKSDGGTDDEENLITLCEDCHKGVHAGTVTLNRKPKKSKNLKHATHMSIIRSWLLKEYPNAIETFGFVTSENRNHLKLQKDHYIDACVIASGGLEFKELDVVYRKRRVPKQGRALTKGVRGEKKLPTGKIHGFKRYDKVKYLGDVCFVKGRRNGGGFVLMNIDNNPIDFRDKGGKQKPPHNEIKRLNTRRSILCVGVREEGGIN

SEQ ID NO: 9265 - protein, 431 aa, unidentified
  REGION 1..431: note = metagenome
MPNKVYVINKHGRPLMPCSPAKARHLLDEGKAKVKKRTPFTIQLVYGSSGYTQEVILGVDAGSKTIGMSVSTTKEELLSAEVKPRNDVVDLLSTRREFRRARRNRKTRYRKPRFDNRVRSKHKGWLAPSVEVKIQEHITSIKRVCRILPVSKVVIETAEFDLQLLKAIADGKPVPQGEDYQQGEMYGHYNVRQYVLWRDDYTCQCCGAHATKKKEVRLHVHHLESRKVGGDAPDNQVTLCESCHEKLHKGLITEKDFKKRKRRSTRDATFMGIMRKTLMQRLCSELPIPVVETRGYITKATREKLLVLPKSHINDALAIAQGKRGFNVGYLPEIAQIDKIYTIRPVRHHNRQLHKATILKGGIRKSNQTEKYVFGYRLFDKVQFNGQDCFIWGRRTTGIFTIKTINGKMIKDGISFKKLKLVEKSTSYLIA

SEQ ID NO: 9266 - protein, 408 aa, unidentified; identical to SEQ ID NO: 4614
  REGION 1..408: note = Human gut metagenome

SEQ ID NO: 9267 - protein, 413 aa, unidentified
  REGION 1..413: note = Human gut metagenome
MTSYSFVLDANGKQLAPAKEQKAWFLIRKKRAALVSKYPMVIQLKKEIPENEICKDEIRCGIDDGGLHVGIALVQKCKTKNKVVFKGTIEQRNDVKHLMEVRRSYRHYHRYHKRYRPARFDNRKSSKRKKRIAPSILQKRQAIIRVIHWLNKWINITNYWLEDVSIDIRVLTDGYKSYSWQYQKSNRLDENIRKATILRDGGKCMECGKSNCRLEVHHIKPRRRNGSNTLDNLITLCESCHQKTEGQEELYMDRYFSLLKSSDNKNLNYAQHVMIGKMWLRKQLSGLGVLYLTSGGDTANKRIDWNIEKSHTNDAVCITDLQPDTCDIKEWAIKPMRRQSKAKTDHVLGIHHRDLVEYTFKNGETHRGYVTALYPDQKAINFQSQTKHCKKVNARKCKLLWNYSKIYWFENAS

SEQ ID NO: 9268 - protein, 472 aa, Pandoraea sp.
LPVFVLGRNGRPLMPCSEKRARKLLGAGRARVHRRYPFTLRLIDRQPADSRLQALELKLDPGSQTTGLALCRVAASVDGDGVVHRVMHIRFLMELVHRGRAIKQALQARSAMRRRRRGNLRYRAPRFDNRTRKAGWLPPSLQHRVDTTMAWARRLCKLAPVTHIAQELVRFDMQLMQNAEISGVEYQQGELAGYEVREYLLEKFGRSCQYCDATGVPLQVEHIHAKARGGSSRVSNLALACAPCNQKKDSRDIRAFLAQDPTRLARILARAKAPLRDAAAVNTTRWALFEALKGTGLSVSTASGAQTKCNRTRLGLPKTHSLDAACTGQADGVTGAAAPVLVVKCSGRGSRSRTRLNQFGFPRAYLSRSKTAFGFRTGDMVLATVPNGKKAGTYQGRVAIRQTGSFNIQSGKPGVPTVQGISQKHCKVLQRGDGYGYACQPSPYSTTKGNEACGLGAFPLRPEGRSVAEQLG

SEQ ID NO: 9269 - protein, 408 aa, unidentified
  REGION 1..408: note = Human gut metagenome
MVYVQDINGKPMMPTTRHGKVRRLLKDKKAVVVNLCPFTIKLMYVTSDYKQEIVLGVDAGTKHVGLSATTKSKELYSSEVILRNDIVDLLSTRRELRRSRRNRLRYRKPRFDNRIKSKRPGWVAPSVKYKVDAHIRVIDNVCSILPISRIVIEVAQFDTQKINNPNISGKEYQEGDQLGFWNVREYVLARDGHKCQHCKGKSKDPVLNVHHIESRKTGGDSPSNLITLCETCHKEYHKGNIDLKIKRRSSLRDAAVMGIMKWRLYEELKSKYDNISMTFGYVTKYNRIKHGIEKSHVFDAFVISKNFDAIRLGYYYKVRLARRHNRQIHKQKIPKGGIKRPNQSPFEVFGFRLFDRVMFENSYYFIFARRKTGSFNIRDIDGKNQRDITYKKLKLSRCKRFMVQKEMD

SEQ ID NO: 9270 - protein, 512 aa, unidentified; identical to SEQ ID NO: 3776
  REGION 1..512: note = Human gut metagenome

SEQ ID NO: 9271 - protein, 442 aa, unidentified; identical to SEQ ID NO: 3234
  REGION 1..442: note = Human gut metagenome

SEQ ID NO: 9272 - protein, 414 aa, unidentified
  REGION 1..414: note = Human gut metagenome
MPCSPAKARLLLKEKKAIVKRRTPFTIQLTIATGESKQPVSLGVDAGYKHVGFSASTEKAELYASEVELRQDVSDLLSARRALRQSRRNRKTRYRAPRFDNRIRTKRKSWLAPSVENRINAHLSRIEAVLRLLPVTKITVETASFDMQLLKNPDISGKEYQEGEQLGFWNVREYVLFRDGHVCQHCHGRSKDPVLNVHHLESRRTGGDSPGNLITLCETCHKALHRSEITLKTKRGQSFRAEAYMGLMRWEVLNRLKTSHPGLEVHNTYGYRTKYTRIVNGIDKSHCADAFCIAGNLGAERLGEFFFQKQTRRNNRQIHKLSILKGGIRKRNQAPFEVNGFRLFDKVACQGEEGFIFGRRSSGFFDVRKLDGTRISAGISYKKLHLLEKRRTYLTDIRKEEVLPPLPEGRGLRA

SEQ ID NO: 9273 - protein, 375 aa, unidentified
  REGION 1..375: note = Human gut metagenome
MVKSSERQERCCRLETPSNIGEGSQPGERPRRQNLRVVVLNKRGKPLMPCSPAKARLLPKERNAIVVRRTPFTVQLTIATGETKQPVSLGVDAGYKHVGLSASTEKAELYASEIELRQDITDLLSARRELRRARRNRKTRYRGPRFDNRIRTKRKEWFAPSVENRINAHLSRIEKVLRLLPVTTITVETASFDTQLLKNPDISGKEYQEGEQLGFWNIREYVLCRDGYVCQHCYGRSKDPVLNVHHLESRRTGGDSPGNLITLCETCHKALHRGEITLKAKRGQSFRAEAFMGIMRWEVLDRLKASHPELEVQNTYGYRTKHVRIANGIAKSHCADAFCIGGNLGAERLGEFFFQKQTRRNNRQIHKLSILKGAL

SEQ ID NO: 9274 - protein, 410 aa, Moorena sp.; identical to SEQ ID NO: 8210

SEQ ID NO: 9275 - protein, 458 aa, Lactobacillus sp.; identical to SEQ ID NO: 4474

SEQ ID NO: 9276 - protein, 488 aa, unidentified
  REGION 1..488: note = Human gut metagenome
MLNIGEGKISCRPPLLVGDSNNSKEVYFMVVYVLNKNNKPLMPCKPQRARKLIKEKKAKIVNYKPFTIKLIYGSYGYTQNTNLGVDLGSKNIGIAVTTQNKVLAKGEIELRQDVSSLIETKKILRRGRRSRKTRYRRCKFNFRNKRVFNAPKGAKLKTLKKGSDSKKNWRTLSTNIDSNRPVGWLPPSIQSKIDNTFFWIDKYYNLLPKCNLSIEVGKFDMAKMINPEIEGADYQQGEAFGFYNTRYFVFARDNYTCQVCKKSKDKVLHTHHVIYKSKGGSDRADNLATICTDCHTSENHKPGGILYEWMIKKKKMKTYKEPPFMNSMRVKVFKKYPQANITYGSITTPRRKKLGLEKTHYNDAIAISKVECINQNCDEVFKIKQFRKKKRSLHEATARKGRKTKNTESKRNEKNTSFANGFYLNDKVEIFGQIGYITGFSGKSSAYVKNINDEYITIPGKKYKQVSIYALKFINHNNNWQYESNFAI

SEQ ID NO: 9277 - protein, 406 aa, unidentified; identical to SEQ ID NO: 2973
  REGION 1..406: note = Human gut metagenome

SEQ ID NO: 9278 - protein, 414 aa, unidentified; identical to SEQ ID NO: 2856
  REGION 1..414: note = Human gut metagenome

SEQ ID NO: 9279 - protein, 438 aa, unidentified; identical to SEQ ID NO: 4848
  REGION 1..438: note = metagenome

SEQ ID NO: 9280 - protein, 457 aa, Lactobacillus sp.
MRIAAGNMIAGKGGKMEYENANRVFLLNKDGKPLMPCRPRKARLLLKSGKAFVVKKYPFTIQLKYGSYGYKQKVSLGVDTGQRHIGFAVTSQDKVLYQSEVELRQDVHKNLYTRSIYRRSRRNCKTRYRQARFLNRVHGKRDGLWLPPSVKGKVNHNIAWIKRYLAVLPNPDLHIEVGKFDMAKMVNPAISGKQYQEGSLHGWKNYEYYVLARDKYTCQLCHKHGEGVKLVVHHIVYRSQGGTDRVDNLITLCTNCHTTKNHQPSGKLYKWMKAKKKVTTHLKGATFMNILRKRIMAAFPEASYQYGYQTFFERKKFNLPKGHFTDAIAISGIREINQMPETVTMISQFRKKKRSLHEASARKGRKEPNRTSKRNAKNTKYARGLWLNDYVHVIGTNLRGYVQSYLSKGAYVRLSDGLGNYVTKDGKNYISTKLCKPITHNGNWQKAEQKLSLYEFK

SEQ ID NO: 9281 - protein, 420 aa, unidentified
  REGION 1..420: note = Human gut metagenome
MQYVYVLNKHGEPLMPCSPRKARLLLKQKKACVVKRTPFTIKLLYGSTGYKQPITLGVDAGSKHIGISATTEKYEFYREEATPRNDVVDLLSARRAFRQGRRNRKTRYRAPRFNNRVHSKHKGWLAPSVEVKIQEHITVIKRICRILPVTLVRVETAEFDTQRLKAMLAGKPLPVGTDYQLGEMYDEYNVRQYVLKRDNYTCQCCGAHTTAKKTVKLHVHHLESRKVGGNAPNNLITLCTTCHNNLHKGKITLDGKKRGKPLKDAAFMGVMRKTLMERLRKKLKIPVQGTYGYITKYLREKNGIPKSHTNDARCISKNSLAIPCDTCYYTKAVRHHNRQLHKATILKGGIRKANQAPYIVKGFRLWDKVLYNGQECFISGRRSSGYFALRKFDGTTITNSISFKKLRLLEPATNYLIERK

SEQ ID NO: 9282 - protein, 442 aa, Virgibacillus sp.; identical to SEQ ID NO: 6559

SEQ ID NO: 9283 - protein, 411 aa, unidentified; identical to SEQ ID NO: 3731
  REGION 1..411: note = Human gut metagenome

SEQ ID NO: 9284 - protein, 493 aa, unidentified; identical to SEQ ID NO: 3154
  REGION 1..493: note = Human gut metagenome

SEQ ID NO: 9285 - protein, 453 aa, Moorena sp.; identical to SEQ ID NO: 6768

SEQ ID NO: 9286 - protein, 477 aa, Moorena sp.
VDVAVFVLDRSGKPLMPCSEKRARLLLDRGRARVHRLVPLAIRLLDRRVADCTLQPLRLKLDPGSKTTGIALVRDTATVETTTGESGPGAVVCNLFELMHRGAAIRKALRQRAAFRRRRRSANLRYRAPRFLNRTRTESWLAPSLQHRVDTTLAWVERLRRLAPVTALASELVRFDLQQVQNPEISGVEYQQGTLRGYEVREYLLEKFERTCAYCDAQNVPFNVDHVRPQAGGGSDRVSNLALSCVPCNEAKDDSPVEMFLAHDPERLARIKQQLKTPLRDAAVVNATRWTLVRALRATGLPLETGSGGRTKWNRVRLGIPKTHALDAACVGAVEQVVDWSRPALTIKATGRGAYQRTLLTAHGFPRGYLMRQKRAHGFRTGDLVAATIPAGRHAGQHRGRVAIRTRPSFALQTESGTFDVHARHLRLLQRGDGYGYCSQPLPQPLRGGLSSPRYDGGAVDQQALWSERWVRAKQDC

SEQ ID NO: 9287 - protein, 415 aa, unidentified
  REGION 1..415: note = Marine metagenome
MQKVYVQNKDGEPLMPCTPAKAKHLLRDKKAEVIHLTPFTIRLNWDCENNTQEIIVGLDTGAVNIGCSAVNGERLLYASETKLRTDIHKKMQRRANYRHTRRCRKLRHRQPRFDNRKSGRQLPPSLQSKMDSTVKIVMQLSKILPISKVRVEIAKFDTQKLQNPDIEGKEYQKGVTEGYDNIRSYVFERDKYSCQICKKSKGILQTHHIKQRKDGGSDRPDNMTTVHKDCHKKFHLGEIEHKFRKPKEYKVETQVTILKDFIVMELKKNFDVELTFGHITKRNRMRLNLPKSHCFDAVAICNPKKIERIDKIFKRVCVTQRRYQMTKGVRSEKRLPNGELFGFRQWDKVKINNQIGFIKGKRSSGFFDVCDIDGNNVSHSVKYTKLQRLYSNNVMEVIASPPTTKVMGIRSETVL

SEQ ID NO: 9288 - protein, 433 aa, Lactobacillus sp.; identical to SEQ ID NO: 4182

SEQ ID NO: 9289 - protein, 431 aa, unidentified
  REGION 1..431: note = Human gut metagenome
MDAWDIIVVLNKRGKPLMPCSPAKARLLLKEKKAIVKRRTPFTIQLTIATGETKQPVSLGVDAGYEHVGLSASTEKAELYASEVELRQDITDLLSARRALRQSRRNRKTRYRAPRFDNRIRTKRKGWLAPSVENRINAHLSRIEAVLRLLPVTKITVETASFDTQLLKNPDIAGKEYQEGEQLGFWNVREYVLFRDGHVCQHCHGRSKDPVLNVHHLESRRTGGDSPGNLITLCETCHKALHRGEITLKAKRGQSFRAEAFMGIMRWEVLDRLKASHPKLEVQNTYGYRTKHARIVNGIAKSHCADAFCIAGNLGAERLGEFFFQKQTRRNNRQIHKLSILKGGIRKRNQAPYEIKGFRLFDKVACQGEEGFIFGRRSSGFFDVRKLDGTRISAGISCKKLHLLEKRRTYLTEIRKEEALPPLPEGRGLRA

SEQ ID NO: 9290 - protein, 406 aa, unidentified
  REGION 1..406: note = Human gut metagenome
MVYVQDINGKPLMPTTRHGKVRRLLKDKKAVVVNLCPFTIKLMYVTSDYKQEIVLGVDAGTKHVGLSATTKSKELYSSEVILRNDIVDLLSTRRELRKARRNRLRYRKPRFDNRVKSKRLGWIAPSVKYKVDAHIRVVENVCSILPISRIVIEVAQFDTQKIKNPEISGKEYQEGDQLEFWNTREYVLARDGHKCQYCKGKSKDSILNVHHIESRKTGGDSPSNLITLCETCHKEYHKGNIDLKIRRGKSLRDAAVMGIMKWRLYEELKSRYDRVFMTFGYITKHNRIKYGIEKSHTSDAFVISKNINAKRIERQYLKRLIRRHNRQIHKMKILKGGKKKNNQAPFEVFGFRLFDKVLYNNKIFFVYGRRKSGSFNIRDFNGENSKDVSRKKFKLIRGKRHPIILK

SEQ ID NO: 9291 - protein, 419 aa, unidentified; identical to SEQ ID NO: 4877
  REGION 1..419: note = Human gut metagenome

SEQ ID NO: 9292 - protein, 430 aa, unidentified
  REGION 1..430: note = Ga0315281_10003133
MQRIFVLGADGQPLDPCHPARARQLLRAGRAAIYRRFPFTLILKERLAGESVVHKHVIKIDPGARTTGLAVVNDAGRVVWAGELEHRGFAIRDHLLARRHVRRSRRFRHCRYRPARFNNRRKPKGWIPPSLMSRVANVATWVSRLRRVAPTTSLAMELVKFDTQAIVNPEISGVEYQHGTLYGSEVREYLLEKWGRTCAYCGERNVPLQIEHLIPTSRGGSDRVSNLTLACGKCNQRKGNQTAMEFGYPHLQVQARQPLKDAAAMNTTRWVLYRQLRDTGLPIEVGTGGRTKFNRVSLGLPKAHWIDAACVGKSGASVRVDVTLKPLAIRATGHGSRQMCRMDKYGFPRTGPKQVRRGHGFRTGDIVRAIVPSGKNRGTHISRVAVRATGRFDITTRKRGVQSIGWQYCHLLQYADGYAYSLDSKRGLVA

SEQ ID NO: 9293 - protein, 442 aa, Lactobacillus sp.
MKHENANRVFLLNKDGKPLMPCRPRKARLLLKSGKAFVVKKYPFTIQLKYGSYGYKQKVSLGVDTGQRHIGFAIVSQNKVLHQSEVELRQDVHKNLYTRKIYRRSKRNRKTRYRQARFLNRVHGKRDGLWLPPSIKGKVSHNIAWIKRYLAVLPNPDLHIEVGKFDMAKMVNPEISGKQYQEGSLKDWKNYEYYVLARDEYTCQLCHKHGEGVKLVVHHIVYRSQGGTDRVDNLITLCTNCHTTKNHQPGGKLYKWMKAKKKVTKQLKGATFMNILRKQIMTTFPEASFQYGSQTYVDRKNLLLPKGHFMDAIAISGIKPVGQMPETVTMISQFRKKKRSLHEATARKGRKQPNTSSKRNEKNTKYACGLWLNDYVRVIGNHVKGYVKGFKSNGYYVYLTDGLGNYVLNNGKNYINGQQCRLIMHNGNWQKAEQKLSLYEFK

SEQ ID NO: 9294 - protein, 431 aa, unidentified
  REGION 1..431: note = Human gut metagenome
MPNKVYVINKHGRPLMPCSPAKARHLLDAGKAKVKKRTPFTIQLVYGSSGYTQEVILGVDAGSKTIGMSASTTKEELLSAEVKPRNDVVDLLSTRREFRRARRNRKTRYRKPRFDNRVRSKHKGWLAPSVEVKIQGHITAIRRVCGILPVSKVVVETAEFDLQLLKAIEKGKPVPQGEDYQQGEMYGHYNVRQYVLWRDNYTCQCCGAHATKKKEVRLHVHHLESRKVGGDAPDNQVTLCESCHEKLHKGLIAEKDFKKRKRRSTRDATFMGIMRKTLMQRLCSELPIPVVKTRGYITKATREKLLVLPKSHTNDALAIAQGKRGFNVGYLPEIAQIDKIYTIRPVRHHNRQLHKAAILKGGIRKSNQAGKYVFGYRLFDKVQFNGQDCFIWGRRTTGIFTIKTINGKMIKDGISFKKLKPVEKSTSYLIA

SEQ ID NO: 9295 - protein, 429 aa, unidentified
  REGION 1..429: note = Human gut metagenome
MTALEERLSKTEYIYVLGFDGKPQMPTRRKRHVLKLLKTGRARIAEDIPFTIRLTYRNAPVLQPVTLAEDPGRTNIGAAVLSPLGDLLFAAVIETRNKEIKKLMTDRQKSRQASRRGERKARQRLAKRYGSMVKSGMVMRKLPMYAADRFVTCKFIRNTQARFCNRKRCPDWITPTVQHLVQTHLNIIRKISRYLPVTDIAFEVNRFAFMHMENPEAIGVDFQNGPLKGYGDVKEAIRTQQHGKCLMCKKPIAHFHHIVPRSRGGSDTIQNLAGLCPECHTKVHKDTAFRKDFDEKKSGQLKKYGALSALNQAVPFICKKLLEEYGEEHVHFCRGLDTSLIRTALGFEKTKKDQMHEVDAYCVGLAALEVNEVETPAFDHTFQIRQFRRQEPVHHPSSDRPLLLPGKRKSCPEPETGFRAENNGSFPVV

SEQ ID NO: 9296 - protein, 442 aa, unidentified; identical to SEQ ID NO: 3333
  REGION 1..442: note = Human gut metagenome

SEQ ID NO: 9297 - protein, 400 aa, unidentified
  REGION 1..400: note = Fermentation metagenome
MPTTPRKARLLLKQGKAKVVKREPFTIQLLYPTGETKQDIVLGVDAGSKKIGLSATTDKQELFSAEVELRNDIVGLLSTRRQNRRTRRNRLRYRKPRFLNRVSRKKKGWLAPSIEHKVNTHLNIISKLHQILPITKIIVEVASFDIQKIKNPDVSGKEYQQGEQLGFWNVREYVLWRDGHKCQGKNGCKNKILNVHHIESRKVGGDSPNNLITLCEECHTDYHNGKLKLNLKRGQPFKDATFMGIMRWSFYNKLKELYPDVKMTYGYITKNTRIQNNLPKEHRVDALCIAGNPTVKRLDNWYYIKKVRNQNRQLHKNTILKGGYRKANKAQKYVFGYQLFDKVKYKNQECFIFGRRSSGSFDIRKLDGTKLSAGVTYKKLELIERAKSYLIERRERLSSP

SEQ ID NO: 9298 - protein, 421 aa, Moorena sp.; identical to SEQ ID NO: 5881

SEQ ID NO: 9299 - protein, 420 aa, unidentified
  REGION 1..420: note = Human gut metagenome
MQYVYVLNKHDEPLMPCSPRKARLLLKQKKACVIKRTPFTVKLLHGSAGYKQPVTLGVDAGSKHIGISATTEKHELYREEATPRNDVVDLLSARRAFRRSRRNRKTRYRAPRFNNRVHSKHKGWLAPSVEVKIQEHITLIKHVFRILPVTLVRVETAEFDTQRLKAMLEGKPLPVGTDYQLGEMYDEYNVRQYVLKRDNYTCQCCGAHSTKTKGVKLHVHHIETRRTGGNAPNNLITLCKACHKALHAEKVTLDGKKRGKPLKDAAFMGIMRKTLMERLRKELKIPVQGTYGYITKYLREKNGIPKSHTNDARCISKNPLAIPCDTCYYTKAVRHHNRQLHRATILKGGIRKANQAPYIVKGYRLWDKVAYNGTECFITGRRTSGYFALKELDGTVVSNSISYKKLRLLEAATNYITERK

SEQ ID NO: 9300 - protein, 406 aa, unidentified; identical to SEQ ID NO: 7406
  REGION 1..406: note = Human gut metagenome

SEQ ID NO: 9301 - protein, 456 aa, unidentified; identical to SEQ ID NO: 2706
  REGION 1..456: note = Human gut metagenome

SEQ ID NO: 9302 - protein, 442 aa, unidentified; identical to SEQ ID NO: 3234
  REGION 1..442: note = Human gut metagenome

SEQ ID NO: 9303 - protein, 470 aa, Anaerostipes sp.; identical to SEQ ID NO: 2825

SEQ ID NO: 9304 - protein, 434 aa, Mitsuokella sp.
MGFLTTWARRKILPKGKVAEMPKIKKYAFVLDAKRKQLDPTIEQNAWRLVRQYKARLVSKFPMIIQLNKVMDNPNNDEIRCGIDDGANHVGMALVQKCQTRNKVLFKGTIEQRKDVKHLLTVRRGYRRYHRYHKQYRPARFLNRASSRRSGRLMPSIIQRKQAILRVIDRLRQWVRIDGYWLEDVKIDIRALTDGYKPYRWQYQKSNRLDNNLRLAAIHRDGCKCVECGKTKTRFEVHHITPRKTGGADTISNLITLCPKCHAKTFGRESQFADRYYALIGSTGHVEGLDDAQRVMQGKHWFREQLQQRGSLVLTTGGNTANKREDWDIAKTHSNDAVCITDLKPENIDIEEWTIKPMRRKNKAGVDEVCGFHHRDYVTYTYRNGETHTGYVTAMYPDKNQLNFQSPTKHCKRVNALKARLLWRYDKIYWFKCA

SEQ ID NO: 9305 - protein, 536 aa, unidentified
  REGION 1..536: note = Human gut metagenome
VLRPRYQCPTRWYPSREQGSGNGCLSGEENTDLEQEVSGTLSKGDHSHPGEQDFCVPAITIQGGPAMSVFVVGLNGCRLMPTSERKARLLLKHGKASVYRKVPFTIKLNYKTGSTTQSGYLGIDTGSQHIGVSVVREDGAVLHKEEIGLRDSMSKRKLMQSRASSRRGRRHRKTRYRHPKWRPKAKRVYCEIPDRKRRHWKKKEITFTSKRPKGWLPPSLQSKTDHHIRWIKKLQDLLPEGYRLSIELGRFDPARLKDPEIHGELYQKGPQYDYENVRAYVLNRDRYTCQVCGKKGGKLHVHHILYRSYGATDDPQYMATVCSDCHNTENHQQGGILYQWMQKQKKFTRGLRDATFMNILRKRLIEAFPGATFTYGNITKADRERLILPKSHGNDATAIAIVKTGIMTVKDKEPVIYIQQVRRKKRSLHEKTPRKGRKEPNRKASRYDKNTKAVTVTKRKNKKKISITGCLFDRVELNGKKGWISGFTDKSCYVKDENDQYIRTSPKYKQVSLSKLKILHHCGNWAIGARRSLGKG

SEQ ID NO: 9306 - protein, 419 aa, unidentified
  REGION 1..419: note = Human gut metagenome
KYVMVYVLSQNGQPLMPTENHAKVRALLKHGKAKVIQRCPFTIQLLYESTTHTQKINLGIDAGSKTIGVSATTDSKVLYESEVVLRNDIVELLSGRRALRNSRRSRKTRYRKPRFDNRKKPDGWLAPSIRQKIETHVTVVGNVMKILPVTKIIVETASFDIQKIKNPEIEGEGYQHGEQLDFWNVREYVLFRDGHTGQCCKGKSKDNILNVHHIESRKTGGNAPNNLITLCETCHKAYHKGIITLPKEIHRGMRFRDAAFMGIMRWAFYDRLKELYNPLGAEVINTYGYITKNTRIEHGLPKEHYVDARCISDNPAAKPLDHYYFQKKVRCHNRQIHKNTILKGGIRKRNQASYEVKGFRLYDQVLWKGQKCFIFGRRSTGRMDLRLLDGTHVNASVGYKNLKLLSMRKNYLIEQRKAG

SEQ ID NO: 9307 - protein, 414 aa, unidentified; identical to SEQ ID NO: 4822
  REGION 1..414: note = Human gut metagenome

SEQ ID NO: 9308 - protein, 475 aa, unidentified
  REGION 1..475: note = Human gut metagenome
MVITLDKNKRPLGFMSERRCRILLEKKRAVLYRYFPTIVILKDVDARKLSGLSSYRIKIDPGAKYTGIAIVMDDTNEFMYAMQIEHRGEQIKKNLDTKRGARRNRRSRETGYRRPKWGNRCTAKEQRQSYDSRRDENWLPPSVKSTADNIISWIRRLCRWINITNCSIESVRFDTQLMENPEIEGVEYQQGTLYGYEVKEYLLEKYGHTCQYCGGKSNDPILEWEHMLPRSRGGSDRLKNASLACHNCNQDKGNHTLEEWQTILQDRIPKERGKQKELDQIRQKFVQQVMEGKTPVKGLRYAAWVNSSRRYSQRHLYLRFPELECSSGGRTKYNRNVLKYPKEHHYDALCVGEIPEDGFVDRTNGYYLYAKATGRGTRLRGQINQCGVIIRKWRDRSKTAFGFQTGDLVVADVPKDTKYKYKGHFSGRVMIRKSGSFDIRTLSGELVTVNAKFCRLLQNNSGYQMMIKRAIPLGN

SEQ ID NO: 9309 - protein, 544 aa, Streptomyces sp.; identical to SEQ ID NO: 8078

SEQ ID NO: 9310 - protein, 425 aa, unidentified
  REGION 1..425: note = Human oral metagenome
MFVHVISKDGQPLMPTSRFGKVRRLLKNKKAKVVRRCPFTIKLLYEPESLVVQEVVLGQDTGSKHVGTVCIANNKVLYQSQVQLRTNIKSKMDSRRQSRRFRRDRKTRYRKPRFLNRANSTKKDRLPPSVRHKVQAHIDEIEFCKKILPVSKIVLEVSQFDTVLMKNPALIDEKVKRWGYQEGFNYGYASRREAVLHRDNYTCQCCGKKHAKLEVHHIIYRSKGGTDDEKNLIALCKKCHDAVHAGILIITKVPKKLNLKYATHMSIIRSQLLKFYPEAIETFGFVTKENRNHLNLPKEHYIDACVIASGGIEFELADILYQKRRVAKQNRQLCKGVRGERKIPTGKIFGFKRFDLVKYLKELCFIKARRNSGCFTLMDINNNTIDFRDRGGKKEPSYKYLERVNARKSVLCIRKRIGGKCSFIY

SEQ ID NO: 9311 - protein, 512 aa, unidentified; identical to SEQ ID NO: 7421
  REGION 1..512: note = Human gut metagenome

SEQ ID NO: 9312 - protein, 442 aa, unidentified; identical to SEQ ID NO: 3333
  REGION 1..442: note = Human gut metagenome

SEQ ID NO: 9313 - protein, 425 aa, Moorena sp.
MENTLKVFVLNMRGQPLMPCSPPKARKLLRAGKAVPVHRTPFVIQLTVPTGETKQPITLGVDAGYKHVGLSATTAKEELLASEVELRQDVTGLLSDRLALRRARRNRKTRHRAPRFANRVRSKHKGWLAPSVENRIQAHISRIEAVCRVLPITKIVIETASFDIQKIKNPEVEGTDYLQGEQLGFWNVREYVLFRDGHVCQACKGRSKDLILNVHHIESRKTGGDAPGNLITLCETCHKAYHAGKLKQFSPRRGASFRAETFMGIMRWTVFNRLRERHPELPVTNTYGYLTKHKRIVAGLPKTHCADAFCIAGVLDAKRRGEYLFQKQTRRHNRQIHKLTILKGGVRKRHQAPYLVHGFRLFDKVLCKGEVGFIFGRRSSGAFDVRRLNGTKISAGISYKKLSLLEKRKMFLTELRKEGRDSSRV

SEQ ID NO: 9314 - protein, 448 aa, unidentified
  REGION 1..448: note = Human gut metagenome
VTLGKDFDSSLEENSFFLAVNLLGKERDIMYVYVINKHGEPLMPCSSHKARTLLNNKKACVVKRTPFTIKLLHGSAGYKQPITLGVDAGSKHVGLSASTETHELYREEFAPRNDVVDLLSTRREFRRTRRNRKTRYRAPRFNNRVHSKHKGWLAPSVEVKIQEHITIIKHACQIIPVSLVRVETAEFDTQRLKAMLEDKPLPVGTDYQLGEMYDEYNVRQYVLKRDNYTCQCCGAHATKTKQVKLHVHHLESRKTGGNAPNNLITLCPTCHKAIHEGKKTLSNKKRGKPFRDAAFMGIMRKTLLMRLRKELSIPVQQTYGYITKMLREKNNLPKSHTNDALCIAKHPKAAPCENCYRSKAVRHHNRQIHKASILKGGIRKNNQAPYIVKGFRLWDKVRYDGQECFISGRRVTGYFALKKLDGTVVTNSGSYKKLRLLETTKNYLRERM

SEQ ID NO: 9315 - protein, 465 aa, unidentified; identical to SEQ ID NO: 3070
  REGION 1..465: note = Human gut metagenome

SEQ ID NO: 9316 - protein, 469 aa, unidentified
  REGION 1..469: note = Human gut metagenome
MNVFVVGLNGCRLMPVSERKARLLLDDGKASVYRKVPFTIKLNYKTGSTTQPGYLGIDTGSQHIGVSVVRKDGTVLHKEEISLRDSMTKRKLLEAKASLRRGRRYRKTRYRHPKWRPKTKRVYCEVPDKKGRHWQKQKNTFTSKRPEGWLPPSLQSKTDHHIRWIKKLQNFLPEGYRLSIELGRFDPARMKDPEIHGELYQKGPQYDYENVRAYVLDRDRYTCQVCKKKGGKLHVHHILYRSQGASDNPQYMVTVCSDCHTTENHLPGGILYQWMQEQKKFTRGLRDATFMNLLRKRLMKTFTDAVFTYGNITKVDREKLKLSKNRGNDATAIALVRTGVTSVKDEEPVLYIQQVRRKRSLHEETPRKGRKEPNRTAARNSKNTKAVTVTKRRGGKKVSVTACLFDRVELNGKKGWITGFTGKACRIVDTEGNYVAATDKYTQVNISSIRILHHTGNWVTGLKRNVGKR

SEQ ID NO: 9317 - protein, 406 aa, unidentified
  REGION 1..406: note = Human gut metagenome
MVYIQDIDGKPMMPTTRHGKVRRLLKDSKAVVVNTCPFTIKLMYKTSGYKQEIVLGVDAGTKHVGLSATTKSKELYSSEVILRSDIVELLSTRRESRRARRNRLRYRKPRFENRVKSKRLGWVAPSVRHRIDAHIRVIDNVCSILPVSRVIVEVAQFDTQKIKNPDISGDEYQEGDQLGFWNVREYILARDGHKCQHCKGKSKDPILNVHHIESRKTGGDSPSNLITLCETCHKEYHKGNIDLKVKRGKSLRDAAVMGIMKWKLYDELKSRCDNVSMTFGYITKYNRIKYGIEKSHTSDAFVISRNFNAKRIERQYLKRLIRRHNRQIHKMKILKGGKKKNNQAPFEVFGFRLFDKVLYNNEILFVYGRRKSGNFNIRDFNGENPKDVSHKKLKLIRGKRHLIILK

SEQ ID NO: 9318 - protein, 431 aa, unidentified
  REGION 1..431: note = Human gut metagenome
MPNKVYIINKHGRPLMPCSPAKARHLLDAGKAKVKKRTPFTIQLVYGSSGYTQEVILGVDAGSKTIGMSVSTTKEELLSAEVKPRNDVVDLLSTRREFRRARRNRKTRYRKPRFDNRVRSKHKGWLAPSVEVKIQEHITSIKRVCRILPVSKVVVETAEFDLQLLKAIADGKPVPQGEDYQQGEMYGHYNVRQYVLWRDGYTCKCCGAHTTKKKEVRLHVHHLESRKVGGDAPDNQVTLCESCHEKLHKGLIAEKDFKKRKRKSTRDATFMGIMRKTLMQRLCSELPIPVVKTRGYITKATREKLLVLPKSHTNDALAIAQGKRGFNVGYLPEIAQIDKIYTIRPVRHHNRQLHKATILKGGIRKSNQTEKYVFGYRLFDKVQFNGQDCFIFGRRTSGYFVVKTIDGKVIHNSASFKKLKLVERASNYLIA

SEQ ID NO: 9319 - protein, 428 aa, unidentified
  REGION 1..428: note = Human gut metagenome
LKVFVLNMRGQPLMPCSPAKARHLLKAGKAAVRRRTPFTIQLRIATGETKQSVTLGVDAGAKHVGLSAATEKEEVFASEVELRQDITGLLAARLSLRRDRRHRKTRYRAPRFLNRVRSKHKGWLAPSVENRIQAHMSRIDAICGLLPVTKIVIETASFDIQKIKHPDVEGTDYQQGDQLGFWNVREYVLFRDGHVCQHCHGYSKDKILNVHHLESRQTGGDAPNNLITLCETCHKACHAGKIKLKVKRGQSFRAEAFMGIMRWTLLDRMRKAHSGLPVENTYGYLTKNTRITLGLPKTHCVDAYCIAGNLKAVRRGVCLHQRQVRKHNRQIHKCTVLSKTLKDGTKIGYRKLNQTPHLVKNFRLFDKVRCLGQTGFIFGRRSSGYFDVRRLDGVKLSSGISYRKLTLLEKRSTYLTELRKEDGASSPV

SEQ ID NO: 9320 - protein, 424 aa, unidentified; identical to SEQ ID NO: 4669
  REGION 1..424: note = Human gut metagenome

SEQ ID NO: 9321 - protein, 396 aa, unidentified
  REGION 1..396: note = gut metagenome
VVRRTPFTIQLTIATGESKQPVSLGVDAGYKHVGLSASTEKAELYASEVELRKDITDLLSARRALRQSRRNRKTRYRAPRFDNRIRTKRKGWLAPSVENRINAHLSRIEAVLRLLPITKITVETASFDMQRLKNPDISGKEYQEGEQLGFWNVREYVLFRDGHVCRHCHGRSKDPVLNVHHLESRRTGSDSPDNLITLCVTCHKALHRGEITLKAKRGQSFRAQAFMGIMRREVLNRLKASYPELKVHETYGYLTKHARIANGIVKSHGADAFCIAGNLGAERLGEFFFQKQTRRNNRQIHKLSILKGGIRKRNQAPFEAKGFRLFDKVACQGEEGFIFGRRSSGSFDVRKLDGTRISVGISCKKLRLLEKRRTYLTEIRKEEALPPLPEGRGLRA

SEQ ID NO: 9322 - protein, 441 aa, Sulfobacillus sp.; identical to SEQ ID NO: 4231

SEQ ID NO: 9323 - protein, 512 aa, unidentified
  REGION 1..512: note = Human gut metagenome
MSTVYVLNKDGKPLMPTTRCGHIRYLLKEKKARVVASKPFTIQLLYETNDVVQPLYLGIDPGRTNIGVAVVKTDGTAVFTAHLETRNKEIPKLMKKRKDSRRARRTNGRRCRRQRRAKANDTISKKCVKQATAQNGSVSKRAKEIGVIKRHLPGCEKEILCIGIKNKEAKFNNRTRPEGWLTPTANQLLQTHINLVKKIRKFLPISDVVLEINKFAFMQLDDPNIQKWQYQQGPLYQKASLEEAVSEMQEHHCLFCKKPIAHYHHVVPQSENGSDTIGNIVGLCTKHHDLVHKDTVWQKKLAKKKTGLNKKYGAQSVLNQIIPALTERLNTLFPKHFFVTTGKSTYDYRAAHGVSKDHWLDAYCIACSVLPNDVCDSGINNRVPYELKQFRRHDRRALHKANMSRVYTLNDKAVATNRHKAIKQTTDSLEEFRQNHPDDVYKLKVKEHHPEYRNSKRNFPGCVFLVGKHTHVMQGTSGSHNGQADGYYDTNGNSYSSGKCKFVAKNEGIVFT

SEQ ID NO: 9324 - protein, 446 aa, Pseudomonas sp.
VAVYVLDKTGTPLMPCSEKRARLLLERGRARIHRQVPFVIRLVDRRQADSALQSLTLKFDPGSKFTGIALVRQKGQRVSVLSLMELAHRGAAIRQAMQQRAAFRRRRRGQNLRHRTPRFDNRTRPEGWLPPSLRHRLDTTLGWVGRMRNWAPISDLAVERVKFDMQAIQNPEISGVQYQQGELAGYEVREYLLEKWGRCCAYCDAENTPLEIEHIVPRSAGGSDRVPNLTLACRPCNQRKGNQPVEVFLKARPELLARIKAKAKVPLRDAAAVNATRNALFRALLDTGLSVTTGTGAQTKFNRRCLGLPKTHALDAASVGEIRAIEHWQRPTLAIKATGRGEYQRTRLTAHGFPRGYLTRQKRHFGFQTGDQVRAEVPTGKKAGTHQGRVAVRKTGSFNIQTPDGVVQGIHHRHCTLIQRADGYAYSDTPTDSAQPQKEAARAGAR

SEQ ID NO: 9325 - protein, 421 aa, unidentified; identical to SEQ ID NO: 4238
  REGION 1..421: note = Human gut metagenome

SEQ ID NO: 9326 - protein, 431 aa, Moorena sp.
MSYVFVIDQEKRPLDPVHPGRARKLLSSGKAAVYRRFPFVLILKHPVSEAHPQPLRLKIDPGSKTTGLAVLNDTSGQVLWAAELVHRGEEVHQALQKRAGVRRGRRSRHTRYRAARFSNRRRKRGWLAPSLCSRMQNVQTWTRRLMRWCPLGAISYEAVRFDTQAIQNPEIKGVAYQHGTLAGLEVKEYLLLKWRHKCVYCQKGDIPLEVEHIVPKRRGGSDRITNLTLACEACNQQKGSQTAQAFGFPHLQAQALQPLKDAAAVNSTRWALYERLKATGLPIEVSTGGQTKWNRKQRGIPKSHWLDAVCVGPSTPERVQWQHVIPLLITARGRQCRQLCNVDGWGFPRSRPKGPSKVFGFQTGDMVQAVVTRGKRMGTYVGRVAIKTDGYFKIIGTHGMVEGIHAGYCSPLHRVDGYEYQKGSAALPPQM

SEQ ID NO: 9327 - protein, 517 aa, Streptosporangium sp.; identical to SEQ ID NO: 3078

SEQ ID NO: 9328 - protein, 429 aa, Moorena sp.
MSKQNYVLVLDGHKKPLSPCRPVTARKLLKAKKAAVFRLFPFTIILKKVVEETPEPMTIKLDPGSQTTGIALIQGDKVVWGAELTHRGQGIKASLESRRSLRRNRRNRKTRYRQPRFLNRKRSKGWLAPSLQHRVETTLTWVRKLIKLAPIDSIVQELVRFDLQKLENPEVSGIEYQQGQLAGYEVREYLLEKWDRKCAYCEVENVPFEVEHIHPKSKGGTDRISNLAIACHNCNQEKGNRDIRDFLSGKPDLLNRILKQAKSPLKDATAVNSTRWALFNKLKEMGLPVLTGSGGLTKFNRTRLNLPKTHWIDASCVGQIESLTLVTNQPILIKATGRGTRQMCGTNQYGFPTRHRSRTQIHKGFQTGDIVTATVVAGKKVGFYLGRVLCRASGSFDIATQNGRVTGISHKYCQSIHKKDGYSYGFQKH

SEQ ID NO: 9329 - protein, 420 aa, unidentified
  REGION 1..420: note = Human gut metagenome
MQYVYVLNKHDEPLMPCSPRKARLLLKQKKACVVKRTPFTIKLLYGSTGYKQPITLGVDAGSKHIGISAATEKYELYREEATPRNDVVDLLSARRAFRRNRRNRKTRYRAPRFNNRVHSKHKGWLAPSVEVKIQEHITLIKRVCRILPVTLVRVETAEFDTQRLKAMLEGKPLPVGTDYQLGEMYDEYNVRQYVLKRDKYTCQCCGAHPTKTKAVKLHVHHIETRRTGGNAPNNLITLCTACHKALHAGKVTLNGKKRGKPLKDAAFMGIMRKTLMERLLKELKIPVQETYGYITKYLREKHSIPKSHTNDARCISKNPLAIPCDTCYYTKAIRRHNRQLHKATILKGGIRKANQAPYTVKGYRLWDKVSCNGTECFITGRRTSGYFALKKLDGTVISNSISYKKLRLLEVATNYITERK

SEQ ID NO: 9330 - protein, 465 aa, unidentified; identical to SEQ ID NO: 8068
  REGION 1..465: note = Human gut metagenome

SEQ ID NO: 9331 - protein, 434 aa, Moorena sp.; identical to SEQ ID NO: 7384

SEQ ID NO: 9332 - protein, 421 aa, unidentified; identical to SEQ ID NO: 2610
  REGION 1..421: note = Human gut metagenome

SEQ ID NO: 9333 - protein, 419 aa, unidentified; identical to SEQ ID NO: 6140
  REGION 1..419: note = Human gut metagenome

SEQ ID NO: 9334 - protein, 456 aa, unidentified
  REGION 1..456: note = Human gut metagenome
MSTCVCVLSNSGERLMPTFRLGKVRRLLKDGKAKIVKHHPFTIQLLYDSKTNTQPIEICEDEGYNYIGISVKSESHEYVSAQYDTLQDEKEHHDDCRKYRRTRRNRLRYRKPRFDNRKRSEGWLAPSLEHKKQLNIRLIERYVSVIPITRATVEVGSFDTMLLQAIQKGESKPEGVDYQKGPRYNLATLREAVFYRDNYTCQVCGRKIADGAILHMHHMFYWKGRHGYQLDELVTACEKCHTPANHQKGGKLFGFGENKEFANLSGAAFMNAVRWQIVNALYATYGKEFVTITYGAMTKEKRIILGIEKTHNNDAYAMGDYHPAHRCVFRHYQKRRRNNRVLEKFYDATYIDARTGNKAKGKELFNGRINRNHKKDSENFHKNRSKKVSKGRRSIRRQRYAIQPYDTVRLEGKTYITSGCHNKGTRLLIPANGKSKSVAISKVQVVCHAGAWIQII

SEQ ID NO: 9335 - protein, 456 aa, unidentified
  REGION 1..456: note = Human gut metagenome
MTNIYILDINGKPLMPCHNGAFVRCRLKNKEAKVVKRKPFTVQLMYEVKNNYKQDIYLGVDAGYKYIGFSASTSNQELFSGELEQDCGMVERNKERRMYRRQRRSRLRYRKARFNNRKAGKPQGWTAPSLQRKRDTHLRFIMMLSSIMPITDINVEIGLFDPALMKATAEGRTIKGADYQHGEAEGFENMKSYIRYRDSYTCQNPNCKCHKMKKEDREKLKLHVHHIGYYKHDRSSRPGNLITLCELSHTPETHQPGNLLYGWKPKMKSLRETAFMNTVRKEIVDTLKAVYPDKTVRYTYGYKTNLTRRDWHVPKSHHDDAFCIAGQYSLKRAETVYFNQQRRNNRSLEIFHDAKYIDSRDGKRKTGKELYCGRNTRNKNFNKENLHQYRSKKVSRGKRNIRKQHYKYQPNDIVVFEGQKYKIRGSHCKGSRVILDTKKSVSVKKIHILKHCSGIC

SEQ ID NO: 9336 - protein, 277 aa, unidentified
  REGION 1..277: note = metagenome
MPNKVYVINKHGRPLMPCSPAKARHLLDEGKAKVKKRTPFTIQLVYGSSGYTQEVILGVDAGSKTIGMSASTTKEELLSAEVKPRNDVVDLLSARREFRRARRNRKTRYRKPRFDNRVRSKHKGWLAPSVEVKIQEHITSIKRVCRILPVSKVVIETAEFDLQMLKTIADGKPVPQGEDYQKGEMYGHYNVRQYVLWRDNYTCQCCGAHATKKKEVRLHVHHLESRKTGGDAPDNLIPLCESCHEKLHKGVIAEGDCKSVSVVPHGMPHSWASCGRL

SEQ ID NO: 9337 - protein, 501 aa, Moorena sp.
MKGGGIMPEVNIIVQNADGSPLMPTHHYGRVKRMLKVGKARIVSLKPFAIRLTYQIVNPGLDTVTLGIDPGRTNIGLSLIDSKGRNLGSYLVETDNRDIPHNVSNKKKHRQASRWGERKRRQRRAVAHDNTLKITELYRILPGCKKAIKCKGIKNSESRFNNRKRSEGWLTPTAKHLLNTHLRIVEIMSRYYPIANVAIEINRFDFAKMENPGIRNWEYQKGRLFGFKDRNDAVFHDQDGKCLLCGKRPIEHYHHIVPRGRGSESMDNIAGLCKQCHDLVHKDIHAQEQLKAKKQGLLKKHHAVSVINQIMPSLLKELSSRYPTYTTTGWQTQKMRAFYGYPQKEPDDGTHYIDAWLIAVDAMGITPAEIPAFEHVGTIMQFRRHDRARIHYQHERAYYLGKTKVCTNRHKRTGQTKTISLAEYRVLHPHEVSKLTVKKSTRGYNNMKRIMPGALVRWHGKILTVSGMHNTRYRFVETNICKEAPASECTIIRHNNGWAFI

SEQ ID NO: 9338 - protein, 431 aa, unidentified
  REGION 1..431: note = Human gut metagenome
MPNKVYVINKHGRPLMPCSPAKARHLLDEGKAKVKKRTPFTIQLVYGSSGYTQEVILGVDAGSKTIGMSASTKKEEVFAADVTPRNDVVDLMSTRREFRRARRNRKTRYRKPRFDNRVRSKHKGWLAPSVEVKIQEHITAIRRVCGILPVSKVVVETAEFDLQLLKAIEEGKPVPQGEDYQKGEMYGHYNVRQYVLWRDDYTCQCCGAHATKKKEVRLHVHHLESRKVGGDAPDNQVTLCESCHEKLHKGLIAEKDFKKRKRRSTRDATFMGIMRKTLMQRLCSELPIPVVKTRGYITKATREKLLVLPKSHTNDALAIAQGKRGFNVGYLPEIAQIDKIYTIRPVRHHNRQLHKATILKGGIRKSNQTEKYVFGYRLFDKVQFNGQDCFIWGRRTTGIFTIKTINGKMIKDGISFKKLKLVEKSASYLIA

SEQ ID NO: 9339 - protein, 423 aa, Moorena sp.; identical to SEQ ID NO: 3576

SEQ ID NO: 9340 - protein, 518 aa, unidentified; identical to SEQ ID NO: 7282
  REGION 1..518: note = Human gut metagenome

SEQ ID NO: 9341 - protein, 442 aa, unidentified; identical to SEQ ID NO: 4418
  REGION 1..442: note = Human gut metagenome

SEQ ID NO: 9342 - protein, 402 aa, unidentified
  REGION 1..402: note = Human gut metagenome
LRVFVRNKRGKPLMPCSPAKARLLLKEKKAIVKRRTPFTIQLTIATGETKQPVSLGVDAGYKHVGLSASTEKAELYASEVELRQDITDLLSARRALRLSRRNRKTRYRAPRFDNRIRTKRKGWLAPSVENRINAHLSRIEAVLRLMPVTKITVETASFDMQLLKNPDIAGKEYQEGEQLGFWNVREYVLFRDRHVCQHCYGRSKDPVLNVHHLESRRTGGDSPGNLITLCETCHKALHHGEITLKTKRGQSFRAEAFMGIMRWEVLNRLKVSHPELEVNNTYGYRTKHVRIANGIAKSHCADAFCIAGNLGAKRLGEFFFQKQTRRNHRQIHKLSILKGGIRKRNQAPFEVKGFRLFDKVACKGEEGFIFGRRSSGYFDVRKLDGTRISAGISYKKLHLLEK

SEQ ID NO: 9343 - protein, 430 aa, unidentified
  REGION 1..430: note = Human gut metagenome
MPKVYVLNRHGRPLMPCTPAKARHLLDAGKAKVRHRTPFTIQLLYGSTGYTQEVILGVDAGSKTIGLSAATETEELFSAEVKPRNDVVELMSARRQFRRARRNRTTRYRKPRFDNRVRSKHKGWLAPSVEVKIQEHMTAIRRACAILPVSKVVVETAEFDLQLLKAVAEGKPVPQGEDYQKGEMYGHYNVRQYVLWRDSYTCCICGVHGSVRKGVPLHVHHLESRRVGGDAPDNLVTLCTACHDKLHKGIIMAADIKKRKRRSTRDATFMGIMRMTLLRRLREQLPVPVVETRGYITKATRENLLVLPKSHTNDALAIAHGPQGFRAEHLPNIRQADRLYTIRPVRHHNRQLHKATILKGGVRKTNQAEKYICGFRLYDKVLYNGIECFVWGRRTSGSFLLRQLNGEKVKDGVSYKHLKLLERSQSYLVA

SEQ ID NO: 9344 - protein, 414 aa, unidentified
  REGION 1..414: note = Human gut metagenome
LMPCSPAKARLLLKEKKAVVVRRTPFTIQLTIATGETKQPVSLGVDAGYEHVGLSASTEKAELYASEVELRQDVSDLLSARRALRQSRRNRKTRYRAPRFDNRIRTKRKGWLAPSVENRINAHLSRIETVLRLLPVTKITVETASFDMQLLKNPDIAEKEYQEGEQLGFWNVREYVLFRDGHVCQHCHGRSKDPVLNVHHLESRRTGGDSPGNLITLCETCHKALHRGGITLKAKRGQSFRAEAFMGIMRWEVLNRLKASHPELEVNNTYGYWTKHARIANGIAKSHCADAFCIAGNLGAERLGEFLFQKQTRRNNRQIHKLSILKGGRRKRNQASFEVKGFRLFDKVACKGEEIFIFSRRSSGYFDVRKLDGTRISAGISYKKLRLLEKRRTYLTEIRKEAFPPLPEGRSLRA

SEQ ID NO: 9345 - protein, 442 aa, unidentified; identical to SEQ ID NO: 2903
  REGION 1..442: note = Human gut metagenome

SEQ ID NO: 9346 - protein, 464 aa, Polaromonas sp.
MAVFVLDRSARPLMPCTEKRARLLLERGRARVHKVMPFTIRVVDLEAEDCEFQALRVKLDPGSKTTGIALVRETAEKNGVAVINLFELMHRGKQISEALTARRGHRRMRRSHLRYRAPRFLNRGNKKSGWLAPSLQHRVDTTLAWVNRLERLAPVSAISTELVRFDMQALENPDIEGAQYQQGTLAGYEVREYLLEKWGRTCAYCGARNVPLQIEHIHPKSKSGSDRIGNLTLACQCCNQKKAALPVEVYLARKPELFKRILGQAKRPLKDAAAVNSTRWALVNALKTTGLVVETASGGRTKFNRIQLGIPKTHALDAACVGYVNSITGWRKPTLCLKAMGRGSYQRTRLDKYGCARGYLTRSKSIQGFQTGDMVKAEVTQGKKTGIYTGRVAVRASGSFNIQTRHGLVQGVSHRYCTVVQRGDGYGYSLVAKTDATGTSPKQGDALHPALYLPGLKAGVSRAN

SEQ ID NO: 9347 - protein, 422 aa, unidentified
  REGION 1..422: note = Human gut metagenome
MSLTYVIVKNGQPLMPTERSGKVYRLLKNKQAKVVRRCPFTIKLLYEPESLVVQEVVLGQDTGSKHIGTACVGNNKVLYQSQIRLRDDIKSNMDGRRQARRFRRNRKTRYRKPRFLNRKNSTKLDRLPPSVKHKVQAHINEIEFCKKVLPISKIVLEVSQFDTYLIKNPSLISEKVRHWGYQKGFNYEWSSRREAILNRDNYTCQICGKKNTRLEVHHIIFRSQGGTNDENNLITLCSECHSDIHNEKIVLTKKPKKLNLKYATHMSIIRSQLLKVYSEAIETFGFVTKTNRENLSLPKDHYIDACIIASGGKIFELNDIIYRKRRVAKGDYRLTKGVRCEQKIPVGKIQGFRKFDKVKYLGKEYFIKGRMSSEFAVLMDIFNNKIDFSFMPKGWKTPKLSNLERISSRSSCICINQKSFQA

SEQ ID NO: 9348 - protein, 406 aa, unidentified; identical to SEQ ID NO: 4271
  REGION 1..406: note = Human gut metagenome

SEQ ID NO: 9349 - protein, 374 aa, unidentified
  REGION 1..374: note = Human gut metagenome
MVIQLMKEIPEKEICQDEIRCGIDDGGLHVGIALVQKCKTKNKVVFKGTMEQRNDVKHLMEVRRGYRRYHRYHKRYRQARFDNRKSSKREGRIAPSILQKRQATIRVIHWLNKWINITNYWLEDVSVDIRVLTDGYQSYRWQYQKSNRLDENIRKAAILRDGGKCMECGKSNCRLEVHHIKPRRRNGSNTLDNLITLCESCHQKTEGQEELYMDRYFSLLKSSDNKNLNYAQHVMIGKMWLRKQLSGLGVLYLTSGGDTANKRIDWNIEKSHANDAVCITDLQPDTCDVKEWTMKPMRRQSKAKTDHVLGIHHRDLVEYTFKNGETHRGYVTALYPEQKAINFQSPTKHCKKVNARKCKLLWKYSKIYWFENAS

SEQ ID NO: 9350 - protein, 416 aa, unidentified
  REGION 1..416: note = metagenome
MVYVLSKTGQPLMPTENHAKVRVLLKQQKAKIVHRCPFTIQLLYDSTNYTQPVSLGIDAGSRHIGISATTETKVLYEADVTLRNDIVNLLSTRREARRPRRSRKTRYRKPRFNNRTRKDGWLAPSVRQKVDTHLTTVRKVTEILPVNSITVETASFDIQKIKNLNIVSTDYQHGEQFDFWNVREYILFRDGHKCQCCKGKSKDPVLNVHHIESRKTGGNAPNNLITLCETCHKGYHNGTVSLPKNIRRGMKFNDAAFMGIMRLAFFNKVKETYEPLGIMVNMTYGYITKNTRIEHNLPKDHFIDARCISGHPDATSDGTVFYQKKVRCHNRQIHKQKIFKGGIRKRNQAPYEVKGFRLYDEVLWKGQKCFIFGRRSTGRMDLRLLDGTHINASVGYKNLKLLRKRSNYLTEQRKVG

SEQ ID NO: 9351 - protein, 442 aa, unidentified; identical to SEQ ID NO: 8269
  REGION 1..442: note = Human gut metagenome

SEQ ID NO: 9352 - protein, 376 aa, unidentified
  REGION 1..376: note = Human gut metagenome
PVSLGVDAGYKHVGLSASTEKAELYASEVELRQDITDLLSARRALRQSRRNCKTRYRAPRFDNRIRTKRKGWLAPSVENRINAHLSRIEAVLRLLPVTKITVETASFDLQLLKNPDISGKEYQEGEQLGFWNIREYVLCRDGHVCQHCYGRSKDPVLNVHHLESRRTGGDSPGNLITLCETCHKALHRGEITLKAKRGQSFRAEAFMGIMRWEVLNRLKASHPELEVNNTYGYRTKHARIANDIAKSHCADAFCIAGNLGAERLGEFFFQKQTRRNNRQIHKLSILKGGIRKRNQAPFEVNGFRLFDKVACQGEEGFIFGRRSSGFFDVRKLDGTRISAGISYKKLHLLEKRRTYLTEIRKEEALLALPEGRSLRT

SEQ ID NO: 9353 - protein, 466 aa, unidentified; identical to SEQ ID NO: 4047
  REGION 1..466: note = Human gut metagenome

SEQ ID NO: 9354 - protein, 515 aa, unidentified
  REGION 1..515: note = Human gut metagenome
MTALEERLSKTEYIYVLGFDGKPQMPTRRKRHVLKLLKTGRARIAEDIPFTIRLTYRNAPVLQPVTLAEDPGRTNIGAAVLSPLGDLLFAAVIETRNKEIKKLMADRKKSRQASRRGERKARQRLAKRYGSMVKSGMVMRKLPMYAADKFVTCKFIRNTQARFCNRKRCPDWITPTVQHLVQTHLNIIRKISRYLPVTDIAFEVSRFAFMHMENPKAMGVDFQNGPLKGYGDVKEAIRTQQHGKCLMCKKPIAHFHHIVPRSRGGSDTIQNLAGLCTECHTKVHTDTAFRKDFDEKKSGQLKKYGALSALNQAVPFICKKLLEEYGEEHVHFCRGLDTSLIRTALGFEKTKKNQMHEVDAYCIGLAALEVNEVETPAFDHTFQIRQFRRQDRSIIHHQTGRSYYQGKEKVAQNRKPGFEQKTTALSQWYEEQVRIHGEKEAEKLRSQLMVEKSCRHYNDMDRFLPGAVFLYEGKRYVLSGRITNGKYLRACGQGMKNFPAAECTFIRHNAGLVFI

SEQ ID NO: 9355 - protein, 453 aa, Moorena sp.
MSVAVLSSTGRKLMPTSNYRARKLLKSHRAKIECYRPIFTIRLTDREEGNTQPIEYACDTGYQHIGVSIKSEKHEFVHAQYDMLSNETERHNDCRKCRRTRRNRLRYRKPRFDNRSKKNKEMAPSLRHRKENQIRLFESFCKVMPITSATFEMGKFDTQLLQAIADGKSLPEGKDYQRGSKYLYQTEREAVFGRDHYTCQVCGKSVKDGVILHTHHIGFWKGYRSNRISNLLTVCEHCHTAKNHQPGGKLWGLEPKSTNLAPATYMSTVRWAMYRDLVLTHPELDIYFQYGAKTAVTRKSLHLAKTHANDAYCIGSLHPKHRTAELVYQKKRRNNRILAKFYDAKYIDIRDGEKKSGSALSCGRTNRRESRRSDKNQRIYRGKKCSSGRTSVRKKRYSYQPGDAILFRSQRFTVNGAHCNGTRVILNTGKSVKMADLTCIKMEGGWRFLPAQA

SEQ ID NO: 9356 - protein, 462 aa, unidentified
  REGION 1..462: note = Human gut metagenome
MSVLVIGRNGRALMPTNPRKARLLLKKKTASVVCRHPFTIQLLYKTGCATQEGCIGIDTGSQHIGVGITCGDRVILKDEHALRSSMEKRSLLATRTVMRRGRRYRKVRYRKPKWRHHTKRMYFEKANRRGQHWRKVKTTTQSPRLKGWLPPSLQSKCDHHFRIIDRYLKYLPDPITRNLVIEAGRFDMARMNDPTIHGEMYQRGPMYDAENLRAYIFARDNYQCACCKAKAGTTRKADGTTVKLVAHHILFRSRGATDNPKYIISVCDHCHTTKAHQPGGILYSWMENNKKVARGLRDATFMNILRKRLFARYPQAAFTYGNITAADRKQLRLPKSHANDAVAISLFGKEASTVKNICQTMHYKQIRKSKRSLHEAIPRKGRKNPNTKAVRNKKNTTQVNGFKLWDSVLADGKKLFICSFTGTSAYLIDKNGCYISQPGKTYKQWPLSKLKRLHPNGNWLMA

SEQ ID NO: 9357 - protein, 434 aa, Lactobacillus sp.; identical to SEQ ID NO: 2383

SEQ ID NO: 9358 - protein, 477 aa, unidentified
  REGION 1..477: note = Human gut metagenome
MIIALDKNKRPLGFLTERRCRILMERKRAVLYRVFPTVVILMDMDVRKLRDLPSYRIKIDPGSKYTGIAIVRNDTDELVYAMQIEHRGDAVRAGLQKRKMARRNRRSRETGYRRAKWGNRCLSDGDKKSYNSSRKDGWLPPSILSVADNVLTWVQRLSRWINITDCSLEAVRFDTQLLENPNIKGEEYQHGTLFGYEIREYLLEKFGHTCQYCGGKSGDSVLEWEHIHPKSRGGSDRVKNAILSCSSCNRDKDNQTLEEWIGQIRSRVSREKGKRKELDSGRIERIQKVIDGKPEGQPMRYATWVSSSRRYLEKHLFQIFRDVECSSGGRTKYNRIRLGYSKEHHYDALCVGTVPEKGYHDRTNGYYLYAKATGRGTRLRGAVNQCGVIITKWTSRKKNFFGFQTGDIVVAEVPHKIPRPYKYEGRFVGRVMVRASGSFDIRTTDGKLATVKAGFCRLLQANSGCAYSMERTIPLDH

SEQ ID NO: 9359 - protein, 418 aa, unidentified; identical to SEQ ID NO: 6784
  REGION 1..418: note = Human gut metagenome

SEQ ID NO: 9360 - protein, 426 aa, Moorena sp.; identical to SEQ ID NO: 3177

SEQ ID NO: 9361 - protein, 442 aa, Deinococcus sp.; identical to SEQ ID NO: 5259

SEQ ID NO: 9362 - protein, 470 aa, unidentified; identical to SEQ ID NO: 2825
  REGION 1..470: note = Human gut metagenome

SEQ ID NO: 9363 - protein, 414 aa, unidentified; identical to SEQ ID NO: 4264
  REGION 1..414: note = Human gut metagenome

SEQ ID NO: 9364 - protein, 462 aa, unidentified
  REGION 1..462: note = Human gut metagenome
MSVLVIGQNGRALMPTTTRKARILLKENKASVVCRHPFTIHLWYKTGCATQEGSIGIDTGSQHIGVGVTCGDKVILKDEHELRSSMEKRSLMETRATMRRGRRYRKVRYRKPKWRHHTKRMYFEKANRKGQHWRKVKTTTQSPRPERWLPPSLQSKCDHHFRIIDRYLKYLPDSITKNLVIEVGRFDMAHMNDPTIHGEMYQRGPMYDTENLRAYIFARDGYKCACCKAKAGSIRKKDGTSVKLVAHHIQFRSRGATDNPKYMISVCDHCHTTKAHQLGGILYSWMETNKKVTRGLRDATFMNILRRRLFDGYPQAAFTYGNITAVDRKRLLLPKSHANDAVAISLFGKDVSVINATCQTLRYKQVRKSKRSLHEATPRKGRKEPNTKAIRNKKNTTHVNGFKLWDSVLVNGQKLFICGFTGSSAYLVDQDGHYVSPPGKTYKQWTLSKLSRLHPNGNWLMA

SEQ ID NO: 9365 - protein, 529 aa, Moorena sp.; identical to SEQ ID NO: 8434

SEQ ID NO: 9366 - protein, 451 aa, unidentified; identical to SEQ ID NO: 5203
  REGION 1..451: note = Human gut metagenome

SEQ ID NO: 9367 - protein, 434 aa, unidentified
  REGION 1..434: note = Anaerobic digester metagenome
MQRKGENPMVFVLDTNKRPLAPCHEAVARKLLKQGKAGIYRRFPFTIILKKSVDESENETTYRLKIDYGSRHTGLAILRGQEVVWLGQLDHRTDIKERIDKRRAFRRARRNRKTRYRKPRFLNRKRKEGWLPSSLESRVQNIQTWVNRLKKLCPIGYISYENAKFDTQLMRNPEINGVEYQQGTLQGYEVREYLLEKFGRKCCYCGKENVPLEVEHIIPKSRGGTDRVDNLCLACHDCNQRKGSKTAEEFGYSHIQEMVKKTLKDASVVNATRWKVYEVLKQTGLDVECGTGARTKMNRIRLDLPKTHYFDACCVGESTTNHLYFKTKEVLFIKAKGRGSRSRTNLDRYGFPRGYLARQKFFFGFQTGDMVKAVVPRGKYQGVWFGEVACRKTGSFDIKGKDGKRIAQGINYRYVQVIQRFDGYAYGKGVAELA

SEQ ID NO: 9368 - protein, 464 aa, unidentified; identical to SEQ ID NO: 6574
  REGION 1..464: note = Human gut metagenome

SEQ ID NO: 9369 - protein, 430 aa, unidentified; identical to SEQ ID NO: 3252
  REGION 1..430: note = Human gut metagenome

SEQ ID NO: 9370 - protein, 428 aa, Enterococcus sp.; identical to SEQ ID NO: 4335

SEQ ID NO: 9371 - protein, 423 aa, unidentified; identical to SEQ ID NO: 5734
  REGION 1..423: note = gut metagenome

SEQ ID NO: 9372 - protein, 416 aa, unidentified
  REGION 1..416: note = Human gut metagenome
MVYVLDKNGQPLMPTDRHRKVRLMLQSGQAKVIKRCPFTIQLNYDSGHQTQEISLGIDAGSKHIGVSTTTKIKELYEVDVELRNDIVDLLSSRRELRRGRRNRKTRYRQAKFNNRRRGNGWLAPSIRQKIGTHLTVVENICKMLPISRIMVETASFDIQKIKNPDIQGAEYQQGDQLEFWNVREYVLFRDGHTCQCCKGKSKDKILNVHHIESRKTGGNAPNNLITLCETCHTGYHKGTVQLPKAIKRGMRFKDAAFMGIMRWAFYEALKQQYEPVGTPVHNTYGYITKHTRIEHNLPKEHYVDARCISGNPDAFPSGEYYYQKKVRCHNRQIHKLTILKGGIRKQNQATYLVKGYRLFDKVSYQGKGYFVFGRRQSGFFDIRTLSGEKVNKGSLNCKKLKFIATRTYYLTERRAV

SEQ ID NO: 9373 - protein, 456 aa, unidentified; identical to SEQ ID NO: 4017
  REGION 1..456: note = Human gut metagenome

SEQ ID NO: 9374 - protein, 512 aa, unidentified
  REGION 1..512: note = Human gut metagenome
MPTVYVLNKDGKPLMPTTRCMHVRHLLKEQKAQAVASKPFTIQLLYETDDVVQPLYLGIDPGRTNIGVAVVKTDGTAVFTAHLETRNKEIPKLMQGRKKARRARRTNGRRCRRQRRAKANGTISKKCVKQTTAQNGSVSKRAKEIGVIKRHLPGCEKEILCIGIKNKEAKFNNRTRPEGWLTPTANQLLQTHINLVKKIQKFLPISDVVLEANKFAFMQLDNPNIQKWQYQQGPLYQKANLKEAVSEMQEHHCLFCKKPIAHYHHVVPQSENGSNIIGNIVGLCTKHHDLVHKDAAWQEKLAKKKTGLNKKYGALSVLNQIIPALTKELSSLFPKHFFATDGKSTYDYRTAHGVSKDHWLDAYCIACSVLPNDVCDSNINSHVPYELKQFRRHDRRVLHKANMSRVYTLNGKTVATNRHKAIKQTTDSLEEFRQSHPGDVCKLKVKEHHPAYRNLNRNYPGSVFLVDGQVHVMQGVSGSHNGKADGYYNTNGNAYPYYKCKFVVKNEGIVFA

SEQ ID NO: 9375 - protein, 423 aa, unidentified
  REGION 1..423: note = Microbial mat metagenome
MSNHVFVLDTNRKPLTPCQPGVARSLLNAGKASVFRRYPFTIILNKEVDANPEPLELKLDPGSKVSGMALKQGNRIIFAAELQHRGQQIVEALQSRRQLRRSRRNRKTRYRPARFLNRTRPQGWLAPSLQHRVDTLMTWVNRFRRLAPVGRITQELVRFDLQLMENPDISGVEYQQGALQGYEVREYLLEKWDRTCAYCGVPHVPLEVEHIQPQSKGGSDRVSNLTIACHSCNQAKGNGDIRDFLSGQPDVLSRLLGQAKSPLKDAAAVNSTRWALFKALKATGLRVTTGTGGQTKFNRLRLNLPKAHWLDAACVGDVKSLEVMTSKPLLIIAKGHGTRQMCGTDKYGFPTRHRSRIQVHKGFRTGNIVAATVTEGKKIGSYVGRVLCRASGRFDITTASVRVAGISHKYCKPIHRKDGYAYA

SEQ ID NO: 9376 - protein, 415 aa, Eubacterium sp.; identical to SEQ ID NO: 6925

SEQ ID NO: 9377 - protein, 477 aa, Polaromonas sp.
MAVFVLDRGGQPVMPCSEKRARLLLQSKRARVHRVMPFTIRLIDRSQTDCLLQPLRLKLDPGSRVTGLAVVREKPNTPGAKNAPAFEIAVINLFELVHRGRQISEALTARRQMRRRRRGNLRYRAPRGLNRGNKQKGWLAPSLQHRVDTTLAWVARLRRLAPITALSSELVRFDMQQLANPQIEGAEYQQGTLAGYEVREYLLEKWSRTCAYCDAQNTPLQIEHIEPRARGGSHRISNLCLACGPCNQKKAARTLQDFLKKDPARLARILAQAKKPLRDAAAVNATRWALAEALKATSLPLELASGGQTKFNRCTLGMPKTHALDAACVGRVDAIAGWQNHASATLTIKAMGRGSYQRTRLDGFGFPRGYLMREKSVHGFQTGDLVKAVVPKGKKAGTHVGRVAIRKTGSFNITTARGVVQGIGHKNCRVVQRNDGYGYFFNRAQHTGCEQAGPGATDALHPALYLPGLNPGVSRAS

SEQ ID NO: 9378 - protein, 341 aa, unidentified
  REGION 1..341: note = Mouse gut metagenome
VLCALRYIGIYRRTRRNRLRYRKPRFNNRISNKKEGWFAPSLKNKADQHIMLIQRLATVAPIKDIYLEVGSFDTQLLDAIAKGLPIQEGTDYQQGALYGEETLRKAVFQRDNYTCQVCGRTIKDGAKLHTHHFLYWKGRHGNRLDELCTVCEKCHTSANHQKGGKLYGWGADKKFKSYVSAAFMNTVRWYIVNQVKDLVSDTEVHTTYGAATKLARKDFQFEKSHVNDAYAMGKLHPNIRCETEYYKKVRRNNRCLEKFYDAKYIDIRDGKKKSGKELGCQRINRREPRMSEKNLRIYHGQKVSKGRRSIRKQRYSIRPGDVVLFNGQKYISKGCGSYGTQ

SEQ ID NO: 9379 - protein, 413 aa, unidentified; identical to SEQ ID NO: 3476
  REGION 1..413: note = Human gut metagenome

SEQ ID NO: 9380 - protein, 442 aa, unidentified; identical to SEQ ID NO: 2637
  REGION 1..442: note = Human gut metagenome

SEQ ID NO: 9381 - protein, 431 aa, Escherichia sp.; identical to SEQ ID NO: 3801

SEQ ID NO: 9382 - protein, 453 aa, Leptospirillum sp.
MLPQSRALEVPDADNREGQDETVGGKGAIPKPVANIPEGRRFARSALRPKGQCNVRFDGGFVQVFVLDKKKKPLVPCHPARARELLREGRAVVHRIAPFTIRLKDRIGGETQPIRVKLDPGSKTTGLAVVREEETDGEKTAHVLFQAEIHHRGSAIKKRLDQRRAFRRRRRSQLRYRTPRFDNRTRPDGWLPPSLRHRVDTTLAWVERLRRLVPVSELSQELVRFDMQKIENPEISGAEYQQGTLAGYEVREYLLEKWGRTCAYCGASDMPLEIDHIHPRSLGGSDRVSNLTLACRSCNLKKGNRPVGEFLAKTPERLSTILARAKAPLKDAAAVNTTRWALFQALKATGLPVETASGGRTKYNRTRLGIPKGHSLDAACVGKVDRIEGWNRPCLSVKVTGRGSYQRTRLDSFGFPRGFLTRTKAHFGFQTGDRVMAIVTNGKKPEPVPDGWP

SEQ ID NO: 9383 - protein, 427 aa, Nostoc sp.; identical to SEQ ID NO: 2670

SEQ ID NO: 9384 - protein, 242 aa, unidentified
  REGION 1..242: note = Human gut metagenome
MPNKVYIINKHGRPLMPCSPAKARHLLDEGKAKVKKRTPFTIQLVYGSSGYTQEVILGVDAGSKSIEISASTKKEEVFAADVTPRNDVVDLLSTRREFRRARRNRKTRYRKPRFNNRVRSKHKGWLAPSVEVKIQEHITSIKMVCRILPVSKVVVETAEFDLQLLKAIEEGKPVPQGEDYQQGEMYGHYNVRQYVLWRDNYTCQCCGAHPTKKKEVRLHVHHLESRKVGGNAPGNLVTLWRC

SEQ ID NO: 9385 - protein, 525 aa, unidentified
  REGION 1..525: note = Human gut metagenome
LMPTTRCGHVRKLLDSKKAVVVNSNPFTIRLKYDTPNGIQDVFAGIDSGRENIGSGASNEDGDCLYLGELKTSNKSIKIKMAERTGFRRERRRHDRQSKQRKAKKDHTEIQNGNDDICRTTISCKSVQISYPVAEESVTHKIIRGKEGKFANRHRDEGWITPSARQLVQMHMNDLKSMCKILPISHVTLERVAFDFQKLENENIKVWEYGKGKLYGYDSPEEYIHDVQDGKCLVCGKPHIDYLHHIIPRSKGGSDKVSNIAGLCYDCHYGPMGVHNCQDTQNRLPELKNEANKQYKVSLLNSVMTVLIEEMDKFCKANSIIFSICEGHDTAKVRDMYDLQKDHCFDGFAISLVGRNVESVDVIPDRIYQKQRYKKKSKNIIQKRNCREYYDGKKLVAVNRHKGTDQKADSLEEYMNTYAETHTADECKNQFESLTVKPARRTYTFHKEGRICPFHIGDKVRYEKKNKIKGNTKVDTFICEGIYFSKDENKAEVEHNKTKSKKMKFCRTIESGCIPYIDYRKLALI

SEQ ID NO: 9386 - protein, 426 aa, Moorena sp.
MSNSTNYVFVLDASKKPLTPCKPGMARSLLKVGKAKVFRRYPFTIILNKLVAEKHKGLLLKIDPGSKQTGFALVSLGGEVICAMVLVHRGQQIRNALERRRTIRRGRRNRKTRYRSSRFLNRKRKKGWLPPSLMHRVLTTQTWVNRLIKLAPIDSIAMELVRFDTQKMVNPEVSGVEYQLGELAGYEVREYLLEKFNRTCAYCDAKNVPLEVEHIKPKSKGGSNRISNLTLACRPCNEAKGNQDIKDFLSGKPNLVKRILSEAKAPLKDAAAVNATRWKLFETLKATGLPITTGSGALTKYNRCRLDLPKEHWIDAACVGEVEQLTILTTQPLLVTAMGHGCRQMVQMDKYGFPRKGYQAKKPVAGWKTGDIINVVKGKNIGLKGVRIKTVRSKGNFDIRHGDAILSVSRNQIQPIHRRDGYNYSF

SEQ ID NO: 9387 - protein, 415 aa, unidentified; identical to SEQ ID NO: 6534
  REGION 1..415: note = Human gut metagenome

SEQ ID NO: 9388 - protein, 451 aa, unidentified; identical to SEQ ID NO: 2593
  REGION 1..451: note = Human gut metagenome

SEQ ID NO: 9389 - protein, 456 aa, unidentified; identical to SEQ ID NO: 5939
  REGION 1..456: note = Human gut metagenome

SEQ ID NO: 9390 - protein, 450 aa, unidentified
  REGION 1..450: note = Human gut metagenome
LRVRNPFQPGRRITTGRKPEETNLRVFVLNKRGQPLMPCSPAKARLLLKEEKAVVKRRTPFTIQLTQATGETVQPVTLGVKAGSKEIGLSASTDKAELYASSVQLRTDVVDLLSTRRELRRARRNRKTRHRAPRFDNRVHNKNKGWLAPSVENKINAHLSRVAAVRKLLPVTKIVVETAAFDIQKIKNPDIEGTEYQQGDQLGFWNVREYVLFRDGHKCCHCHGKSKDPILNVHHLESRKTGGNTPNNLITLCETCHKAYHAGKIALKAKRGQSFRDAAFMGIMRWTFFNRLKAQCPELEVRNTYGYLTKNTRIRCGLAKTKTTDAFCIAGNLGAKRLGEYFFQKQTRKHNRQIYKMSILKGGVRKRQQAPYEVKGFRLFDKVRYQGQEVFVFGRRLRGDFDIRTLSGKRISSGASYRKLKLVELKKTYLTEIRKEDAIPHATEVACPLA

SEQ ID NO: 9391 - protein, 420 aa, unidentified
  REGION 1..420: note = metagenome
MFVYVLDMNGQPLMPTQRFGKVRRLLRDKKAKVVRGCPFTIRLLYEPKTKIVQEVVLGVDTGSKHVGVACVGNDKVLYQAQIELRDDVKRKMDSRRMYRRNRRQRKARYRKPRFLNRGNSIRKDRYCPTIVSKYYGHEREIEFCKTILPITKVVLETGTFDTQLMEKPWIQEQKWAYQKGVNYGYANAREHALVRDKYTCQCCGKKNCRLEVHHIVFRRNGGSDSLENLITLCEDCHKAVHLGEIGLKLKGKRKSTMRYATQMSTIRCMLLKKYPDAIETFGFVTKANRENLGLQKDHYLDACVIASCGRLFKLSDTLYQKRCVPKQNRQLCKGVRGERKIPTGKVLGFKKFDKIEYMGEICFVKGRRSKGAFELMDINNNTLDFRDRGGNRTPSYKSLKRVNARKSILCISTKIERGIL

SEQ ID NO: 9392 - protein, 420 aa, unidentified
  REGION 1..420: note = Human gut metagenome
MQYVYVLNKHGEPLMPCSPRKARLLLKQKKACVVKRTPFTVKLLYGSTGYKQPVTLGVDAGSKHIGISANTKKYELYREEATPRNDVVDLLSARRAFRRSRRNRKTRYRAPRFNNRVHSKHKGWLAPSVEVKIQEHITLIKRVCRILPITLVRVETAEFDTQRLKAMLEGKPLPVGTDYQLGEMYDEYNVRQYVLKRDNYTCQCCGAHPTKTKAVKLHVHHIETRKTGGNAPNNLITLCTVCHKALHAGKVTLDGKKRGKPLKDVAFMGIMRKALLERLRKELKIPVQGTYGYITKYLREKHGIPKSHTNDARCISKNPLAIPCDTCYYTKAVRHHNRQLHKATILKGGIRKANQALYTVKGYRLWDKVSYNGKECFITGRRTSGYFALKKLDGTVISNSISYKKLRLLEVATNYITERK

SEQ ID NO: 9393 - protein, 568 aa, Streptomyces sp.; identical to SEQ ID NO: 7824

SEQ ID NO: 9394 - protein, 414 aa, unidentified
  REGION 1..414: note = Human gut metagenome
MPCSPAKARLLLKEKKAIVVRRTPFTIQLTIATGEAKQPVSLGVDAGYKHVGLSASTEKAELYASEVELRQDVSDLLSARRALRQSRRSRNTRYRAPRFDNRIRTKRKGWLAPTVENRINVHLSRIETVLRLLPVTKITVETASFDTQLLKNPDIAGKEYQEGEQLGFWNVREYVLFRDGHVCQHCHGRSKDPVLNVHHLESRRTGGDSPGNLITLCETCHKALHRGEIKLRAKRGQSFRAETFMGIMRWGVLNRLKASHPKLEVHNTYGYRTKHARIANGIAKSHCADAFCIAGNFGAKRLGEFFFQKQTRRNNRQIHKLSILKGGIRKRNQAPFEVNGFRLFDKVACQGEEGFIFGRRSTGYFDVRKLDGTCISAGISYKKLHLLEKRRTHLTEIRKEEALPPPPEGRGLRA

SEQ ID NO: 9395 - protein, 448 aa, unidentified
  REGION 1..448: note = Human gut metagenome
MYWLIALNILKKKGSALMVYVLDINGQPLMPTTRHGKVRRLLNGHLAKVVKRCPFTIQLLYQSTKETQSTSLGVDAGSKHIGLAATTEKKVVYQEEFTPRNDVVKLLSARRILPHSRRNRKTRYRKPRFNNRVHSKHKGWLAPSVEIKIQEHITAIKRICQILPISEIHVETAEFDLQRLKALEDGNPLPVGTDYQLGEQYDFYNTRQYVLHRDGYTCQCCGTHDNNVKLHVHHIESRQTGGNAPNNLITLCEHCHSALHEGKLKLPKGKKRGKSYRDTAFMGIMRKTLLERLRKEIDIPVTETYGYITKYWREKVGLEKGHINDAVCISKHPYAEPLDIYYLTKAVRHHNRQIHKTKFSKGGIRKRNQAPYLVKGFRLFDKVLYQNREYFIFGRRATGYFDIRTLDGTKVNKGSISYKKLRIQDTANAYLKEVKAIPHMNKFTCVLA

SEQ ID NO: 9396 - protein, 395 aa, unidentified
  REGION 1..395: note = Human gut metagenome
MDTGYIHIGISVKSEKHEYLAEQIDTLTDEKTKHGACRMYRTLRRGRKRYRQPRFNNRKRDKDWIAPSLEHKKDIHVQAISRINKVMPLTDITMEMGNFDTQVLKAKEEGKPLPQGADYQHGERYGIATLREAVFSRDGYKCQCCGRTISDGAILHVHHIKYRSQGGTNSMTNLATVCDKCHTPKNHKPGGKLYNWKPKLPDFKGATFMTTIRWQLYNEVKSLFPDINVHITYGAATKEQRRELNIDKSHVNDAFAMGKFHPKHRTNAALYKKKRRNNRCLEKFYDAKYIDSRDGSKRTGQELFNGRINRNHKKDSENLHRYRLQKITAGKRTVRKRHYNIQPHDIVMYENRKRETSGCQSNGTRVILLSDKKSVAVKKVKIYKYAGGYFKSAFN

SEQ ID NO: 9397 - protein, 414 aa, unidentified; identical to SEQ ID NO: 2588
  REGION 1..414: note = Human gut metagenome

SEQ ID NO: 9398 - protein, 420 aa, unidentified
  REGION 1..420: note = Human gut metagenome
MQYVYVLNKHGEPLMPCSPGKARLLLKQQKACVVKRTPFTIKLLFGSAGYKQPITLGVDAGSKHVGLSASTEKRELYSEEFTPRSDVVELLSTRRQNRRSRRNRKTRYRVPRFDNRVHSKHKGWLAPSVEVKIQEHITVIKHICKILPISLVRVETAEFDTQRLKAMLAGKPLPVGTDYQLGEMYDEYNVRQYVLKRDHYTCQCCGAHNTAKKVVKLHVHHLESRKTGGNAPGNLITLCATCHENLHKGKVTLDGKERGKPLRDAAFMGVMRKTLMARLKEELPIPVQGTYGYITKMRREKNDIKKSHTNDARCISKHPLAEPCSVCYRTKAIRHHNRQTHKVNFSKGGYRKRSQTPYLVEGYRLWDKVLYKGQECFVSGRRSSGSFALKKLDGTTISEGVTFKKLRLLEPATNYLIERM

SEQ ID NO: 9399 - protein, 594 aa, Streptomyces sp.
VRSSLVQPRIIPTRQLASNGTRERRSLAPGPSPRGPRVNSPSHHDHWITGRCPPMATFPAGEQTHRAVLPQQLALESVRADTPGGRDETAHGHPAHARGTGGKHGRGETGRGRTEPRRRHATTAATAGTAENGNGDVPPWGIGQARVFVLAKGGQPLMPCHPARARELLAKDRAVVARQAPFTMRLKDRTLADAEVDGVRLRIDPGSKGTGLALTDEKKEPAAHGPTVTARRGLVSIELQHRGDQIHHSMRQRAGYRHRRRSAHCRYRAPRSANRTHPDGWLPPSLRHRVDTTLSTARRLCRYAPVTEIHIESVTFDTHAMSAGRPLTGTEYQQGPLAGTEARAYLLELWGRACTYCGITGVPLNIDHIHPRSRGGSDRIANLALACIGCNQAKGSRPIEKFLANDPVRLAQILRQAKTPLRDSAAMNSTRWQLTAALSTLGVPVLTWSGGRTKRNRTAMGLAKTHTVDALCVGLLDHESGDVIVRVPQQVCLVKATGRGSYARTTPDRYGFPRLQRPRAKQHHGFITGDLVRATMPSGRWKGTWTGRVSVRSRGQHSLTTSAGRFNVLHRNLRLLQRAEGYSYASKRETPKIS

SEQ ID NO: 9400 - protein, 512 aa, unidentified
  REGION 1..512: note = Human gut metagenome
MSTVYVLNKDGKPLMPTTRCGHVRRLLKEQKAQVVTSKPFTIQLLYETDDVVQPLYLGIDPGRTNIGVAVVKIDGTAVFTAHLETRNKEIPKLMQGRKKARRARRTNGRRCRRQRRAKANGTISKKCVKQTTAQNGSVSKRAKKIGVIKRHLPGCEKEVLCIGIKNKEAKFSNRARPEGWLTPTANQLLQTHINLVKKIQKFLPISDVVLEINKFAFMRLDNPNVQKWQYQQGPLYQKASLEEAVSEMQEHHCLFCKNTIDHYHHVVPQHKNGSNTIGNIVGLCAKHHDLVHKDTSWQEKLAKKKTGLNKRYGALSVLNQIIPALTKELSSLFPKHFFATNGKSTYDYRAAHGVSKDHWLDAYCIAGSVLPNDACDNNINSHVPYELKQFRRHDRRALHKENMSRVYTLNGKSVATNRHKAIKQTTDSLEEFRQRQPNDVCKLKVKEHHPEYRNPKRNFPGCVFLVGKHTHVMQGTSGSHNGKADGYYDTNGNSYSSGKCKFVAKNKGIVFA

SEQ ID NO: 9401 - protein, 425 aa, Nodularia sp.; identical to SEQ ID NO: 3165

SEQ ID NO: 9402 - protein, 460 aa, Petrotoga sp.; identical to SEQ ID NO: 8096

SEQ ID NO: 9403 - protein, 434 aa, unidentified
  REGION 1..434: note = Human gut metagenome
MGFLTTWARRKILPKGKVAEMPKIKKYAFVLDAKRKQLDPTIEQNAWRLVRQYKARLVSKFPMIIQLNKVMDNPNNDEIRCGIDDGANHVGMALVQKCQTRNKFLFKGTIEQRKDVKHLLTVRRGYRRYHRYHKQYRPARFLNRASSRRSGRLMPSIIQRKQAILRVIDRLRQWVRIDGYWLEDVKIDIQALTDGYKPYRWQYQKSNRLDNNLRLAAIHRDGCKCVECGKTKTRFEVHHITPRKTGGADTISNLITLCPKCHAKTFGRESQFADRYYALIGSTGHVEGLDDAQRVMQGKHWFREQLQQRGSLVLTTGGNTANKREDWDIAKTHSNDAVCITDLKPENIDIEEWTIKPMRRKNKAGVDEVCGFHHRDYVTYTYRNGETHTGYVTAMYPDKNQLNFQSPTKHCKRVNALKARLLWRYDKIYWFKCA

SEQ ID NO: 9404 - protein, 413 aa, unidentified
  REGION 1..413: note = Human gut metagenome
MTSYSFVLDANGKQLAPTKEPKAWFLIRKKRAALVSKYPMVIQLKKKIQENEICKDEIRCGIDDGGLHVGIALVQKCKSKNKVVFKGTIEQRNDVKHLMEVRRNYRRYHRYHKRYRQARFDNRKSSKRKGRIAPSILQKRQATIRVINRLNKWINITNYWLEDVSIDIRVLTDGYKSYSWQYQKSNRLDENIRKATILRDGGKCMECGKSNCRLEVHHIKPRRRNGSNTLDNLITLCESCHQKTEGQEELYMDRYFSLLKSSDNKNLNYAQHVMIGKMWLRKQLSGLGVLYLTSGGDTANKRIDWNIEKSHANDAVCITDLRPDTCDVKEWTMKPMRRQSKAKTDHVLGIHHRDLVEYTFKNGETHRGYVTALYPEQKAINFQSPTKHCKKVNARKCKLLWNYSKIYWFENAS

SEQ ID NO: 9405 - protein, 431 aa, unidentified
  REGION 1..431: note = Human gut metagenome
MPNKVYVINKHGRPLMPCSPAKARHLLDAGKAKVKKRTPFTIQLVYGSSGYTQEVILGVDAGSKTIGMSASTTKEELLSAEVKPRNDVVDLLSTRREFRRARRNRKTRYRKPRFDNRVRSKHKGWLAPSVEVKIQEHITSIKRACRILPVSKVVVETAEFDLQLLKAIADGKPVPQGEDYQKGEMYGHYNVRQYVLWRDNYTCQCCGAHATKKKEVRLHVHHLESRKVGGDAPDNQVTLCESCHEKLHKGLIAEKDFKKRKRRSTRDATFMGIMRKTLMQRLYSELPIPVIETRGYITKATREKLLVLPKSHTNDALAIAQGKRGFNVGYLPEIAQIDKIYTIRPVRHHNRQLHKAAILKGGIRKSNQAGKYVFGYRLFDKVQFNGQDCFIWGRRTTGIFTIKTINGKMIKDGISFKKLKPVEKSTGYLIA

SEQ ID NO: 9406 - protein, 521 aa, unidentified; identical to SEQ ID NO: 3983
  REGION 1..521: note = Human gut metagenome

SEQ ID NO: 9407 - protein, 420 aa, unidentified; identical to SEQ ID NO: 3504
  REGION 1..420: note = Human gut metagenome

SEQ ID NO: 9408 - protein, 390 aa, unidentified
  REGION 1..390: note = Human gut metagenome
MVYVLNIDGQPLMPTDRHGKVRHLLKDGRAEVVKRCPFTIRLLYDSTHYTQDIVLGVDAGSKHIGLSGTTETKELYASDVELRNDIVDLISTRRQNRRFRRNRKTRYRKARFLNRLSDKKDWLAPSIRQKVDTHMTVVSRVCKILPVTKIIVETASFDIQKIKDPDISGTGYQHGEQLDFWNVREYVLFRDGHTCQCCKGKSKDPVLNVHHIESRKTGGDAPNNLITLCETCHKGYHSGAVQLPKAIHRGMRFKDAAFMGIMRWAFYNKLKEVYEPQDIEVSMTFGYLTKNTRIRHYLPKEHYIDARCISGHPEAIPSNEVFYQKKVRCHNRQIHKNTILKGGVRKRNQAGYLVKGFRLFDKVAYEGREYFIFGRRQSGFFDLRNLSGCK

SEQ ID NO: 9409 - protein, 544 aa, Blautia sp.; identical to SEQ ID NO: 4004

SEQ ID NO: 9410 - protein, 469 aa, Burkholderia sp.
VAVFVLDRKGKPVMPCSEKRARLLLERGRARVHRVIPFVIRLVDRQADSCTLQSLRIKLDPGSTATGMALVRDTETVDASTGEIQRGAAVLNLFELVHRGRQISEALTARRSMRRRRRGNLRYRAPRFLNRTRPAGWLAPSLQHRVDTTMAWVRRLMRWAPAAAISSELVRFDMQALENPEISGVEYQQGTLAGYEVREYLLEKWNRRCAYCDASSVPLQIEHIVARARGGSNRVSNLTLGCEPCNLDKGAQPVEVYLVKAPKRMAAILAQAKRPRKDAAAINATRWALANVLRATGLPVELASGGRTKFNRVTLGVPKTHALDAACVGALSGMTRWQRPTLSVSCTGRGSYQRTRLDRFGFPRGHLTRDKRIQGFQTGDLVRAEVPSGKKAGTHVGRVAVRATGYFNIQMAGRVVQGIARRHCQLIQRSDGYGYPRIAFQRGDAGEGRASHGALSIPGLKAEVSRATG

SEQ ID NO: 9411 - protein, 439 aa, Moorena sp.
LKVFVLDTNKEIQEPVHPAEARLLLNQQKAAVFKRFPFIIILKEAVKEQPKKLRLKIDPGSRTTGITIVNDKSGEIVFAMELEHRGLRIKNLLDSRRVIRRNRRNRKTRYRQPRFLNRTRPKGWLPPSLKSRVYNIETWVKRLKQVCNVQNLSMELVRFDMQLMENPNISGVEYQQGELAGYEVKEYLLEKWGRACVYCGKKDIPLEIEHIVPKSKGGSNRISNLTISCVNCNRKKNVQSIDQFLKHKPELLKKIKAQTKRPLRGAAAVNATRWNLFNTLKKSGLPVEVGSGGLTKFNRTQRDLPKTHWLDAVCVGKSTPERLFQSHKNVLIVKAMGHGSRQMCRVDKYGFPRTKAKSKNKKVKGFQTGDIAKAIVTKGKKVGTYVGRVAVRTNGSFNVKVKKVTVQGISWKYCKKIHCIDGYNYNYNWQKEVAISPLP

SEQ ID NO: 9412 - protein, 427 aa, Parasutterella sp.; identical to SEQ ID NO: 3787

SEQ ID NO: 9413 - protein, 453 aa, Lactobacillus sp.; identical to SEQ ID NO: 4050

SEQ ID NO: 9414 - protein, 442 aa, unidentified; identical to SEQ ID NO: 3161
  REGION 1..442: note = Human gut metagenome

SEQ ID NO: 9415 - protein, 430 aa, unidentified; identical to SEQ ID NO: 3681
  REGION 1..430: note = Human gut metagenome

SEQ ID NO: 9416 - protein, 431 aa, unidentified
  REGION 1..431: note = Human gut metagenome
MVYVLNKNGQPLMPTNRHGKVRRLLKISKAKVIKRCPFTIQLLYNTTNCIQNITLGVDAGSKHIGLSATTKDKVLFEADVELRNDITKLLEARRKFRHSRRNRKTRYRKRRFNNRVSSKHKGWLAPSIEHKIQTHFAMVEKVHKMLPITKIVVETASFDMQLLKAQLEGEPIPKGMDYQKGELTGWNIREYIFHRDNYTCQWCKGKSKDSILVTHHHAYWKGDHTNKPSSLITLCNTCNDSKYHKKEANRLWGWEPKITNSYKHAAFMNVMRWVFYNRLKEIYANVSMTYGYITKNTRIKNNLPKTHYLDARCISGNPKAKSSGEYFYYKKVRCHNRQLYKANTLKGGIRKRNQAEYTVKGFRLFDRVEYQNHEYFIFGRRASGFFDIRNLNGQKVNKGSVSFKKLKLKETNKTYLIERCTVDTRDDLAPL

SEQ ID NO: 9417 - protein, 427 aa, Enterococcus sp.; identical to SEQ ID NO: 5630

SEQ ID NO: 9418 - protein, 413 aa, unidentified; identical to SEQ ID NO: 2815
  REGION 1..413: note = Human gut metagenome

SEQ ID NO: 9419 - protein, 544 aa, unidentified
  REGION 1..544: note = Human gut metagenome
MKQKKQKVMVYILNKKGKPLMPTTRCGHVRKLLDSKKAVVVNSNPFTIRLKYDTPNGIQDVFAGIDSGRENIGSGASNEDGDCLYLGELKTSNKSIKIKMAERTGFRRERRRHDRQSKQRKAKKDHTEIQNGNDDICRTTISCKSVQISYPVAEESVTHKIIRGKEGKFANRHRDEGWITPSARQLVQMHMNDLKSMCKILPISHVTLERVAFDFQKLENENIKVWEYGKGKLYGYDSPEEYIHDVQDGKCLVCGKPHIDYLHHIIPRSKGGSDKVSNIAGLCYDCHYGPMGVHNCQDTQNRLPELKNEANKQYKVSLLNSVMTVLIEEMDKFCKANSIIFSICEGHDTAKVRDMYDLQKDHCFDGFAISLVGRNVESVDVIPDRIYQKQRYKKKSKNIIQKRNCREYYDDKKLVAVNRHKGTDQKADSLEEYMNTYAETHTADECKNQFESLTVKPARRTYTFHKEGRICPFHIGDKVRYEKKNKIKGNTKVDTFICEGIYFSKDENKAEVEHNKTKSKKMKFCRTIESGCIPYIDYRKLALI

SEQ ID NO: 9420 - protein, 404 aa, unidentified
  REGION 1..404: note = Human gut metagenome
LLKEKKAIVVRRTPFTIQLTIATGEAKQPVSLGVDAGYKHVGLSASTEKAELYASEVELRQDVSDLLSARRALRQSRRSRNTRYRAPRFDNRIRTKRKGWLAPTVENRINVHLSRIETVLRLLPVTKITVETASFDTQLLKNPDIAGKEYQEGEQLGFWNVREYVLFRDGHVCQHCHGRSKDPVLNVHHLESRRTGGDSPGNLITLCETCHKALHRGEIKLKAKRGRSFRAETFMGIMRWGVLNRLKASHPKLEVHNTYGYRTKHARIANGIAKSHCADAFCIAGNFGAKRLGEFFFQKQTRRNNRQIHKLSILKGGIRKRNQAPFEVNGFRLFDKVACKGEEGFIFGRRSSGYFDVRKLDGTCISAGISYKKLHLLEKRRTYLTEIRKEEALPPPPEGRGLRA

SEQ ID NO: 9421 - protein, 430 aa, unidentified
  REGION 1..430: note = Human gut metagenome
MPNKVYVINKHGRPLMPCSPAKARHLLDAGKAKVKKRTPFTIQLVYGSSGYTQEVILGVDAGSKTIGVSALTKKEELFAANVIPRNDVVDLLSTRRESRRARRNRKTRYRKPRFDNRVRSKHKGWLAPSVEVKIQEHITAIRRVCGILPVSKVVVETAEFDLQLLKAIEEGKPVPQGEDYQKGEMYGHYNVRQYVLWRDNYTCQCCGAHATKKKEVRLHVHHLESRKVGGDAPDNQVTLCESCHEKLHKGLIAEKDFKKRKRRSTRDATFMGIMRKTLMQRLCSELPIPVVETRGYITKATREKLLVLPKSHTNDALAIAQGKHGFNVGYLPGIEQIDKIYTIRPVRHHNRQLHKAAILKGGIRKSNQAGKYVFGYRLFDKVQFNGQDCFIWGRTTGIFTIKTINGKMIKDGISFKKLKLVEKSTSYLIA

SEQ ID NO: 9422 - protein, 413 aa, unidentified; identical to SEQ ID NO: 2636
  REGION 1..413: note = Human gut metagenome

SEQ ID NO: 9423 - protein, 419 aa, unidentified; identical to SEQ ID NO: 6355
  REGION 1..419: note = Human gut metagenome

SEQ ID NO: 9424 - protein, 431 aa, unidentified; identical to SEQ ID NO: 5232
  REGION 1..431: note = Human gut metagenome

SEQ ID NO: 9425 - protein, 451 aa, unidentified
  REGION 1..451: note = Human gut metagenome
MKVFVKNMRGQALMPCSPRKARILLRQKKAKVVDYRPFTIQLCYPTGEAKQEVIIGIDQGARHIGIAVISQGKILAKGEVELRQDVHSLLQTRAEYRRGRRYRKTRYRKARFLNRIRPEGWLPPSIQEKLNANFAWIDKFCSLVPDSKLRIEVGKFDTAKMINPDIKGVDYQHGQTYGYYDVRYFVFARDNYTCQVCHKKNKILHTHHIIYKSKGGSDRADNLITVCTECHTHENHQEDGILYQWMLKHKKTRQYKEPSFMNILRIRTYKKYSEADITYGSVTTERRKALRLEKTHYNDAIAITGIDKVEENIDECFWIKQLRKRKRSLHEATPRKGRKEKNTEAKRNSKNTKQVNGWYLNDEVICYGRRGWITGFNSATSSSPAAFVVDKDGNYITVPEKKYKQVSLKLLKLVRHNNNWQYVVTKEEKSAASSEIPHPPIEVSESFLAAC

SEQ ID NO: 9426 - protein, 411 aa, Orenia sp.; identical to SEQ ID NO: 7492

SEQ ID NO: 9427 - protein, 420 aa, unidentified
  REGION 1..420: note = Human gut metagenome
MQYVYVLNKHGEPLMPCSPGKARLLLKQQKACVVKRTPFTIKLLFGSAGYKQPITLGVDAGNKHVGLSASTEKREFYCEEFTPRNDVVDLLSTRKQSRRSRRNRKTRYRAPRFDNRVHSKHKGWLAPSVEVKIQEHITVIKRICRILPVALVRVETAEFDTQRLKAMLEGKPLPVGTDYQLGEMYDEYNVRQYVLKRDHYTCQCCGAHTTTKKTVKLHVHHLESRKVGGNAPSNLITLCTTCHDALHKGKVSLDGKERGKPLRDAAFMGIMRKALMARLREELPIPVQGTYGYITKMRREQNDINKSHVNDARCISKHPLTEPCSVCYRTKAIRHHNRQTHKANFSKGGIRKRSQMPYVVEGYRLWDKVLYKGQECFVSGRRASGSFTLKKLDGTRISKGVTFKKLRLLEPATNYLIERM

SEQ ID NO: 9428 - protein, 414 aa, unidentified
  REGION 1..414: note = Human gut metagenome
MPCSPAKARLLLKEKKAIVKRRTPFTIQLTIATGETKQPVGLGVDAGYKYVGLSASTDKAELYASQVELRQDITDLLSARRALRRARRNRKTRYRAPRFNNRIRTKRKGWLAPSVENRINAHLSRIEAVLRLLPVTKITVETASFDMQLLKNPDIAGKEYQEGEQLGFWNVREYVLFRDGHVCQHCYGRSKDPVLNVHHLESRRTGGDSPGNLITLCETCHEALHRGEIALKTKRGHSFRAEAFMGMMRWEVLNRLKASHSELEVNNTYGYRTKHARIVNGIDKSHCADAFCIAGNLGAERLCEFFFQKQTRRNNRQIHKLSILKGGIRKRNQAPFEIKGFRLFDKVACKGEESFIFGRRSSGYFDVRKLDGTRISAGISYKKLRLLEKRRTYLTEIRKEEALPPLPEGRGLRA

SEQ ID NO: 9429 - protein, 454 aa, Streptomyces sp.
MVPVLDKRGRPLMPCHPARARELLAKGRAVVVRYVPFAIRLKDRLIEESTIAGVAVRVDPGSCGTGIAVTTDTEQLDHATGRGHAARRGLFAVELIHRSAQIRDGMKRRAGYRRRRRSGNLRYRAPRFDNRRRPAGWLAPSLRHRVEGTIGQVGRLMKLFPVVEIHIERNSFDTHALSLGRETLSALEYREGTLAGYEVREYLLEKWHRTCSYCGATGVPLQIDHIQPRAHGGSDRISNLTPACGPCNQAKSARLVEDFLAEQPERLARIKAEAKHPLRDAAAMNATRWQLWRSAAGLGPSVYAWSGGLTKFNRGAHGLAKSHTLDALAVGELPDRTRIVRHPAQVLTARATGRGSYARTRTDAYGFPRLHLTRRKKHYGFTTGDLVRAVIPRGKYAGTHTGRVAVRANGCHSIPVPGGHAGTSHKNLRLLQRADGYAYGTRFEKPVEPGSIGS

SEQ ID NO: 9430 - protein, 512 aa, unidentified; identical to SEQ ID NO: 2906
  REGION 1..512: note = Human gut metagenome

SEQ ID NO: 9431 - protein, 442 aa, unidentified
  REGION 1..442: note = Human gut metagenome
MSTSVFVLDKKHRPLMPCRPARARRLLRAGRARVVKRFPFVIRLVDRTVEQSEVQPVLIKLDPGSRETGAAVVRDDEKKRHHALAFFVIKHRGGAIRDALKARSAFRRRRRSQNLRCRSPRFLNRVKPKGWLPPSLRHRVETTLSFVRRMCRYLPVSGIATELVKFDSQKLQTPEVSGIEYQQGTLFEYEVREYLLEKFGRKCVYCGAEGVPLNIDHVVPRAKGGSNRVSNLVLACVSCNQKKGARSLEDFLKGKPEVLARVRRELKTPLRDAAAVNATRWVLFNELKATGLPVETGSGALTKFNRHAFGVEKEHWLDALCVGRLNGAVTRKGLNVLEIRCMGRGSRQRTRLTKYGFPRGYLMRQKCVHGFATGDMVEANVPKGKKAGLWRGRVAVRVSGSFNIQTPMGVIQGVGWKHCRLISHNDGYGYAWLGHAPHSSPA

SEQ ID NO: 9432 - protein, 418 aa, Moorena sp.
MENGYVYVLSKEGKPLMPTRRFGKVRWWLKNGEAHVVHRTPFTIQMDRETTLRTQPVTLGMDSASEHLGISASTEARELLRVEVELRQDVKNNMSTRRELRRGRRYRKTRYRKLRFNNRGRKDFIAPTIEQKVRTHENIIKFVCSILPVEKVVIEVAPFDTQKLDNPDIEGAEYQNGPLKEFSNVREYVLYRDGHTCHHCKGKSGDKILQVHHIESRKVAGNSPRNLVTLCKTCHEAYHAKRIKLKLSSDVNLRHAAHISVIPVLVCQRLWQHGVHLRKTYGYVTKQRRFTASLPKSHTNDAFCIAGNINAIRLGYCYYMRCVRRHTRSLHVMKPNKGGLRRSALAPKFIGTSRIQRYDMVRYRGQECFVFGSTGGRLVLKDIYGKKVHTTQSVSTKTVKFLQKKRNGFMMYRVQEVL

SEQ ID NO: 9433 - protein, 411 aa, unidentified; identical to SEQ ID NO: 6244
  REGION 1..411: note = Human gut metagenome

SEQ ID NO: 9434 - protein, 492 aa, unidentified; identical to SEQ ID NO: 4486
  REGION 1..492: note = Human gut metagenome

SEQ ID NO: 9435 - protein, 413 aa, unidentified; identical to SEQ ID NO: 2636
  REGION 1..413: note = Human gut metagenome

SEQ ID NO: 9436 - protein, 442 aa, unidentified; identical to SEQ ID NO: 2903
  REGION 1..442: note = Human gut metagenome

SEQ ID NO: 9437 - protein, 372 aa, unidentified
  REGION 1..372: note = Human gut metagenome
MPGTNMSDFPHQLKRLNFMHPKSNCGRTSPICSLLSARRALRQSRRNRKTRYRAPRFDNRIRTKRKGWLAPSVENRINAHLSRIEAVLRLLPITKITVETASFDMQRLKNPDISGKEYQEGEQLGFWNVREYVLFRDGHVCRHCHGRSKDPVLNVHHLESRRTGSDSPDNLITLCETCHKALHRGEITLKAKRGQSFRAQAFMGIMRREVLNRLKASYPELKVHETYGYLTKHARIANGIVKSHGADAFCIAGNLGAERLGEFFFQKQTRRNNRQIHKLSILKGGIRKRNQAPFEAKGFRLFDKVACQGEEGFIFGRRSSGSFDVRKLDGTRISTGISCKKLRLLEKRRTYLTEIRKEEALPPLPEGRGLRA

SEQ ID NO: 9438 - protein, 418 aa, unidentified; identical to SEQ ID NO: 2425
  REGION 1..418: note = Human gut metagenome

SEQ ID NO: 9439 - protein, 413 aa, Moorena sp.; identical to SEQ ID NO: 2636

SEQ ID NO: 9440 - protein, 414 aa, unidentified
  REGION 1..414: note = Human gut metagenome
MVYVINKQGQALMPTERFGKVRRLLKNSLAHVVCRIPFTIQLDYDTTDYTQPVSLGIDAGSKHIGISATTSEKELYAADVELRNDIVDKLSTRRGLRRTRRSRLRYRKARFNNRVSSKRKGWLAPSVENKIQTHLTVVEKIHKFLPITNIVVETASFDIQKINNPSISGSEYQQGEQLDFFNVREYVLFRDNHTCQHCKGKSKDKALNVHHIESRKTGGDSPKNLITLCETCHKAYHRGEFKLNVKRGKSFRDAAFMGIMRWSFYDRLKNIYPNVSMTFGYITKNTRITNNLPKEHYVDARCISGNPVAKPLGYYFYQKKVRCQNRQIHKANFLKGGRKKLNQAPFLVKGFRLFDLVEYQKELYYIFGRRSSGSFDIRKLDGTKVNKGSISCKHLRLIGKRKSILTEKRMQVNL

SEQ ID NO: 9441 - protein, 512 aa, unidentified
  REGION 1..512: note = Human gut metagenome
MSTVYVLNKDGKPLMPTTRCGHVRYLLKEKKARVVASKPFTIQLLYETDDVVQPLYLGIDPGRSNIGVAVVKTDGMAVFTAHLETRNKEIPKLMKKRKDSRRARRTNGRRCRRQRRAKANGTISKKCVKQTTAQNGSVSKRAKEIGVIKRHLPGCEKDVLCIGIKNKEAKFNNRTRPTGWLTPTANQLLQTHINLVKKIQKFLPISDVVLEVNKFSFMQLDNPNIQKWQYQKGPLYQKESLKSAVSEMQEHHCLFCKKKIDHYHHVVPQHKNGSNTIDNIVGLCTQHHDLVHKDATWQKRLAKKKTGLNKKYGALSVLNQIIPALTKELSSLFPKHFFVTNGKSTYDYRAAHGVSKDHWLDAYCIACSVLPNDTCDKTINSRVPYELKQFRRHDRRALNNENMSRVYTFNGKMVATNRHKATEQTTDSLEEFRQRQPNDVCNLKVKEHHPTYRNMSRNYPGSIFLVEKQVHIMQGIAGSKDGKATTYKDTNANSIAAGKCKFVAKNSGILFV

SEQ ID NO: 9442 - protein, 456 aa, unidentified; identical to SEQ ID NO: 4017
  REGION 1..456: note = Human gut metagenome

SEQ ID NO: 9443 - protein, 431 aa, unidentified
  REGION 1..431: note = Human gut metagenome
MPNKVYVINKHGRPLMPCSPAKARHLLDEGKAKVKKRTPFTIQLVYGSSGYTQEVILGVDAGSKTIGMSASTTKEELLSAEVKPRNDVVDLLSTRREFRRAQRNRKTRYRKPRFDNRVRSKHKGWLAPSVEVKIQEHITAIRRVCGILPVSKVVIETAEFDLQLLKAIADGKPVPQGEDYQQGEMYGHYNVRQYVLWRDGYTCQCCGAHATKKKEVRLHVHHLESRKVGGDAPDNQVTLCESCHEKLHKGLIAEKDFKKRKRKSTRDATFMGIMRKTLMQRLCSELPIPVIETRGYITKATREKLLVLPKSHTNDALAIAQGKQGFNVGYLPGIVQINKIYTIRPVRHHNRQLHKATILKGGIRKSNQTEKYVFGYCLFDKVQFNGQDCFIWGRRTTGIFTIKTINGKMIKDGISFKKLKLAEKSTSYLIA

SEQ ID NO: 9444 - protein, 431 aa, unidentified; identical to SEQ ID NO: 7729
  REGION 1..431: note = Human gut metagenome

SEQ ID NO: 9445 - protein, 431 aa, unidentified; identical to SEQ ID NO: 3801
  REGION 1..431: note = Human gut metagenome

SEQ ID NO: 9446 - protein, 427 aa, unidentified
  REGION 1..427: note = Chlamydiae bacterium
PAKARGLLKKGLAKVISKKPFTIKLLFSSSGHKQKITAGMDTGSKTIGIAAIANGKVLYQAETKLRGEEIKKKMDQRRMYRRGRRGRKLRYRKPRFLNRRASRAINRLAPSVKHKVLSHLREKKFIESILPVSMWIVETASFDIHKITNPKGVSKALGKSQSYQKGRMLDFYNVKQYVLNRDKYQCQMCKKKKDLKLHVHHIKFRSNSGSNSPDNLVTLCETCHDKLHKLNKEEAEKSSKKLQKRAQKPTKHATEVSILRSQLCKHFRNLESSQAFEETFGYITKFNRENKNLPKAHHIDAICIATCGESIEMHNQNNTSDLFLRRYVSKGDYQQSRGIRSEVKIPTGKLFGLKKFDLVKTSKGVGFVKGKRSSGFFAISDINGTSISDSVNIKKNIGRIQARKAVLTWRSQFLPDLKDRISLREKR

SEQ ID NO: 9447 - protein, 424 aa, unidentified; identical to SEQ ID NO: 8578
  REGION 1..424: note = metagenome

SEQ ID NO: 9448 - protein, 403 aa, Halomonas sp.; identical to SEQ ID NO: 9022

SEQ ID NO: 9449 - protein, 448 aa, Moorena sp.
LGATNFPNLGEANVTEQLGTNTMSNYVLVIDTNQKPLTPCSPGTARRLLNAGKAAVFRQYPFTIVLKKAVESDLESCELKIDPGSKTTGLALLKGNAVVWAGELSHRGQAIKNDLATRRACRRSRRSRKTRYREPRFLNRTRPKGWLPPSLSHRVETTMTWVNRLRKLCPIFSISQELVRFDTQKLQNPEVSGVEYQQGERFGYEVRQYLLEKWGRKCAYCGAENVPLEVEHIHPKSKGGSDRVSNLTLACHPCNLTKNTQDVQDFLSGSPDLLARILKQSKRPLKDAAAVNATRWRLFEELKATRLPVKVGTGGQTKYNRCRFGLPKTHWLDAACVGETDSIDVQTLQPLSIKATGHGTRQMCGIDRDGFPIRHRSKSRFVRGFQTGDIVRAEVPKGKKAGIHVGRVAVRSTGSFNISTAKGLVQGINAKYCKHIHQKDGYSYSYGD

SEQ ID NO: 9450 - protein, 469 aa, Moorena sp.
VAVFVLDRSGKALMPCSEKRARLLLVRGRARLHRVVPFVIRLVDRRVESSAMQPLRIKLDPGSKSTGLALVRDTDSVDATTGAIQRGAVVLNLFELVHRGRQISEALTARRAMRRRRRGTLRYRAPRFLNRTRPAGWLAPSLQHRVDTTLAWVKRLMRWTPVLAVSSELVRFDMQALENPEISGIEYQQGTLTGYEVREYLLAKWGRKCAYCDAGQVPLQVEHIHSRARGGTNRVSNLTLACAPCNTTKGALPIAVFLVRDPKRLAAILAQAKRPLKDAAAVNSTRWALVQALKETGLPTELASGGRTKFNRTRLGIPKSHALDAVCVGEVAAVRAWQKPTLTVNCTGRGSYQRTRLDKYGFPRGYLTRSRRVHGFQTGDLVRADVPSGKKTGTHVGRVAVRATGNFNIQGAGEVVQGIAHRHCRLIQRSDGYAYSRIAPPKGDARVGTSLLSALSLPAVNDGVSRANG

SEQ ID NO: 9451 - protein, 424 aa, unidentified; identical to SEQ ID NO: 3434
  REGION 1..424: note = Human gut metagenome

SEQ ID NO: 9452 - protein, 507 aa, unidentified
  REGION 1..507: note = Human gut metagenome
VLNKDGKPLMPTTRGGHVRHLLKEQKARVVRTKPFTIQLLYETDDVVQPLYLGIDPGRTNIGVAVVKTDGTAVFTAHLETRNKEIPKLMKKRKDSRRARRTNGRRCRRQRRAKANGTISKKCVKQTTAQNGSVSKRAKEIGVIKRHLPGCEKEVLCIGIKNKEAKFSNRVRPEGWLTPTANQLLQTHINLVKKIQKFLPISDVVLEVNKFAFMQLDNPNIQKWQYQQGPLYQKASFEEAVSEMQEHHCLFCKKPIDHYHHVVPQHKNGSNTIGNIVGLCAKHHDLVHKDTTWQKKLAKKKTGLNKKYGALSVLNQIIPALTKELSSLFSKHFFATNGKSTYDYRAAHGVSKDHWLDAYCIACSVLPNDVCDSDINNRVPYELKQFRRHDRRALHKENMSRVYTLNGKSVATNRHKATEQTTDSLEEFRQCQPDDVCKLKVKEHHPEYRNPKRNFPGCVFLVGKHTHVIQGTSGSHNGKADGYYDTNGNSYSSGKCKFVAKNEGIVFT

SEQ ID NO: 9453 - protein, 386 aa, Moorena sp.
MSKVFVLDTNFTPLNPIHSAQARQLLRSKKAAIYRQFPFTIILKESRSDSPISLLRLKIDPGAKFTGMVLVNDSTGEVVFAAELKHRGFAIRDALTSRSQLRRSRRARKTRYRQPRFLNRTRPERWLAPSLQSRIENIKTWVERLRKLAPIEAISQELVRFNMQLMTNPDIQGKEYQRGSNSITNLTLSCEKCNTKKGTKDIKYFLKKDPLKLEKILKQAKRPLADAAAVNTTRTALLEVLKATGLPVETGSGGLTKFNRSEQNLEKTHWIDAACVGKSTPILNIKGVKPLLITANGHGSRQSCRTDKYGFPSRHVPREKIHFGFQTGDIAKAVVTTGKKIGTYVGKVAIRSTGSFNISTKNGLIQGISHKFCKRIHAKDGYSYAQ

SEQ ID NO: 9454 - protein, 415 aa, unidentified; identical to SEQ ID NO: 6044
  REGION 1..415: note = Human gut metagenome

SEQ ID NO: 9455 - protein, 560 aa, unidentified
  REGION 1..560: note = Human gut metagenome
MANDYVFVVDRKGNPLMPTKRRGRVRHLLKEEKAVVIKTHPFTVKIKYDVGHYTQPMYEGIDSGRQNIGNAVSRENGENVLLEDVRTNNKSIKKNLMKRKVHRQERRRNNRHSRQRKAIHDGTEIKNGDDDKWHTDKDCKSVKVSYPAADNAVTHKVIRGKEGKFANRKRPDGWITPSARQIVQLTLNMVKETCSIMPIRRISFERVAFDFQKLANQNIHAWEYGKGPLYGFKTYKDCIYAEQKGKCPFCGKPITQYHHIIPRSAGGIDNVKNIIGLCDEHHTMVHNDAAFAETLSDAKAGVEQEYYAGLLNSAVPALIEALSVYCKEKSIELLITDGRTTRETRVKYGFDDKKDHCIDAYAISLADRNVKNISFAGRIIMKRRYKKKSKNIISARNQRIYVLNGQVIACNRHKAENQKENSLEEFLTQYRETHTEKKVQQMMHHIRILPAVRSYTFHKDGLKAICHPGDIVEYKKLNKTSGRMKRNIFVCTSVNFDGKDKYGNYCAAENHIGYDNGKGNGNRKAKFCTVLDSGCLQCTGIKRTDDYIAQLKADPSKKKG

SEQ ID NO: 9456 - protein, 420 aa, unidentified; identical to SEQ ID NO: 3288
  REGION 1..420: note = Human gut metagenome

SEQ ID NO: 9457 - protein, 501 aa, Moorena sp.
MVFVLDKHKKPLMPCTEKRARLLLERGRAVVHRMSPFTIRLKDRTAEESRFQPLRLKLDPGSRTTGFAVLREDTPNRSEVILLGEIHHKPSIKDGLDVRRNQRHSRRNRKTRYREPRFNNRHPEKCAVCGKNAQHGSRYCRPCEKAKNFVDNGHREGRLAPSLEARVNQTLSVVDKLTRWLPITAISTEHVKFDTQLMQNPDISGVEYQQGELFGYEVREYLLEKWGRKCAYCGKEGVPLEVEHVVPRNPKRGPRGTDRISNLTLACEECNKAKGNLQPEEWLEKLKQSKRKLDQVRAENLPKILRKLKEPLRDAALVNATRWVLYDRLKKTGLSVECGTGARTKYNRLKMGLPKTHYYDACCVGESTPENLAINQEYVQVWTALGRGTRKMCNTDKYGFPVSHRTRQKMYFGFTTGDLVMAEVPEGKYAGRWVGRVAVRASGYFDIKDGSGKRICQGISYRHIKLLQRADGWQYEKIRVEKGGSGGASSPGVNAGASGAA

SEQ ID NO: 9458 - protein, 423 aa, Moorena sp.; identical to SEQ ID NO: 7848

SEQ ID NO: 9459 - protein, 414 aa, unidentified; identical to SEQ ID NO: 5358
  REGION 1..414: note = Human gut metagenome

SEQ ID NO: 9460 - protein, 460 aa, Fischerella sp.; identical to SEQ ID NO: 9149

SEQ ID NO: 9461 - protein, 442 aa, unidentified; identical to SEQ ID NO: 2637
  REGION 1..442: note = Human gut metagenome

SEQ ID NO: 9462 - protein, 279 aa, unidentified
  REGION 1..279: note = Human gut metagenome
VVVETAEFDLQLLKAIADGKPVPQGEDYQKGEMYGHYNVRQYVLWRDNYTCQCCGTHPSKKKEVRLHVHHLESRKVGGDAPDNQVTLCESCHEKLHKGLIAEKDFKKRKRKSTRDATFMGIMRKTLMQRLCSELPIPVVKTRGYITKATREKLLVLPKSHTNDALAIAQGKRGFNVGYLPEIAQIDKIYTIRPVRHHNRQLHKATILKGGIRKSNQTEKYVFGYRLFDKVQFNGQDCFIWGRRTTGIFTIKTINGKMIKDGISFKKLKLVEKSTSYLIA

SEQ ID NO: 9463 - protein, 465 aa, unidentified; identical to SEQ ID NO: 3856
  REGION 1..465: note = Human gut metagenome

SEQ ID NO: 9464 - protein, 420 aa, unidentified
  REGION 1..420: note = Human gut metagenome
MVYVLDVDGKPLMPTTRHGKVRRLLKEGKAKVVKRCPFTIQLLYDSTRYVQEINLGIDAGSKHIGVSATTKQKVLYEADVELRNDIVDLISTRRECRRTRRNRKTRYRKARFNNRVSTKKTGWLAPSVKQKIQTHLTVINNVYKILPVKNLTVETASFDIQKIKNPDISGEEYQQGEQLNFWNVREYVLFRDGHTCQCCKGKSKDKILNVHHIESRKAGGNAPNNLITLCETCHKGYHNGTVKLPKSIHRGMSFRDATFMNTMRKTLLSELRKTYPNVKETYGYVTKNTRITHNLPKDHYVDARCISGNPDAKPLGYYFYQRKIRCHNRKLHKINFSKGGIRKIDKMNYTVKGFRLFDKVVYNGNEYFVFARRKSGSFSVRNFLGEKPNKSGDISYRKLIFSETRHSILTEVRWWLHGYC

SEQ ID NO: 9465 - protein, 420 aa, unidentified
  REGION 1..420: note = Human gut metagenome
MQYVYVINKHGKPLMPCSPGKARLLLKQQKARVVKRTPFTIKLLYGSAGYKQPITLGVDAGSKHVGLSASTEKRELYSEEFTPRNDVVELLSTRRQNRRSRRNRKTRYRAPRFDNRVHSKHKGWLAPSVEVKIQEHITVIKRICRILPITLVRVETAEFDTQRLKAMLAGKPLPVGTDYQLGEMYDEYNARQYVLKRDHYTCQCCGAHTTTMKSVKLHVHHLESRKVGGNAPSNLITLCTTCHDNLHKRKVTLDGKKRGKTLRDAAFMGIMRKALMARLKEELSIPVQETYGYITKMRREQNDIKKSHVNDARCISKHPLAEPCSVCYRTKAIRHHNRQIHKANFSKGGYRKRSQMSYIVEGYRLWDKVLYKGQECFISGRRASGRFALKKLDGTSISKSVTFKKLRLLEPATNYLIERM

SEQ ID NO: 9466 - protein, 433 aa, Sutterella sp.; identical to SEQ ID NO: 6555

SEQ ID NO: 9467 - protein, 477 aa, Blautia sp.; identical to SEQ ID NO: 2707

SEQ ID NO: 9468 - protein, 427 aa, Ktedonobacter sp.
MVFVLDTKKKPLMPCTPKRARQLLARGRAVVHRVAPFVIRLKDRQVEDSVLQPLALKIDPGSQTTGMTLARVEDRSEGAIHHAVLLAEVQHRGHEVRARKVTQRHARRRRRSANLRHRAARAANRRIARGWLPPSLLSRIGNVVSWTKRLRRFAPVTRVDVECVRFDTQLLQNPEITGVQYQHGELFGWEIRAYLLLKYAYQCVYCGKRDTPFELDHIRPRSRGGSSRITNLALACHDCNRQKGAQTAAEWGHPEVEVQAQTPLRDAAAVNATRHKLVQELRVFGLPVGTWTGGRTRWNRARFGIAKTHAKDALCVGDLAGVREGRLKTVAITATGRGEHCRTNWSKQGFPRGYRLRHKQVKGFKTGDRVRAVVPDKLKTRGIHVGRVQVRKSGSFDIQTHEREVEGVNATYCCLVQRGDGYAYALA

SEQ ID NO: 9469 - protein, 442 aa, Lactobacillus sp.
MKHENANRVFLLNKDGKPLMPCRPRKARLLLKSGKAFVVKKYPFTIQLKYGSYGYKQKVSLGVDTGQRHIGFAIVSQNKVLHQSEVELRQDVHKNLYTRKIYRRSKRNRKTRYRQARFLNRVHGKRDGLWLPPSIKGKVSHNIAWIKRYLAVLPNPDLHIEVGKFDMAKMVNLEISGKQYQEGSLKDWKNYEYYVLARDEYTCQLCHKHGEGVKLVVHHIVYRSQGGTDRVDNLITLCTNCHTTKNHQPGGKLYKWMKAKKKVIKQLKGATFMNILRKRIMTAFPEASFQYGSQTYADRKNLLLPKGHFMDAIAISGIKSVGQLSDTVTMISQFRKKKRSLHEATARKGRKQPNTSSKRNEKNTKHARGLWLNDYVRVIGNHAKGYVKGFKSNGYYVYLTDGLGNYVLNNGKNYINGQQCRLIMHNGNWQKAEQKLSLYKFK

SEQ ID NO: 9470 - protein, 430 aa, unidentified; identical to SEQ ID NO: 3252
  REGION 1..430: note = Human gut metagenome

SEQ ID NO: 9471 - protein, 417 aa, unidentified
  REGION 1..417: note = Human gut metagenome
MPCSPAKARLLLKEKKAIVKRRTPFTIQLTIATGEAKQPVALGVDSGYKHIGLSATTEKAELYASEVELRQDITDLLSARLALRCSRRSRKTRYRAPRFDNRVASKCEGWLAPSVENRIAAHMSRVEAVMRVLPVTAITVETAAFDTQLLKNPDIAEAAYQQGEQLGFGNVREYVLFRDGHVCQHCRGKSKDPILNVHHIESRRTGGDAPNNLITLCETCHKAFHRGEIELKVRRGKSFKAATFMGIMRWTLFERLKKAHPELSVRNTYGYLTKHKRISHGIAKSHCADAYCIADNLGAKRLEGFFFQKQTRKHNRQIHKLSILKGGLRKKNQAPYEVKGFRLFDKVICKGEEAFIFGRRTSGSFDVRRLDGTRISAGINYKKLRLLEPRTTYLAEFRKEAAHPPLHECRGFRAEFL

SEQ ID NO: 9472 - protein, 512 aa, unidentified
  REGION 1..512: note = Human gut metagenome
MSTVYVLNKDGKPLMPTTRGGHVRHLLKEQKARVVRTNPFTIQLLYETDNLVQPLYLGIDPGRTNIGVAVVKTDGTAVFTAHLETRNKEIPKLMQGRKKARRARRTNGRRCRRQRRAKANGTISKKCVKQATAQNGSVSKRANEIGVIKRHLPGCEKEVLCIGIKNKEAKFSNRARPEGWLTPTANQLLQTHINLVKKIQKFLPISDVVLEINKFAFMRLDNPNVQKWQYQQGPLYQKASLEEAVSEMQEHHCLFCKNTIDHYHHVVPQHKNGSNTIGNIVGLCAKHHDLVHKDTSWQEKLAKKKTGLNKRYGALSVLNQIIPALTKELSSLFPKHFFATNGKSTYDYRAAHGVSKDHWLDAYCIAGSVLPNDACDNNINSYVPYELKQFRRHDRRALHKENMGRVYTLNGKSVATNRHKAIKQTTDSLEEFRQRQPNDVCKLKVKEHHPEYRNPKRNFPGCVFLVGKHTHVMQGTSGSHNGKADGYYDTNGNSYSSGKCKFVVKNEGIVFT

SEQ ID NO: 9473 - protein, 421 aa, unidentified; identical to SEQ ID NO: 2738
  REGION 1..421: note = Human gut metagenome

SEQ ID NO: 9474 - protein, 545 aa, Streptomyces sp.
MTTLPAGEQTHQAVLPQQPALESVGADTPGSRNETAHGHPATARGTGGKHGRGETDGHHTRARRRHAKTTATAAEAAENRNGDVPTHDHRYAGGVGAGRVFVLSKDGQPLMPCHPARARELLGKGRAVVARQTPFTIRLKDRTLAESEVDGVQLRIDPGSKGTGLALTHEKKETSSDGTTVTARRGLISVELQHRGDQIRMCMQQRAGYRHRRRSANCRYRAPRSHNRAQPRGWLPPSLRHRVDTTTSMATRMCRYAPVTEIHVEVTAFDTHSMSAGRTLTGTEYENGPLTGTNARAYLHAKWGSACAYCDTTGVPLNIDHLRPRSRGGSNRISNLVLACAPCNQAKGNRPVDIFLAHRPERLAKILQQVKAPLQDAAAMNTTRWRLLEALEALGRPVHDWPGTLTKQNRTTTGLEKTHTLDALCVGPLDHEGGDAIVRVPGNVLVAKATGRGSYARTTPDRFGFPRLRRARAKQHFGYVTGDLVRATMPSGKWAGTWTGRISVRARGQHSLTTPQGRINVSHRNLRLLQRGDGYGYARRQEMVE

SEQ ID NO: 9475 - protein, 501 aa, unidentified
  REGION 1..501: note = Human gut metagenome
MSYKVYVVDKNKKPLMPTTRFGKVRRLLKEKKAKVISSKPFVIQLLYEPKTHEVQPLHGGTDPGRENIGLSVIDDKGNIVYSAHLKTRNKDIPKLMAERKAHRQASRRGERLRRKRRAKKNKSTTTFPEGRKLSGYKDGVLMLKDIINTESRFNNRKRPKGWITPTVRQLIQTHINIIRQICSFLPVADWSIEGNKFAFMELEDSTIQGIDFQNGRLKGFKNASEYVKHLQKGKCIFCDNPIEHYHHITPRSKGGSDRPENLVGLCECCHHKVHKGEASLAAIGEKKKFAHLSVLNTALPFILKELQTIFGEDRLFICAGYDTKNYRVLYHIDKDHHLDAACIAGLTNNIQIQTKNLTTFEIQQYRNHNRSIIHHQTERTYKLKGKTIAKNRSKRFEQKGDSFHDWTRKTKKGKSRTEFRKLCAQITVQKSTRYKNDMNRLKPGTVFRYTKPEKKKTKLCAGKHILKGQITNGKYFKAQDVEGNFPVTNCEKLYFKSLLYL

SEQ ID NO: 9476 - protein, 413 aa, unidentified; identical to SEQ ID NO: 8063
  REGION 1..413: note = Human gut metagenome

SEQ ID NO: 9477 - protein, 442 aa, unidentified; identical to SEQ ID NO: 7529
  REGION 1..442: note = Human gut metagenome

SEQ ID NO: 9478 - protein, 418 aa, unidentified
  REGION 1..418: note = Human gut metagenome
MVYVINKQGQALMPTERFGKVRRLLKNGLAHVMYRIPFTIQLDYDTTNFIQPISLGIDAGSKHIGISATTSEKELYAADVELRNDIVEKLSTRREQRRTRRNRLRYRRARFNNRVSSKRKGWLAPSIENKIQTHLTVVEKIHKFLPITNIIVETAAFDIQKIKNPSISGKEYQQGEQLNFFNVREYVLHRDGHQCQHCKGKSKDPILNVHHIESRKVGGNSSQNLITLCESCHKAYHKGEIELEVKRGTSFRDSAFMSTMRWSFYKKLKNIYPNVSMTFGYITKHTRITNGLPKNHYVDARCISGNPTAKHLEYYFYQKKVRCQNRQIHKVNFLKGGRKKLNQAPYLVKGYRLFDLVEYQKDLYYIFGRRESGFFDIRKLDGTKVNKGSISCKKMRLIDIRKTIIIEKRMQGAIHPIN

SEQ ID NO: 9479 - protein, 407 aa, Fervidobacterium sp.
MHPFTIRLKDRTVQQSELQPLRLKLDQGAKVTGLSVLREDGDVAETVFLCEIHHKTDIKQKLDARCAVRRSRRNRKTRYRKPRFLNRRRPEGWLPPSFKARVNQLINAVRKLTKLLPISAISIEDAKFDTQKLQNPEISGIEYQRGTLFGYEVREYLLEKWGRKCAYCGRSDVPLEIDHIVPRSRGGTDRVSNLTLACRECNQKKGNKTAAEFGYPHVEEQARQTYKQPAFMNSIRSYLRKSLSGFGIPAEYGTGALTKANRIRLGLPKKHYFDACCVGESTSSEIRITQSYVQIWHAVGRGTRQMCNTDKFGFPRGHRQRRKKHFGFQTGDIVKAIVPRGKYAGIWVGAVAVRGSGFFDIKDTNGKRICQGISYKYCKLIQIADGWQYSKRKANYSKSHTTEVACL

SEQ ID NO: 9480 - protein, 415 aa, Bacillus sp.; identical to SEQ ID NO: 7196

SEQ ID NO: 9481 - protein, 420 aa, unidentified
  REGION 1..420: note = Human gut metagenome
MQYVYVLNKHGEPLMPCSPGKARLLLKQQKACVVKRTPFTIKLLFGSAGYKQPITLGVDAGSKHVGLSASTEKRELYSEEFTPRSDVVELLSTRRQNRRSRRNRKTRYRVPRFDNRVHSKHKGWLAPSVEVKIQEHITVIKHICKILPISLVRVETAEFDTQRLKAMLAGKPLPVGTDYQLGEMYDEYNVRQYVLKRDHYTCQCCGTHNTAKKVVKLHVHHLESRKTGGNAPSNLVTLCTTCHKNLHKGRVTLDGKERGKPLRDAAFMGIMRKTLMVRLKEELPIPVQGTYGYITKMRREQNDIKKSHVNDARCISKHPLAEPCSVCYRTKAIRHHNRQTHKANFSKGGIRKRSQMPYVVEGYRLWDKVLYKGQECFVSGRRASGSFTLKKLDGTRISKGVTFKKLRLLEPATNYLIERM

SEQ ID NO: 9482 - protein, 460 aa, unidentified; identical to SEQ ID NO: 7734
  REGION 1..460: note = Mouse gut metagenome

SEQ ID NO: 9483 - protein, 453 aa, Anaerotruncus sp.; identical to SEQ ID NO: 8749

SEQ ID NO: 9484 - protein, 262 aa, unidentified
  REGION 1..262: note = Human gut metagenome
HHCLFCKNTIDHYHHVVPQHKNGSNTIGNIVGLCAKHHDLVHKDSAWEKKLAKKSTGLYKKYGALGVLNQIIPTLTNKLSVLFPKHFFVTTGKSTHDYRESHSVSKDHWLDAYCIACSVLPSNVCDSNINNHVPYELKQFRRHDRRALHKENMSRVYTLNGKAVATNRHKAIKQTTDSLEEFRQSHPGDVCKLKVKEHHPAYRNLNRNHPGSVFFVGEQAHVMQSIVASKDGKATRYKDTNVNKIAAGQCRFVAKNEGIVFT

SEQ ID NO: 9485 - protein, 337 aa, unidentified
  REGION 1..337: note = Human gut metagenome
VVGNNLLSIKPLINIGEGVIYSSICTGLSLQTYQKRKEVPCMVYVLDINGQPLMPTTRHGKVRRLLNSHLAKVVKRCPFTIQLLYQSTKEIQPVSLGVDAGSKHIGMAATTEKKVVYQEELSARNDVVKLLSARRTLRRTRRNRKTRYRKPRFNNRVHSKHKGWLAPSVEVKIQEHITTIKRICQILPISEIQVETAEFDLQRLKAMEEGRTPPVGTDYQLGEQYDFYNTRQYVLHRDGYTCQCCGTHDNNIKLHVHHIESRQTGGDAPNNLIILCEHCHKALHEGKLELPKGKKRGKSYRDATFMGVMRKTLLERLKKEIDVPVEGTYGYITKYWR

SEQ ID NO: 9486 - protein, 426 aa, unidentified
  REGION 1..426: note = Human gut metagenome
MVYVQNHLGQPLMPTQDHRKVRLLLKAGAAVVVRRTPFTIRLTTRTKTYVQPVILGVDAGSKTVGMSAATHEEEVFAAELTPRNDVVKNLADRREFRNSRRGRTTRYRQPRFNNRVHSKHKGWLAPSVEVKIQEHITSIKRACELLPIGKVVVETAEFDLQLLKAIADGRPVPQSEDYQQGEMYGFYNVRQYVFFRDGYTCQCCGAHGKGVKFHTHHLESRKTGGNAPDDLVTVCDKCHKAFHTGLITDAKLKKRRRKSTRDAAFMGIMRKTLLQRLRAELPISVVETKGYITKATREQLLKLPKSHTNDALAIAMGRHGFGIEGVTYMPQRDRIFQIKPVRHHNRQLHKAIPKKGGRRQRNQGPKYVQGFRRFDKVLYRGQECFIWGLRTRGYFQLKLLDGAKVHESAKASELILLEHSSGYLIA

SEQ ID NO: 9487 - protein, 237 aa, unidentified
  REGION 1..237: note = Human gut metagenome
MYDEYNVRQYVLKRDHYTCQCCGTHNTAKKVVKLHVHHLESRKTGGNAPSNLVTLCTTCHKNLHKGRVTLDGKERGKPLRDAAFMGIMRKTLMVRLKEELPIPVQGTYGYITKMRREQNDIKKSHVNDARCISKHPLAEPCSVCYRTKAIRHHNRQTHKANFSKGGIRKRSQMPYVVEGYRLWDKVLYKGQECFVSGRRASGSFTLKKLDGTRISKGVTFKKLRLLEPATNYLIERM

SEQ ID NO: 9488 - protein, 431 aa, unidentified; identical to SEQ ID NO: 3235
  REGION 1..431: note = Human gut metagenome

SEQ ID NO: 9489 - protein, 493 aa, unidentified
  REGION 1..493: note = Human gut metagenome
MAVVYVISASGKPLMPTTRCGHVRGLLNERKARVVEQNPFTIQLNYETKEMTQPLYLGIDPGRTNVGAAVVREDGECVFTAQLTTRNKDVSKLMKARKQFRMAHRRLKRRCKRQRRAKAAGTISQKRELQRLLPGCEEPILCKGIRNKEARFNNRQRPAGWLTPTANHLLLTHLNMVKKLQKFLPITDVVLEVNRFAFMAMENPNIRRWQYQRGPLYGKGSVEDAVYAQQDGHCLFCGKPITHYHHVVPQHKNGSDTLENRVGLCIEHHDLVHKDRAWEAKMKEVKAGMNKKYHALSVLNQIIPALAEQLAELFPQHAFATTGKDTADFREDHGVTKEHHLDAYCIACSVLTEPGRVSAPTAKPHRLMQFRRHDRQVCHKENIKRVYLLDGKAVATNRHKAIEQKDNSLEEFRKTHTQQEVSSLTVKDHKPIYKDMRRSMPGGVFLCNGKVHTLLGSQGRYKGMPQYYHGTDRSRNNATRCIFLQLNCGLRWV

SEQ ID NO: 9490 - protein, 420 aa, unidentified; identical to SEQ ID NO: 3247
  REGION 1..420: note = Human gut metagenome

SEQ ID NO: 9491 - protein, 442 aa, unidentified; identical to SEQ ID NO: 3658
  REGION 1..442: note = Human gut metagenome

SEQ ID NO: 9492 - protein, 442 aa, Lactobacillus sp.
MKNERRKAMQNRVFVINQHGKALMPCKPRKARILLRDGKAKVLKKEPFTIQLLYGSSGYKQDVNIGIDSGQRHVGLAVTSQDKVLFQGEVELRQDVKLLLDTRRIYRRSRRNRKTRYRKARFLNRVSNRKDNWLPPSVASKVNHNINWIKRLLSVLPKADLHIEVGKFDMQKMKNPAINGEGYQQGDLYGYQTVKQFVLARDDYTCQVCKKKGGKLKIHHIIYRSLGGTNTIDNLITVCADCHTAKNHQSGILAKWCKDKKKVNKSYKGATFMNILRRRLFNAFPQAKFQYGACTTLQRADLNLTKSHYNDAVAISGIRKIKVKPTSIMMFKQFRKKKRSLHEATARKGRKTPNITSKRNAKNTKYAKGFWLNDYVKIKDSNKKGYISGFMSKGTNVRLRDIFGEYVSNSDKSYTSTKNISLINHSNNWQKQVITEKQYIMG

SEQ ID NO: 9493 - protein, 427 aa, Nostoc sp.
MSKVFVLDTEKRPLDPIHPAQARQLLRNKKAAVFRRFPFTIILKESRADASVSDLRIKLDPGAKITGIALVNDSTGEVVFAAELKHRGFAIRDALISRRQLRRSRRNRKTRYRKPRFLNRTRPEGWLAPSLMSRVHNVETWVNRLRKFAPITAISTELVKFDMQLIRNPEIEGKEYQQGTLAGYETREFLLEKWNRQCVYCGNKDIPLQIEHIHPRSKGGSNSITNLTLSCEKCNVKKGTKDIKDFLKKDPTRLQKILAQAKKPLADAAAVNATRYKLLDVLKSTYLPVECGSGGLTKFNRTNQQLQKTHWLDAACVGQSTPILIIKGIKPLLITANGHGTRQMCRTDKFGFPNRYVPKLKFIKGFQTGDIVKAVVTNGKKIGEYIGRVAVRSTGSFNISAQRGLIQGINYKFCKSIHKKDGYSYSS

SEQ ID NO: 9494 - protein, 442 aa, Lactobacillus sp.; identical to SEQ ID NO: 5193

SEQ ID NO: 9495 - protein, 420 aa, unidentified
  REGION 1..420: note = Human gut metagenome
MQYVYVINKHGKPLMPCSPGKARLLLKQQKARVVKRTPFTIKLLYGSAGYKQPITLGVDAGSKHVGLSASTEKRELYSEEFTPRNDVVELLSTRRQNRRSRRNRKTRYRAPRFDNRVHSKHKGWLAPSVEVKIQEHITVIKRICRILPITLVRVETAEFDTQRLKAMLAGKPLPVGTDYQLGEMYDEYNARQYVLKRDHYTCQCCGAHTTTMKSVKLHVHHLESRKVGGNAPSNLITLCTTCHANLHKRKVTLDGKKRGKTLRDAAFMGIMRKALMARLKEELSIPVQETYGYITKMRREQNDIKKSHVNDARCISKHPLAEPCSVCYRTKAIRHHNRQIHKANFSKGGYRKRSQISYIVEGYRLWDKVLYKGQECFISGRRASGRFALKKLDGTSISKSVTFKKLRLLEPATNYLIERM

SEQ ID NO: 9496 - protein, 398 aa, unidentified
  REGION 1..398: note = Human gut metagenome
RRAKANGTISKKCVKQTTAQNGSVSKRAKEIGVIKRHLPGCEKDVLCIGIKNKEAKFSNRTRPEGWLTPTANQLLQTHINLVKKIQKFLPISDVVLEINKFAFMRLDNPNVQKWQYQQGPLYQKANLEETVSEMQEHHCLFCKKKIDHYHHVVPQHKNGSNTIDNIIGLCTQHHDLVHKDATWQKRLAKKKTGLNKKYGALSVLNQIIPALTKELSSLFPKHFFVTNGKSTYDYRAAHGVSKDHWLDAYCIACSVLPNDTCDKTINSRVPYELKQFRRHDRRALNNENMSRVYTFNGKMVATNRHKATEQTTDSLEEFRQRQPNDVCNLKVKEHHPTYRNMNRNYPGSVFLVGNQVHVMQGIAGSKDGEATTYKDTNANSIAAGKCKFVAKNSGILFV

SEQ ID NO: 9497 - protein, 423 aa, Leptolyngbya sp.
MSNHVFVLDTNRKPLTPCKPGVARSLLKAGKASVFRRYPFTIILKKEVNANPEPIEVKLDPGSKVTGIALKQGNRIIFGAELQHRGRQIKDALLSRRQLRRSRRNRKTRYRQVRFLNRTRPDGWLAPSLQHRVDTLITWVNRFRRLAPVARIALELVRFDLQLMQNPEISGVEYQQGELPGYEVREYLLEKWGRKCVYCGTQNVALEVEHIQPQSKGGTDRVSNLTLACHSCNQSKSNRDIRDFLSSQPDLLSRILRQTKSPLKDAAAVNSTRWALFNALKATGLPVVTGTGGQTKFNRTRLELPKAHWLDAACVGEIESLEILTSKPLLIAAKGHGTRQMCGTNKYGFPTRHRSRVQVHKGFRTGDIVIATVTAGKKIGSYVGRVLCRASGSFDITTASGRVAGISHKYCKPIHRKDGYAYA

SEQ ID NO: 9498 - protein, 415 aa, unidentified; identical to SEQ ID NO: 3548
  REGION 1..415: note = Human gut metagenome

SEQ ID NO: 9499 - protein, 406 aa, unidentified
  REGION 1..406: note = Human gut metagenome
VVYVQDIDGNPLMPTTRHGKVRRLLKAKKAIVINLCPFIIQLTYATSSYKQEVVLGVDAGTKHVGLSATTKSKELYASEVILRSDVVDLLSTRRELRRKRRYRLRYRKPRFKNRIKYKKEGWIAPSIRRKIDSHIRIIGFVYSILPVSKLIVEVAQFDTQKIKNPEISGKEYQEGDQLGFWNVREYVLARDGHKCQHCKGKSKDPILNVHHIESKKTGGDSPSNLITLCETCHKEFHKGNIKLKVRRGRSLRDAAVMGIMKWRLYNKLKSLYSNVDITFGYITKYNRIRYGIEKSHISDAFAISRNFSSIKLGYYYKKKITRRHNRQIHKMKILKGGVKRLNQAPFKVFGFRLFDKVISQGDVYFIYGRRISGRFNIRDINGENKKDVYCNKLRYISNGLISVRVD

SEQ ID NO: 9500 - protein, 420 aa, unidentified; identical to SEQ ID NO: 6067
  REGION 1..420: note = Human gut metagenome

SEQ ID NO: 9501 - protein, 442 aa, Lactobacillus sp.
MKHENANRVFLLNKDGKPLMPCRPRKARLLLKSGKAFVVKKYPFTIQLKYGSYGYKQKVSLGVDTGQRHIGFAIVSQNKVLHQSEVELRQDVHKNLYTRKIYRRSKRNRKTRYRQARFLNRVHGKRDGLWLPPSIKGKVSHNIAWIKRYLAVLPNPDLHIEVGKFDMAKMVNPEISGKQYQEGSLKDWKNYEYYVLARDEYTCQLCHKHGEGVKLVVHHIVYRSQGGTDRVDNLITLCTNCHTTKNHQPGGKLYKWMKAKKKVIKQLKGATFMNILRKRIMTAFPEASFQYGSQTYVDRKNLLLPKGHFMDAIAISGIKSVGQLSDTVTMISQFRKKKRSLHEATARKGRKQPNTSSKRNEKNTKHARGLWLNDYVRVIGNHAKGYVKGFKSNGYYVYLTDGLGNYVLNNGKNYINGQQCRLIMHNGNWQKAEQKLSLYKFK

SEQ ID NO: 9502 - protein, 443 aa, Anoxybacillus sp.; identical to SEQ ID NO: 7148

SEQ ID NO: 9503 - protein, 430 aa, unidentified; identical to SEQ ID NO: 4504
  REGION 1..430: note = metagenome

SEQ ID NO: 9504 - protein, 429 aa, Parasutterella sp.; identical to SEQ ID NO: 4241

SEQ ID NO: 9505 - protein, 408 aa, unidentified; identical to SEQ ID NO: 4810
  REGION 1..408: note = Human gut metagenome

SEQ ID NO: 9506 - protein, 429 aa, Parasutterella sp.; identical to SEQ ID NO: 4241

SEQ ID NO: 9507 - protein, 292 aa, Moorena sp.
MPNFVFVLNPDKQPLSPIHPAQARLLLKEKKAAVFRRYPFTIIFKEEVRQTAEPIKIKLDPGSQTTGIALVQSNQVILGAELTHRGQVISKNLTSRRQLRRGRRSRQTRYRKPRFLNRTHPLPPPRRGTEGVGWLAPSLQHRVDTTLTWVKRLIKLAPIESIAMELVRFDLQKQENPEISGAEYQYGTLYGWEVREYLLTKFNRTCQYCSAKDTPLEVEHIQPKSKGGSDRVSNLTLACHDCNQSKGNQDIQDFLKEEPDLLKRILKQAKMPTQRRKVREGWRRDGAIPQSG

SEQ ID NO: 9508 - protein, 428 aa, unidentified
  REGION 1..428: note = Human gut metagenome
LKVFVLNMRGQPLMPCSPAKARHLLKAGKAVVRRRTPFTIQLRIATGETKQSVTLGVDAGAKHVGLSAATEKEEVFASEVELRQDITGLLAARLSLRRDRRHRKTRYRAPRFLNRVRSKHKGWLAPSVENRIQAHMSRIDAVCRLLPVTKIVIETASFDIQKIKDPSVEGTDYQQGDQLGFWNVREYVLFRDGHVCQHCHGHAKDKILNVHHLESRQTGGDAPNNLITLCERCHKACHAGKIKLKVKRGQSFREEAFMGIMRWTLLDRVRKAHPGLPVENTYGYLTKNTRITQGLPKAHCVDAYCIAGNLKAVRRGVHLYQRQVRKHNRQIHKCTVLSKTLKDGTKIGYRKLNQTPHLVKNFRLFDKVRCLGQTGFIFGRRSSGYFDVRRLDGVKISSCINYRKLTLLEKRGTCLTELRKEDGASSPV

SEQ ID NO: 9509 - protein, 413 aa, unidentified
  REGION 1..413: note = Human gut metagenome
MTSYSFVLDANGKQLAPTKEPKAWFLIRKKRAALVSKYPMVIQLKKKIQENEICKDEIRCGIDDGGLHVGIALVQKCKSKNKVVFKGTIEQRNDVKHLMEVRRNYRRYHRYHKRYRQARFDNRKSSKRKGRIAPSILQKRQATIRVINRLNKWINITNYWLEDVSIDIRVLTDGYKSYSWQYQKSNRLDENIRKATILRDGGKCMECGKSNCRLEVHHIKPRRRNGSNTLDNLITLCESCHQKTEGQEELYMDRYFSLLKSSDNKNLNYAQHVIIGKMWLRKQLSGLGVLYLTSGGDTANKRIDWNIEKSHTNDAVCITDLQPDTCDIKEWAIKPMRRQSKAKTDHVLGIHHRDLVEYTFKNGETHRGYVTALYPDQKAINFQSQTKHCKKVNARKCKLLWNYSKIYWFENAS

SEQ ID NO: 9510 - protein, 460 aa, Ammonifex sp.
VQKQNCVLVLDKNKEPLMPCHPARARQLLKKGRAAVFRRHPFTIILKDREGGETQPLELKIDPGAKVTGLPLVAEFPRGREVLWAAELHHRGEQVREALHRRRGYRRFRRYRKTRYREPRFSNRGRPEGWLPPSLESRVANILTWGKRLCRWSPVTAVSVELAKFDTQKFQHPEISGIEYQQGELSGYEVREYLLEKYGRRCAYCGKEDVPLEVDHVVPKSRGGTDRVSNLTLACRECNRAKGNRLLQEWLEDLKKSRRAVDRKRAENIPKVLSLLKEPLKGAAFINATRYALVERLKALGLPVFTATAAQTKYNRARQGYPKAHWIDAACVGETGESVRLDPGMQALKITARGHGSRRVQNVDRYGFPRGEPKRVRRFMGFATGDLVKAVIPTGKYAGVHVGRVAIRSRPGFRLNGFDVHPKHLRLLQRADGYEYDWVKGGSGVSSPRPEGRGPRRRVI

SEQ ID NO: 9511 - protein, 424 aa, unidentified; identical to SEQ ID NO: 3434
  REGION 1..424: note = Human gut metagenome

SEQ ID NO: 9512 - protein, 413 aa, unidentified; identical to SEQ ID NO: 2636
  REGION 1..413: note = Human gut metagenome

SEQ ID NO: 9513 - protein, 503 aa, Streptomyces sp.
MGRGETYGRGTRARRRHAKSAASAAKAAENRSGDAPAHHQSYTGGVGASRVFVLARDGRPLMPCHPARARELLGKGRAVVARQVPFTIRLKDRALPDSEVDGVQLRIDPGSKGTGLVLTDEKREADERGTDVTVRRGLIAIELQHRGDQIHLRMRQRAGYRHRRRSVNYRYRAPRSDNRPRPPGWLPPSLRHRIDTTLSLATRLCRYAPVTEVHVERVAFDTHAMGAGRPLSEAEYRQGPLAGTTARAYLHAKWNSACAYCDARGVPLNIEHLRPRSRGGSHRVSNLVLACVPCNEAKGSTPVETFLSGRSDHLARILGRSRAPLHDAAAMNATRWRLTEVLGALGRPVHAWSGGRTKDNRSAMGLAKTHTLDALSVGRLNHESGDAIVRYPERVLVAKATGRGSYARTTPNRFGFPRLRRARAKQHFGYVTGDLVRATVPRGKWAGTWTGRISVRARGQHSLTTPRGRVNVSHRNLRLLQRGDGYGYGGRPEPTPSTSRKSS

SEQ ID NO: 9514 - protein, 457 aa, unidentified; identical to SEQ ID NO: 3236
  REGION 1..457: note = Human gut metagenome

SEQ ID NO: 9515 - protein, 450 aa, Moorena sp.; identical to SEQ ID NO: 4205

SEQ ID NO: 9516 - protein, 442 aa, unidentified; identical to SEQ ID NO: 2903
  REGION 1..442: note = Human gut metagenome

SEQ ID NO: 9517 - protein, 413 aa, unidentified; identical to SEQ ID NO: 2636
  REGION 1..413: note = Human gut metagenome

SEQ ID NO: 9518 - protein, 406 aa, Geobacillus sp.; identical to SEQ ID NO: 3747

SEQ ID NO: 9519 - protein, 462 aa, Halomonas sp.
MAVFVWDKHKRPLMPCSEKRARLLLARGRAVVHKRYPFTIRLKDRVGGDTQPLRLGIDPGSKTTGLALMRETDSTESDGPQRHVLCLFDLVHRGYQIKKSLEQRRGFRRRRRSKNLRYRAPRFNNRTKPKGWLAPSLQHRVDTVMAWVERLSKLAPVTAISQELVRFDTQKLDNPEISGVEYQQGTLLGYEVREYLLAKWGRECAYCGTGDTPLEIEHVVPRSRGGSNRVSNLTLSCHPCNQAKGSLPLADFFSRDKGLRKRLKANGLSADARLERVQRQLKQPLRDASAVNATRWALFNALKTTGLPVAVASGGRTKYNRQRLGIPKTHALDAACVGAFGRLHDWTAPTLTIKCTGRGNYQRTRLTKYGFPRGYLMRQKQVRGFQTGDIVKAVVPSGKKAGTYTGRVAVRKTGSFNIQTDQGAVQGISHKHCTVIQRGDGYGYHLTPTIHQLKGGAGQAVA

SEQ ID NO: 9520 - protein, 433 aa, unidentified
  REGION 1..433: note = Human gut metagenome
MVYVQDIDGKPMMPTTRHGKVRRLLKDSKAVVVNTCPFTIKLMYKTSGYKQEIVLGVDAGTKHVGLSATTKSKELYSSEVILRSDIVELLSTRRESRRTRRNRLRYRKPRFNNRIKSKRTGWVAPSVRHRIDAHIRVIDNICSILPVSRVIVEVAQFDTQKIKNPDISGDEYQEGDQLGFWNVREYILARDGHKCQHCKGKSKDPILNVHHIESRKTGGDSPSNLITLCETCHKEFHKGNIKLKVSRGKSLRDAAVMGIMKWKLYEELKSRCDNVSMTFGYITKHNRIKYGIEKSHTSDAFVISMNINAKRIERQYLKRLIRRHNRQIHKMKILKGGKKKNNQAPFEVFGFRLFDKVLYNNKIFFVYGRRKSGSFNIRDFNGENPKDVSRKKFKLIRGKYDYQAGYTSSSIVYFPKQFCLGGPGKESNGKSRQ

SEQ ID NO: 9521 - protein, 420 aa, Bacillus sp.; identical to SEQ ID NO: 9117

SEQ ID NO: 9522 - protein, 415 aa, Bacillus sp.; identical to SEQ ID NO: 2431

SEQ ID NO: 9523 - protein, 512 aa, unidentified
  REGION 1..512: note = Human gut metagenome
MSTVYVLNKDGKPLMPTTRGGHVRYLLKEKKARVVTSKPFTIQLLYETDDVVKPLYLGIDPGRTNIGVAVVKTDGTAVFTAHLETRNKEIPKLMQGRKKARRARRTNGRRCRRQRRAKANGTISKKCVKQTTAQNGSVSKRAKKIGVIKRHLPGCEKKVLCIGIKNKEAKFSNRTRPEGWLTPTANQLLQTHINLIKKIRKFLPVNDVVLEINKFAFMQLDNPNIQKWQYQQGPLYQKASLEEAVSEMQEHHCLFCKQSIVHYHHVVPQSENGSDTIGNIVGLCTKHHDLVHKDTAWQKKLAKKKTGLNKKYGALSILNQIIPALTKELSSLFPKHFFATNGKSTHDYRAAHDVSKDHWLDAYCIACSILPNDTCDKNINGRVPYKLKQFRRHDRRALHKENMSRVYTLDGKKVATNRHKAIKQTTDSLEEFRQRQPNDVCKLKVKEHHPEYRNPERNFPGCVFLVGKHTHVMQGTSGSHNGKADGYYDTNGNSYPSGKCKFVAKNKGIVFA

SEQ ID NO: 9524 - protein, 465 aa, unidentified; identical to SEQ ID NO: 4016
  REGION 1..465: note = Synthetic metagenome

SEQ ID NO: 9525 - protein, 413 aa, unidentified; identical to SEQ ID NO: 3476
  REGION 1..413: note = Human gut metagenome

SEQ ID NO: 9526 - protein, 518 aa, unidentified
  REGION 1..518: note = Human gut metagenome
MTPKKRKEASRMSEYIYVLGIDGNPQMPTKRKRHVEQLLQTGRARVFRQIPFTIQLTYENKPVLQPITIAEDPGRSNIGMAVVSLSGELLSAAVVQTRNKEIVKLMEKRKQHRRASRNGERKARQRLAKKCHTMIKTGFLMRKLPMYGKDKRVRCNVIKNTEAKFCNRKREDGWLTPSAEHLVRTHINLIHKMQKFLPITDVAIEINRFAFLSLEDPSISGVDFQNGPLKGYDDLNAAIEDLQDGHCLMCNSPIEHRHHIVPRSMQGSNTIGNIAGLCCKCHERVHKDARFEDRLKKKKAGLNKRYAAVSALNQAIPFICKRLEQEFGKEHVHYCSGRDTSMVRRSFGYHKTKEEQLHEVDAWCIAVLSLRQIPEKAPEFDHVHEILQFRRQDRSRIKAQTSRAYYHEGKKIAKNRKKAEGQREDSLQEWRKQQVKRYGEEQTRKMISQLEIKKSIRRYNRLDRLMPGAVFYYQGIRYVMRGQHCEGAYLQAVGMGSKDFPAKKCKIVVHNEGLVFVS

SEQ ID NO: 9527 - protein, 460 aa, Ammonifex sp.; identical to SEQ ID NO: 9510

SEQ ID NO: 9528 - protein, 468 aa, Fervidicola sp.
LVFVLDKKKRPLMPCSEKRARLLLQRGRAVVHCMHPFTIRLKDRVLEESVVQPLRLKIDPGAKTTGIAVMDESDPVCGKVIFLAEIKHKDGIKEAMKTRRDVRRSRRHRKTRYRKARFQNRNPEKCIACGRNARHKSDYCSICHENRNFVDNGFRKKRLPPSLEARVNQTINAVKKLMKLLPVTAISTEHVKFDTQLMQNPEIEGIEYQRGELFGYEVREYLLEKWGRKCAYCGEEGVPLEIEHIIPKSRGGTDRVSNLTLACHECNQKKGNLTAEEFGYPEIQEQAKKPLKDAAIMNATRWKLYRRLKELGLPVECATGARTKKQRIEHGLPKAHYYDACCVGITPGKLVFKTEYVSIWTAIGRGTRRMCNPDKYGFPKGHRTARKLYFGFQTGDIVKAIVPKGKYRGTWVGRVVVRTSGYFDLKDNYGKRICQGISYKTCCLIQRADGWQYDKCQRKEVLAHSSSQ

SEQ ID NO: 9529 - protein, 419 aa, Anoxybacillus sp.
LFVYVINKHGKPLMPCSPRKARILLTNKKAKVVKRTPFTIQLLYGSSGYKQPISLGVDAGAKHVGLSATTKNQVLLEAEVQLRTDIQELLATRRQFRRSRRNRKTRYRKARFLNRKKPNGWLAPSIQHKVESHIKLVKWVHSLLPITHITVEVAQFDTQKIKNPDIQGAAYQQGEQLGFWNVREYVLYRDGHTCQWCKGKLKDPVLNVHHIESRKTGGDSPSNLLTLCKTCHDRIHREGLEHEIQRRFPSLKDASHMSMMRWFIWNGLKKVYPHAKHTYGYITKHTRIVHRLAKTHMVDARCISGNPLATPSDTVFLLKFVRKNNRQLHKATISKGGKRKANKAERLVKGFQLFDKVMYHRQECFVFGRRSSGYFDLRLLDGTRIHASASVKKLKKVEHASTLLIERRKGDSSPTFALA

SEQ ID NO: 9530 - protein, 453 aa, unidentified
  REGION 1..453: note = Human gut metagenome
MPVAVVSKTGERLMPTSEHRARKLLKSGKAIKYSYHPFTIQLTERESGDVQPIELCMDTGYIHIGISVKSEKHEYLAEQIDTLTDEKARHDACRMYRRQRRSRKRYRQPRFNNRKRNDRWIAPSLEHKKSIHIQAILRICKVMPVTDITLEMGNFDTQVLKAREEGKPLPQGVDYQHGERYGITTLREAVFARDGYTCQCCGRAIKDGAILHVHHIVYRSQGGTNRMSNLITVCDKCHTPANHKQGGKLYNWKPKIASFKSATYMTTIRWKLYNEVKALFPDIDIDIHITYGAETKERRRALDIDKSHVNDAFVMGQFHPKHRSKPICYKKKRRNNRCLEKFYDAKYIDSRDGKKRSGQELFNGRISRNHKKDSENLHQYRLQKVTPGRRAIRRQHYPIQPHDIIVYNGNKIEVSGCQHKGTRVVFSKTKKSVQISKIKLFKYAGGYSKSVFN

SEQ ID NO: 9531 - protein, 450 aa, Moorena sp.
MQKLLVEFENTPEDAPQVSCSISGALNRDKSLSVPCLLLADNNSDKDQHSGKNGQALSVPVINLRGKPLMPTRSGKARILLQQGKAIVIQRAPFTIQLCYLTGNYTQNIKLCIDAGYSTIGFSAINNKCELLSGELTLRKRISKLIEGKSNYRKTRRSRLLHRKPRFNNRNKPEGWFTPSIQHKLKTHLGLIEKLKKIPPVIKITIEVASFDTQKLQNPEITGVEYQQEELQGYEVREYMLEKWKHKCAYCGKSNLPLEIEHIIPKSRGGTDRVSNLTLACHKCNQKKGNQTAAEFGHSEIQKKTKQTLKATAFMNIVRWRLVNTLKCDWTYGYITKHARIKLGMKKSHVTDAFIAGGNVQERSRSYELTQTRRNNRSIQTNRKGHKPSIRRKRYRLQLNDLVKYIKSLCKVKDVHNYGRYVILEDKIGEIFDINVKKVEMVKHGKGIQF

SEQ ID NO: 9532 - protein, 512 aa, unidentified
  REGION 1..512: note = Human gut metagenome
MSTVYVLNKDGKPLMPTTRGGHVRHLLKEQKARVVRAKPFTIQLLYETNDVVQPLYLGIDPGRTNIGVAVVKANGTAVFTAHLETRNKEVPKLMQDRKKASRARRTNGRRCRRQRRAKANGTISKKCVKQDTAQSKNPSKRAKEIGIIKRRLPGYKKDVLCIGIKNKEAKYTNRTRPEGWLTPTANQLLQTHINLVRKMQKFLPISDVVLEVNKFAFMRLDNPDIQKWQYQQGPLYQKGSLENAVSEMQEHHCLFCDKPIDHYHHVVPQSENGSNTIANIVGLCAEHHNLVHKDAAWQKKLAEEKVGLNKKYGALSVLNQIIPALTNKLSVLFPKHFFVTAGKSTHDYRAAHGVSKDHWLDAYCIACSVLPSNVCDSNINNHMPYELKQFRRHDRRVLNNENMNRVYTLDNKAVAINRHKATEQEAASLEEFRKEHPNDVCKLKVKEHHPTYRNMNRNYPGSIFLVGKHVHIMQGIAGSKDGKATTYKDSNANSITASKCKFVAKNSGILFV

SEQ ID NO: 9533 - protein, 449 aa, unidentified; identical to SEQ ID NO: 4974
  REGION 1..449: note = Human gut metagenome

SEQ ID NO: 9534 - protein, 413 aa, unidentified; identical to SEQ ID NO: 2636
  REGION 1..413: note = Human gut metagenome

SEQ ID NO: 9535 - protein, 433 aa, Burkholderia sp.
MSVFVLDRSGKPLMPCSEKRATLLLARGRARVHRVMPFVIRLVDRKAGACARQPMRIKLDPGSKVTGIALVREADHGVAVLNLFELVHRGRQISEALAARRAFRRRRRGSNVRYRAPRFLNRRRSQGWLPTSLRHRVETTAAWVNRIRRWAPVTALSSELVRFDLQRLENPEISGIEYQQGTLAGYEVREYLLEKWNRTCIYCDVKGRPLQIEHLTAKARNGSNRIGNLGIACSNCNQDKGARDVREYVKDPQRLARILATASRPLKDAAAVNATRWALANALRATGLPLELASGARTKFNRVTHGIPKTHAFDAVCVGDVGSIRDWQRPSLAIKASGRGSYQRTRLTRHGFARGYLMRQKQVHGFQTGDHVRANVPGGKKAGSHIGRVAVRATGSFNIQTARAVVQGISYRYCTLIQRGDGYSYAPQPKDSF

SEQ ID NO: 9536 - protein, 411 aa, unidentified
  REGION 1..411: note = Human gut metagenome
MVYVQDIDGKPMMPTTRHGKVRRLLKDNKAVVVNTCPFTIKLTYKTSDYKQEIVLGVDSGTKHVGLSATTKSKELYASEVILRSDVVDLLSTRRGLRRTRRSRLRYRKQRFNNRVKSKKDGWIAPSVRHKIDSHIRIISFVYSILPVSKLIVEVAQFDTQKIKNPEISGKEYQEGEQLGFWNVREYVLARDGHKCQHCKGKSKDPILNIHYIESRKIGGDSPSNLITLCETCHKEFHKGNIKLKVSRGKSLRDAAVMGIMKWKLYEELKSKYDNVSMTFGYITKYNRINHGIEKSHVSDAFVISRNFNSCRLGYYYKRKLVRRHNRQIHKMKILKGGIRKRNQAPFKVFGFRLFDKVMFQGEEHFIYARRLSGQFNIRDINGENKKDVSCKKLKYVSHGLVSVKTNLFLSQ

SEQ ID NO: 9537 - protein, 413 aa, unidentified; identical to SEQ ID NO: 9225
  REGION 1..413: note = Human gut metagenome

SEQ ID NO: 9538 - protein, 432 aa, unidentified
  REGION 1..432: note = Human gut metagenome
MLTGLLAEQVDPAGIRKGDTLKVFVLNMRGKPLMPCSPAKARHMLKAGKAVVLRRTPFTISLTVATGETKQEVTLGVDAGAEHVGISATTEKEEVFASEVELRQDIKGLLADRLEFRRARRNRKTRYRAPRFDNRVRSKHKGWLAPSVENRIQAHISRIEAVCRVLPITKIVIETASFDIQKIKNPEVEGTDYLQGDQLGFWNVREYVLFRDGHVCRHCRGRSKDPFLNVHHLESRKTGGDAPNNLITLCETCHKAYHAGKIKLKARRGTPFRAEAFMGIMRWTLLERVRKAHLELPVENTYGYLTKHKHIVLGLPKTHCADAFCIAGNLSALRRGEFLYQRQTRKHNRQIHKCSILKGGVRKLHQAPFLVKGFRLFDKVKCKGRIGIIFGRRSSGYFDVRTLDGVRLSAGISSKKLMLLEKQTTFLTQLRK

SEQ ID NO: 9539 - protein, 414 aa, unidentified
  REGION 1..414: note = Human gut metagenome
MPCSPAKARLLLKEKKAIVKRRTPFTIQLTIATGETKQPEGLGVDAGYKHVGLSASTDKAELYASQVELRQDITDLLSARRALRRARRNRKTRYRAPRFNNRIRTKRKGWLAPSVENRINAHLSRIEAVLRLLPVTKITVETASFDMLLLKNPDIAGKEYQEGEQLGFWNVREYVLFRDGHVCQHCYGRSKDPVLNVHHLESRRTGGDSPGNLITLCETCHEALHRGEIALKTKRGHSFRAEAFMGMMRWEVLNRLKASHSELEVNNTYGYRTKHARIVNGIDKSHCADAFCIAGNLGAERLCEFFFQKQTRRNNRQIHKLSILKGGIRKRNQAPFEIKGFRLFDKVACKGEESFIFGRRSSGYFDVRKLDGTRISAGISYKKLRLLEKRRTYLTEIRKEEALPPLPEGRGLRA

SEQ ID NO: 9540 - protein, 430 aa, unidentified; identical to SEQ ID NO: 6405
  REGION 1..430: note = Human gut metagenome

SEQ ID NO: 9541 - protein, 447 aa, Geobacillus sp.; identical to SEQ ID NO: 6209

SEQ ID NO: 9542 - protein, 456 aa, unidentified
  REGION 1..456: note = Human gut metagenome
MSTCVCVLSNSGERLMPTFRLGKVRRLLKDGKAKIVKHHPFTIQLLYDSKTNTQPIEICEDVGYNYIGISVKSESHEYVSAQYDTLQDEKEHHDDCRKYRRTRRNRLRYRKPRFDNRKRGESWLAPSLRHKKELNVNVVKMYCAVMPITHATVEVGSFDTMLVKAIQEGKAIPEGADYQKGPRYNLATLREAVFYRDNYACQVCGRKIADGAILHMHHMFYWKGRHGYQLDELVTACEKCHTPANHQKGGKLFGFGEDKEFANLSGAAFMNAVRWQIVNALYATYGKEFVTITYGAMTKEKRIALQLEKTHSNDAYAMGDYYLAHRCVFRHYQKRRRNNRVLEKFYDATYIDARTGNKAKGKELFNGRINRNHKKDSENFHKYRSKKISKGRRSIRRQRYAIQPYDTVRLEGKTYITSGCHNKGTRLLIPVNGKSKSVAISKVQVVCHAGAWIQII

SEQ ID NO: 9543 - protein, 512 aa, unidentified; identical to SEQ ID NO: 8277
  REGION 1..512: note = Human gut metagenome

SEQ ID NO: 9544 - protein, 413 aa, unidentified
  REGION 1..413: note = Human gut metagenome
MTSYSFVLDANGKQLAPTKEPKAWFLIRKKRAALVSKYPMVIQLKKKIQENEICKDEIRCGIDDGGLHVGIALVQKCKSKNKVVFKGTIEQRNDVKHLMEVRRNYRRYHRYHKRYRQARFDNRKSSKRKGRIAPSILQKRQATIRVINRLNKWINITNYWLEDVSIDIRVLTDGYKSYSWQYQKSNRLDENIRKATILRDGGKCMECGKSNCRLEVHHIKPRRRNGSNTLDNLITLCESCHQKTEGQEELYMDRYFSLLKSSDNKNLNDAQHVMIGKMWLRKQLSGLGVLYLTSGGDTANKRIDWNIEKSHANDAVCITDLQPDTCDMKEWTMKPMRRQSKAKTDHVLGIHHRDLVEYTFKNGETHRGYVTALYPDQKAINFQSQTKHCKKVNARKCKLLWNYSKIYWFENAS

SEQ ID NO: 9545 - protein, 406 aa, unidentified; identical to SEQ ID NO: 3980
  REGION 1..406: note = Human gut metagenome

SEQ ID NO: 9546 - protein, 413 aa, unidentified; identical to SEQ ID NO: 5215
  REGION 1..413: note = Human gut metagenome

SEQ ID NO: 9547 - protein, 417 aa, unidentified
  REGION 1..417: note = metagenome
MPCSPAKARLLLKERKAIVKRRTPFTIQLTIATGEAKQPVALGVDSGYKHIGLSATTEKAELYASEVELRQDITDLLSARLALRRSRRSRKTRYRAPRFDNRVASKREGWLAPSVENRIAAHMSRVEAVMQVLPVTAITVETAAFDTQLLKNPDITGAAYQQGEQLGFWNVREYVLFRDGHVCQHCSGKSKDPILNVHHIESRRTGGDAPNNLITLCETCHKAFHRGEIELKIKRGKSFKAETFMGIMRRTLFERLKKAHPELNVRNTYGYLTKHKRISYGIAKSHCADAYCIADNLGAKRLEGFFFQKQTRKHNRQIHKLLILKGGLKKKNQAPYEVKGFRLFDKVICKGEEAFIFGRRTSGSFDVRRLDGTRISAGINYKKLRLLEPRTTYLTEFRKEAALPPLHKCRGVCAEFL

SEQ ID NO: 9548 - protein, 413 aa, unidentified; identical to SEQ ID NO: 3220
  REGION 1..413: note = Human gut metagenome

SEQ ID NO: 9549 - protein, 473 aa, unidentified
  REGION 1..473: note = Synthetic metagenome
VIDIPEGREASASVTRPVRAFIERKTMSVFVLDKRKHPLMPCTERRARLLLSRRRAVVVRAYPFTIRLKNRTGDVTQPLRIKIDPGSKATGIAVVRENGQKQHVLALMELVHRGRQISKSLDQRRAFRRRRRNQLRYRAPRFLNRTKPKGWLAPSLQHRVDTTRSLVNRLRSLVPVVSISQELVRFDTQKMENPEVSGVEYQQGTLLGYEIREYLLEKWGRECAYCADTDTPLQIEHIDPKANGGSNRISNLTLACRPCNQEKDRKSLVSFFATSKRLKNHQAKLDRILKQCKKPLRDASAVNSTRWALHQTLKQTGLPVEVGTGGRTKFNRRRLNIPKTHALDAACVGEVEIVEGWDVPTLAIKATGRGSYKRTRLTKHGFPRGYLMRQKQVQGFQTGDMVRAVVPAGTKAGTWQGRVAVRKTGSFNIQTSSGAIQGISHRHCVLTQRADGYGYHIQPNQRKEEGDRENESR

SEQ ID NO: 9550 - protein, 422 aa, unidentified
  REGION 1..422: note = Human gut metagenome
MVYVLNINGHSLMPTERFSKVRRMLRDGKAKVIKRCPFTIQLLYQTTNNVQPVNLGVDAGSKHIGLSATTKNKVLYEADVELRNDIVTLLATRAELRRTRRNRKTRYRKPRFNNRIATKKEGWLAPSIKNKIQTHLSVVDKVYKILPVSKIIVETASFDIQKIKNPDINNEDYQQGEQLGFWNVREYVLFRDNHQCQCCKGKSKDKILNVHHLESRKTGGDAPNNLITLCEYCHKQYHLGKLNLPKNIHRGMKFNDAAFMGIMRWNFYDNLKKKYESSGVPVSLTYGYITKHTRIQYNLPKEHYIDARCISGNPTADSNGEYFYQKKVRCHNRQIHKTTILKGGRRKLNQAAYVIKNFHLFDKVEYQKENYFIFGRRTSGFFDIRKLDGTKINNGSISYKKLKLIEIKKYYLTERRIASPLI

SEQ ID NO: 9551 - protein, 470 aa, unidentified; identical to SEQ ID NO: 2825
  REGION 1..470: note = Human gut metagenome

SEQ ID NO: 9552 - protein, 465 aa, unidentified
  REGION 1..465: note = Human gut metagenome
MSTCVCVLSNSGERLMPTIRLGKVRRLLKDGKAKIVKHHPFTIQLLYDSKTNTQPIEICEDVGYNYIGISVKSESHEYVSAQYDTLQDEKEHHDDCRKYRRTRRNRLRYRKPRFDNRKRSEGWLAPSLEHKKELNVNVIKMYCEVMPITHAIVEVGSFDTMLVKAIEEGKATPESADYQKGPRYKLATLREAVFYRDNYTCQVCGRKANEGAILHVHHIFYWKGRHGNSLSELITVCEKCHTPANHQKGGKLYGFGEDIKFANLSGAAFMNTVRWQIVNVLYAAFGKPFVTFTYGAMTKEKRIALHLEKSHNNDAYAMGSFHPVNRCAFEHYEKVKRNNRILEKFYDSQYIDIRTGEIATGKELFNGRISRSHKKDSENLHKYRGKRICKGHRALRRKKVALNPGDLVSLNGEILVVHGTHTKKNGSVNVEFKTPSRGGKKSASLKKLKIVKTSNLMHSAWTKVA

SEQ ID NO: 9553 - protein, 431 aa, Moorena sp.
MVYVLDINGQPLMPTARHGKVRRLLNSHLAKVVKRCPFTIQLLYQSTKEIQPVSLGVDAGSKHIGLAATIEQKVLYQEELTPRNDVVKLLSAKRACRHSRRNRKTRYRKPRFNNRVHSKHKGWLAPSVEVKIQEHITAIKNICKILPASEIHVETAEFDLQRLKAMEEGKTFPVGTDYQLGEQYDFYNTRQYVLHRDGYTCQCCGVHDKDVKLHVHHIESRQTGGNAPNNLITLCEHCHKALHEGKIKLPKGKKRGKSHRDAAFMGIMRNTLLERLKKEVSVPVMMTYGYITKYWREKADLEKSHINDAICISKHPYTKPLDTYYLTKVVRHHNRQIHKANFSKGGIRKRNQAPYLVKGFRLFDKVLYQGKEYFIFGRRTTGYFDIRTLDGTKANKGSVSYKKLRIQDTAKAYLKEVRAIPHMNKFTCDLA

SEQ ID NO: 9554 - protein, 449 aa, unidentified; identical to SEQ ID NO: 4729
  REGION 1..449: note = Synthetic metagenome

SEQ ID NO: 9555 - protein, 451 aa, unidentified
  REGION 1..451: note = Human gut metagenome
MSVAVMSKTGMRLMPTSEYRARKLLKSKKATVYRYNPFTIQLTERETGDVQTVELCMDTGYLHIGTSVKSEKHEYFGVQIDTLTDEKQKHDACRMYRRQRRGRKRYSQSRFNNRKRSDGWIAPSLEHKKDIHIQTISRICNAMPITNITLEMGNFDTQVLKALEENRPLPQGTDYQHGERYGIATLREAVFARDKYTCQCCRKTIADGAILHVHHIIYRSRGGTNRMSNLATVCDRCHTPANHKPGGRLYNWKPKIASFKGATFMTAVRWKMYNEVKSKFSDINIHITYGAETKEQRRAFDITKSHVNDALVMGQFHPKHRSRPVCYKKKRRNNRCLEKFYDAKYIDSRDGKKRSGQELFNGRINRNHKKDSENLHQYRQQKVSSGRKTIRKQHYSIQPHDIVVFNRQQFETSGCHCNGARAILLPQKKSVAIKKLSIHKYAGGYFKSDFT

SEQ ID NO: 9556 - protein, 431 aa, unidentified; identical to SEQ ID NO: 4463
  REGION 1..431: note = Human gut metagenome

SEQ ID NO: 9557 - protein, 431 aa, unidentified
  REGION 1..431: note = Human gut metagenome
MNRVFVLSKTGKTLMPCHPARARQLLHDKKAVIKRLYPFTIQLTHRSEEYIQPVELKFDPGSKQTGIGIVLHGKNRFSAIYGTVLTHRGNEIKNNLDSRRMIRRSRRNRKTRYRQVRFLNRVRSKHKGWLAPSVQSRVDNIVEWSKRFIRYVTVGFITVESVKFDMQKMENADVDGIEYQRGTLFDYEVKEYLLEKYNYSCVYCGAKNVPFEKEHVIPRSRGGSNRISNLVLSCRSCNEKKDNLPIEEYLKDNPALLKKIKAQLKSSLKDAAAVNITRKQIVKELENLNVPVLTGTGAETKYNRVSQGYKKEHYIDALCAGTTGTKVYIPSTLKPLLIKKERRNNRQMCLVDKYGFPRGKAKGSKIVHGFKTGDIVKAVVLKGKKKGTYKGKVAVRSSGSFNIKVKQGVVEGIGWKNCVMLYRFDGYSYAY

SEQ ID NO: 9558 - protein, 431 aa, unidentified
  REGION 1..431: note = Human gut metagenome
MPNKVYVINKHGRPLMPCSPAKARHLLDEGKAKIKKRTPFTIQLVYGSSGYTQEVILGVDAGSKTIGMSVSTTKEELLSAEVKPRNDVVDLQSTRREFRRARRNRKTRYRKPRFDNRVRSKHKGWLAPSVEVKIQEHITAIKMVCRILPVSKVVIETAEFDLQLLKAIADGKPVPQGEDYQKGEMCGHYNVRQYVLWRDDYTCQCCGTHATKKKEVRLHVHHLESRKVGGDAPDNQVTLCESCHEKLHKGLITAKDFKKRKRRSTRDATFMGIMRKTLMQRLCSELPIPVVETRGYITKATREKLLVLPKSHTNDALAIAQGKQGFNVGYLPGILQIDKIYTIRPVRHHNRQLYKATILKGGIRKSNQTKKYVFGYRLFDKVQFNGQDCFIWGRRTTGIFTIKTINGKMIKDGISFKKLKLLEKSTSYLIA

SEQ ID NO: 9559 - protein, 526 aa, Streptomyces sp.
MATFHVGQQTHQVVLPQQLALEFASADTPGSRDETGREDHTDDVVPGVEHGRGETGKGVTESDRRHPGTSLPGEGLAARLSHLPHPVVFVLDRHGQPLQPTSPARARKLLKAGRAVVARHTPFVIRLKDRTVAESVVSGVELGIDPGSKYTGLAVFAADGDGVRRGLYHVELQHRGSQIRDKLTARAAHRRGRRSRNLRYRAPRFNNRVRPGGWLAPSLRHRVETTMTWTTRLARWAPVTAVHVELAAFDTQLLTSEDTLVGVEYQHGTLAGTEVREYLLAKWQRRCAYCGAYGVPLNIDHIHPRSRGGSDRISNLTLACIPCNHAKGSSSIEEFLRDKPTLAARIRAQAKKPLRDAAAVNATRWTLCRALESAFPCVRIATGGRTKWNRQRVGLSKTHTLDALCVGVLNAVTVHPRRVLIVTAGGRGRYRRTDLDRHGFPRKINPRSKAVFGFQTGDYARAVIPTGRYAGTHVGRVAVRTSGRFNMRTRHSLIQGIHHRHVRLLQRADGYAYATREEAGVRWLSR

SEQ ID NO: 9560 - protein, 512 aa, unidentified
  REGION 1..512: note = Human gut metagenome
MSTVYVLNKNGKPLMPTTRCGRVRHLLKEQKARVVTSNPFTIQLLYETDDVVQPLYLGIDPGRTNIGVAVVKTDGTAVFTAHLETRNKEIPKLMQGRKKARRARRTNGRRCRRQRRAKANDTISKKCVKQDTAQSGSASKRAKKIGVIKRHLPGCEKGVLCIGIKNKEAKFSNRTRPEGWLTPTANQLLQTHINLVKKIRKFLPISDVVLEINKFAFMQLDNPNIQKWQYQQGPLYQKASLEEAVSEMQEHHCLFCKKPIAHYHHVVPQSENGSDTIGNIIGLCTKHHDLVHKDTAWQKKLAKKKTGLNKKYGALSVLNQIIPALTKGLGSRFQGHFYVTTGKSTYDYREVHGVSKDHWLDAYCIACSVLPNDVCDSDINNRVPYELKQFRRHDRRALHKANINRVYTLNGKSVATNRHKAIKQTTDSLEEFRQCQPDDVCKLKVKEHHPEYRNPERNFPGCVFLVGKHTHVMQGTSGSHNGQADGYYDTNGNSYSSGKCKFVAKNKGIVFA

SEQ ID NO: 9561 - protein, 415 aa, unidentified; identical to SEQ ID NO: 6534
  REGION 1..415: note = Human gut metagenome

SEQ ID NO: 9562 - protein, 425 aa, unidentified; identical to SEQ ID NO: 3151
  REGION 1..425: note = Human gut metagenome

SEQ ID NO: 9563 - protein, 415 aa, Bacillus sp.; identical to SEQ ID NO: 2431

SEQ ID NO: 9564 - protein, 440 aa, unidentified
  REGION 1..440: note = Human gut metagenome
MPTNSYRARRLLKSKRAVIYKYRPVFTIKLVDRANGYTQPIEYKCDTGYQNIGISICSDTKEFVNEQRDLLKDEVKRHSDSRKYRRTRRNRLRYRKKRFDNRRGMISEDGFAPSIRNKRDVHVRLYEEYYKVFPITKAAFEMGQFDTQVLKAVEAGLPVPAGTDYQRGEQYGYATLREAVFARDNYTCICCGKSAIKDGVKLRIHHIGYLSGDRSNRMANLGSVCESCHTSKNHKPGGKLYNLKPKLKTFKGATFMTTVRYSMVKQLKAATPDVDIKVTYGAATKLARRVLSVKKTHSNDAYCMGEFHPKHRSDFKHYSKCRRNSRVLSRFYDAKYRDLRDGSVKTGSQLSCGRTNRKISRHTEFDERIYRAHKISRGRVSIRRQHYSLRPGDKVLYDGKVYFVTGMQNNGTCVKLTNGKVYSLKKVCVLQHCNAWTAVI

SEQ ID NO: 9565 - protein, 497 aa, Streptomyces sp.
VLPQQLALEFESADNPGIRDETGLGRRKASGVEHVRGEITGSAPTAGGVTPDHQVREPGREADPAVFVLDKHGTPLQPTSPARARKLLVSGRAVVARHTPFVIRLKDRTADASEVDGVELGIDPGSKHTGLAVFTARDGERRGRFAVQLDHRGAAIRKKLEQRSAYRRGRRTRNLRYRAPRFLNRTRPKGWLPPSLQHRVDTTMSWTGRLARWAPVRTVHVERVAFDTHAISAGKPLEGAEYQHGTLHGTEVREYLLAKFGRACSYCGATGVPLNIDHIRPRSRGGSDRVSNLTLACIPCNQAKGHRPVEEFAPKQAADILKRAKAPLRDAAAVNATRWALWRALDARLPTRTASGGRTKWNRVRCALPKTHTLDALAVGDLDTVTAWPRTVLVVKATGRGTYARTRADKHGFPRLRLPRTKQFFGYATGDLVRAVVPSGKNAGTHTGRIAVRSSGSFAVRTAGGLYTARYKYFRLLQRADGYAYTTQPEGGPSDAP

SEQ ID NO: 9566 - protein, 413 aa, unidentified; identical to SEQ ID NO: 2636
  REGION 1..413: note = Human gut metagenome

SEQ ID NO: 9567 - protein, 431 aa, unidentified
  REGION 1..431: note = Human gut metagenome
MPGKVYVISRLGHPLMPCSPAKARHLLDDGKAKVVKRTPFTIKLLYGSTEYTQPVILGVDAGSKTIGLSASTTKEELFAAEVMPRNDVVENLSTRREFRRARRNRTTRYRKPRFNNRVHSKNNGWLAPSVEVKIQEHITSIKRVCAILPISKIVVETAEFDLQLLKAVQDGKPVPEGEDYQKGEMYGSYDVRQYVLWRDNYTCTCCGVKGTDKKPVKLHVHHFESRKHGGNAPDNYGTLCEDCHKKLHLGIITDISLKTRKRPSTRDAAFMGIMRKTLMQRLITGLSIPVAETKGYITKAAREEILKLPKTHTNDALAIAQGRHGFGIREPAYVKPTNRIYTVRPVRHHNRQLHKATILKGGIRKLNQASKYIFGFRLYDKVLYQGGECFVWGRRTSGSFLLRTIDGTKVKDGVGYRNLTLLERSTNYLIA

SEQ ID NO: 9568 - protein, 437 aa, Clostridium sp.; identical to SEQ ID NO: 8243

SEQ ID NO: 9569 - protein, 431 aa, Aphanizomenon sp.
MSKVFVLDTEKRPLDPINPAQARQLLRNKKAAIFRQFPFTIILKKSCPDSPVSSLRLKIDPGAKFTGMALVNDSTGEVVFAAELKHRGFAIRDALTSRSQLRRSRRARKTRYRQPRFLNRTRPERWLAPSLQSRVENIKTWVERLRKLAPIRAISQELVRFDMQLMANPDIQGKEYQQGTLAGYESREYLLEKWGRQCAYCGVKDVPFQVEHIYPRAKGGSNSITNLTLSCEKCNTKKGTKDIKDFLKKDRSKLEKILEQAKRPLADAAAVNTTRLALLFVVKATGLPVETGSGGLTKFNRSQQNLEKTHWIDAACVGQSTPILNIKGVKPLLITANGHGTRQSCRTDKYGFPSRYVPRFKFVNGFQTGDIVKAVVTKGKKIGAYIGRVAVRTSGSFNISTISGLIQGISYKCCKSIHKKDGYEYGKSKIC

SEQ ID NO: 9570 - protein, 424 aa, Anabaena sp.
MQNYVFVVDTNKQPLNPIPPARARELLTKEKAAVFRMYPFTIILKHTVLNPTLKPLTVKLDPGSKFSGIAVLDEENVIWVAELEHRGGQIKNALESRRSLRRSRRNRKTRYRQPRFNNRKRTEGWLAPSLMHRVFTIETWVKRLCRYAPIVQITMELVKFDTQAMQNPEIDGVEYQQGELAGYEVREYLLEKWGRKCAYCDQEAVPLQIEHIHPRAKGGSNRVSNLTLSCQRCNTKKGTRSIDEFLQKNPSRLKKIQRQAKQPLRDAAVVNSTRWALFQTLKNILPTTTGTGGQTKYNRTRLELPKHHWVDAACVGNVEKLNLLTQQPLRIKCTGWGTRQMCGTDKYGFPIRHRERKQVHFGFRTGDIVKAVVLSGKKVGQYVGRLLCRKIGSFDIVTHVGRVAGISYRFCTPIHKQDGYSYKF

SEQ ID NO: 9571 - protein, 544 aa, unidentified; identical to SEQ ID NO: 3572
  REGION 1..544: note = Human gut metagenome

SEQ ID NO: 9572 - protein, 431 aa, unidentified
  REGION 1..431: note = Human gut metagenome
MPNKVYVINKHGRPLMPCSPAKARHLLDEGKAKVKKRTPFTIQLIYGSSGYTQEVILGVDAGSKTIGMSTSTKKEEVFAADVTPRNDVVDLMSTRREFRRARRNRKTRYRKPRFDNRVRSKHKGWLAPSVEVKIQEHITSIKRVCRILPVSKVVVETAEFDLQLLKAIADGKPVPQGEDYQKGEMYGHYNVRQYVLWRDDYTCQCCGAHATKKKEVRLHVHHLESRKVGGDAPDNQVTLCESCHEKLHKGLIAEKDFKKRKRRSTRDATFMGIMRKTLMQMLCSELPIPVVKTRGYITKATREKLLVLPKSHTNDALAIAQGKQGFNVGYLPGIVQIDKICTIRPVRHHNRQLYKAAILKGGIRKSNQAEKYVFGYCLFDKVQFNGQDCFIWGRRTTGIFTIKTINGKMIKDGISFKKLKPVEKSTGYLIA

SEQ ID NO: 9573 - protein, 446 aa, Moorena sp.; identical to SEQ ID NO: 2419

SEQ ID NO: 9574 - protein, 406 aa, Moorena sp.
PLNPISPKKARRLLDKGKAAVFRMYPFTIILKTAIANPTISPGQIKIDPGSKVTGFALVQDDQVIWGMELEHRGGLIKKKLESRSAVRRGRRNRNTRYRKPIFLNRKRPEGWIAPSLEHRVLTIETWVKRLIKFCPINEISVERVKFDTQKMQNPEINGIEYQQGDLAGYEVREYLLEKWGRECAYCGKQNIPLQIEHIHPKSKGGSDRVNNLCLACEKCNQRKGNRPIEEFLKKKPGLLQKIKNKAKQPLRDAAAVNTTRNRIVKVLKEVKPVVTGTGAQTKYNRTKLGLSKQHWIDAACVGDIKTLVLRTSQPLLVTCKGQGGRQKAALNKYGYPIRHNPLKPIKGWSSGDIAKNLLTGEFGRVNPRSKSNSFNYTAPGKKAISLHLKNLLRVHRKDGYSYGFC

SEQ ID NO: 9575 - protein, 420 aa, unidentified; identical to SEQ ID NO: 4198
  REGION 1..420: note = Human gut metagenome

SEQ ID NO: 9576 - protein, 430 aa, unidentified
  REGION 1..430: note = Human gut metagenome
MPKVYVLNRHGRPLMPCTPAKARHLLDAGKAKVRHRTPFTIQLLYGSTGYTQEVILGVDAGSKTIGLSAATETEELFSAEVKPRNDVVELMSARRQFRRARRNRTTRYRKPRFDNRVRSKHKGWLAPSVEVKIQEHMTAIRRACAILPVSKVVVETAEFDLQLLKAVAEGKPVPQGEDYQKGEMYGHYNVRQYVLWRDSYTCCICGVHGSVRKGVPLHVHHLESRRVGGDAPDNLVTLCTACHDKLHKGIIMAADIKKRKRRSTRDATFMGIMRMTLLRRLREQLPVPVVETRGYITKATRENLLVLPKSHTNDALAIAHGPQGFRAEYLPNTRQADRLYTIRPVRHHNRQLHKATILKGGVRKANQAEKYICGFRLYDKVLYNGIECFVWGRRTSGSFLLRQLNGEKVKDGVSYKHLKLLERSQSYLVA

SEQ ID NO: 9577 - protein, 413 aa, unidentified
  REGION 1..413: note = Human gut metagenome
MTSYAFVLDANGKQLAPAKEQKAWFLIRKKRAALVSKYPMVIQLKKEIPENEICKDEIRCGIDDGGLHVGIALVQKCKTKNKVVFKGTIEQRNDVKHLMEVRRSYRHYHRYHKRYRPARFDNRKSSKRKKRIAPSILQKRQAIIRVIHWLNKWINITNYWLEDVSIDIRALTDGYKPYRWQYQKSNRLDENIRKAAILRDGGKCMECGKLNCRLEVHHIKPRRRNGSDTLDNLITLCESCHQKTEGQEELYMDRYFSLLKSSDHKNLNYAQHVMIGKEWLRKQLSSLGVLYLTNGGDTANKRIDWNIEKSHANDAVCITNLQPDTYDMKEWTVKPMRRQSKAKTDNVLGIKHRDLVEYTFKNGETHRGYVTALYPEQKAINFQSPTKHCKKVNARKCKLLWKYSKIYWFENAS

SEQ ID NO: 9578 - protein, 453 aa, Cupriavidus sp.
MAVFVLDKHGKPLMPCTEKRARLLLERGRARVHRLMPFAIRLIDGRVADSEFQPLRLKLDPGSKGTGVALVRETTDVNGIRHAIVLSLAEILHRGRQISEALLARRSMRQARRGRKTRYRASRFHNRRKPKGWLAPSLRHRVETTVSWVSRFRALAPITALSTELVRFDMQAMQHPEISGIQYQQGTLQGYELREYLLEKFGRICAYCDAKDRPLEIEHIDARANNGSNRVSNLTLACRPCNQKKGALPLEVFLHNDPQRVRRIRAHMKAPLRDAAAVNVTRFALLDALKATSLPVETGSGAQTKYNRRRLDIPKAHALDAACVGEVQAILGWQRPTLCIKCTGRGSYQRTRLTANGFPRGYLMRSKRAFGFQTGDMVKAEVPAGKRAGTHVGRVAIRATGKFNIQTIGGAVQGISHKYCSILQRGDGYGYALVAHSQKKIESRTGATLRVAR

SEQ ID NO: 9579 - protein, 242 aa, unidentified
  REGION 1..242: note = Human gut metagenome
MSTIYVLSKDGKPLMPNFVHKETAWQEKLAKKKTGLNKRYGALSVLNQIIPALTKELSSLFPKHFFVTTGKSTYDYRAAHGVSKDHWLDAYCIAGSILPNDVCDNNINNRVPYKLKQFRRHDRRALHKENMSRVYTLNGKKVATNRHKAIEQTTDSLEEFRQNHPDDVCKLKVKEHHQEYRNPGRNFPGCVFLVGKHTHVMQGTSGSHNGKADGYYDTNGNSYSSGKCKFVAKKRRDCIYIN

SEQ ID NO: 9580 - protein, 446 aa, unidentified
  REGION 1..446: note = Human gut metagenome
CRKLLEVRRAVFYRHYPAVIILKDVDARNIYKLPSYRIKIDPGAVHTGIAIVCNETNEVMYFLQIEHRGSEVKKALITRKQTRRNRRSRETRYRRCKFKNGGDFDSSRKNGWLPPSVKSTADNVIHWVEKLCRYINITECSFEAVRFDSQLMDNPEIGGEEYQQGTLSGYELREYLMEHFRHTCQYCGGESGDPVLEWEHKIPRSRGGSDSVKNASLACSCCNRDKGNRTLEEYLEDSKHISPKGKSEKALNEARISHISGILEKGTIYGSNRYSAWVNSTRRYIEKYLFLMFDDVECCSGGRTKYNRIKLKLPKDHHYDALCVGSVPKEGYTDRTNSYVLYVKATGRGTRFRGQCNSCGVITVKYKNNSKRKFGFQTGDIVQLNKPKGKDTGQYTGKVAVRSSGSFDLIRKGCKRITANYKYFRMMQYSDGYEYLGPLRPIPHSA

SEQ ID NO: 9581 - protein, 456 aa, unidentified
  REGION 1..456: note = Human gut metagenome
MNTCVCVLSNNGERLMPTFRLGKVRRLLKDGKAKIVKHHPFTIQLLYDSKTNKQPIEICEDVGYNYIGISVKSESHEYVSAQYDTLQDEKEHHDDCRKMRRARRNRLRYRKPRFDNRKRSEGWLAPSLKHKKELNVNVVKMYCAVMPITHATVEVGSFDTMLVKAIQEGKAIPEGADYQKGPRYNLATLREAVFYRDNYVCKVCGRKATEGAILHMHHMFYWKGRHGYKLDELVTACEKCHTPANHQKGGKLFGFGEDKEFADLSGAAFMNAVRWQIVNALHTTYSKEFVTITYGAMTKEKRIALQLEKSHNNDAYAMGDYHPACRCKFIHYQKRRRNNRVLEKFYDATYIDTRTGNKAKGKELFNGRISRNHKKDSENLHKYRSKKVSKGRRSIRRRRYAIQPYDTVRLEGKTYITSGCHNKGTRLLIPVNGKSKSVAISKVQAVCHAGAWIQII

SEQ ID NO: 9582 - protein, 442 aa, unidentified; identical to SEQ ID NO: 2903
  REGION 1..442: note = Human gut metagenome

SEQ ID NO: 9583 - protein, 396 aa, Moorena sp.; identical to SEQ ID NO: 7124

SEQ ID NO: 9584 - protein, 414 aa, unidentified; identical to SEQ ID NO: 2588
  REGION 1..414: note = Human gut metagenome

SEQ ID NO: 9585 - protein, 448 aa, Variovorax sp.
VSVYVLDRSGRPLMPCSEKRARKLLNCGRARVHRLQPFVIRLVDRTQDDCTLQHLRLKLDPGSKATGAALVRESESTDATGEVRRAATVVNLMEIIHRGRQISEALTARRQMRRRRRGNLRYRAPRFLNRCGVKTGWLAPSLQHRVDTTMAWVKRLQRWAPIKSISSELVCFDMQALQNPEISGMEYQQGTLHGYEIREYLLEKWGRACAYCGTKDVPLQIEHIQAKARSGSNRPSNLTLACQCCNQKKGSRPIEEYLAKDPKRLAHILAYAKRPLKDAAAVNATRWALADALKATGVPLELSSGGRTKFNRSMLSVPKTHSLDAACVGLVDAISGWVKPVLTVKCTGRGSYQRTRLDKFGFPRGYLMRSKRVHGFGTGDMVIAKVPKGVKAGVHAGRVAVRASGSFNVQTHRDGIAAVFQGINHRHCRVVQRNDGYGYFLNRAISKT

SEQ ID NO: 9586 - protein, 407 aa, unidentified
  REGION 1..407: note = Human gut metagenome
MVYVQDINGNPLMPTTRHGKARRLLKNNKAVVVNLCPFTIRLTYETTNYKQEIVLGVDAGTKHVGLSATTKSKELYSGEVILRSDIVDLLSTRRELRKTRRNRLRYRKPRFNNRIKSKRPGWIAPSVKYKIDAHIRVIDNVCSILPISRIVIEVAQFDTQKIKNPDITNIEYQQGDQLGFWNVREYVLTRDNHKCQYCKGKSKDKILNVHHIESRKTGGDSPSNLITLCETCHNEFHKGNIDLKVKREKSLRDAAVMGIMKWRLYEILKSIFPNVSMTFGYITKYNRIHNDIEKSHVSDAFVISKNFNAKRLNFSYKIKLVRRHNRQIHKMKIPKGGTKRPNQSPFEIFGFRLFDRVRFDSKFYFIYGRRKTGSFNIRDINGENKKDVIYKKLKLSRCKRFMIQKEM

SEQ ID NO: 9587 - protein, 427 aa, unidentified; identical to SEQ ID NO: 8384
  REGION 1..427: note = Human gut metagenome

SEQ ID NO: 9588 - protein, 462 aa, unidentified; identical to SEQ ID NO: 4058
  REGION 1..462: note = Human gut metagenome

SEQ ID NO: 9589 - protein, 414 aa, unidentified
  REGION 1..414: note = Human gut metagenome
MPCSSAKARLLLKEKKAIVVRRTPFTIQLTIATGETKQPVSLGVDAGYKHVGLSASTEKAELYASEVELRQDVSDLLSARRALRQCRRNRKTRYRAPRFDNRIRTKRKGRLAPSVENRINAHLSRIKTVLRLLPITKITVETASFDIQLLKNPNIAGKEYQEGEQLAFWNVREYVLFRDGHVCQHCHGRSKDPVLNVHHLESRRTGGDSPGNLITLCETCHRALHRGEMKLRAKRGQSLRAEAFMGIMRWEVLGRLKTSHPELEVNNTYGYRTKHVRIRNGIAKSHCADAFCIAGNLGAERLGEFFFQKQTRRNNRQIHKLSILKGGIRKRNQAPFEVKGFRLFDKVAYKGEEGFIFGRRSSGFFDVRKLDGTRISAGISCKKLHLLEKRQTYIKEIRKEEALPPLPDGRDLRA

SEQ ID NO: 9590 - protein, 512 aa, unidentified; identical to SEQ ID NO: 2745
  REGION 1..512: note = Human gut metagenome

SEQ ID NO: 9591 - protein, 415 aa, unidentified
  REGION 1..415: note = Human gut metagenome
MENEMAYCFVVDKNNRPLAPTKVNKGWYLVRKGRAKIKSRYPMVIQLEKEVEPDKYDESRMVVGIDDGSAHVGLAIVQKCPTKNKVVFKGTIEQRQDVKHLMDVRRGYRRYHRHHKRYRQARFNNRHSSKRSGRLAPSIKQKKDAILRVLYQLNRWIDIQEYCLEDVCIDIRAMTDGYNPYKWKYQKSNRLDENLRKAAIIRDGCKCQECGRSNCVLEVHHIRARKYGGADTIGNLITLCSGCHQKTEGREREFEDRYFKIIGSKPKRFDYAMHVMQGKNYLREKISELGPLHLTNGGETANKRINWNIEKSHSNDAICITDCVPDTCDVKEWIIRPMRRKSKAKTDNVLGIRHRDLVSYTYKNGEIHTGYVTALYPELLALNFQSKTKHCKKVNARKCRLLWKFDKIYWLEQRV

SEQ ID NO: 9592 - protein, 419 aa, Bacillus sp.; identical to SEQ ID NO: 2411

SEQ ID NO: 9593 - protein, 453 aa, Lactobacillus sp.; identical to SEQ ID NO: 4050

SEQ ID NO: 9594 - protein, 332 aa, unidentified; identical to SEQ ID NO: 8875
  REGION 1..332: note = Human gut metagenome

SEQ ID NO: 9595 - protein, 593 aa, Streptomyces sp.; identical to SEQ ID NO: 8708

SEQ ID NO: 9596 - protein, 416 aa, unidentified
  REGION 1..416: note = Human gut metagenome
MVYVLSQHGQPLMPTENHAKVRALLKHGKAKVIQRCPFTIQLLYESTTHTQKINLGIDAGSKTIGVSATTDSKVLYESEVVLRNDIVELLSGRRALRNSRRSRKTRYRKPRFDNRKKPDGWLAPSIRQKIETHVTVVGNVMKILPVTKIIVETASFDIQKIKNPEIEGEGYQHGEQLDFWNVREYVLFRDGHTCQCCKGKSKDNILNVHHIESRKTGGNAPNNLITLCETCHKAYHKGIITLPKEIHRGMRFRDAAFMGIMRWAFYDRLKELYNPLGAEVINTYGYITKNTRIEHGLPKEHYVDARCISDNPAAKPLDHYYFQKKVRCHNRQIHKNTILKGGIRKRNQASYEVKGFRLYDQVLWKGQKCFIFGRRSTGRMDLRLLDGTHINASVGHENLKLLSMRKNYLIEQRKAG

SEQ ID NO: 9597 - protein, 254 aa, unidentified
  REGION 1..254: note = Human gut metagenome
EVAQFDTQKINNPEISGKEYQEGDQLGFWNVREYVLARDGHKCQYCKGKSKSKILNVHHIESRKTGGDSPSNLITLCEICHKEYHKGNIDLKIRRGKSLRDAAVMGIMKWRLYEELKSRYDRVFMTFGYVTKYNRIKYGIEKSHTSDAFVISMNINAKRIERQYLKRLIRRHNRQIHKMKILKGGKKKNNQAPFEVFGFRLFDKVLYNNKIFFVYGRRKSGSFNVRDFNGENSKDVSRKKFKLIRGKRHPIILK

SEQ ID NO: 9598 - protein, 431 aa, unidentified
  REGION 1..431: note = Human gut metagenome
MPNKVYIINKHGRPLMPCSPAKARHLLDEGKAKVKKRTPFTIQLVYGSSGYTQEVILGVDAGSKTIGMSVSTTKEELLSAEVKPRNDVVDLLSTRREFRRARRNRKTRYRKPRFDNRVRSKHKGWLAPSVEVKIQEHITSIKRVCRILPVSKVVIETAEFDLQLLKAIEEGKPVPQGEDYQQGEMYGHYNVRQYVLWRDGYTCQCCGAHATKKKEVRLHVHHLESRKVDGDAPDNQVTLCESCHEKLHKGLIAEKDFKKRKRRSTRDATFMGIMRKTLMQRLCSELPIPVVKTRGYITKATREKLLVLPKSHTNDALAIAQGKRGFNVGYLPEIAQIDKIYTIRPVRHHNRQLHKATILKGGIRKSNQTEKYVFGYRLFDKVQFNGQDCFIWGRRTTGIFTIKTINGKMIKDGISFKKLKLVEKSTSYLIA

SEQ ID NO: 9599 - protein, 560 aa, unidentified
  REGION 1..560: note = Human gut metagenome
HAKASSSQGKHNLLFRQGRLIAKKVTYMSTVYVLNKDGKPLMPTTRGGHVRHLLKEQKARVVQSNPFTIQLLYETNDAVQPLYLGIDPGRTNIGVAVVKADGTAVFTAHLKSRNKEIPKLMQDRKRARRARRTNGRRHRRQRRAKANGTISKKCVKQTTTQNGSVSKRAKEIGIIKRHLPGCEKDVLCIGIKNKETKYTNRERPEGWLTPTANQLLQTHVNLVKKVQKLLPISDVVLEVNKFAFMRLDNPDIQKWQYQQGPLYKKESLESAVSEMQEHHCLFCKKPIDHYHHVVPKSENGSNTIANIVGLCAEHHNLVHKDVAWQEKLAEEKTGLNKKYGALSVLNQIIPALTNKLSVLFPKHFFVTAGKSTHDYRAAHGVSKDHWLDAYCIACSVLPSNVCDSNINNHVPYELKQFRRHDRRVLHKANMSRVYTLNGKAVATNRHKAIKQTTDSLEEFRQNYPDDVYKLKVKEHHPAYRNLNRNYPGSVFLVGKQAHVMQGIASSKDGKTTKYNDTNATTITAGKCKFVAKNSGILFVQCKFRKALSDGTTKKLQYPVR

SEQ ID NO: 9600 - protein, 470 aa, unidentified
  REGION 1..470: note = Human gut metagenome
MVGGVSQIFQKKEVSALDTVAVISASGRKLMPTNSYRARRLLKSRRAVIYRYRPVFTIKLVDRTNGYTQPIEYKCDTGYQNIGISICSDTKEFVNEQRDLLKDEVKRHSDSRKYRRTRRNRLRYRKARWNNRKGMISKDGFAPSIRNKRDVHIHLYEEYYKVFPITKAVFETGQFDTQVLKAVEAGLPVPAGTDYQRGEQYGYATLREAVFARDSYTCICCGKSAIKDGVKLRIHHIGYLSGDRSNRMANLGSVCENCHTSKNHKPGGKLYNLKPELKTFKGATFMTTVRYSMVKQLKAATPDVDIRVTYGAATKLARKELNVKKTHSNDAYCMGEFHPKHRSDFKHYRKCRRNSRVLSRFYDAKYMDLRNSSIKKGSQLACGRTNRRIPRHTELNERIYRAHKISRGRVSIRRQHYSLRPGDKVLYDGKVYFVTGMQNSGTHVKLTNEKVYSLKKVHVLQHCNAWTAVI

SEQ ID NO: 9601 - protein, 408 aa, unidentified; identical to SEQ ID NO: 3192
  REGION 1..408: note = Human gut metagenome

SEQ ID NO: 9602 - protein, 429 aa, Macromonas sp.; identical to SEQ ID NO: 6403

SEQ ID NO: 9603 - protein, 413 aa, unidentified
  REGION 1..413: note = Human gut metagenome
MTSYAFVLDANGKQLAPAKEQKAWFLIRKKRAALVSKYPMVIQLKKEIPENEICKDEIRCGIDDGGLHVGIALVQKCKTKNKVVFKGTIEQRNDVKHLMEVRRSYRHYHRYHKRYRPARFDNRKSSKRKKRIAPSILQKRQAIIRVIHWLNKWINITNYWLEDVSIDIRALTDGYKPYRWQYQKSNRLDENIRKAAILRDGGKCMECGKLNCRLEVHHIKPRRRNGSDTLDNLITLCKSCHQKTEGQEELYMDRYFSLLKSSDHKNLNYAQHVMIGKEWLRKQLSSLGVLYLTNGGDTANKRIDWNIEKSHANDAVCITNLQPDTYDMKEWTVKPMRRQSKAKTDNVLGIKHRDLVEYTLKNGETHRGYVTALYPEQKAVNFQSPTKHCKKVNARKCKLLWKYSKIYWFENAS

SEQ ID NO: 9604 - protein, 416 aa, unidentified; identical to SEQ ID NO: 7823
  REGION 1..416: note = Human gut metagenome

SEQ ID NO: 9605 - protein, 436 aa, unidentified
  REGION 1..436: note = Human oral metagenome
MTKTLTTRTTQACVLDQQGKPLMPMTRLGKVYRLLKTQKAHIVSYEPFTIQLDYEPDTHIIQPLTLGVDSGAIHSGYSVANEHREYYNAEVIARNDISNRLSERHMYRRNRRSRKTRYRQPRFNNRKNKKKGWLPPSLEQKVAVQVNEIDHIHRYFPIETIIVETAEFDIQKIKNPGISGIEYQQGTLQGYNVRNYLLEKHRRKCFYCGKAVSDFEVEHMLPKSKGGSNRIDNLTLSCHDCNEKKGTSTAEEFIQQTLPAKKATAKLKQLPQEKRLFKYMAHMNTTRWTLYDTIKGIYPNVKMTYGYITKYNRIQAGLPKAHHIDAKCITGFATVPSMSQTVVKVKMRRHNRQLHRATFSKGHVRKTASLPKTIFSFQLYDLVCFNNHRYYIKSRRSSGYFALVSVENLKNEERTYKKLTLLAHTNAYLTNHYVNA

SEQ ID NO: 9606 - protein, 458 aa, unidentified
  REGION 1..458: note = Human metagenome
MSTGLRAEQAEPAGIRKGDTLKVFVLNMRGKPLMPCSPAKARHMLKAGKAVVLRRTPFTISLTVATGETKQEVTLGVDAGAEHVGISATTEKEEVFASEVELRQDIKGLLADRLAFRRARRNRKTRYRAPRFDNRVRSKHKGWLAPSVENRIQAHISRIEAVCRVLPITKIVIETASFDIQKIKNPEIEGEGYQQGEQLGFWNVREYVLFRDGHVCQACKGRSKDLILNVHHIESRKTGGDAPGNLITLCEACHKAYHAGKLKQFSPRRGASFRAETFMGIMRWTLLERVRKAHLELPVENTYGYLTKHKRIVLGLPKTHCADAFCIAGNLSALRRGEFLYQRQTRKHNRQIHKCSILKGGVRKLHQAPFLVKGFRLFDKVKCKGRIGIIFGRRSSGYFDVRTLDGVWLSAGISSKKLMLLEKQTTFLTQLRKEVGASSPSERKRFPRRIIMIREQQP

SEQ ID NO: 9607 - protein, 442 aa, Lactobacillus sp.; identical to SEQ ID NO: 3226

SEQ ID NO: 9608 - protein, 538 aa, Streptomyces sp.
MTTFPAGEQTHRAVLPQQPALESARADTPGSRDETAHGHPAPARDTGREHGRGETDGRGTGHRRRHAEKAANRDGDVPPQHITHHGGTGSGRVFVLAKGGEPLMPCHPARARQLLTNGRAVVARHTPFTIRLKDRTDADSQVDGVQLRIDPGSKGTGIAITETKQESTPDGAATTVRRGLMSIELRHRGWQIHRAMRQRAGYRRRRRSANRRYRARRSHNRTRPKGWLPPSVQHRVDTTLATAHRLSQYAPISEIHIEQVAFDTHAMSAGCDLTTAEYRSGTLAGTEIREYLLATWGRTCAYCGASGVPLNIDHIRPRSRGGSNRVSNLTLACISCNQAKGSTHVEEFLAHHPARLAAIRAQIKSPLRDAAVMNATRQLLTDALAGLGKPVLTWSGGRTKWNRTAMGLPKTHTLDALCVGQLNHEAGNRIVRVPQQVQVITATGRGSYARTTPDRYGFPRLTRARRKRHHGFATGDLVHASVPRGNWAGTWTGRVSVRASGKHSLGTPMGRFTVSHVHLRLLQRADGYAYSCRQEAAE

SEQ ID NO: 9609 - protein, 448 aa, unidentified; identical to SEQ ID NO: 5196
  REGION 1..448: note = Fermentation metagenome

SEQ ID NO: 9610 - protein, 423 aa, unidentified; identical to SEQ ID NO: 3538
  REGION 1..423: note = Human gut metagenome

SEQ ID NO: 9611 - protein, 456 aa, unidentified; identical to SEQ ID NO: 5876
  REGION 1..456: note = metagenome

SEQ ID NO: 9612 - protein, 418 aa, unidentified
  REGION 1..418: note = Human gut metagenome
MVYVINKQGQALMPTERFGKVRRLLKNSLAHVVCRIPFTIQLDYDTTDYTQPVSLGVDAGSKHIGISATTSEKEMYAADVELRNDIVDKLSTRREQRRTRRSRLRYRKARFNNRVSSKRKGWLAPSVENKIQTHLTVVEKIHKFLPITNIVVETASFDIQKINNPSISGVEYQQGEQLDFFNVREYVLFRDNHTCQHCKGKSKDKVLNVHHIESRKTGGDSPNNLITLCETCHKAYHRGEFKLNIKRGKSFRDSAFMGIMRWSFYDRLKNIYPNVSMTFGYITKNTRITNDLPKEHYVDARCISGNPTAKPLGYYFYQKKVRCQNRQIHKANFLKGGRKKLNQAPFLVKGFRLFDLVEYQKDLYYIFGRRDSGFFDIRKLDGTKVNKGSINCKYLRLVDKRKSILIEKRMQVNLLTLR

SEQ ID NO: 9613 - protein, 419 aa, unidentified; identical to SEQ ID NO: 8922
  REGION 1..419: note = Human gut metagenome

SEQ ID NO: 9614 - protein, 427 aa, Moorena sp.
MSKVFVLDTNFTPLNPIHSAQARQLLRTKKAAIFRQFPFTIILKKSRPDSPVSLLRLKIDPGAKFTGMALVNDSTGEVVFAAELKHRGFAIRDALTSRRQLRRSRRARKTRYRQPRFLNRTRPEGWLAPSLQSRVDNIKTWVERLRKLAPIEAISQELVRFDMRLIANPDIQGQEYQQGTLAGYETREYLLEKWGRQCAYCGVKDVPFQIEHIHPRAKGGSNSITNLTLSCEKCNTKKGTKDIKDFLKKDLSKLEKILKQAKRPLADAAAVNTTRTALLEVLKATGLPVETGSGGLTKFNRSQQQLEKNHWIDAACVGKSTPILNIKSVKPLLITANGHGSRQSCRTDKYGFPSRHVPREKIHFGFQTGDIAKAVVTTGKKIGTYVGKVAIRSTGSFNISTKNGLIQGISHKFCKRIHAKDGYSYAV

SEQ ID NO: 9615 - protein, 323 aa, unidentified
  REGION 1..323: note = Human gut metagenome
RRSRRNRKTRYRAPRFDNRVHSKHKGWLAPSVEVKIQEHITIIKRICKILPISLVRVETAEFDTQRLKAMLAGKPLPVGTDYQLGEMYDEYNVRQYVLKRDNYTCQCCGAHTTAKKLVKLHVHHLESRKTGGNAPSNLVTLCTTCHKNLHKGRVTLDGKERGKPLRDAAFMGIMRKTLMARLKEELPIPVQGTYGYITKMRREQNDIKKGHTNDARCISKHPLAEPCSVCYRTKAIRHHNRQTHKANFSKKGIRKRSQMPYLVEGYRLWDKVLYKEQECFVSGRRSSGSFTLKKLDGTSVSKGVTFKKLRLLEPATNYLIERM

SEQ ID NO: 9616 - protein, 416 aa, unidentified
  REGION 1..416: note = Human gut metagenome
MVYVLDKNGQTLMPTDRHRKVRLMLQSGQAKVIKRCPFTIQLNYDSGHQTQEIFLGIDAGSKHIGVSATTKIKVLYEADVELRNDIVNLLSSRREFRRGRRNRKTRYRQAKFNNRRLGNGWLPPSIRQKIGTHLTVVENICKILPISRIMVETASFDIQKIKNPDIQGAEYQQGDQLGFWNNREYVLFRDNHTCQCCKGKSKDKILNVHHIESRKTGGNAPNNLITLCEICHTGYHKGAIQLPKTVKRGMRFKDAAFMGIMRWAFYEALKQQYEPVGTPVHNTYGYITKHTRIEHNLPKEHYVDARCISGNPDAFPNGEYYYQKKVRCHNRQMHKLTILKGGIRKQNQATYLVKGYRLFDKVSYQGKGYFVFGRRQSGFFDIRTLSGEKVNKGSLSCKKLKFIATRTYYLTERRAV

SEQ ID NO: 9617 - protein, 447 aa, Halolactibacillus sp.
LRVFVKSMRGSNLDPCKNQKARQLLKEKKAKIISYKPFTIQMLIATGETTHESHVGIDLGAKYTGVAITQEDRVLAKGNIECRQDIKGLLETKKIYRRSRRSRKTRYRKCKFKHKTTRVYSNKKGKWVKKKTPFTSPRPKSWLPPSLESRTQNVFFWIDTFTSLLPKVTLHIEVGKFDVQKMKNPGIQGKSYQEGDTFGYHDVRYYVFARDNYTCQVCKKKGNILNTHHIIYRSHGGSDAPSNLISVCTDCHTSDNHKRGRILWNWMEKRKKVPTYKEPPFMNALRIRTFRRYPDARIIYGSETTPRRKELHLEKTHYNDAIAISGIQHIKENPPTIFYIKQFRKKKRSLHEATARKGRKNKNLTQKRNKKNTKEMKGIHLNDTVRIFGKIGFVSGFTNVGLYVKDIHNAYITKPGKTYKQVSFKDVTVENHNNNWQFISHLASDGA

SEQ ID NO: 9618 - protein, 412 aa, Coprococcus sp.
MTNYVFVLDAAGKQLAPTKETKAWFFIRKEHATLVSKYPMVIQLNKEVSDDEICKDEIRCGIDDGGLHVGIALVQKCQTKNKVVFKGTIEQRNDVKHLMDVRRGCRHYHRYHKRYRQSRFNNRSSSKRGRIAPSILQKRQATVRVINQLNRWIHITNYWLEDVSIDIRALTDSYKSYSWQYQKSNRLDENIRKAVILRDECKCMECGKSNCRLEVHHIRPRRLNGSNTLSNLITLCEKCLQKTEGSEELFMDKYFSLLKSSDNKNLNYAQHVMIGKKWLREQLSNLGLLYLTNGGDTANKRIDWNIEKSHSNDAICITDLQPDTCDVKEWTIKPMRRQSKAKTDNVLGIKHRDLVEYTFKNGETHKGYVTALYPKQNAINFQSPTKHCKKVNAKKCRLLWKFNKIYWLDNVS

SEQ ID NO: 9619 - protein, 413 aa, unidentified; identical to SEQ ID NO: 9603
  REGION 1..413: note = Human gut metagenome

SEQ ID NO: 9620 - protein, 427 aa, Enterococcus sp.; identical to SEQ ID NO: 2410

SEQ ID NO: 9621 - protein, 528 aa, Glycomyces sp.
LRAAVTRPSQQIILEVNKLATYRVGQKTDPGMLPQLQALEFTAADNPRIGNETGRGGLQAPGGVHGRGEIRDPSPGIAGVTRESGACGRETAPCVFVLAKDGTQLDPCHPARARKLLNKGRAVVARHTPFVIRLRDRSAAESEVQGVEVGIDPGSKHTGIAVFADVGGGRRQGLYALQVNHRGGKIRDKLTARAAYRRARRGRNLRYRTPRFANRTRPQGRLAPSLQHRVDTTMSQIARLRRWAPVTAVHVERVSFDTHAMSAGQSLTGVEYQQGTLAGYEVRQYLLEKWGRACAYCGAGDTPLQVEHIRPKARGGSHRISNLTLACGACNQAKNTTPVEMFLADRSTLLARILKQAKAPLSDAAAMNATRNALWGSLTGTGLPAHSSSGGRTKYNRFITGAPKSHTLDGLHVGALRAVPSWPGQVLVVKATGRGTYCRTRTDAFGFPRLKMPRTKQIHGFQTGDLVRAVVLRGKYQGTHTGRVAVRSSGSHTVQTPQGPVKTSWKNLHLLQRGDGYTYHRQEETCRP

SEQ ID NO: 9622 - protein, 448 aa, Aneurinibacillus sp.
MVYVLNPNGEPLMPTKRFGKVRRMLKNKQAKVVRRRPFTIQLTYETTNYVQPVALGVDAGYQTVGFSAVSEKEELLSGECRLLTGMSERLKERAMYRRQRRSRLRYRAPRFDNRRRTQGWLAPSIQHKLDSHVRLVELVKKLLPVQKVIVEVASFDIQAIQNPEIAGTLYQEGEQLDFWNLREYILHRDHHQCQNPNCKNKAVNPILQVHHVGYWKGDRSDRPGNLVTLCEMCHIPANHQLNGFLYGWEPKTQSFRPETFMSIVRWRLTQLLGGAATYGYVTKHVRIQHGIEKSHTNDAFVIAGGTTQSRTAPFVLQQVRRNNRSLEKFYGAKHVDIRTGAKASGQDLFCGRRTRNREMAGENLRQYRGLKLCKGRRSIRRMRYPLQPMDTVRFDGKDYLVSGTNNKGKTVVLKGCVRVPSVKKVRVVKYGKGFCWLAGEDRRVSSPI

SEQ ID NO: 9623 - protein, 413 aa, unidentified; identical to SEQ ID NO: 2636
  REGION 1..413: note = Human gut metagenome

SEQ ID NO: 9624 - protein, 429 aa, Moorena sp.
MSKNPNQVFVLDSRKKPLTPCLPVIARKLLNAGKAKVFRLYPFAIILNKSVEEQPQPIEIRIDPGSKTTGIALVFLTQVIWGAELTHRGQAIKSRLETRRAIRRNRRNRKTRYRQPRFFNRIRRKGWLPPSLQHRVLTTITWVNRLCKLAPIKSIAFELVKFDTQKMQSPEVYGIEYQQGELQGYEVREYLLEKWNRKCAYCSAENLPLQVEHMNPRAKGGSNRVSNLCLACKKCNIKKGTEDIKDFLKSQPDLLKRIMSQAKASLKDAAAVNATKSALLEVLKATKLEHIYVGRGSLTKFNRTKLGLPKANWIDAACCGDVSQGLTLAINQPLLIKAMGWGSRQVVQTDKYGFPRKGYQPKKKVKGWKTGDIVSVIDGKYEGVKCKRIKTTRFKGNFDIRVNDTTVISVSRNQIKPVQRNDGYNYSFV

SEQ ID NO: 9625 - protein, 211 aa, unidentified
  REGION 1..211: note = Human gut metagenome
AKVKKRTPFTIQLVYGSSGYTQEVILGVDAGSKTIGISASTKKEEVFAADVTPRNDVVDLLSTRREFRRARRNRKTRYRKPRFNNRVRSKHKGWLAPSVEVKIQEHITSIKMVCRILPVSKVVVETAEFDLQLLKAIEEGKPVPQGEDYQQGEMYGHYNVRQYVLWRDNYTCQCCGAHPTKKKEVRLHVHHLESRKVGGNAPGNLVTLWRC

SEQ ID NO: 9626 - protein, 450 aa, Moorena sp.; identical to SEQ ID NO: 2935

SEQ ID NO: 9627 - protein, 396 aa, unidentified; identical to SEQ ID NO: 9321
  REGION 1..396: note = gut metagenome

SEQ ID NO: 9628 - protein, 414 aa, unidentified
  REGION 1..414: note = Human gut metagenome
MPCSPAKARLLLKEKKAIVKRRTPFTIQLTIATGETKQPVGLGVDAGYKHVGLSASTEKAELYASEVELRQDITDLLSARRALRQSRRNRKTRYRAPRFNNRIRTKRKGWLAPSVENRINAHLSRIETVLRLLPVTKITVETASFDMLLLKNPDIAGKEYQEGEQLGFWNVREYVLFRDGHVCQHCYGRSKDPVLNVHHLESRRTGGDSPGNLLTLCETCHKALHRREIKLKTKRGHSFRAEAFMGMMRWEVLNRLKASHSELEVNNTYGYRTKHARIVNGIDKSHCADAFCIAGNLGAKRLGEFFFQKQTRRNNRQIHKLSILKGGIRKRNQAPFEAKGFRLFDKVACQGEEGFIFGRRSSGSFDVRKLDGTRISAGISCKKLRLLEKRRTYLTEIRKEEALPPLPEGRGLRA

SEQ ID NO: 9629 - protein, 451 aa, unidentified; identical to SEQ ID NO: 3061
  REGION 1..451: note = Human gut metagenome

SEQ ID NO: 9630 - protein, 423 aa, Anoxybacillus sp.
VLDTNKRPLAPCHEAVARKLLKQGKAAIYRRFPFTIILKKSVDESEIKATYRLKIDYGSRHTGLAILRGQEVVWLGQLDHRTDIKERIDKRRAFRRARRNRKTRYRKPRFLNRKRKEGWLPSSLESRVQNIQTWVNRLKKLCPIGYISYENAKFDTQLMRNPEINGVEYQQGTLQGYEVREYLLEKFGRKCCYCGKENVPLEVEHIIPKSRGGTDRVDNLCLACHDCNQRKGSKTAEEFGYPHIQKQVKESLKDASAINSTRWKAYEVLKQTGLDVECGTGARTKMNRIRLDLPKTHYFDACCVGESTTNHLYFKTKEVLFIKAKGRGSRSRTNLDRYGFPRGYLARQKFFFVFQTGDMVKAVVPRGKYQGVWFGEVACRKTGSFDIKGKDGKRIAQGINYRYVQVIQRFDGYAYGKGVAELA

SEQ ID NO: 9631 - protein, 413 aa, unidentified; identical to SEQ ID NO: 2636
  REGION 1..413: note = Human gut metagenome

SEQ ID NO: 9632 - protein, 518 aa, unidentified
  REGION 1..518: note = Human gut metagenome
MTPKKRKEASRMSEYIYVLGMDGDPQMPTKRKRHVEKLLQAGRARVFRQIPFTIQLTYENKPVLQPVTIAEDPGRSNIGMAVVSLSGELLSAAVVQTRNKEIVKLMEKRKQHRRASRNGERKARQRLAKKCHTMIKTGFLMRKLPMYGKDKRVRCNVIKNTEAKFCNRKREDGWLTPSAEHLVRTHINLIHKMQKFLPITDVAIEIHRFAFLSLEDPSISGVDFQNGPLKGYDDLNVAIEDLQDGHCLMCNSPIEHRHHIVPRSMQGSNTIGNIAGLCCKCHERVHKDARFEDRLKKKKAGLNKRYAAVSVLNQAIPFICKRLEQEFGKEHVHYCSGRDTSMVRRSLGYHKTKEEQLHEVDAWCIAVLALQHVPEKAPEFDHVHEILQFRRQDRSRIKAQTSRAYYHEGKKIAKNRKKAEGQKDDSLQGWRKRQVERYGEEQTRKMISQLKVKKSIRRYNRLDRLMPGAVFYYQGVRYVMRGQHSNGQYLQAVGMRDKEFPAKKCKIVVHNQGLVFVS

SEQ ID NO: 9633 - protein, 414 aa, unidentified
  REGION 1..414: note = Human gut metagenome
MPCSPAKARLLLKEKKAIVKRRTPFTIQLTIATGETKQPVSLGVDTGYKHVGLSASTEKAELYASEVELRQDITDLLSARRALRQSRRNRKTRYRAPRFDNRIRTKRKGWLAPSVENRIDAHLSRIEAVLRLLPVTKITVETASFDLQLLKNPDISGKEYQEGEQLGFWNIREYVLCRDGHVCQHCYGRSKDPVLNVHHLESRRTGGDSPGNLITLCETCHKALHRGEITLKAKRGQSFRAEAFMGIMRSEVLNRLKASHPELEVNNTYGYRTKHARIANDIAKSHCADAFCIAGNLGAERLGEFFFQKQTRRNNRQIHKLSILKGGIRKRNQAPFEVNGFRLFDKVACQGEEGFIFGRRSSGFFDVRKLDGTRISAGISYKKLHLLEKRRTYLTEIRKEEALPPLPEGRGLRA

SEQ ID NO: 9634 - protein, 544 aa, unidentified
  REGION 1..544: note = Human gut metagenome
LYIKMTSCTCTVFPAYNYAKASSSQGKHNLLLRQERLIVKEVAYMSTVYVLNKDGKPLMPTTRCGHVRYLLKEKKARVVASKPFTIQLLYETDDVVQPLYLGIDPGRSNIGVAVVKTDGMAVFTAHLETRNKEIPKLMKKRKDSRRARRTNGRRCRRQRRAKANGTISKKCVKQTTAQNGSVSKRAKEIGVIKRHLPGCEKDVLCIGIKNKEAKFNNRTRPTGWLTPTANQLLQTHINLVKKIQKFLPISDVVLEVNKFAFMQLDNPNIQKWQYQKGPLYQKESLKSAVSEMQEHHCLFCKKKIDHYHHVVPQHKNGSNTIDNIVGLCTQHHDLVHKDATWQKRLAKKKTGLNKKYGALSVLNQIIPALTKELSSLFPKHFFVTNGKSTYDYRAAHGVSKDHWLDAYCIACSVLPNDTCDKTINSRVPYELKQFRRHDRRALNNENMSRVYTFNGKMVATNRHKATEQTTDSLEEFRQRQPNDVCNLKVKEHHPTYRNMSRNYPGSIFLVEKQVHIMQGIAGSKDGKATTYKDTNANSIAAGKC

SEQ ID NO: 9635 - protein, 448 aa, unidentified
  REGION 1..448: note = Human gut metagenome
MSTGLRAVQAEPAGIRKGDALKVFVLNMRGRPLMPCSPARARHLLKAGKAVVRRRTPFTIQLRIATGETKQNVTLGVDAGAKHVGLSAATEKEEVFASEVELRQDITGLLAARLSLRRDRRHRKTRYRAPRFLNRVRSKHKGWLAPSVENRIQAHMSRIDAVCRLLPVTRIVIETASFDVQKIRNLEVEGTGYQQGDQLGFWNVREYVLFRDGHVCQHCHGHSKDKILNVHHLESRQTGGDAPNNLITLCETCHKACHAGKIKLKVKRGQSFRAEAFMGIMRWTLLDRMRKAHSGLPVENTYGYLTKNTRITPGLPKTHCVDAYCIAGNLKAVRRGVCLHQRQVRKHNRQIHKCTVLSKTLKDGTKIGYRKLNQTPHLVKSFRLFDKVRCLGQTGFIFGRRSSGYFDVRRLDGVKLSSGISYRKLTLLEKRSTYLTELRKEDGASSPV

SEQ ID NO: 9636 - protein, 414 aa, unidentified
  REGION 1..414: note = Human gut metagenome
MPCSPAKARLLLKEKKAIVKRRTPFTIQLTIATGESKQPVTLGVDAGYKHVGLSASTEKAELYASEVELRQGITDLLSARRALRRARRNRKTRYRAPRFDNRIRTKRKGWLAPSVENRINAHLSRIEAVLRLLPVTKITVETASFDMQLLKNPDIAGKEYQEGEQLGFWNVREYVLFRDGHVCQHCYGRSKDPVLNVHHLESRRTGGDSPGNLITLCETCHKALHRGDITLKAKRGKSFRAEAFMGIMRWEVLNRLKVSHPELEVNNTYGYLTKHARIKSGITKSHCSDAFCIAGNLGAKRLGEFLFQKQTRRNNRQIHKLSILKGGIRKRNQAPFEIKGFRLFDKVACKGEESFIFGRRSSGYFDVRKLDGTRISAGISCKKLRLLEKRRTYLTEIRKEEALPSLREGRGLRA

SEQ ID NO: 9637 - protein, 420 aa, unidentified
  REGION 1..420: note = Human metagenome
MLVYVLKQNGQPFMPTERFGKVRRLLKEKKAKVVRREPFTVKLLYEPKTDVVQECYCGVDTGSKHVGVAVVGNDKVLYQSQVELRSDIKRKMNRRRVFRRTRRNRKTRYRKCRFLNRRNSIKKDRLPPSVKHKVQVHIDEIEFCKKILPISDKNLILEVSQFDTALMKKPSLISEKVKHWGYQKGFNYGHSSRRKAVLHRDNYTCQCCGKKNCQLQTHHIIFRSRGGTDDENNMITLCKECHKGVHDGTIVLDKKPKKMNLKHATHMSIIRSQLFKVYPQAMETFGFITSENRHHLGLGKSHYIDACVIASGGLEFEPLDVVYYKRKVSKGDYKLARGSRSEQKLPTGKLFGFRKFDKVKYLGKEYFIKGRAAKSGHADLMDIFGNKIDFSFMPKGHKKPKLQNCRRISARESYLLISQK

SEQ ID NO: 9638 - protein, 415 aa, unidentified
  REGION 1..415: note = Human gut metagenome
MENEMAYCFVVNKNNRPLAPTKVNKGWYLVRKGRAKIKSRYPMVIQLEKEVEPDKYDESRMVVGIDDGSAHVGLAIVQKCPTKNKVVFKGTIEQRQDVKHLMDVRRGYRRYHRHHKRYRQARFNNRHSSKRSGRLAPSIKQKKDAILRVLYQLNRWIDIQEYCLEDVCIDIRAMTDGYNPYKWKYQKSNRLDENLRKAAIIRDGCKCQECGKSNCVLEVHHIRARKYGGADTIGNLITLCSGCHQKTEGREREFEDRYFKIIGSKPKRFDYAMHVMQGKNYLREKISELGPLHLTNGGETANKRIDWNIEKSRSNDAICITGCIPDTCDMKEWIITPMRRKSKAKTDNVLGIRHRDLVSYTYKNGEIHTGYVTALYPELLALNFQSKTKHCKKVNARKCRLLWKFDKIYWLEQRV

SEQ ID NO: 9639 - protein, 574 aa, Nocardiopsis sp.; identical to SEQ ID NO: 3358

SEQ ID NO: 9640 - protein, 430 aa, unidentified
  REGION 1..430: note = Human gut metagenome
MPKVYVLNRHGRPLMPCTPAKARHLLDAGKAKVRRRTPFTIQLLYGSTGYTQEVILGVDAGSKTIGLSAATETEELFSAEVKPRNDVVELMSARRQFRRARRNRATRYRKPRFDNRVRSKHKGWLAPSVEVKIQEHMTAIRRACAILPVSKVVVETAEFDLQLLKAIANGKPVPQGEDYQKGEMYGHYNVRQYVLWRDSYTCRICGAHGSVRKGVPLHVHHLESRRVGGDAPDNLVTLCTACHDKLHKGIIMAADIKKRKRRSTRDATFMGIMRKTLMQRLCAELPIPVIETRGYITKATREKLLVLPKSHTNDALAIAQGKHGFNVGYLPGIVQSDKTYTIRPVRHHNRQLHKATILKGGIRKANQAEKYVCGFRLYDKVLYNGIECFVWGRRTSGSFLLRALDGTKVKDGAGHRSLTLLERSSNYLIA

SEQ ID NO: 9641 - protein, 512 aa, unidentified
  REGION 1..512: note = Human gut metagenome
MSTVYVLNKDGKPLMPTTRGGHVRHLLKEQKARVVRAKPFTIQLLYETNDVVQPLYLGIDPGRTNIGVAVVKANGTAVFTAHLETRNKEVPKLMQDRKKARRARRTNGRRCRRQRRAKANGTISKKCVKQDTAQSKNPSKRAKEIGIIKRRLPGYKKDVLCIGIKNKEAKYTNRTRPEGWLTPTANQLLQTHINLVRKIQKFLPISDVVLEVNKFAFMRLDNPDIQKWQYQQGPLYQKGSLENAVSEMQEHHCLFCDKPIDHYHHVVPQSENGSNTIANIVGLCAEHHNLVHKDAAWQKKLAEEKVGLNKKYGALSVLNQIIPALTNKLSVLFPKHFFVTAGKSTHDYRATHGVSKDHWLDAYCIACSVLPSDVCDSNINNHMPYVLKQFRRHDRRVLNNENMNRVYTLNNKAVAINRHKAKDQKTVSLEEFRKEHPDDVCKLKVKEHHPTYRNMNRNFPGSVFLVGKQIHVMQGIASSKDGKATKYNDTSATAIAARKCKFVAKNTGILFV

SEQ ID NO: 9642 - protein, 398 aa, Moorena sp.; identical to SEQ ID NO: 7752
  SITE 26: note = misc_feature - Xaa can be any naturally occurring amino acid

SEQ ID NO: 9643 - protein, 324 aa, Nostoc sp.; identical to SEQ ID NO: 8503

SEQ ID NO: 9644 - protein, 442 aa, unidentified
  REGION 1..442: note = Human gut metagenome
MSTSVFVLDKKHRPLMPCRPARARRLLRAGRARVVKRFPFVIRLVDRTVEQSEVQPVLIKLDPGSRETGAAVVRDDGKKRHHALAFFVIEHRGGAIRDALKARSAFRRRRRSQNLRCRSPRFLNRVKPKGWLPPSLRHRVETTLSFVRRMCRYLPVSGIAAELVKFDSQKLQTPEVSGIEYQQGTLFEYEVREYLLEKFGRKCVYCGAEGVPLNIDHVVPRAKGGSNRVSNLVLACVSCNQKKGARSLEDFLKGKPEVLARVRRELKTPLRDAAAVNATRWVLFNELKATGLPVETGSGALTKFNRHAFGVEKEHWLDALCVGRLNGAVTRKGLNVLEIRCMGRGSRQRTRLTKYGFPRGYLMRQKCVHGFATGDMVEANVPKGKKAGLWRGRVAVRVSGSFNIQTPKGVIQGVGWKHCRLISHNDGYGYAWLGHAPHSSPA

SEQ ID NO: 9645 - protein, 437 aa, Clostridium sp.
MVYVLSKEGKPLMPTNRYAKVRVLLKSKKAVVVNSKPFTIKLSYNTEDFVQPITLGIDSGYLNIGFSAITKEKELISGEVKLLKGMSERLKEKAMYRRQRRSRLRYRKPRFDNRKRSKDWLAPSIQHKYDSHIKFIDKLKKLLPITNIIIEVANFDTHKLKDSSIEGAAYQNGEQKDFFNLREYILHRDGHKCQNPNCKNKNAESILQVHHIGFWKQDRSDRPGNLITLCNKCHTPKNHKEKGFLYGWQPKVKSFKEATFMSMIRWRLVNTLGCKYTYGYITKYNRITLKLEKTHYNDAFCIAGGSNQNRVKPLIFEQIKRNSRSLQKFYDAKVIDIRTNTKVSGLELFNGRRTRNKNLNSENLRKYRGVKVSKGQRRIRTKRYFYQPGDLVKYEDKVYTVKGTQNKGKYIALKELKKVPKVELLAPYKFRKGLVCV

SEQ ID NO: 9646 - protein, 427 aa, Anabaena sp.; identical to SEQ ID NO: 5141

SEQ ID NO: 9647 - protein, 415 aa, unidentified; identical to SEQ ID NO: 3018
  REGION 1..415: note = Human gut metagenome

SEQ ID NO: 9648 - protein, 490 aa, unidentified
  REGION 1..490: note = Human oral metagenome
MYVVYVLDRQGKPLMPTKRFGHVRRMLKTGKAKAISTKPFVIQLQYESTDFVQPLYGGTDPGRTNIGEAVLNNKGEVVYAAHVLTRNKEIPKLMADRAAHRKASCRGERLRRKRRAKANGTMTCFPEGRKLPGYKDGVLELKDIINTESRFNNRKRPAGWLTPTARQCIQTHLNMVQNICKILPVTNWTLEYNRFAFMQLEDGSVCGWDFQNGRLKGYASKEDYIYALQGGACVCCGASIEHYHHIKPRHKGGSNTHENLVGLCSVCHAEIHIGKRNLDKIGKYKKYAGTSIVNIAIPFIWDGIVKMFGDKAHICEGQETAELRKANSIPKEHFADAVCIAGIGYGITPQYDDNQPFKLRQFRCHDRSRINAQVERTYLDGKTIVAKNRKPRFEQKGDALSDLQSKIAKEHGELAARRAVSKLVVKKSYRRYNVPERIKPSAVFMFNNKKYLLRGQLTNGMYYRAFGEGTKNFPSRNCEVVSSGCSLTYM

SEQ ID NO: 9649 - protein, 281 aa, unidentified
  REGION 1..281: note = Human gut metagenome
VTVARVCEILPVSQIIVETASFDIQKIKNPEIQGVEYQRGEQMDFWNVREYVLFRDGHICQCCKGKKKDPVLNVHHIESRKSGGDAPNNLITLCETCHKGYHNGTIKLPTKIKRGMKFKDAAFMGIMRWTFYNTLKENYEPDIPVSMTYGYLTKNTRIQHNLPKGHHIDARCISGNPGAKSDGVYYYQKKVRCHNRQIHKFNTLRKGVRKLNQSEYLVKGYRLFDKVRYQGKEYFVFGRRKTGFFDIRTLSGEKVNNGSLSIKKIAFVDTRKNYITERRTA

SEQ ID NO: 9650 - protein, 435 aa, Moorena sp.
MYVYVINRHGEPLMPCKPQKARVLLQNGKAAVVKRNPFTIKLIYGSSGYKQPVTLGMDAGSKHVGIAATTEKNVLYAEELSPRNDVVDLLSTRRQNRRTRRTRKTRYRQTRFENRVHSKPKGWIAPSVEVKIQEHVSAITRITKILPITKIRVETAEFDTQRLKAMEEGKPLPVGTDYQLGEMYDEYNVRQYVLKRDNYTCQFCKKHKDGTKFHVHHIESRKTGGNAPDNLVTLCEECHKAIHDGTKKLPDRRRGHSFKDAAFMGIMRKTLVARLREKYEPLGIHVQETYGYITKFWRERYGLEKSHINDAIVITKNYAAKYDGGYYLSKAIRHHNRQIHKNAILKGGIRKRNQALHTVKGFRMFDTVEYEDKEYFVFGRRTSGFMDIRTLDGTKVNKGSVSFKKIKYLSTNKGVLTERRMAILPADKSAGFLAR

SEQ ID NO: 9651 - protein, 421 aa, Moorena sp.; identical to SEQ ID NO: 4235

SEQ ID NO: 9652 - protein, 448 aa, Thiorhodococcus sp.
MAVFVLDKKKRPLMPCSEKRARLLLKRERAVVVRLAPFTIRLKDRVGGATQPLRIKLDPGSKTTGLALVREEEIVDPETGEVTRTAHVVWLGELTHRGHQIREALTARSAMRRRRRTANLRHRAPRFDNRTKPCGWLAPSLRHRVETTVTWVERLRRLAPITAISQERVRFDMQAMQNPEISGLEYQQGTLAGYEVREYLLEKWRRTCAYCGAKDIPLQIEHIQPKSMGGSNRISNLTLACAPCNQKKGNRPVTVFLANKPDRLKRIQAHVSAPLRDAAAVNATRWALFESLKATGLPVETGSGGCTKFNRMRLGVPKTHALDAACVGQVDALHGWQCPTLAIKATGRGSYQRTRLDRFGFPRGVLMRQKRVHGFQTGDRVIACVPTGKKAGTYVGRVAIRATGSFNIQTAGAVVQGLSYRYCRTLQRADGYGYSFNPTPKEEARQAA

SEQ ID NO: 9653 - protein, 411 aa, unidentified
  REGION 1..411: note = metagenome
MVYVQDINGKPLIPTTRYGKVRRLLKANKAVVVNICPFTIKLTYVTSDYKQEIVLGVDAGTRHIGLSATTKSKELYSSEVILRNDIVDLLSTRRELRRTRRSRLRYRKPRFNNRIKSKKQEWIAPSVKYKIDAHIRVVEKVYSILPVSHIIIEVAQFDTQKIKNPDISGKEYQEGDQLGFWNVREYVLARDGHKCQHCKGKSKDAILNVHHIESRKTGGNSPSNLITLCETCHKEYHKGNIKLKVKRGTSLRDAAAMGMMKWKLLDKLKSLFPNVSMTFGYITKHNRINNNIEKSHISDAFVISKNFNAKRLNLQHKIKLVRRHNRQIHKMKIQKGGIKRPNQSPFEVFGFRLFDRVKFNDKFYFIYGRRKSGSFNIRDINGENSKDIMYKKLNLLRCKRFMIQIETKQTK

SEQ ID NO: 9654 - protein, 465 aa, unidentified
  REGION 1..465: note = Human gut metagenome
MSTCVCVLSNSGERLMPTFRLGKVRHLLKDGKAKIVKHHPFTIQLLYDSKTNTQPIEICEDVGYNYIGISVKSQSHEYVSAQYDTLQDEKACHGSCRKLRRTRRNRLRYRKPRFDNRKRGEGWLAPSLKHKKELNVNVVKMYCAVMPITHATVEVGSFDTMLLQAIRKGESKPEGADYQKGPRYNLATLREAVFYRDNYTCQVCGRKIADGAILHMHHMFYWKGRHGYQLDELVTACEKCHTPANHQKGGKLYGFGEDKEFANLSGAAFMNAVRWQIVNALYATYGKEFVTITYGAMTKEKRIALHLEKSHNNDAYAMGSFHPVNRCAFEHYEKMKRNNRILEKFYDSQYIDTRTGELTNGKSLFNGRISRSHKKDSENLHKYRGKRICKGHRALRRKKLALNPGDLVSLNGEILVVHGTHTKKNGSVNVEFKTSSRSGKKSASLKKLKIVKTSSLMHSAWTKVS

SEQ ID NO: 9655 - protein, 442 aa, unidentified
  REGION 1..442: note = Human gut metagenome
MSTSVFVLDKKHRPLMPCRPARARRLLRAGRARVVKRFPFVIRLVDRTVEQSEVQPVLIKLDPGSRETGAAVVRDDEKKRHHALAFFVIEHRGGAIRDALKARSAFRRRRRSQNFRCRSPRFLNRVKPKGWLPPSLRHRVETTLSFVRRMCRYLPVSGIAAELVKFDSQKLQTPEVSGIEYQQGTLFEYEVREYLLEKFGRKCVYCGAEGVPLNIDHVVPRAKGGSNRVSNLVLACVSCNQKKGARSLEDFLKGKPEVLARVRRELKTPLRDAAAVNATRWVLFNELKATGLPVETGSGALTKLNRHAFGVEKEHWLDALCVGRLNGVVTRKGLNVLEIRCMGRGSRQRTRLTKYGFPRGYLMRQKCVHGFATGDMVEANVPKGKKAGLWRGRVAVRVSGSFNIQTPKGVIQGVGWKHCRLISHNDGYGYAWLGHAPHSSPA

SEQ ID NO: 9656 - protein, 477 aa, unidentified
  REGION 1..477: note = Human gut metagenome
LYTKPLDNIGEGSLLPSGEINLKGMTFMVYVKSIDGKALMPTSNAKARKLLKQKKAKVVSLRPFVVKLTYKTKTEYTQKLNLGVDSGYSNIGFSVIDAKQEYIAGEVKLLEGMKKRLLEKASYRRIRRSRLRYRKARWNNRVKSKKKGWLAPSLKHKLDTHIKFIDYLKNILPIGKITIEVANFDIPKMKDDLISGVDYQNGDMFSFWNVREFVLHRDGHKCQNPNCKHKDKKEQILKVHHIRYRSEGGSDRPENLITLCSKCHTPANHKKGKFLYDWCVNGKKVRGFKDATFMSMIRWYLVNYLKSKHNNVSITYGYITKNHRIKNGIEKSHLNDAFAIAKGTNQARTKDRFLVIQDRLKNRSLEKFYDSKIIDIRTEKKVSGGDLNCGRSTRNKNLNTENLRKYRGVKISKGQRRIRKQKYFYQPNDLVKYDGKVYTVKGTQNEGKYIALKEIKKVPKVELLIPYVFKKGLNWSY

SEQ ID NO: 9657 - protein, 512 aa, unidentified; identical to SEQ ID NO: 3680
  REGION 1..512: note = Human gut metagenome

SEQ ID NO: 9658 - protein, 404 aa, unidentified
  REGION 1..404: note = Human gut metagenome
LLKEKKAIVKRRTPFTIQLTIATGESKQPVTLGVDAGYKHVGLSASTEKAELYASEVELRQDVSDLLSARRALRQSRRNRKTRYRAPRFNNRLRTKRKGWLAPSVENRINAHLSRIEAVLRLLPVTKITVETASFDLQLLKNPDISGKEYQEGEQLGFWNIREYVLCRDGHVCQHCYGRSKDPVLNVHHLESRRTGGDSPGNLITLCETCHKALHRGEITLKAKRGQSFRAEAFMGIMRSEVLNRLKASHPELEVNNTYGYRTKHARIVNGIAKSHCADAFCIAGNLGAERLGEFFFQKQTRRNNRQIHKLSILKGGIRKRNQAPFEVKGFRLFDKVACQGEEGFIFGRRSSGFFDVRKLDGTRISAGISCKKLHLLEKRRTYLTEIRKEEALPPLPEGRGLRA

SEQ ID NO: 9659 - protein, 460 aa, unidentified
  REGION 1..460: note = Human gut metagenome
MVAVVDLSGRPLMPTNEYRARKLLKQKKAKIFGYRPFTIQLTERKDTEIQPIELCMDAGYIHIGISAKSERHEYLGMQIDTLTDEKLKRDDKRQYRRQRRNRKRYRAPRFDNRRRKEGWIAPSLEHKKEIHIDAIQRICKVMPITDITLEMGNFDTHVLKAVEEGKPLPQGSDYQHGERYGIATLREAVFLRDGYKCQCCEKTVKDGAILHVHHIKYRSQGGTNRMSNLITVCDKCHTPQNHKPGGKLWNWKTKLAEFKGASYMTSIRWMLYNEVTALLPNSSVHITYGAKTKESRRELDIEKSHVNDAYVMGLFHPKHRTQPVYFKKKRRNNRVLEKFYDAKYIDGRDGKKRSGQELFNGRISRNHKKDSENLHLYRKQKVTKGKRSIRNRHYPIQPHDILLYQKNKYETAGCHNNGTRAILLPEKKSVALRQLTIYQYAGGYYRVPYESNKKEERTGS

SEQ ID NO: 9660 - protein, 427 aa, Moorena sp.
MQQGNRVFVLNMRGEPLMPCSQRKARILLKEGKAIINRYNPFTIQLTYATGETKQDCHIGVDTGAKHIGIAVTSEDKILYKAEIELRQDVSSNIDSKRIYRRSRRNRKCRYRKPRFLNRKRTDEWLPPSLQNRINHTFTWINKFSALVPNPILHIEVGKFDTAKMINPDINGVDYQYGQTYGFFDERYFVFARDNYTCQVCGKSKGKILQTHHIIYRSNGGTNRVDNLITVCTDCHTSANHKKGGILYKWQAEHKKVKQYKEPPFMNTLRKRIFAKYPNAVITYGSETTPKRKDIGLEKTHYNDAIVISGIKTIKENPNEWLLIRQFRKKKRSLHEATARKGRREPNRTQKRNSKNTPFYKGFWINDKVSVLGQFGYITGFASGGAYIKNSDGEYITLPSKSYKQVGLANLRLVSHNNNWQYIRNAV

SEQ ID NO: 9661 - protein, 465 aa, unidentified
  REGION 1..465: note = Human gut metagenome
MSTCVCVLSNSGERLMPIFRLGKVRRLLKDGKAKIVKHHPFTIQLLYDSKANTQPIEICEDVGYNYIGISVKSQSHEYVSAQYDTLQDEKACHDSCRKLRRTRRNRLRYRKPRFDNRKRSEGWLAPSLEHKKQLNIRLIERYVSVIPITHATVEVGSFDTMLVKAIEEGKATPESADYQKGPRYNLATLREAVFYRDNYICKVCGRKATEGAILHMHHMFYWKGRHGNSLSELITVCEKCHTPANHQKSGKLYGFGENVKFADLSGAAFMNTVRWQIVNELYATFGKDFVTVTYGAMTKEKRIALHLEKSHNNDAYAMGSFHPVNRCAFEHYEKVKRNNRILEKFYDSQYIDTRTGELTNGKSLFNGRISRSHKKDSENLHKYRGKRICKGHRALRRKKLALNPGDLVSLNGEILVVHGTHTKKNGSVNVEFKTPSRGGKKSASLKKLKIVKTSNLMHSAWTKVS

SEQ ID NO: 9662 - protein, 397 aa, unidentified; identical to SEQ ID NO: 8898
  REGION 1..397: note = Human gut metagenome

SEQ ID NO: 9663 - protein, 425 aa, unidentified
  REGION 1..425: note = Human gut metagenome
MVYVISQDGQPLMPTDRHGKIRRLLKSDKAKVVKHCPFTIQLLYGSTDYTQEISLGIDAGSKYIGISATTQNRVLYESDVELRNDIVSLLSARRQNRRTRRNRKTRYRKPRFNNRISCKKKGWLAPSVRQRVNTHLTVVAKVHQILPVTRIIVETASFDIQKIKNPTISGTDYQQGDQLGFWNVREYVLFRDGHVCQCCKGKSKDKILNVHHIESRKTGGDSPDNLITLCKTCHTGYHRGTIKLPKTIHRGTSFRDASFMGIMRWSFYDELKTLYPDVNLTFGYITKNTRIKNNLPKEHYIDARCISGHPLAVSDETYYYQKKVRCHNRQIHKNTILKGGVRKRNQAPYFVKGFRLFDKVMYQGQECFIFGRRSTGRMDLRLLDRTHINASVSYKKLKLIESRKNYITERRTAVPPTGKSVDFPA

SEQ ID NO: 9664 - protein, 423 aa, Parasutterella sp.
LLNKRGKPLMPCSPAKARLLLKEKKAIVVRRTPFTIQLTIATGESKQPVSLGVDAGYKHVGLSASTEKAELYESEVELRQDVSDLLSARRALRQSRRNRKTRYRAPRFDNRIRTKRKGWLAPSVENRINAHLSRIETVIRLLPVTKITVETTSFDMQLLKNSDIAGKEYQEGEQLGFWNVREYVLFRDGHVCQHCHGRSKDPVLNVHHLESRRTGGNSPGNLITLCETCHKALHRGEIKLKAKRGHSFRAQAFMGIMRWEVLNRLKASHPELEVNNTYGYRTKHARIANDIAKSHCADAFCIAGNLGAERLGEFLFQKQTRRNNRQIHKLSILKGGIRKRNQVPFEVKGFRLFDKVAYKGEEGFIFGRRSSGYFDVRKLDGTHISAGISYKKLRLLEKRQTYLTEIRKEEALPPLPEGRGLRA

SEQ ID NO: 9665 - protein, 450 aa, unidentified
  REGION 1..450: note = Human gut metagenome
VDDLGRGAAPQTAAYSCLHYLFSQIKNTIERIAYQMVYVLNVNGVPLMPTDRHGKVRRLLKSKQARVVKRTPFTIQLLYDTPTCVQPLTLGVDAGSKHIGLSVSSENKEVYAGQIEPRQDVSKKLDERRQYRRSRRNRLRYRKPRFNNRTASKPKGWIAPSIACKIDSHVTVIGQLHQILPITEIVVEVADFDTQKMLNPDIQGKEYQTGPLFNSNLRQYIFARDGYTYQWCKGKSKNKILHIHHWNYWRGDHTNKPSSVITLCDVCNDSKNHKKDGFLYGWEPKITNNLKDAAFMNISRWALYNRLKEIYPNVRLTYGYITKVVRSDHGLEKSHVNDALCIANHPNATRLLYCYLIKKNRVHNRQLHKANKLKGGRLKLNQAPHLVKGYRLNDIVKCNGQNYVITARRRTGYFQLKNFITGEKLPSVSYKKLELLEKAKNYTTERIARN

SEQ ID NO: 9666 - protein, 396 aa, unidentified
  REGION 1..396: note = Human gut metagenome
VVRRTPFTIQLTIATGESKQPVSLGVDAGYKHVGLSASTEKAELYASEVELRKDITDLLSARRALRQSRRNRKTRYRAPRFDNRIRTKRKGWLAPSVENRINAHLSRIEAVLRLLPITKITVETASFDMQRLKNPDISGKEYQEGEQLGFWNVREYVLFRDGHVCRHCHGRSKDPVLNVHHLESRRTGSDSPDNLITLCETCHKALHRGEITLKAKRGQSFRAQAFMGIMRREVLNRLKASYPELKVHETYGYLTKHARIANGIVKSHGADAFCIAGNLGAERLGEFFFQKQTRRNNRQIHKLSILKGGIRKRNQAPFEAKGFRLFDKVACQGEEGFIFGRRSSGSFDVRKLDGTRISVGISCKKLRLLEKRRTYLTEIRKEEALPPLPEGRGLRA

SEQ ID NO: 9667 - protein, 512 aa, unidentified
  REGION 1..512: note = Human gut metagenome
MSTVYVLNKNGKPLMPTTRCGRVRHLLKEQKARVVTSNPFTIQLLYETDDVVQPLYLGIDPGRTNIGVAVVKTDGTAVFTAHLETRNKEIPKLMQGRKKARRARRTNGRRCRRQRRAKANDTISKKCVKQDTAQSGSASKRAKKIGVIKRHLPGCEKGVLCIGIKNKEAKFSNRTRPEGWLTPTANQLLQTHINLVKKIRKFLPISDVVLEVNKFAFMRLDNPNVQKWQYQQGPLYQKASLEEAVSEMQERHCLFCKKPIAHYHHVVPQSENGSNTIDNIVGLCTKHHDLVHKDTTWQKKLAKKKTGLNKKYGAQSVLNQIIPALTERLNTLFPKHFFVTTGKSTYDYRAAHGVSKDHWLDAYCIACSVLPNDVCDSGINNRVPYELKQFRRHDRRALHKANMSRVYTLNDKAVATNRHKAIKQTTDSLEEFRQNHPDDVYKLKVKEHHPEYRNPKRNFPGCVFLVGKHTHVMQGTSSSHNGQADGYYDTNGNSYSSGKCKFVAKNEGIVFT

SEQ ID NO: 9668 - protein, 416 aa, unidentified
  REGION 1..416: note = Human gut metagenome
MVYVLDKNGQPLMPTDRHRKVRLMLQSGQAKVIKRCPFTIQLNYDSGHQTQEISLGIDAGSKHIGVSTTTKIKVLYEVDVELRNDIVDLLSSRRERRRGRRNRKIRYRQAKFNNRRRGNGWLAPSIRQKIGTHLTVVENICKILPISRITVETASFDIQKIKNPDIQGAEYQQGDQLGFWNIREYVLFRDNHTCQCCKGKSKDKILNVHHIGSRKTGGNAPNNLITLCETCHTGYHKGTVQLPKAIKRGMRFKDAAFMGIMRWAFYEALKQQYEPVGTPVHNTYGYITKHTRIAYNLPKEHYVDARCISGNPEASSNGEYYYQKKVRCHNRQIHKLTVLKGGIRKQNQATYLVKGYRLFDKVSYQGKGYFVFGRRQSGFFDIRTLSGEKVNKGSLSCKKLKFIATRTYYLTERRAV

SEQ ID NO: 9669 - protein, 424 aa, unidentified
  REGION 1..424: note = Human gut metagenome
MRVFVFNMRGRPLMPCSQRKARLLLRENKAMIYKYHPFTIQLTYTTGETKQDCHIGIDTGSKYIGAAVRSEDKVFWKGEIELRQDIRSNLDTKRIYRRSRRNRKTRYRKPRFLNRKRRDEWLPPSLQSRINHTFHWIDTLSSLVPNPILHIEVGKFDVAKMINPEIHGVDYQHGQTYGFFDERYFVFARDNYTCQCCGKSKNKILNTHHIIYRSNGGTNRVDNLITVCTDCHTSQNHRKGGIFYQWQEQHKKVKQYKEPPFMNTLRKRIFVAYPDAEITYGSETTPKRKAMKLDKTHYNDAIVISGINEIKENPEEWLLIKQFRKKKRSLHEATARKGRKKPNRNQTRNSKNTPYYKGFYLNDKVSVFGKSRYITGFTSNAAYIKDENNDYITLPNKTYKQVSINKMKLECHNNNWQYIIKNAV

SEQ ID NO: 9670 - protein, 325 aa, unidentified
  REGION 1..325: note = Human gut metagenome
VLHTANLPLTLAKVSLRQVWPAYRRKGTYIMVYVVANDGQPLMPTERHGKVCRMLRSGMAKVIKKCPFTIQLQYESERNVQPVSLGVDAGSKHIGISATTKAKVLYESDVELRDDIVKLLATRRQLRRSRRSRKTRYRPARFDNRKRKEGWLAPSIRQKIGSHLTVVANVCKILPINQIIVETASFDIQKIKNPEIQGIEYQQGEQMDFWNVREYVFFRDGHTCQCCKGRSKDKILNVHHIESRKTGGNAPNNLITLCETCHKGYHNGTVILPKNIKRGMQFKDAAFMGIMRWAFYNALKEQYEPAVPVSMTYGYLTKNTRIEHG

SEQ ID NO: 9671 - protein, 419 aa, unidentified; identical to SEQ ID NO: 6355
  REGION 1..419: note = Human gut metagenome

SEQ ID NO: 9672 - protein, 406 aa, unidentified; identical to SEQ ID NO: 7944
  REGION 1..406: note = Human gut metagenome

SEQ ID NO: 9673 - protein, 408 aa, unidentified; identical to SEQ ID NO: 7570
  REGION 1..408: note = Human gut metagenome

SEQ ID NO: 9674 - protein, 462 aa, Moorena sp.
LWRVPRCGADTTSLLNIVEANMTRVIGETMSTCVFVLTTDHVPQTPVHPAVARKMLTARAAAVFKRFPFTIILKTAEAAHLPVHTHRLKIDPGSKTTGLALLDGPKVVWAAEITHRGQRITDALLRRRALRRSRRQRQTRYRQARFLNRTRPAGWLPPSLHSRVANMMTWVQRLQRLCPIVALSQELVRFDAQLLQHPAISGIEYQHGTLAGYEVREYLLEKWGRACAYCGATDVPLEVEHIVPKVRGGSHRVSNLTLACVSCNQQKGSQTAGEFGFAKIQAQARVPLKDAAVVNATRWALYSALKTTELPVETGTGGRTKYNRTRRGIPKSHWSDAACVGASTPEALHVAGVQPLGIRAMGHGTRQMCRVGAQGFPKAHRTRQKQYFGMQIGDIVKASVPQGKYAGTWTSRVVVKNSGWFDLVIHGKKASVHHKHCTRLWSSDGYTYTLPAGAGTAVSSPH

SEQ ID NO: 9675 - protein, 414 aa, unidentified
  REGION 1..414: note = Human gut metagenome
MPCSPAKARLLLKEKKAIVVRRTPFTIQLTIATGESKQPVSLGVDAGYKHVGLSASTEKAELYASEVELRKDITDLLSARRALRQSRRNRKTRYRAPRFDNRIRTKRKGWLAPSVENRINAHLSRIEAVLRLLPITKITVETASFDMQRLKNPDISGKEYQEGEQLGFWNVREYVLFRDGHVCRHCHGRSKDPVLNVHHLESRRTGSDSPDNLITLCETCHKALHRGEITLKAKRGQSFRAQAFMGIMRREVLNRLKASYPELKVHETYGYLTKHARIANGIVKSHGADAFCIAGNLGAERLGEFFFQKQTRRNNRQIHKLSILKGGIRKRNQAPFEAKGFRLFDKVACQGEEGFIFGRRSSGSFDVRKLDGTRISAGISCKKLRLLEKRRTYLTEIRKEEALPPLPEGRGLRA

SEQ ID NO: 9676 - protein, 512 aa, unidentified; identical to SEQ ID NO: 4031
  REGION 1..512: note = Human gut metagenome

SEQ ID NO: 9677 - protein, 411 aa, unidentified
  REGION 1..411: note = Human gut metagenome
MVYVQDIDGKPMMPTTRHGKVRRLLKDNKAVVVNTCPFTIKLTYKTSDYKQEIVLGVDAGTKHVGLSATTKSKELYSGEVILRNDIVELLSTRRESRRTRRNRLRYRKPRFENRVKSKRLGWVAPSVRHRIDAHIRIINNVCSILPVSRVIVEVAQFDTQKIKNPEISGKEYQEGDQLGFWNVREYVLARDGHKCQHCKGKSKDPILNIHHIESRKTGGDSPSNLITLCETCHKEFHKGNIKLKVKRGKSLRDAAVIGIMKWRLYDKLKSLYPNVRMTFGYITKHDRINHGIEKSHVSDAFVISRNFDSERLGYYYKRKLVRRHNRQIHKMKAPKGGNKRMNQSPFKVFGFRLFDKVMFQGKERFIYARRLSGQFKIKDIDGNNERNISYKKLRYVSHGLISIKTNLFLSQ

SEQ ID NO: 9678 - protein, 348 aa, Enterococcus sp.; identical to SEQ ID NO: 9214

SEQ ID NO: 9679 - protein, 423 aa, Moorena sp.
MRVFVLNKNRQPLDPCRPARARILLSTGKAKVYRRYPFTIILTEEIKEPITHGSQIKIDPGAKTSGLAIVQGNRVVWGAELTHRGFQIRDALTSRRQLRRARRNRKTRYRKPRFLNRTRSKGWLAPSLMSRVKNILTWVEKLTRVCPVTGISQELVRFDTQKLQNPEISGIDYQQGTLYGYELREYLLEKWNRKCAYCGATGTQLEIEHIKPKSKGGSNRVSNLAIACHPCNQAKSNQDIELFLSNKPSVLKRVLSQARRPLADAASVNTTRWKLYHDLKSTGIPVEVGSGGLTKFNRCRQNLPKTHWLDAANVGKVETLIIEVTHPLLITAKGHGTRQLCRTNKYGFPVRHCSRTKIHKGFQTGDIVRAVVTKGKKIGTYVGRVATRKSGYFNISTKSGLVQGISHKYCQFIHRKDGYAYTN

SEQ ID NO: 9680 - protein, 442 aa, unidentified; identical to SEQ ID NO: 2637
  REGION 1..442: note = Human gut metagenome

SEQ ID NO: 9681 - protein, 456 aa, unidentified; identical to SEQ ID NO: 6138
  REGION 1..456: note = Human gut metagenome

SEQ ID NO: 9682 - protein, 419 aa, Geobacillus sp.; identical to SEQ ID NO: 4579

SEQ ID NO: 9683 - protein, 408 aa, unidentified
  REGION 1..408: note = Human gut metagenome
MVYVQDINGKPMMPTTRHGKVRRLLKENKAVVVSLCPFTIKLTYVTSDYKQEIVLGVDAGTKHVGLSATTKSKELYSSEVILRNDIVDLLSTRRELRKTRRNRLRYRKPRFNNRIKSKRSGWIAPSVKYKVDAHIRVIDNVCSILPIFRIVIEVAQFDTQKIKNPNISGKEYQEGDQLGFWNTREYVLARDGHKCQYCKGKSKDKILNVHHIESRKTGGNSPSNLITLCETCHKEYHKGNIDLKIKRGKSLRDAAVMGIMKWRLYEEIKSKYDRVSMTFGYVTKYNRINHDIEKSHVSDAFVISKNFNAIRLGYYYKVRLVRRHNRQIHKQKIQKGGIKRLNQSPFEVFGFRLFDRVMFENSYYFIFGRRKTGSFNIRDIDGKSQKNITYKKFKLSRCKRFMIQKEMN

SEQ ID NO: 9684 - protein, 447 aa, Bacillus sp.; identical to SEQ ID NO: 4471

SEQ ID NO: 9685 - protein, 422 aa, unidentified
  REGION 1..422: note = Human oral metagenome
MLVYVISKDGQPLMPISRCGKVRRLLKSKRVKVIKRCPFTIKLLFEPENDFVGECYCGVDTGSKHVGIAVVSNDRVLYQSQIELRDDIKRKMEQRRMFRRNRRSRKTRYRKTRFLNRANSTKPNKLPPSVKHKVQAHIDEIEFCKKILPVSDIILEVSQFDTALMKNPGLMNEKVKHWGYQQGFNYGYSLRRSAILHRDNYTCQCCGKKNCRLEVHHIKFRRNGGTDDEENLITLCEECHKGVHAGSVVLNKKPKKSKGLKHATHMSIIRSQLLKVYPQAIETFGFVTSENRNRLNLPKDHYIDACVIASGGLPFELSDVLYQKRRVSKQDRQLCQGMHGERKIPTWKVLGFKKFDLVEYMRELCFVKGRRSSGSFVLMDINSRLIDFRDKGGKQNPSYKSLKRVSARRSILCISKKNREIR

SEQ ID NO: 9686 - protein, 420 aa, unidentified; identical to SEQ ID NO: 8560
  REGION 1..420: note = Human gut metagenome

SEQ ID NO: 9687 - protein, 413 aa, unidentified; identical to SEQ ID NO: 2636
  REGION 1..413: note = Human gut metagenome

SEQ ID NO: 9688 - protein, 430 aa, unidentified
  REGION 1..430: note = Human gut metagenome
MPKVYVLNRHGRPLMPCTPAKARHLLDAGKAKVRHRTPFTIQQLYGSTGYTQEVILGVDAGSKTIGLSAATETEELFSAEVKPRNDVVELMSARRQFRRARRNRTTRYRKPRFDNRVRSKHKGWLAPSVEVKIQEHMTAIRRACAILPVSKVVVETAEFDLQLLKAVAEGKPVPQGEDYQKGEMYGHYNVRQYVLWRDSYTCRICGAHGSVRKGVPLHVHHLESRRVGGDAPDNLVTLCTACHDKLHKGIIMAADIKKRKRRSTRDATFMGIMRMTLLRRLWEQLPVPVVETRGYITKATRENLLVLPKSHANDALAIAHGPQGFRAEYLPNIRQADRLYTIRPVRHHNRQLHKATILKGGVRKANQAEKYICGFRLYDKVLYNGIECFVWGRRTSGSFLLRQLNGEKVKDGVSYKHLKLLERSQSYLVA

SEQ ID NO: 9689 - protein, 409 aa, unidentified; identical to SEQ ID NO: 7451
  REGION 1..409: note = Human gut metagenome

SEQ ID NO: 9690 - protein, 535 aa, unidentified; identical to SEQ ID NO: 6116
  REGION 1..535: note = Human gut metagenome

SEQ ID NO: 9691 - protein, 413 aa, unidentified; identical to SEQ ID NO: 2636
  REGION 1..413: note = Human gut metagenome

SEQ ID NO: 9692 - protein, 442 aa, unidentified; identical to SEQ ID NO: 4467
  REGION 1..442: note = Human gut metagenome

SEQ ID NO: 9693 - protein, 422 aa, unidentified; identical to SEQ ID NO: 5333
  REGION 1..422: note = Human gut metagenome

SEQ ID NO: 9694 - protein, 402 aa, unidentified
  REGION 1..402: note = Human gut metagenome
MPTERFGKVRRLLKNGLAHVVCRIPFTIQLDYETTNFVQSISLGVDAGSKYIGISATTNKKELYAADVELRNDIVEKLSTRREQRRTRRYRLRYRKARFNNRISSKRKGWLAPSIENKIQTHLTVIEKIHKFLPIANMVVETASFDIQKIKNPSISSKEYQQGEQFDFFNVREYVLFRDKHTCQYCKGKSKDNVLNVHHIESRKTGGNAPNNLITLCETCHKKYHKGEIQLKLKRGKTFRDAAFMGIMRWTFYDRLKSMYPNVSMTFGYITKNTRILSNLPKEHYVDARCISGNSQAKPLEYYFYQKKVRCQNRQIHKAKILKGGKKKLNQAPFLVKGYRLFDLVEYQKELYYIFGRRSSGFFDIRRLDGTKINNGSVSCKHIRLIDARKTLIIEKRVQGAS

SEQ ID NO: 9695 - protein, 494 aa, Moorena sp.
MVIALDKGKRPLGFITERRARKLMEARRACVYRYFPFVLIIKDVDARQIPDLPEYRIKIDPGADTDGISIIHDNEILFAMHVKHRGRQVTENMTKRKVSRRNRRNRETRYRRSKFAKGGTFEHTGSKGKLPPSVNSVIGNTKTWIRHLCSWINITNASFEAARFDTQLMDNPEIEGEQYQHGTLHGTEVKEYLLDYYQHTCQYCGGKSGDPVLEWEHIKPKSRGGTDTVKNATLSCSCCNREKGNHTPKEWKEIILAKPHKTRLDEARLEGIDNVMKHTITGGSNRYCAWTNISRKKLERFLFDLFDEVECSTGGKTKYNRVQMGLLKDHQYDAACIGDSTPEKYIDRTHGYYVKAIGMGRGTRFRGQASKCGIIAVKYAPRERRVFGFMTGDIVAADVPHRTKRPFKYEGHYTGRVMTRATGSFDIRTLGGDKVTVKHDFCRIIQYVDGYQYSLCRTTEKTCQGAKWRFPPGHLMTGDPRLAVLKNRHRQKGK

SEQ ID NO: 9696 - protein, 442 aa, Sutterella sp.; identical to SEQ ID NO: 3234

SEQ ID NO: 9697 - protein, 426 aa, unidentified
  REGION 1..426: note = Human gut metagenome
MVYVLNNNGQPLMPTNRHGKVKHLLKTGKAKVVKRCPFTIKLMYDSKSYTQPLSLGVDTGSGTLGVAVSKDNGDVVYISEVVVRNDVTDKMQRRAKYRRNRRNRKTRYRKARWLNRANSIRKDRFSPTMQSKLHSHTKEIEYVKSILPITTVVFETGQFDTHLMKNPMLANLKIRHWGYQKGVNYGFENTRAMVLNRDKYTCQYCKGKRKDSRLEVHHIVFRCQSGSDEECNLITLCHTCHKKLHDGKINPDFTGKTKGTLNYATQMNSIRKQLFRLYPNAIETFGYVTKANRFVLNIEKEHYLDACIIATQGKPFVLKSKVLLKKKCVPKGDFQKTKGVRSEQPIVTKKIFGFKKFDKVKYFGKEYFIKGRMSSGYAALMDINGNKIDFSTMPKGYKTAKMTNLKRLEARSSWMITAEEVTQNIA

SEQ ID NO: 9698 - protein, 456 aa, unidentified
  REGION 1..456: note = Human gut metagenome
MSTCVCVLSNNGERLMPTFRLGKVRRLLKDGKAKIVKHHPFTIQLLYDSKTNTQPIEICEDVGYNYIGISVKSESHEYVSAQYDTLQDEKEHHDDCRKYRRTRRNRLRYRKPRFDNRKRSEGWLAPSLEHKKQLNIRLVERYVSVIPITHATVEVGSFDTMLLQAIQKGESKPEGVDYQKGPRYNLATLREAVFYRDNYTCQVCGRKIADGAILHMHHMFYWKGRHGYQLDELVTACEKCHTPANHQKGGKLFGFGEDKEFANLSGAAFMNAVRWQIVDALHATYGKEFVTITYGAMTKEKRIILGIEKTHSNDAYAMGDYHPVHRCVFRHYQKRRRNNRVLEKFYDATYIDARTGNKAKGKELFNGRISRNHKKDSEDLHKYRSKKVSKGRRSIRRQRYAIQPYDTVRLESKTYITSGCHNKGTRLLIPANGKSKSVAISKVQVVCHAGAWIQII

SEQ ID NO: 9699 - protein, 442 aa, Sutterella sp.; identical to SEQ ID NO: 7529

SEQ ID NO: 9700 - protein, 413 aa, unidentified; identical to SEQ ID NO: 2636
  REGION 1..413: note = Human gut metagenome

SEQ ID NO: 9701 - protein, 427 aa, Fischerella sp.; identical to SEQ ID NO: 6171

SEQ ID NO: 9702 - protein, 431 aa, Aphanizomenon sp.; identical to SEQ ID NO: 8468

SEQ ID NO: 9703 - protein, 412 aa, Shewanella sp.
MFVFVLNKNGKPLMPCKPQKARVLLRRGDAKVIKRTPFTIKLVGGSSGYKQPLVAGMDTGSKAIGCAVIGLGQVIYQSQVALRQDVSKKMEQRAMYRRNRRGRKCRYRPARWSNRASMRTTGRLAPSLKSKLDSHLRERNFVESILPISEWKVETASFDIHKITKPDVSGAGYQNGVQKGFYNVKAYVLHRDGYKCQSGRKGKHSNKLHVHHIQFRSNGGTDTPTNLTTLCETCHADLHANKFELKAKKSRTKHATEIGIIKSRLKEEWQFAETFGYETKYKREQVLRLQKEHYYDAVAICLEDGELVEPASSVYFKRHVAKGDYQQTKGARSEKRIPVGKLFGLKKHDFISTPQGSGFVKGKRSTGYFALETITGEKVHASANVKKNTIRVTARTTTLTQKMESASNSSSH

SEQ ID NO: 9704 - protein, 512 aa, unidentified; identical to SEQ ID NO: 4031
  REGION 1..512: note = Human gut metagenome

SEQ ID NO: 9705 - protein, 513 aa, unidentified; identical to SEQ ID NO: 3179
  REGION 1..513: note = Human gut metagenome

SEQ ID NO: 9706 - protein, 415 aa, Bacillus sp.; identical to SEQ ID NO: 6255

SEQ ID NO: 9707 - protein, 470 aa, unidentified
  REGION 1..470: note = Human gut metagenome
MSVFVVGLNGCRLMPVSERKARLLLKGGKASVYRKVPFTIKLNYKTGSTVQPGYLGIDTGSQHIGVSVVQKDGTVLHKEEIGLRDSMSKRKLLESRASSRRGRRYRKTRYRHPKWKPKTKRIYNEKADRKGRHWKKQKNTFTSKRQAGWLPPSLQSKTDHHIQWIRKLLDLLPEGYRLSIELGRFDPARMKDPEIHGELYQKGPQYDYENVRAYVLARDGYTCRVCKKKGGKLHVHHILYRSRGASDNPKYMAAVCSKCHTTENHLPGGILYQWMQDQKKFTRGLRDATFMNILKKRLRKAFPDAVFTYGNITKADREKLELPKSHGNDATAIALVKTEVKSVKDEEPVIHIQQVRRKKRSLHEETPRKGRKEPNRTASRSDKNTKSVTVTKGSGEKKASMTACLFDRVELDGKKGWITGFTGTSCYVKDKEDNYICTSSKYKQVSISRLRILHHCGNWAIGAEKPLGKG

SEQ ID NO: 9708 - protein, 431 aa, Escherichia sp.; identical to SEQ ID NO: 3801

SEQ ID NO: 9709 - protein, 371 aa, unidentified
  REGION 1..371: note = Human gut metagenome
VDAGYKHVGLSASTEKAELYASEVELRQDVSDLLSARRALRQSRRSRNTRYRAPRFDNRIRTKRKGWLAPTVENRINVHLSRIETVLRLLPVTKITVETASFDTQLLKNPDIAGKEYQEGEQLGFWNVREYVLFRDGHVCQHCHGRSKDPVLNVHHLESRRTGGDSPGNLITLCETCHKALHRGEIKLRAKRGQSFRAETFMGIMRWGVLNRLKASHPKLEVHNTYGYRTKHARIANGIAKSHCADAFCIAGNFGAKRLGEFFFQKQTRRNNRQIHKLSILKGGIRKRNQAPFEVKGFRLFDKVACQGEEGFIFGRRSTGYFDVRKLDGTCISAGISYKKLHLLEKRRTYLTEIRKEEALPPPPEGRGLRA

SEQ ID NO: 9710 - protein, 413 aa, unidentified
  REGION 1..413: note = Human gut metagenome
MTSYAFVLDANGKQLAPTKEQKAWFLIRKKRATLVSKYPMVIQLKKKIPDKEIYKDEIRCGIDDGGLHVGIALVQKCQTRNKVVFKGTIEQRNDVKHLMDVRCGYRRYHRYHKRYRPARFNNRSSSKREGRIAPSVLQKRQAIIRVINRLNKWINITNYWLEDVAIDIRALTDGHRPYWWQYQKSNRLDENIRKATILRDGRKCMECGKSNCRLEVHHIKPRRLKGSSTLGNLITLCTKCHQKTKGVEELYMDKYFALLNSSDNKNLDYAQHVMIGKKWLRKQLSNLGLLYLTSGGDTANKRIDWDITKSHSNDAVCITDLRPDTCEIKEWIIKPMRRQSKAKTDNVFGIKHRDLVEYTFGNGETHRGYVTALYPEQNALNFQSLTKHCKKVNARKCKVLWKYSKIYWLDNVV

SEQ ID NO: 9711 - protein, 441 aa, Sulfobacillus sp.; identical to SEQ ID NO: 4231

SEQ ID NO: 9712 - protein, 429 aa, unidentified
  REGION 1..429: note = Freshwater metagenome
MNRVFVLSSTKKPLMPCTPARARRLLNGRKAAVYRLKPFTIILKFRADGDVQDVEFKIDPGSKTTGMALVAAFKQDCVLVWGANLQHRGQAIRNALESRSSLRRGRRNRHTRYRAPRFLNRTRPAGWLPPSLQSRVGNISTWYNRLLGVVPVASAEVETVRFDLQKIANPEISGVEYQQGALLGYEIREYLLEKWHRCCAYCGAKDVPLQVEHIRPRASGGGNSVTNLTLACAPCNTKKGAKPIEQFLAKKPDILKKVLAHARLPLKDAAAVNATRYATGNAIKSIGLPTGFWSGGRTKSNRISQGYTKDHFIDAACVGITGATVSIADGFVPISIKAMGRGNRQVTRVNKFGFPCAAAKSKKSVLGIRTGDLVRITQPKGKFAGSYSARVSAIKAASNFLSINLDKKQTWFSAKLATLVQRGDGYAYA

SEQ ID NO: 9713 - protein, 420 aa, unidentified
  REGION 1..420: note = Human gut metagenome
MVYVLDKNGHPLMPTCRHGKVKHLLKDGKAKVVKRCPFTIKLLYESTSHTQNLTLGVDTGSGTVGTAVSKDNGDIVYISEVVVRNDITDKMTRRSKYRRNRRNRKTRYRKARWLNRKNSIKTDRFSPTMTSKFHSHIKEIEYIKSILPITTMVFETGQFDTHLMKNPSLADPDIKHWGYQKGSNYGFENTKAMVLNRDGYNCQYCKGKHKDSKLEVHHIVFRSKGGSDEESNLITLCHTCHKDLHSGKIHPDFKGETKGTLKYATQMNSIRKQLFRSYPEAVETFGYVTKTNRLSLGVEKEHYYDACTIATQGNPFVVITNLYKKKCVSDGDFQKTKGIRSEQPIVTDKICGFRKFDKVQYFGKEYFIKGRMSTGYAFLMDIDGNKADFSAMPKRCKTPKLSNCKRLTARSTQMVLAVAV

SEQ ID NO: 9714 - protein, 424 aa, unidentified
  REGION 1..424: note = Human gut metagenome
MASMQYVYVLNKHGEPLMPCSPGKARLLLKQQKACVVKRTPFTIKLLYGSAGYKQPVALGIDAGSKHVGLSASTEKRELYREEFTPRNDVVELLSTRRQNRRSRRNRKTRYRAPRFDNRVHSKHKGWLAPSVEVKIQEHITVIKRICRILPITLVRVETAEFDTQRLKAMLKGKPLPVGTDYQLGEMYDEYNVRQYVLKRDNYTCQCCGAHPTEKKPVRLHVHHLESRHVGGNAPNNLITLCVACHKALHKGKITLDKGKKRGKPLRDAAFMGIMRNTLLARLKDELNIPVKQTYGYITKLLREKNKIPKSHVNDARCIAKAPNAKPCDTMLYTRALRHHNRQIHKAKILNGGIRKKNQAPYLVKGFRLWDKVRYNGEECFITGRRSSGYFALKKYDGTVISNSASYKKLMLLEAATNYITERS

SEQ ID NO: 9715 - protein, 430 aa, unidentified; identical to SEQ ID NO: 3252
  REGION 1..430: note = Human gut metagenome

SEQ ID NO: 9716 - protein, 312 aa, Fischerella sp.; identical to SEQ ID NO: 8098

SEQ ID NO: 9717 - protein, 416 aa, unidentified
  REGION 1..416: note = Human gut metagenome
VSEITSYAFVLDVNGKPLAPTKEQKAWFLIRKKRAALVSKYPMVIQLKKEIPENKICKDEIRCGIDDGGLHVGIALVQKCKSKNKVVFKGTIEQRNDVKHLMEVRRNYRRYHRYHKRYRQARFDNRKSSKRKERIAPSILQKRQATMRVIHRLNKWINITNYWLEDVSIDIRVLTDGYKSYSWQYQKSNRLDENIRKATILRDGGKCMECGKSNCRLEVHHIKPRRRNGSNTLDNLITLCESCHQKTEGQEELYMDRYFSLLKSSDNKNLNYAQHVMIGKMWLRKQLSGLGVLYLTSGGDTANKRIDWNIEKSHTNDAVCITDLQPDTCDIKEWAIKPMRRQSKAKTDHVLGIHHRDLVEYTFKNGETHRGYVTALYPDQKAINFQSQTKHCKKVNARKCKLLWNYSKIYWFENAS

SEQ ID NO: 9718 - protein, 456 aa, unidentified
  REGION 1..456: note = Human gut metagenome
MSTCVCVLSNNGERLMPTIRLGKVRHLLKDGKAKIIKHHPFTIQLLYDSETNIQPIEICEDVGYNYIGISVKSQSHEYVSAQYDTLQDEKSCHDACRRMRRTRRNRLRYRQKRFDNRKRDKGWLAPSLKHKKELNVNVIKMYCEVVPITHATVEVGSFDTMLVKAIQEGKAIPEGADYQKGPRYNLATLREAVFYRDNYVCKVCGRKATEGAILHVHHMFYWKGRHGNSLSELITVCEKCHTPANHQKGGKLYGFGENVKFADLSGAAFMNTVRWQIVNELYAAFGKDFVTVTYGAMTKEKRIALHLEKSHNNDAYAMGNCHPAHRCEFGHYQKRCRNNRVLEKFYDATYIDTRTGDKAKGKELFNGRISRNHKKDSEDLHKYRSKKVSKGRRSIRRQRYAIQPYDTVRLESKSYITSGCHNKGTRLLIPANGKSKSVAISKVQVVCHAGAWIQII

SEQ ID NO: 9719 - protein, 512 aa, unidentified
  REGION 1..512: note = Human gut metagenome
MSTVYVLNKDGKPLMPTTRGGHVRHLLKEQKARVVRAKPFTIQLLYETNDVVQPLYLGIDPGRTNIGVAVVKANGTAVFTAHLETRNKEIPKLMQDRKKARRARRTNGRRCRRQRRAKANGTISKKCVKQTTAQNGSVSKRAKDIGVIKRHLPGCEKEVLCIGIKNKEAKFSNRTRPEGWLTPTANQLLQTHINLVKKIQKFLPISDVVLEINKFAFMRLDNPNVQKWQYQQGPLYQKASLEEAVSEMQEHHCLFCKKPIDHYHHVVPQHKNGSNTIGNIVGLCAKHHDLVHKDSAWEKKLAKKSTGLYKKYGALGVLNQIIPTLTNELSSLFPKHSFVTNGKSTYDYRAAHGVSKDHWLDAYCIACSVLPSNVCDSNINNHMPYVLKQFRRHDRRVLNNENMNRVYTLNNKAVAINRHKAKDQKTVSLEEFRKEHPDDVCKLKVKEHHPTYRNMNRNFPGSVFLVGKQIHVMQGIASSKDGKATKYNDTSATAIAAGKCKFVAKNTGILFV

SEQ ID NO: 9720 - protein, 431 aa, unidentified; identical to SEQ ID NO: 4306
  REGION 1..431: note = Human gut metagenome

SEQ ID NO: 9721 - protein, 462 aa, unidentified
  REGION 1..462: note = Human gut metagenome
MSVLVIGRNGRALMPTNPRKARLLLKKKTASVVCRHPFTIQLLYKTGCATQEGCIGIDTGSQHIGVGITCGDRVILKDEHTLRSSMEKRSLLATRAVMRRGRRYRKVRYRKPKWRHHTKRMYFEKANRRGQHWRKVKTTTQSPRSKGWLPPSLQSKCDHHFRIIDRYLKYLPDSITRNLVIEAGRFDMARMNDPTIHGEMYQRGPMYDAENLRAYIFARDNYQCACCKAKAGTTRKADGTTVKLVAHHILFRSRGATDNPKYIISVCDHCHTTKAHQPGGILYSWMENNKKVARGLRDATFMNILRKRLFARYPQAAFTYGNITAADRKQLRLPKSHANDAVAISLFGKEASTVKNICQTMHYKQIRKSKRSLHEAIPRKGRKNPNTKAVRNKKNTTQVNGFKLWDSVLANGKKLFICSFTGTSAYLIDKNGCYISQPGKTYKQWPLSKLKRLHPNGNWLMA

SEQ ID NO: 9722 - protein, 422 aa, unidentified
  REGION 1..422: note = Human gut metagenome
LNKRGKPLMPCSPAKARLLLKEKKAIVVRRTPFTIQLTIATGESKQPVSLGVDAGYKHVGLSASTEKAELYASEVELRKDITDLLSARRALRQSRRNRKTRYRAPRFDNRIRTKRKGWLAPSVENRINAHLSRIEAVLRLLPITKITVETASFDMQRLKNPDISGKEYQEGEQLGFWNVREYVLFRDGHVCRHCHGRSKDPVLNVHHLESRRTGSDSPDNLITLCETCHKALHRGEITLKAKRGQSFRAQAFMGIMRREVLNRLKASYPELKVHETYGYLTKHARIANGIVKSHGADAFCIAGNLGAERLGEFFFQKQTRRNNRQIHKLSILKGGIRKRNQAPFEAKGFRLFDKVACQGEEGFIFGRRSSGSFDVRKLDGTRISAGISCKKLRLLERRRTYLTEIRKEEALPPLPEGRGLRA

SEQ ID NO: 9723 - protein, 428 aa, unidentified; identical to SEQ ID NO: 5055
  REGION 1..428: note = Human gut metagenome

SEQ ID NO: 9724 - protein, 416 aa, unidentified
  REGION 1..416: note = Bioreactor metagenome
MLVYVLNKHGKPLMPCKPSKARKLLKQGKAKITQREPFTIQLIYGSSGYKQPITLGIDAGSKFIGVSATTEKQELFSAEVELRNDIVQLLSERRQYRRSRRYRKTRYRKPRFSNRVRSKNKCWLAPSIENKIQTHLKIVEKVHKILPITKIITEVASFDIQKIKNPNIEGVEYQQGEQLGFWNVREYVLWRDNHTCQICKGKSKDNRLNVHHIESRQTGGNAPNNLITLCETCHNKYHKGELNVKLKRGQSFRDTAFMGIMRWTFYNRLKNIYPNVELTYGYITKNTRITHKLPKSHRIDALCISGNPKAKQLDYWYYIKQVRKHNRQIHKAKILRGGIRKLNQAPYLVKGFRLFDKVKYKRQECFIFGRRSSGYFDLRKLDGTVIHRSASYKDLKLLSKRKTLLWERREGVSSPT

SEQ ID NO: 9725 - protein, 416 aa, Moorena sp.
LVYVLSKNGNPLMPTSRHGKVKHLLKDGKAKVVRRTPFTIQLLYDSPEYTQPITLGVDSGSKVVGLSATTEKKELFVSEITLRDDIPELLSTRRQNRRTRRNRLRYRMERFLNRTASKKEGWLAPSVKHKVDSHLKVIENVHRILPISRIVIETASFDIQKIRNPEISGTEYQQGEQLGFWNIREYVLWRDNHECQHCHGKSKDRILNVHHKESQKTGGDSPGNLVTLCETCHKSYHAGRIQLKLTPNKSYRDASFMGIMRWYVYNSLKELYPEVSMTYGYITKTNRIMNNIEKTHSADAYCISGNMNAIRSNETYNQAFKRKYNRQIHKANFLKGGKKKLNQSEYEVKGFRLFDHVRYKDEDCFIFGRRTSGYFDLRKLDGSVVHRSASFKELKLLKRQNTILIERKGCNGVLLS

SEQ ID NO: 9726 - protein, 473 aa, unidentified
  REGION 1..473: note = Human gut metagenome
MAVFVIGLTEKRLMPTTERKARILLKQKKAEVFCKNPFTIRLLYQTGGTTQHVTLGVDTGSQHLGFAVAGDNGNIIHEQEVSLRRSMEKRKLLVKCKESRRGRRYRKVRYRHPKWRHHTVRVYIQKGYRKKGVKRHWKKLKVQFSSPRPEGWLPPSLQSKTDHHIRWIHRFLDVLPKDTGMVLEVGRFDAARMKNPEIHGELYQRGPQYDYENVKAYVFDRDNYKCRCCHAKAGTRRKDGTVVKLIAHHIDYRSKGASDNPDALASVCDACHTAANHQPGGVLYDWMVKNKRFKQGLRDTAFMNILRRRLFETFPDAKYTYGNITAARRKELMLPKSHTNDAVAIACTGMDISSIGKRPNHEVYEQQVRKKKRSLHEANPRKWSKTKNRFAVRNSKNTKEVNGVCLFDKVEVLGKGYGWVTGFTGTSCYVLDKNGNYVTTADTYKQVAISRLKVIHHSGNWISGLKCPIGNGS

SEQ ID NO: 9727 - protein, 442 aa, unidentified; identical to SEQ ID NO: 3234
  REGION 1..442: note = Human gut metagenome

SEQ ID NO: 9728 - protein, 425 aa, Moorena sp.; identical to SEQ ID NO: 3008

SEQ ID NO: 9729 - protein, 247 aa, unidentified
  REGION 1..247: note = Human gut metagenome
MYGSYNVCQYVLWRDNYTCICCGVRGTPKNPVRLHVHHFESRKYGGNAPDNHGTLCDDCHKKFHLGIITDVKLKTRRRQSTRDAAFMGIMRKTLMWRLRTELFIPVAETMGYITKATREKLLVLPKSHTRDALAIAQGRHGFGIKEYAYVEPANHIYTVRPVRHHNRQLHKASILKGGIRKRNQASKYVFGFRLYDKVLYQGKACFVWGRRTSGTFLLRTIDGIKVKDGVSYRNLTLLERSSNYLIA

SEQ ID NO: 9730 - protein, 418 aa, unidentified
  REGION 1..418: note = Human metagenome
MVYVINKEGQALMPTERFGKVRRLLKNGLAHVICRIPFTIQLDYETTHFVQPISLGVDAGSKHIGISATTSEKELYAADVELRNDIVEKLSTRREQRRTRRNRLRYRKARFNNRVSSKHKGWLAPSVENKIQTHLTVVEKIHKFLPITKIIVETASFDIQKINNPSISSEEYQQGEQLGFFNVREYVLFRDNHTCQHCKGKSKDHILNVHHIESRKIGGNSPSNLITLCESCHKAYHNGKIDIKVKRGASFRDAAFMGIARWTTYERLKNIYSNVSMTFGYITKNTRITNGLPKEHHVDARCISGNPKSKPLGYYFYQKKVRCQNRQIHKANFLKGGRKKLNQSPFLVKGYRLFDLVEYQKKLYYIFGRRDSGFFDIRRLDGTKVNKGSISCKHIRLVDIRRSILTERRNSCSTLPTN

SEQ ID NO: 9731 - protein, 429 aa, unidentified
  REGION 1..429: note = Human oral metagenome
MMVYVLDMNGQPLMPTHNGAKVRVLLKQKRAKVISKCPFTIKLLYESTNFTQSLTLGVDTGSKYVGSAVINDVTSESIYESQTELRDDVKSRMDRRRQFRRVRRNKLRYRPVKFNNRRASKRKNRYTPTLISKFQGHKREIEFIKSILPIKDVILEVGEFDPQLLQDPTLAYRKWGYAKGELYQQENFKQAAKARDGHKCQCCGKKNCRLEVHHLLPRSRGGSDKLANLLTLCTDCHSLAHSSEEQLLAFQKKFGKKAKSTLRYATQMNVLRHMLQREYPEAELTYGFHTKEMRRVFGLEKSHMIDACCIASSGVLFKNETSNKYKKKCVPKGNYVRTNTTNGKHVIIPKGKIAGFRRYDKVLYNNKEYFIAGRRSIGKVYLIDIDNNRVQVDRIKRTTGEKYVSKAEIKVSLVKKVASAKTCLCTISK

SEQ ID NO: 9732 - protein, 434 aa, Mitsuokella sp.; identical to SEQ ID NO: 2893

SEQ ID NO: 9733 - protein, 557 aa, unidentified
  REGION 1..557: note = Human gut metagenome
MIYNLVSTRERSFMKQKKQKVMVYILNKKGKPLMPTTRCGHVRKLLNSKKAVVVNSNPFTIRLKYDTPNGVQDVFAGIDSGRENIGSGASNEDGDCLYLGELKTSNKSIKLKMTERAGFRKERRRHDRQNKQRKARKDHTEIQNGNADICRTTISCKSVQISYPAAEKSVTHKIIRGKEGKFANRHRDEGWITPSARQLVQMHMNDLKSMCKILPISHVTLERVAFDFQKLENENIKVWEYGKGKLYGYDSPEEYIHDVQNGKCLVCGKPHIDYLHHIIPRSKGGSDKVSNIAGLCYDCHYGPMGVHNCQNTQDRLPELKSEANKQYKVSLLNSVMPVLIEEMDKFCKANSIMFSVCEGHDTAKVRDMYDLQKDHCIDGFAISLVDRNVKSVDVMPDRIYQKQRYKKKSKNIIQKRNCREYYDDKKLVAVNRHKGTDQKADSLEEYMNTYAETHTTDECKKHFDSLVVKPARRTYTFHKEWRICPFHIGDKVRYEKKNKIKGNTKVDTFICEGIRFVKDENKAEVKHNKTKSKKMKFCRVLESGCTPYVDYRKLALM

SEQ ID NO: 9734 - protein, 456 aa, unidentified; identical to SEQ ID NO: 9335
  REGION 1..456: note = Human gut metagenome

SEQ ID NO: 9735 - protein, 430 aa, unidentified
  REGION 1..430: note = Human gut metagenome
MPNKVYVINKHGRPLMPCSPAKARHLLDEGKAKIKKRTPFTIQLVYGSSGYTQEVILGVDAGSKTIGMSASTKKEEVFAADVTPRNDVVDLMSTRREFRRARRNCKTRYRKPRFDNRVRSKHKGWLAPSVEVKIQGHITAIRRVCGILPVSKVVVETAEFDLQLLKAIEKGKPVPQGEDYQQGEMYGHYNVRQYVLWRDNYTCQCCGAHATKKKEVRLHVHHLESRKVGGDAPDNQVTLCESCHEKLHKGLIAEKDFKKRKRRSTRDATFMGIMRKTLMQRLCSELPIPVIETRGYITKATREKLLVLPKSHTNDALAIAQGKQGFNVGYLPGIVQINKIYTIRPVRHHNRQLHKATILKGGIRKSNQAGKYVFGYCLFDKVQFNGQDCFIWGRTTGIFTIKTINGKMIKDGISFKKLKPVEKSTSYLIA

SEQ ID NO: 9736 - protein, 388 aa, unidentified
  REGION 1..388: note = Archaeon sp.
MHGKPLMPTTPGKARILLKQGKATVIQRTPFTIQLCYLTGKYKQDIELGIDAGYSTIGFSATTEKKELLSGELTLRKRISKLLKQRRSYRRARRNRLWHRKSRFNNRSKPEGWLAPSIQHKLETHLRLIEKLKKILPITKITIEVAKFDQQKMNKTEIKGVEYQQGELQGYEVREYLLEKWKHKCAYCGKNNLPLEIEHIIPKIRGGTNRVSNLTLACHRCNQKKCDKTAAEFGYPEIQKKANQTLKSTAFMNIVRKKVVNTLKCAWTYGYITKHDRIKLGLEKNHVNDAFVIAGGTTQSRTIPDMATQTRRNNRSIQTNRKGHKPSIRRQRYKLQPNDLVRYKEILCKVKGVSSYGKWVRLVTKAGEIINTNVKKVELVKYGKGIQF

SEQ ID NO: 9737 - protein, 431 aa, unidentified; identical to SEQ ID NO: 3235
  REGION 1..431: note = Human gut metagenome

SEQ ID NO: 9738 - protein, 514 aa, unidentified; identical to SEQ ID NO: 7895
  REGION 1..514: note = Human gut metagenome

SEQ ID NO: 9739 - protein, 472 aa, unidentified; identical to SEQ ID NO: 2965
  REGION 1..472: note = Human gut metagenome

SEQ ID NO: 9740 - protein, 496 aa, Streptomyces sp.; identical to SEQ ID NO: 4777

SEQ ID NO: 9741 - protein, 512 aa, unidentified
  REGION 1..512: note = Human gut metagenome
MSTVYVLNKDGKPLMPTTRGGHVRHLLKEQKARVVRTNPFTIQLLYETDNLVQPLYLGIDPGRTNIGVAVVKTDGTAVFTVHLETRNKEIPKLMQGRKKARRARRTNGRRCRRQRRAKANGTISKKCVKQATAQNGSVSKRANEIGVIKRHLPGCEKEVLCIGIKNKEAKFSNRTRPEGWLTPTANQLLQTHINLVKKIQKFLPISDVVLEINKFAFMRLDNPNVQKWQYQQGPLYQKASLEEAVSEMQEHHCLFCKKPIAHYHHVVPQSENGSDTIGNIVGLCTKHHDLVHKDTAWQKKLAKKKTGLNKKYGALSVLNQIIPALTKELSFLFPKHFFATNGKSTYDYRAAHGVGKDHWLDAYCIAGSVLPNDACDNNINNHVPYELKQFRRHDRRALHKENMGRVYTLNGKSVATNRHKAIKQTTDSLEEFRQRQPNDVCKLKVKEHHPEYRNPKRNFPGCVFLVGKHTHVMQGTSGSHNGKADGYYDTNGNSYSSGKCKFVVKNEGIVFT

SEQ ID NO: 9742 - protein, 442 aa, unidentified; identical to SEQ ID NO: 7396
  REGION 1..442: note = Human gut metagenome

SEQ ID NO: 9743 - protein, 495 aa, Moorena sp.
MSTTLARGESGGSMAGEVIHQRRHKVMAYVAVLSASGKSLMPTTAYKARKLLKSGRAKIYSYRPLFTIQMQDREEGTTQPIEMKVDTGAQYIGVSVCSEKHEYWNRRYDMLPNEKEMHDEARKNRRNRRQKLRYRAPRFDNRTHGHNRKEDKWFTPSLKHRENIHIQLAAKICAVVPVTDAYFEMGQFDIQVLKAYEAGKPIPVGDDYQKDERYGYATLREAIFARDNYTCQVCGAKLDDKHHPILRMHHIGYWKHDHSNRMGNLMTVCIKCHTAANHKPGGKLYGLEPELPTFKGAAFMNTVRWNMFTQLKKTLPNVKCHITYGAMTKLKRSELNTRKTHSNDAYCMGTLHPKWRTDFQHYQKVRRNNRVLSKFYDAQYIDTRDGEKMSGSQLSCGRTKRSESRHSIKNLRGYRGHRATSKGKKPKISKGHISIRRHKYAFNTGDIVIVQGKKLTVSGTQHYGEYVVFRDKTHAAAKAKEVTMYRHGDGWIRVV

SEQ ID NO: 9744 - protein, 427 aa, Scytonema sp.; identical to SEQ ID NO: 4708

SEQ ID NO: 9745 - protein, 431 aa, unidentified; identical to SEQ ID NO: 5232
  REGION 1..431: note = Human gut metagenome

SEQ ID NO: 9746 - protein, 442 aa, unidentified; identical to SEQ ID NO: 7529
  REGION 1..442: note = Human gut metagenome

SEQ ID NO: 9747 - protein, 304 aa, unidentified
  REGION 1..304: note = Human gut metagenome
VHSKHKGWLAPSVEVKIQEHITVIKRICRILPVALVRVETAEFDTQRLKAMLEGKPLPVGTDYQLGEMYDEYNVRQYVLKRDHYTCQCCGAHTTTKKTVKLHVHHLESRKVGGNAPSNLITLCTTCHDALHKGKVSLDGKERGKPLRDAAFMGIMRKALMARLREELPIPVQGTYGYITKMRREQNDIKKSHVNDARCISKHPLAEPCSVCYRTKAIRHHNRQTHKANFSKGGIRKRSQMPYVVEGYRLWDKVLYKGQECFVSGRRASGSFTLKKLDGTRISKGVTFKKLRLLEPATNYLIERM

SEQ ID NO: 9748 - protein, 442 aa, Moorena sp.; identical to SEQ ID NO: 2637

SEQ ID NO: 9749 - protein, 424 aa, Caldicoprobacter sp.
MVYVISKAGKPLMPTERHGKVRRLLKQGLAKVVKREPFTVQLLYDTTTYTQPVTVGLDIGSKTTGVSAVTEKKEIFSAEVELRDDIKGLLLERRQYRRMRRYRKVRYRKPRFLNRARDDGWLAPSLQWKVDAHIRIVDMLGRIMPIERVVVEVAPFDTQKILNPDIEGADYQNGAQKGFWDVREYCLWRAGYRSELSGKRGILEVHHIVPRSEGGTDTPSNLIVLTADEHKGVHEGRIRIPKSKVEKVKMFKDAAHVSTIGWHIVNRLRERYSVEVTYGSTTKAKRLSCGMEKSHRVDAFIIAGGDLQERLREWYLGKFLRRQNRSLHKANPIKGGVRPVNTIKEAYGFRRYDRVEYEGIIGIIAGLRSSGYFAVRSLSGEKIHDSAKHNRLRLVEKAKTLMLERREERIPLHLEEDGVSCARI

SEQ ID NO: 9750 - protein, 414 aa, unidentified
  REGION 1..414: note = metagenome
MPCSPAKARLLLKEKKAIVKRRTPFTIQLTIATGETKQPVSLGVDAGYKHVGLSASTEKAELYASEVELRKDITDLLSARRALRQSRRNRKTRYRAPRFDNRIRTKRKGWLAPSVENRINAHLSRIEAVLRLLPVTKITVETASFDLQLLKNPDISGKEYQEGEQLGFWNVREYVLFRDGHVCQHCHGRLKDPVLNVHHLKSRRTGGDSPSNLITLCETCHKALHRGEITLKAKRGQSFRAETFMGIMRREVLDRLKASHPKLEVQNTYGYRTKHARISNGIAKSHCADAFCIAGNLGAKRLGEFFFQKQTRRNNRQIHKLSILKGGIRKRNQAPFEIKGFRLFDKVACKGEESFIFGRRSSGYFDVRKLDGTRISAGISCKKLRLLEKRRTYLTEIRKEEALPPLPEGRGLRA

SEQ ID NO: 9751 - protein, 496 aa, Streptomyces sp.; identical to SEQ ID NO: 4777

SEQ ID NO: 9752 - protein, 454 aa, Streptomyces sp.; identical to SEQ ID NO: 9429

SEQ ID NO: 9753 - protein, 429 aa, unidentified; identical to SEQ ID NO: 9712
  REGION 1..429: note = Freshwater metagenome

SEQ ID NO: 9754 - protein, 393 aa, unidentified
  REGION 1..393: note = Human gut metagenome
NGTISKKCVKQATAQNGSVSKRANEIGVIKRHLPGCEKNVLCIGIKNKEAKFSNRTRPEGWLTPTANQLLQTHVNLVKKIQKFLPISDVVLEVNKFAFMRLDNPNVQKWQYQQGPLYQKASLEEAVSEMQEHHCLFCKNTIDHYHHVVPQHKNGSNTIGNIVGLCAKHHDLVHKDTSWQEKLAKKKTGLNKRYGALSVLNQIIPALTKELSSLFPKHFFATNGKSTYDYRAAHGVSKDHWLDAYCIAGSVLPNDACDNNINNRVPYELKQFRRHDRRALHKENMSRVYTLNGKSVATNRHKAIKQTTDSLEEFRQRQPNDVCKLKVKEHHPEYRNPKRNFPGCVFLVGKHTHVMQGTSGSHNGKADGYYDTNGNSYSSGKCKFVVKNEGIVFT

SEQ ID NO: 9755 - protein, 495 aa, unidentified
  REGION 1..495: note = gut metagenome
MAAVYVLSASGKPLMPTTRCGHVRILLKEGKARVVERIPFTIQLTYQSTEETQSLYLGIDPGRTNIGAAVIREDGECVFTAQLTTRNKDVPKLMKARKQFRMAHRRLKRRCKRQRRAKTNGTTSQKEAFQRLLPGCEEPITCKGIRNKEARFNNRKRPVGWLTPTANHLLLTHINLVQKLKKFLPITDVVLEVNRFAFMAMDNPHIQRWQYQRGPLFGQGSVEEAVYAAQDGHCLFCKNGIDHYHHVIPRRKNGSETLENRVGLCEEHHRLVHTEASWEEKLATKKAGLNKKYHALSVLNQIIPQLTEQLTELFPQHAFATTGQNTYAFREDHSIPKDHYLDAYCIACSVLADTSRVAIPKEAPYDIRQFRRHDRQACHKANIERKYIDAGGKVVASNRNKAIEQKTDSLVEYRVSHSEAEVSQLTVKPHLPQYKDMGRPMPGSLALHNGNVFVLTASDGRHNGFVDYYIDEHGEKHGARKCDIQTNNTGLQFCG

SEQ ID NO: 9756 - protein, 430 aa, Desulfobacter sp.
LSVFVLDTNKKPQNPVHPAKARLLLTEGKAAVFRQFPFTIILKETVLDVASNPLRIKIDPGSRDTGIAVINDDTGEIVFAMELRHRGQQIKNNLESRRAIRRSRRNRKTRYRKPRFDNRTRAEGWLPPSLKSRIHNIETWVNRLCRFCNIQAISMELVRFDMQKIQNPEISGVAYQQGELMGYEVREYLLEKWDRTCAYCGKTDIPLEIEHIVPRSKGGSNRVSNLTLACTACNRKKGNKPLEQFLSRKPRLLKRIQKQSKMPLKDAGAVNATRWDLFRTLKKTGLPVEIGSGGLTKFNRTTRGLHKTHWLDAACVGKSTPEKMFQIDKTVLIVKADGHGSRQMCRVNKFGFPRTTAKSTEKKVKGFQTGEIVKAVVTSGKKVGTYIGRVAVRKSGSFNIKTVDKTVQGISWKYCRLLHASDGYSYNTTC

SEQ ID NO: 9757 - protein, 381 aa, Moorena sp.
  SITE 381: note = misc_feature - Xaa can be any naturally occurring amino acid
MSRVLIVDQQRRPLMPCTPARARLLLKQKKAAVLRRCPFTLILHESRPEAVVQPLRLKIDPGSKVSGLALVNDTSGEVVWAAEVTHRGGQVHKDLQKRAGVRRGRRQRHTWYRPARYLNRRRPKGWLPPSLESRVQNVETWTQRLIFWAPVGSLSYEAVRFDTQALQNPEIEGTQYQHGTLAGLEVKEYLLLKWGQRCAYCEKMGLPLQLEHIIPKIRGGSNRVTNLTLACEQCNGKKGNQTAEEFGFPHLQAQAKAPLKDAAAVNSTRRVLHQRLVRTGLPIEASSGGRTKWNRRERDIAKTHWLDAANVGPSTPARLLFQHVRPWLIEANRRQDRQLCLVNALGFPRSKPKKKSPKHDFRTGDIVRAVVPAHLENPGIX

SEQ ID NO: 9758 - protein, 442 aa, unidentified; identical to SEQ ID NO: 2903
  REGION 1..442: note = Human gut metagenome

SEQ ID NO: 9759 - protein, 430 aa, Moorena sp.
  REGION 384..409: note = misc_feature - Xaa can be any naturally occurring amino acid
MVYVLDQSGQPLMPTERHGKVRHLLKSGKAKVIKRCPFTIQLLYNSTHYTQDITLGVDAGSKQIGLSATTKQKELYAAEIELRNDIVKLLAARRELRRSRRSRKTRYRKPRFQNRTHSRKPGWLAPSIRQRIQCHLTVIANVHKLLPTKTILIETASFDIQKIKHPDIHGVQYQKGEQLDFWNVREYVLFRDNHTCQCCKGRSKDNILNVHHIESRQTGGNAPNNLITLCETCHTGYHNGKVILPKTIKRGMSFKDAAFMGIMRWSCYDMLKNIYPDVHMTYGYITKNTRIGNNLAKEHYVDARCISKNPKAKPLPYYYYQKKVRCHNRQIHKTKPTKHGIRKRNQAEYVVHRYRLFDKVQYQNNEYFIFGRRKTGYFDIRTLXXXXXXXXXXXXXXXXXXXXXXXXXXKKLKLLEKSKKYLTETRLQTT

SEQ ID NO: 9760 - protein, 406 aa, unidentified; identical to SEQ ID NO: 7406
  REGION 1..406: note = Human gut metagenome

SEQ ID NO: 9761 - protein, 440 aa, Calothrix sp.
MTTNLIFVLDSDKKPLTMCTPGLARKLLDSQKAAMFKWYPATIILKKSVVELPLPYLELRIDPGSRFTGIALVEIETETIVWAMELEHRGLSISETLTSRSNIRKGRRSRNTRYRKERPNHKKSSGWLPPSLQHRVDTTMTWVRRIIKLAPIKSIAFERVKFDMQKIENPSIEGIEYQQGALQGYTLREALLDHWGRKCAYCNAIDVPLEIEHIQPKSKGGSDRFNNLTLSCHQCNQNKSNQTIDEFLKDDPARLNNIKKHQKQSLRDAAAVNSTRNKLFDSLKTFNIPIYSGSGAETKMMRIKSNLPKAHFIDAGCVNASYKVTLKTIQPLRVKCNGHGNRQFMTMDKHGFPRKDYAPKCVRKDWKAGDIIKVKKKGGNFVLGRVKKAAKTLAFIPFGGKETSFSPKNTKPIHRSDGYRYSFTTIDTEGRKRKRSFPAG

SEQ ID NO: 9762 - protein, 408 aa, unidentified; identical to SEQ ID NO: 6729
  REGION 1..408: note = Human gut metagenome

SEQ ID NO: 9763 - protein, 411 aa, unidentified; identical to SEQ ID NO: 6244
  REGION 1..411: note = Human gut metagenome

SEQ ID NO: 9764 - protein, 512 aa, unidentified
  REGION 1..512: note = Human gut metagenome
MSTVYVLNKDGKPLMPTTRGGHVRRLLKEQKAQVVTSKPFTIQLLYETDDVVQPLYLGIDPGRTNIGVAVVKTDGTAVFTAHLETRNKEIPKLMQGRKKARRARRTNGRRCRRQRRAKANGTISKKCVKQTTAQNGSVSKRAKKIGVIKRHLPGCEKKVLCIGIKNKEAKFSNRTRPEGWLTPTANQLLQTHINLIKKIRKFLPVNDVVLEINKFAFMQLDNPNIQKWQYQQGPLYQKASLEEAVSEMQEHHCLFCKQSIVHYHHVVPQSENGSDTIGNIVGLCTKHHDLVHKDTAWQKKLAKKKTGLNKKYGALSILNQIIPALTKELSSLFPKHFFATNGKSTHDYRAAHDVSKDHWLDAYCIACSVLPNDTCDKTINSRVPYELKQFRRHDRRALNNENMSRVYTFNGKMVATNRHKATEQTTDSLEEFRQRQPNDVCNLKVKEHHPTYRNMNRNYPGSVFLVGNQVHVMQGIAGSKDGEATTYKDTNANSIAAGKCKFVAKNSGILFV

SEQ ID NO: 9765 - protein, 460 aa, unidentified; identical to SEQ ID NO: 7734
  REGION 1..460: note = Mouse gut metagenome

SEQ ID NO: 9766 - protein, 456 aa, Moorena sp.
LAAFVLDRNGKPLMPCTEKRARLLLVRRRARVHRVVPFTIRIIDRDIRTSDVQPLRIKLDPGSRVTGMALVRDFACSDGLRGAAVLNLFDLIHRGAQISKMLTVRRAMRRARRYRKTRYRAARLNNRRRSTGWLAPSLRHRLETTTAWVHRLRRFAPVVAISTELVRFDMQAMENPDIRGVEYQQGTLAGYELREYLLEKWGRQCAYCDATGRPLQIDHIKARALGGSNRVSNLTLACKSCNQQKDSLPLTTFLRHDSRRAAQILAHARAPLRDAAAVNMTRWALFGALKATGLQVEPSTGGRTKFNRAHLSVPKTHALDAACVGEVDMLRYWRRPTLAIRCTGRGAYRRTRLTASGFPRGYLMRQKRACGFQTGDLVRAKVPRGKKTGTYVGRVAIRASGSFNIQCAAQVMQGISHRYCTVMQRGDGYGYSFVAQFPKESENWGDATRRALSLPA

SEQ ID NO: 9767 - protein, 453 aa, unidentified
  REGION 1..453: note = Human gut metagenome
MLMAVAVVSRTGVPLMPTSPYRARKLLASGKAEKYGYDPFTIRLTERETGDTQPVELCMDTGYIHIGVSVKSEKHEYLALQIDTLTDEKKKHEKCREKRRNRRSRKRYRKPRFDNRKRDKGWLAPSLKHKKEIHVRAAERICRVVPVTDITMEMGNFDTQVLKAKEEGRPLPQGTDYQQGERYGTATLREAVFSRDNYTCLCCGRTMKDGAYFHVHHIRYRSQGGTDRMANLATVCEKCHTPANHQPGGKLYNWKPEIKSFKGATFMTAVRWQMYREIKEKIPDVSVHLTYGAATKERRRALDIEKSHVNDAFVMGRFHPGHRARPELYIKKRRNNRVLESFYDARYIDSRDGKRKPGKELFNGRISRNHKKDSENLHKYRLRKVSKGKRCIRKKHYLIQPHDILVYCGRKYETAGCHNLGTGAILLPERRSIAVSKLKIYRYSGGYYKAAFN

SEQ ID NO: 9768 - protein, 544 aa, unidentified
  REGION 1..544: note = Human gut metagenome
MKQKKQKVMVYILNKKGKPLMPTTRCGHVRKLLDSKKAVVVSSNPFTIRLKYDTPNGVQDVFAGIDSGRENIGSGASNEDGDCLYLGELKTSNKSIKMKMTERAGFRKERRSHDRQNKQRKARKDHTEIQNGNADICRTTISCKSVQISYPAAEKSVTHKIIRGKEGKFANRHRDEGWITPSARQLVQMHMNDLKSMCRILPISHVTLERVAFDFQKLENENIKAWEYGKGKLYGYDSPEEYIHDVQGGKCLICGKPHIDYLHHIIPRSKGGSNKVSNLAGLCYDCHYGPMGVHNCQDTQGRLPELKNEANKQYKVSLLNSVMPVLIEEMDKFCKANSIIFSICGGHDTAKVRDMYDLQKDHCIDGFAISLAGRNVKSVDVMPDRIHQKQRYKKKSKNIIQKRNCREYYDGKKLAAVNRHKGTDQKADSLEEYMNTYAETHTADECKKHFESLTVKPARRTYTFHKEGRICPFHIGDKVRYEKKNKIKGNTKVETFICEGIRFPKDENKAKVEHNKTKSKKMKFCRVLEPGCTPYIDYRKLVLI

SEQ ID NO: 9769 - protein, 417 aa, unidentified
  REGION 1..417: note = Human gut metagenome
MPCSPAKARLLLEEKKAIVKRRTPFTIQLTIATGEAKQPVTLGVDSGYKHIGLSATTEKAELYASQVELRQDITDLLSARLALRRSRRSRKTRYRAPRFDNRVASKRKGRLAPSVENRIAAHMSRVEAVMRVLPVTAITVETAVFDTQLLKTPDIAGAAYQQGEQLGFWNVREYVLFRDGHVCQHCRGKSKDPILNVHHIESRRTGGDAPNNLITLCETCHKAFHRGEIELKIKRGKSFKAETFMGIMRWTLFERLKKAHPELNVHNTYGYLTKHKRISHGIAKSHCADAYCIADNLSAKRLKGFFFQKQTRKHNRQIHKLSILKGGLRKKNQAPYEVKGFRLFDKVICKGEEAFIFGRRTSGSFDVRRLDGTRISAGISYKKLRRLESRTTYLTEFRKEAALPPLHKCRGFRAEFL

SEQ ID NO: 9770 - protein, 419 aa, Butyrivibrio sp.
MVYVISQDGKPLMPCSNTIARLLLKQGKAKVKRREPFTIKLTYETTSYTQDLTLGVDTGSGTIGTAVSKNNGDIVYISEIIVRNDITDKMTQRAKYRRNRRNRKTRYRKAKWLNRANSIKNDRFSPTMQSKLHSHVKEIEYIKSILPITKLVFETGQFDMHLMKNPSLASPKVKHWGYQKGANYGVENIKAMVLNRDNYTCQCCRGKHKDSKLEVHHIIYRSQGGSDEADNLITLCHTCHKALHDGKINPKLSGKTKGNLKYATQMNSIRKQLFRLYPGAIETFGYITKANRLRLGVNKEHYHDACTIATQGDSFALKTNLYKKKCISDGDFQKTKGIRSEQPIETKKICGFRKFDKVRYFGKEYFIKGRMSTGYAILMDIEGKKIDFSSMPKGYKTPKLNNCMRIAARTSQIIQTVAM

SEQ ID NO: 9771 - protein, 442 aa, unidentified
  REGION 1..442: note = Human gut metagenome
MSTSVFVLDKKHRPLMPCRPARARRLLRAGRARVVKRFPFVIRLVDRTVEQSEVQPVLIKLDPGSRETGAAVVRDDGKKRHHALAFFVIEHRGGAIRDALKARSAFRRRRRSQNLRCRSPRFLNRVKPKGWLPPSLRHRVETTLSFVRRMCRYLPVSGIAAELVKFDSQKLQTPEVSGIEYQQGTLFEYEVREYLLEKFGRKCVYCGAEGVPLNIDHVVPRAKGGSNRVSNLVLACVSCNQKKGARSLEDFLKGKPEVLARVRRELKTPLRDAAAVNATRWVLFNELKATGLPVETGSGALTKLNRHAFGVEKEHWLDALCVGRLNGAVTRKGLNVLEIRCMGRGSRQRTRLTKYGFPRGYLMRQKCVHGFATGDMVEANVPKGKKAGLWRGRVAVRVSGSFNIQTPKGVIQGVGWKHCRLISHNDGYGYAWLGHAPHSSPA

SEQ ID NO: 9772 - protein, 518 aa, unidentified; identical to SEQ ID NO: 2751
  REGION 1..518: note = Human gut metagenome

SEQ ID NO: 9773 - protein, 557 aa, Blautia sp.; identical to SEQ ID NO: 7395

SEQ ID NO: 9774 - protein, 423 aa, unidentified; identical to SEQ ID NO: 3951
  REGION 1..423: note = Human gut metagenome

SEQ ID NO: 9775 - protein, 453 aa, unidentified
  REGION 1..453: note = Human gut metagenome
MSVAVVSKTGMLLMPTSEYRARKLLKSKKAIIHGYHPFTIQLTERETGYIQPVELCMDTGYIHIGTSVKSEKHEYLGEQIDTLTDERQKHDACRMYRRQRRNRKRYRQPRFNNRERDDGWIAPSLEHKKTIHIQALSRICKVIPVTDITLEMGNFDTQVLKAREEGRPLPQGLDYQHGERYSVTTLREAVFLRDGYTCQRCGRTIKDGAILHVHHVVYRSQGGTNRISNLITICDKCHTPANHKPGGKLYGWKPKVASFKGATYMTTIRWKLYNEIKALFPDIDIHITYGAETKERRRAFDITKSHVNDAFVMGQFHPKYRSKPVCYKKKRRNNRCLEKFYDAKYIDSRNGKTRTGQELFNGRISRNHKKDSENLHQYRRQKISTGKRTIRKQHYAIQPHDIVIFNGEKFETSGCHNNGTRVILLPQKKSVAIKKLNIYRYAGGYFKSAFNQK

SEQ ID NO: 9776 - protein, 413 aa, unidentified
  REGION 1..413: note = Human gut metagenome
MTSYAFVLDANGKQLAPAKEQKAWFLIRKKRAALVSKYPMVIQLKKEIPENEICKDEIRCGIDDGGLHVGIALVQKCKTKNKVVFKGTIEQRNDVKHLMEVRRSYRHYHRYHKRYRPARFDNRKSSKRKKRIAPSILQKRQAIIRVIHWLNKWINITNYWLEDVSIDIRALTDGYKPYRWQYQKSNRLDENIRKAAILRDGGKCMECGKLNCRLEVHHIKPRRRNGSDMLDNLITLCKSCHQKTEGQEELYMDRYFSLLKSSDHKNLNYAQHVMIGKEWLRKQLSSLGVLYLTNGGDTANKRIDWNIEKSHANDAVCITNLQPDTYDMKEWTVKPMRRQSKAKTDNVLGIKHRDLVEYTFKNGETHRGYVIALYPEQKAINFQSPTKHCKKVNARKCKLLWKYSKIYWFENAS

SEQ ID NO: 9777 - protein, 430 aa, unidentified
  REGION 1..430: note = Human gut metagenome
MPKVYVLNRHGRPLMPCTPAKARHLLDAGKEKVRHRTPFTIQLLYGSTGYTQEVILGVDAGSKTIGLSAATETEELFSAEVKPRNDVVELMSARRQFRRARRNRATRYRKPRFDNRVRSKHKGWLSPSVEVKIQEHMTAIRRACAILPVSKVVVETAEFDLQLLKAVAEGKPVPQGEDYQKGEMYGHYNVRQYVLWRDSYTCCICGVHGSVRKGVPLHVHHLESRRVGGDAPDNLVTLCTACHDKLHKGIIMAADIKKRKRRSTRDATFMGIMRMTLLRRLREQLPVPVVETRGYITKATRENLLVLPKSHANDALAIAHGPQGFRAEYLPNIRQADRLYTIRPVRHHNRQLHKATILKGGVRKANQAEKYICGFRLYDKVLYNGIECFVWGRRTSGSFLLRQLNGEKVKDGVSYKHLKLLERSQSYLVA

SEQ ID NO: 9778 - protein, 414 aa, unidentified; identical to SEQ ID NO: 2588
  REGION 1..414: note = Human gut metagenome

SEQ ID NO: 9779 - protein, 424 aa, unidentified; identical to SEQ ID NO: 6533
  REGION 1..424: note = Human gut metagenome

SEQ ID NO: 9780 - protein, 406 aa, unidentified; identical to SEQ ID NO: 2973
  REGION 1..406: note = Human gut metagenome

SEQ ID NO: 9781 - protein, 470 aa, unidentified; identical to SEQ ID NO: 2825
  REGION 1..470: note = Human gut metagenome

SEQ ID NO: 9782 - protein, 419 aa, unidentified
  REGION 1..419: note = Human gut metagenome
MVYVISQDGKPLMPCSDPIARLLLKQGKAKVKKREPFTIKLTYETTNYTQGLTLGVDTGSGTIGTAVSKDNGDIVYMSEVVVRNDITDKMTQRAKYRRNRRNRKTRYRKARWLNRASSIKKDRFSPTMQSKLHSHVREIEYIQSILPVTEMVFETGQFDMQLMKNPSLANPKVRPWGYQKGANYGFENTKAMVLNRDNYTCQCCKGKHKDSKLEVHHIVFRSQGGSDEESNLLTLCHTCHKDLHSGKINPKLSGKLKGNLKYATQMNSIRKQLFRFYPNAIETFGYVTKANRLHLGVDKEHYYDACTIATQGNAFNVKSNLYKKKCVSDGDFQKTKGIRSEQPIVTDKICGFRKFDKVRYFGNDYFIKGRMSTGYAILMDVDGNKIDFSTMPRGYKTPKLSNCKRITARSTVMTQVKVV

SEQ ID NO: 9783 - protein, 466 aa, unidentified; identical to SEQ ID NO: 9194
  REGION 1..466: note = Human gut metagenome

SEQ ID NO: 9784 - protein, 453 aa, unidentified
  REGION 1..453: note = Human gut metagenome
MSTCVCVLGSDGERLMPTFRLGKVRRLLKDGKAKIIKHHPFTIQLLYDSKTNTQPIEICEDVGYNYIGISVKSESHEYVSAQYDTLQDEKACHDSCRKLRRTRRNRLRYRKPRFDNRKRGEGWLAPSLRHKKELNVNVVKMYCAVMPITHATVEVGSFDTMLVKAIQEGKAIPEGADYQKGPRYNLATLREAVFYRDNYTCQVCGRKIADGAILHMHHMFYWKGRHGNSLDELLTVCEKCHTPANHQKSGKLYGFGEDVKFSNLSGAAFMNTVRWQIVNELYAAFGKPFVTITYGAMTKEKRIALHLEKSHNNDAYAMGEFHPNCRCAFEHYEKVRRNNRILERFYDSRYIDIRTGEIATGKELFNGRINRNHKKDSENLHKYRGKRTYAGHRALLRKKVNLNPGDLVSLNGEVLIVYGTHTDKKGAVNVEFKTPAKNGRKSASLKKLKIVKT

SEQ ID NO: 9785 - protein, 415 aa, unidentified
  REGION 1..415: note = Human gut metagenome
MVYVVANDGQPLMPTERHGKVCWMLRSGMAKVIKKCPFTIQLQYESERNVQPVSLGVDAGSKHIGISATTKTKVLYESDVELRDDIVKLLATRRQLRRSRRSRKTRYRPARFDNRKRKEGWLAPSIQQKIGSHLTVVANVCKILPINQIIVETASFDIQKIKNPEIQGIEYQQGEQMDFWNVREYVFFRDGHTCQCCKGRSKDKILNVHHIESRKIGGNAPNNLITLCETCHKGYHNGTVILPKNIKRGMQFKDAAFMGIMRWAFYNALKEQYEPAIPVSMTYGYLTKNTRIEHGLLKEHYIDARCISGNPDAVSDGTYYYQKKVRCHNRQIHKQTILKGGIRKSNQAEYLVKGYRLFDKVRYHGREYFIFGRRKTGFFDIRTLSGEKVNKGSISVKKLTFADTRKNYLTERRTA

SEQ ID NO: 9786 - protein, 453 aa, Nostoc sp.; identical to SEQ ID NO: 3348

SEQ ID NO: 9787 - protein, 470 aa, unidentified
  REGION 1..470: note = Human gut metagenome
MSVFVVGLNGCRLMPVSERKARLLLKGGKASVYRKVPFTIKLNYKTGNTVQPGYLGIDTGSQHIGVSVVQKDGTVLHKEEIGLRDSMSKRKLLESRASSRRGRRYRKTRYRHPKWKPKTKRIYNEKADRKGRHWKKQKNTFTSKRQAGCLPPSLQSKTDHHIQWIRKLLDLLPEGYRLSIELGRFDPARMKDPGIHGELYQKGPQYDYENVRAYVLARDGYTCRVCKKKGGKLHVHHILYRSRGASDNPKYMAAVCSKCHTTENHLPGGILYQWMQDQKKFTRCLRDATFMNILKKRLRKAFPDAVFTYGNITKADREKLELPKSHGNDATAIALVKTEVKSVKDEEPVIHIQQVRRKKRSLHEETPRKGRKGPNRTASRSDKNTKSVTVTKGSGEKKASMTACLFDRVELDGKKGWITGFTGTSCYVKDKEDNYICTSPKYKQVSISRLRILHHCGNWAIGAEKPLGKG

SEQ ID NO: 9788 - protein, 412 aa, Enterococcus sp.; identical to SEQ ID NO: 5283

SEQ ID NO: 9789 - protein, 423 aa, Oscillatoria sp.; identical to SEQ ID NO: 5009

SEQ ID NO: 9790 - protein, 480 aa, Planomonospora sp.
VMATSDVRRQTHRRVLPQPAALESTGADTPGRDETARGDTIGDDCVPGIGPGRGETRAWRTRARGRHPEAAAVAEGERGGNVPSVFVLDKHGEPLMPCHPARARELLASGRAVVVRHTPFAIRLKDRTVADSRVAGVEAGIDPGSRHTGLSIFTQAGGVRRGIFALQLDHRGGWIRDKLTARAAYRRGRRSRNLRYRAPRFNNRTRPKGWLAPSLRHRVDGTLSWITRLRRWAPIRAIHVERVAFDTSAMAAGRSLSGTEYQQGTLAGYEVREYLLARWERRCAYCDAQNVPLNIDHIRPRARGGSDRISNLTLAVHAVSGGRTKWNRHRTAAPKSHTLDALHVGEMETVVSWPSTVLVASATGRGSYARTAPDRYGFPRLRRPRTKQVHGFATGDLVRAIVPAGKKAGTHVGRVAVRTTGSFNIRTVRGLVQSIGHRHVRLLQRADGYGYTTIKETTMTDRSAFSPRPEGQGFHAGGNQ

SEQ ID NO: 9791 - protein, 415 aa, unidentified
  REGION 1..415: note = Human gut metagenome
MENKIEYCFVIDKNNKPLAPTKINKGWYLIRKGRAKLKSKYPMVIQLEKEVKSDEDDESHMVCGIDDGSTHVGLAIVQKCLTKNKVVFKGTIEQRQDVKHLMDVRRGYRRYHRYHKRYRQARFNNRSSSKRTCRLAPSIRQKKDAILRVLYQLNSWIDIQEYYLEDVCIDIRAMTDDYKPYRWQYQKSNRLDENLRKATILRDGCRCQECGKSNCILEVHHIRARRYGGANTIGNLITLCKKCHDKTESREKDFEERYFNMIKSKPKRFDYAMHVMQGKTYLREKISELGILHLTNGGETANKRIEWNIVKSHSNDAICIADGIPDTCDIKEWIIKPMRRKSKAKTDNVLGIKHRDLVSYTYKSGETHTGYVTALYPEQLALNFQSKTKHCKKVNARKCRLLWKFNKIYWLEQCV

SEQ ID NO: 9792 - protein, 469 aa, Moorena sp.; identical to SEQ ID NO: 9450

SEQ ID NO: 9793 - protein, 431 aa, unidentified
  REGION 1..431: note = Human oral metagenome
MLVYVLKQNGQPFMPTERFGKVRRLLKEGKAKVVRREPFTIKLLYEPEADVVQECYCGVDTGSKHIGVAVIGNDKVLYQSQTELRDDIKKKMDRRRDFRKTRRFRRTRYRKQRFLNRRNSIKKDRLTPSVKHKVQAHIDEIEFCKKILPISDENLILEVSQFDTALMKNPSLITEKVRHWGYQKGFNYGYSSRRSAILHRDGYTCQCCGKKNCRLEVHHIKFRRYGGTDDENNLITLCVDCHKGVHAGTVVLNKSPKKSKGLKHTTHMSIIRSRLLKKYPNAIETFGFVTSENRNHLKLEKAHYIDACVIASGGLEFKELDVIYIKRRVSKQDRILTKGVRDERKIPTGKIHGFKRYDKVKYLGRVCFVKGRRTKGDFVLMDINNNALDFRNMGGKQNPSYKSITRVNTRKSVLCIKERIEREGRLIPVLG

SEQ ID NO: 9794 - protein, 411 aa, unidentified; identical to SEQ ID NO: 9536
  REGION 1..411: note = Human gut metagenome

SEQ ID NO: 9795 - protein, 435 aa, Lactobacillus sp.
MQNRVFVINRQGEPLMPCKQQKCRKLLQAGRAKVVKKEPFTIQLLFGSTGYKQPVSIGVDSGQHHIGLAVTSQDKVLFQGEVSLRQDVKKLLDTRRAYRNGRRNRNTRYRPPRFLNRAKPVGWLPPSVASKVQHNINWIQRMQAVLPKADLHIEVGKFDMAKMKQPDITGLGYQQGDKYGYETTKQYVLARDNYTCQICQGKSKDPKLKIHHIIYRSTGGTNQVSNLLTVCANCHTLANHQPGGKLYALQAKQFQSHRSLKGATFMNILRRRLFMAFPAAKFQYGAQTTLDRAKLDLPKAHYNDAVTISGIQKITQRPTAVVMFHQFRKKKRSLHEATARKGRKVPNITSKRNAKNTKFSNSFYLNDYVQLPDGQKGNISGFSGKTTCYVKDGGNHYLTINPKYKQVNLSKLKVIRHQNNWNVAEIRTAVYTMAG

SEQ ID NO: 9796 - protein, 428 aa, Microcoleus sp.
MSILKPNYVFVLDANRKPLTPCKPSLARKLLKVGKAKVFRLYPFTLLLKKEVTEDPQPVTLKIDPGSKVTGLAILLDSSLIWVAELTHRGQAIKTSLESRRSLRRGRRSRHTRYRQARFLNRTKPKGWLAPSLRHRVETTLTWVNKLSKLAPVKTIFQELVRFDLQKIENPEISGVEYQQGVLAGYEVREYLLNKWERRCAYCSAENVPLQVEHIHPKASGGTNRISNLCLACEPCNTKKGTQDIKIFLAKKPDDLKKILAQAKRPLKDATAVNSTRWALLDGLKETGKVIITGSGGLTKFNRIRLELPKTHFFDAACVGDTPNISVLANQPLNIKATGHGSRQMCRTDKFGFPSRYVPRFKFVKGFQTGDIIKAVVTSGKKVGTYTGRVAVRSSGSFNVSAVQGLIQGINHKYCFSIHQKDGYNYGF

SEQ ID NO: 9797 - protein, 468 aa, unidentified
  REGION 1..468: note = Human gut metagenome
MVITLDKNKRPLGFMSERRCRILLEKKRAVLYRYFPTIVILKDVDARKLSGLSSYRIKIDPGAKYTGIAIVMDDTNEFMYAMQIEHRGEQIKKNLDTRRGARRNRRSRETGYRRPKWGNRCTAKEQRQSYDSRRDENWLPPSVKSTADNIISWIRRLCRWINITNCSIESVRFDTQLMENPEIEGVEYQQGTLYGYEVKEYLLEKYGHTCQYCGGKSNDPILEWEHMLPRSRGGSDRLKNAALACHNCNQDKGNHTLEEWQTILQDRIPKERGKQKELDQIRQKFVQQVMEGKTPVKGLRYAAWVNSSRRYSQRHLYLRFPELECSSGGRTKYNRNVLKYPKEHHYDALCVGKIPEDGFVDRTNGYYLYAKATGRGTRLRGQINQCGVIIRKWMDRSKTAFGFQTGDLVVADVPKDTKYKYKGHFSGRVMIRKSGSFDIRTLSGELVTVNAKFCRLLQNNSGCIACWR

SEQ ID NO: 9798 - protein, 447 aa, unidentified; identical to SEQ ID NO: 5398
  REGION 1..447: note = Human gut metagenome

SEQ ID NO: 9799 - protein, 447 aa, unidentified; identical to SEQ ID NO: 8397
  REGION 1..447: note = Human gut metagenome

SEQ ID NO: 9800 - protein, 434 aa, unidentified; identical to SEQ ID NO: 7534
  REGION 1..434: note = Human gut metagenome

SEQ ID NO: 9801 - protein, 413 aa, unidentified; identical to SEQ ID NO: 2636
  REGION 1..413: note = Human gut metagenome

SEQ ID NO: 9802 - protein, 478 aa, unidentified
  REGION 1..478: note = Human gut metagenome
MNTCVCVLSNNGERLMPTFRLGKVRRLLKDGKAKIVKHHPFTIQLLNDSKTNTQPIEICEDVGYNYIGISVKSESHEYVSAQYDTLQDEKEHHDDCHKMRRARRNRLRYRKPRFDNRKRGEGWLAPSLEHKKQLNVNVVKMYCAVMPITHATVEVGSFDTMLVKAIQEGKAIPEGANYQKGPRYNLATLREAVFYRDNYVCKVCGRKATEGAILHMHHMFYWKGRHGNSLNELLTVCEKCHTPANHQKSGKLYGFGEGVKFADLSGAAFMNTVRWQIVNELYAAFGKPFVTITYGAMTKEKRIALRLEKSHNNDAYAMGEFHPNHRYTFEHYEKVRRNNRILEKFYDSRYIDIRTGEIATGKELFNGRINRNHKKDSENLHRYRGKRTYAGHRALLRKKVNLNPGDLVSLNGEVLVVHGTHTNKKGVVNVEFKAPAKNGQKSASLKKLKIVKAADSIHPAWKKSILNHSTKGVAGYLR

SEQ ID NO: 9803 - protein, 406 aa, unidentified
  REGION 1..406: note = Human gut metagenome
VVYVQDIDGNPLMPTTRHGKVRRLLKAKKATVVNLCPFTIRLLYDTTGYKQEITLGVDAGTKHVGLSATTKSKELYASEVILRSDVVDLLSTRRELRRARRYRLRYRKPRFNNRIKSKKDKWIAPSIRQKIDSHIRIIGFVYSILPVSKLIIEVAQFDTQKIKNPEISGKEYQEGEQLGFWNVREYVLARDGHKCQHCKGKSKDSILNVHHIESRKTGGDSPSNLITLCETCHKEFHKGKIKLKVKRSASLRDAAVMGIMKWELYDELKSLYPNIKMTFGYITKHDRINHGIEKSHVSDAFVISRNFDSYRLGYYYKQKLVRRHNRQIHKMKILKGGIKKPNQAPFKVFGFRLFDKVRYQDNVYFVYGRRTSGCFNIRDINGNNNKNPTFKKLTYISHGLISVETV

SEQ ID NO: 9804 - protein, 512 aa, unidentified; identical to SEQ ID NO: 3720
  REGION 1..512: note = Human gut metagenome

SEQ ID NO: 9805 - protein, 413 aa, unidentified
  REGION 1..413: note = Human gut metagenome
MPCSPAKARLLLKEKKAIVVRRTPFTIQLTIATGESKQPVSLGVDAGYKHVGLSASTEKAELYASEVELRQDVSDLLSARRALRQSRRSRNTRYRAPRFDIRIRTKRKGWLAPTVENRINVHLSRIETVLRLLPVTKITVETASFDTQLLKNPDIAGKEYQEGEQLSFWNVREYVLFRDGHVCQHCHGRSKDPVLNVHHLESRRTGGDSPGNLITLCETCHKALHRGGITLKAKRGQSFRAEAFMGIMRWEVLNRLKASHPELEVNNTYGYWTKHARIANGIAKSHCADAFCIAGNLGAERLGEFLFQKQTRRNNRQIHKLSILKGGRRKRNQASFEVKGFRLFDKVACKGEEIFIFSRRSSGYFDVRKLDGTRISAGISYKKLRLLEKRRTYLTEIRKEAFPPLPEGRSLRA

SEQ ID NO: 9806 - protein, 430 aa, unidentified; identical to SEQ ID NO: 4817
  REGION 1..430: note = Human gut metagenome

SEQ ID NO: 9807 - protein, 414 aa, unidentified
  REGION 1..414: note = Human gut metagenome
MPCSPAKARLLLKEKKAIVKRRTPFTIQLTIATGEAKQPVSLGIDAGYKHVGLSASTEKAELYASEVELRQDITDLLSARRALRQSRRNRKTRYRAPRFDNRISTKRKGWLAPSVENRINAHLSRIEAVLRLLPVTKITVETASFDLQLLKNPDISGKEYQEGEQLGFWNIREYVLCRDGHVCQHCYGRSKDPVLNVHHLESRRTGGDSPGNLITLCETCHKALHRGEITLKPKRGQSFRAEAFMGIMRWEVLGRLKASHPELEVNNTYGYRTKHARIANDIAKSHCADAFCIAGNLGAERLGEFFFQKQTRRNNRQIHKLSILKGGIRKRNQAPYEIKGFRLFDKVACQGEEGFIFGRRSSGFFDVRKVDGTRISAGISCKKLHLLEKRRTYLTEIRKEEVLPPLPEGRGLRA

SEQ ID NO: 9808 - protein, 461 aa, unidentified
  REGION 1..461: note = Human gut metagenome
MVKSSERQERCCRLETPSNIGEGSQPGERPRRQNLRVVVLNKRGKPLMPCSPAKARLLPKERNAIVVRRTPFTVQLTIATGETKQPVSLGVDAGYKHVGLSASTEKAELYASEIELRQDITDLLSARRELRRARRNRKTRYRGPRFDNRIRTKRKEWFAPSVENRINAHLSRIEKVLRLLPVTTITVETASFDTQLLKNPDISGKEYQEGEQLGFWNIREYVLCRDGHVCQHCYGRSKDPVLNVHHLKSRRMGGDSPGNLITLCETCHKALHRGEITLKAKRGQSFRAEAFMGIMRSEVLNRLKASHPELEVNNTYGYRTKHARIANDIAKSHCADAFCIAGNLGAERLGEFFFQKQTRRNNRQIHKLSILKGGIRKRNQAPFEVNGFRLFDKVACKGEEGFIFGRRSSGFFDVRKLDGTRISAGISCKKLHLLEKRRTYLTEIRKEEALPALPEGRGLRA

SEQ ID NO: 9809 - protein, 554 aa, Streptomyces sp.
MTTFPVGEQTHLAVLPQQPALESVGADTPGSRDETAHGHPAAVRGTGREHGRGETGGLGTGVRRRHAKNVAPAAKAAENRSGDAPPHDQSYAGGVGAGRVFVISRDGHPLMPCHPARARELLGKGRAVVARQVPFVIRLKYRTLAESEVDGLCLRIDPGSKGTGLALTDEKQETDAQGGSFTGRRGLVSVELRHRGEQIRLCMRQRAGYRRRRRSANRRYRAPRPDNRSRPAGWLPPSLRHRVDTTYAVASRLCRYAPVNEIHVESVAFDVHAMSVGRPLADVEYQRGTLAGIEARSYLRSRWENACAYCDATDVPLNIEHLTPRSRGGSDRISNLVLACVPCNRAKGSMPVEGFLADRPDRLAKILRQARTPLDDAAAMNATRWQLLERVRVLGRPVNPCSGAQTHWNRDAMGLGKTHTVDALCVGAMDHERGDAIVRLPDRVLVVRATGRGSYARTTPDRFGFPRLRRSRVKRHFGFATGDLVRAVVPLGKWAGVWTGRVSVRATGRHSLTATEGRIDVSHRNLRLLQRADGYGYAFRPEGARQHLGKPVEP

SEQ ID NO: 9810 - protein, 482 aa, unidentified; identical to SEQ ID NO: 3624
  REGION 1..482: note = Human gut metagenome

SEQ ID NO: 9811 - protein, 472 aa, unidentified; identical to SEQ ID NO: 4432
  REGION 1..472: note = Human gut metagenome

SEQ ID NO: 9812 - protein, 383 aa, unidentified
  REGION 1..383: note = Human gut metagenome
MRVFVFNMRGRPLMPCSQRKARLLLRENKAMIYKYHPFTIQLTYTTGETKQDCHIGIDTGSKYIGAAVRSEDKVFWKGEIELRQDIRSNLDTKRIYRRSRRNRKTRYRKPRFLNRKRRDEWLPPSLQSRINHTFHWIDTLSSLVPNPILHIEVGKFDVAKMINPEIHGVDYQHGQTYGFFDERYFVFARDNYTCQCCGKSKNKILNTHHIIYRSNGGTNRVDNLITVCTDCHTSQNHRKGGIFYQWQEQHKKVKQYKEPPFMNTLRKRIFVAYPDAEITYGSETTPKRKAMKLDKTHYNDAIVISGINEIKENPEEWLLIKQFRKKKRSLHEATARKGRKKPNRNQTRNSKNTPYYKGFYLNDKVSVFGRVDILQDLRAMRHI

SEQ ID NO: 9813 - protein, 512 aa, unidentified
  REGION 1..512: note = Human gut metagenome
MSTVYVLNKDGKPLMPTTRGGHVRHLLKEQKARVVRTKPFTIQLLYETDDVVQPLYLGIDPGRTNIGVAVVKADGTAVFTAHLETRNKEIPKLMKKRKDSRRARRTNGRRCRRQRRAKANDTLSTKRVKQTTAQNGSASKRAKEIGVIRRRLPGCEKDVLCIGIKNKEAKFNNRTRPEGWLTPTANQLLQTHINLVKKIQKFLPISDVVLETNKFAFMQLDNPNIQKWQYQQGPLYKKESLESAVSEMQEHHCLFCKKQIDHFHHVVPQHKNGSNTIGNIVGLCARHHDLVHKETAWQEKLAKKKTGLNKKYGALGVLNQIIPALTKELGVLFPKHFFVTTGKSTYDYRAAHGVCKDHWLDACCIACSVLPNDVCDSSINNRVPYELKQFRRHDRRVLHKENMNRVYTLNSKKAATNRHKATEQESASLEEFRKEHPDDVCKLKVKEHHPTYRNMNRNYPGSVFFVDKQVHVMQGIARSKDGKATTYKDTNANLITAEGCKFVAKNSGILFV

SEQ ID NO: 9814 - protein, 431 aa, unidentified
  REGION 1..431: note = Human gut metagenome
MPNKVYVINKHGRPLMPCSPAKARHLLDEGKAKIKKRTPFTIQLVYGSSGYTQEVILGVDAGSKTIGVSASTKKEELFAANVIPRNDVVDLLSTRREFRRARRNRKTRYRKPRFDNRVRSKHKGWLAPSVEVKIQEHITSIKRVCRILPVSKVVIETAEFDLQLLKAIADGKPVPQGEDYQKGEMYGHYNVRQYVLWRDNYTCQCCGAHATKKKEVRLHVHHLESRKTGGDAPGNLVTLCDSCHEKLHKGLIAEKDFKKRKRRSTRDATFMGIMRKTLMQRLCSELPIPVIETRGYITKATREKLLVLPKSHTNDALAIAQGKQGFNVGYLPGILQIDKIYTIRPVRHHNRQLHKAAILKGGIRKSNQAGKYVFGYRLFDKVQFNEQDCFIWGRRTTGIFTIKTINGKMIKDGISFKKLKLAEKSTSYLIA

SEQ ID NO: 9815 - protein, 426 aa, Moorena sp.; identical to SEQ ID NO: 8077

SEQ ID NO: 9816 - protein, 408 aa, unidentified; identical to SEQ ID NO: 4826
  REGION 1..408: note = Human gut metagenome

SEQ ID NO: 9817 - protein, 431 aa, unidentified
  REGION 1..431: note = Human gut metagenome
MPNKVYVINKHGRPLMPCSPAKARHLLDEGKAKIKKRTPFTIQLVYGSSGYTQEVILGVDAGSKTIGMSASTTKEELLSAEVKPRNDVVDLQSTRREFRRARRNRKTRYRKPRFDNRVRSKHKGWLAPSVEVKIQEHITSIKMVCRILPVSKVVIETAEFDLQLLKAIADGKPVPQGEDYQKGEMYGHYNVRQYVLWRDDYTCQCCGAHATKKKEVRLHVHHLESRKVGGDAPDNQVTLCESCHEKLHKGLITEGDFKKRKRRSTRDATFMGIMRKTLMQRLCSELPIPVVETRGYITKTTREKLLVLPKSHTNDALAIAQRKHGFNVGYLPGIAQIDKIYTIRPVRHHNRQLYKATILKGGIRKSNQTKKYVFGYRLFDKVQFNGQDCFIWGRRTTGIFTIKTINGKMIKDGISFKKLKLLEKSTSYLIA

SEQ ID NO: 9818 - protein, 442 aa, unidentified; identical to SEQ ID NO: 2903
  REGION 1..442: note = Human gut metagenome

SEQ ID NO: 9819 - protein, 377 aa, unidentified
  REGION 1..377: note = Human gut metagenome
FTIQLDYDTTDYTQPVSLGIDAGSKHIGISATTSEKELYAADVELRNDIVDKLSTRRGLRRTRRSRLRYRKARFNNRVSSKRKGWLAPSVENKIQTHLTVVEKIHKFLPITNIVVETASFDIQKINNPSISGSEYQQGEQLDFFNVREYVLFRDNHTCQHCKGKSKDKALNVHHIESRKTGGDSPKNLITLCETCHKAYHRGEFKLNVKRGKSFRDAAFMGIMRWSFYDRLKNIYPNVSMTFGYITKNTRITNNLPKEHYVDARCISGNPVAKPLGYYFYQKKVRCQNRQIHKANFLKGGRKKLNQAPFLVKGFRLFDLVEYQKELYYIFGRRSSGSFDIRKLDGTKVNKGSISCKHLRLIGKRKSILTEKRMQVNL

SEQ ID NO: 9820 - protein, 544 aa, unidentified
  REGION 1..544: note = Human gut metagenome
MKQKKQKVMVYILNKKGKPLMPTTRCGHVRKLLDSKKAVVVNSNPFTIRLKYDTPNGIQDVFAGIDSGRENIGSGVSNEDGDCLYLGELKTSNKSIKIKMAERTGFRRERRKHDRQNKQRKARKDHTEIQNGNDDICRTTISCKSVQISYPVAEESVTHKIIRGKEGKFANRHRDEGWITPSARQLVQMHMNDLKSMCKILPISHVTLERVAFDFQKLENENIKAWEYGKGKLYGYDSPEEYIHDVQDGKCLVCGKPHIDYLHHIIPRSKGGSDKVSNIAGLCYDCHYGPIGVHNCQDTQDRLPELKNEANKQYKVSLLNSVMPVLIEEMDKFCEANSIIFSICEGHDTAKVRDMYDLQKDHCLDGFAISLVGRNVKSVDVMPDRIYQKQRYKKKSKNIIQKRNCREYYDDKKLVAVNRHKGTDQKADSLEEYMNTYAETHTADECKNQFESLTVKPARRTYTFHKEGRICPFHIGDKVRYEKKNKIKGNTKVDTFICEGIYFSKDENKAEVEHNKTKSKKMKFCRTIESGCIPYIDYRKLALI

SEQ ID NO: 9821 - protein, 379 aa, unidentified
  REGION 1..379: note = Human gut metagenome
MQLYSVSIFSQGLHNLLLRQERFIVKEVAYMATVYVLNKDSKPLMPTTRCGHVRYLLKEKKARVVRANPFTIKLLYETDDVVQPLYLGIDPGRTNIGVAVAKGDGTAVFTAHLETRNKEIPKLMAKRKEYRQGRRHYRRCKRQRRAAAHGTLSKRCKKQDTAQGSNISERAQKIGVFERNLPGCEKPVLCIGIKNKEARFNNRVRPAGWLTPTANQLLVTHINFVKKICKFLPISDVVLEINKFAFMALDNPNIQKWQYQQGPLYQKGSLENAVSEQQDHHCLFCKKAIEHYHHVVPRSENGSNTIANIVGICIKHHDLVHKDTAWQKKLAKKKTGLNKKYGALSVLNQIIPALTKELSSLFPKHFFATNGKSTYDYRA

SEQ ID NO: 9822 - protein, 383 aa, Moorena sp.; identical to SEQ ID NO: 6831

SEQ ID NO: 9823 - protein, 427 aa, Moorena sp.; identical to SEQ ID NO: 4447

SEQ ID NO: 9824 - protein, 458 aa, Moorena sp.; identical to SEQ ID NO: 4474

SEQ ID NO: 9825 - protein, 465 aa, unidentified
  REGION 1..465: note = Human gut metagenome
MSTCVCVLSNSGERLMPTFRLGKVRRLLKDGKAKIVKHHPFTIQLLYDSKTNTQPIEICEDVGYNYIGISVKSQSHEYVSAQYDTLQDEKACHDSCRKLRRTRRNRLRYRKTRFDNRKRGEGWLAPSLKHKKELNVNVVKMYCAVMPITHATVEVGSFDTMLVKAIQEGKAIPEGADYQKGPRYNLATLREAVLYRDNYTCQVCGRKVADGAILHMHHMFYWKGRHGNSLNELLTVCEKCHTPANHQKSGKLYGFGENVKFADLSGAAFMNTVRWQIVNELYAAFGKDFVTVTYGAMTKEKRIALRLEKSHNNDAYAMGEFHPNCRCTFEHYEKVRRNNRILEKFYDSRYIDIRTGEIATGKELFNGRINRNHKKDSENLHRYRGKRTYAGHRALLRKKVNLNPGDLVSLNGEVLVVHGTHTNKKGAVNVEFKTPGKSGQKSASLKKLKIVKAADSMHSAWEKIS

SEQ ID NO: 9826 - protein, 413 aa, unidentified; identical to SEQ ID NO: 2636
  REGION 1..413: note = Human gut metagenome

SEQ ID NO: 9827 - protein, 456 aa, unidentified
  REGION 1..456: note = Human gut metagenome
MSTCVCVLSNSGERLMPTFRLGKVRRLLKDGKAKIVKHHPFTIQLLYDSKTNTQPIEICEDVGYNYIGISVKSESHEYVSAQYDTLQDEKEHHDDCRKMRRARRNRLRYRKPRFDNRKRSEGWLAPSLEHKKQLNISLIERYVSVIPITRATVEVGSFDTILLQAIQKGKSKPEGVDYQKGPRYNLATLREAVFYRDNYTCQVCGRKIADGAILHMHHMFYWKGRHGYQLDELVTACEKCHTPANHQKGGKLFGFGEDKEFANLSGAAFMNAVRWQIVDALHATYGKEFVTITYGAMTKEKRIILGIEKTHNNDAYAMGDYHPVHRCVFRHYQKRRRNNRVLEKFYDATYIDARTGNKAKGKELFNGRINRNHKKDSENFHKYRSKKVSKGRRSIRRQRYAIQPYDTVRLEGKTYITSGCHNKGTRLLIPANGKSKSVAISKVQVVCHAGAWIQII

SEQ ID NO: 9828 - protein, 377 aa, unidentified
  REGION 1..377: note = Human oral metagenome
MTLGVDSGAIHSGYSLANEHREYYSAEVIARDNISKNLSDRRMYRQTRRSRKTRYRKPRFNNRKNKGKGWIPPSLEQKVTVQVNEIKHLHKYFPIENIIIEVAEFDIQKIKNPDISGKEYQQGTLYGYNIRNYLLEKYHHKCFYCDKEVSVFEVEHMIPRSRNGSNRIDNLTLSCHDCNQKKGTLTAEEFIRQTLSPQKAAQKLRQLPKTKQLLKYMAHMNATRWALYNTIKEMYESVSQTYGYITKYNRIDAGLPKAHHIDAKCITGFSTVPSFDVIVVKTKMRRHNRQLHRATFSKGHIRKAATLPRFVHGFQLYDIVMFNNHRYYIQSRRSTGSFTLVSLEGLKDENRMYSKLTQLAHTNAYMMNHMLMINKIN

SEQ ID NO: 9829 - protein, 447 aa, unidentified
  REGION 1..447: note = Human gut metagenome
VPAYRIKHITKKEAPYMVYVLDIDGQPLMPTSRHRKVRKLLNSHLAKVVKRCPFTIQLLYQSTKETQPVSLGVDAGSRHIGLAATTEQKVVYQEELVPRNDVVKLLSARRALRSSRRSRKTRYRKPRFNNRVHSKHKGWLAPSVEVKIQEHITAIKRICQILPISDIHVETAEFDLQRLKAMEEGRPLPVGTDYQLGEQYDFYNTRQYVLHRDEYTCQCCGTHDNNVKLHVHHIESRQTGGDAPNNLITLCEHCHKLLHAGKTILPKGKKRGKSYRDATFMGIMRKTLLERLKKEIDVPVEGTYGYITKYWRERAGLEKSHINDAICISKHPYARPLETYYLTKVVRHHNRQIHKTKLSKGGIRKRNQAPYLVKGFRLFDKVLYQGESYFIFGRRITGYFDIRTLDGTKVNKGSTSYKKLRIQDTAEAYLTEVRAIPHMNEFTCVLA

SEQ ID NO: 9830 - protein, 421 aa, Moorena sp.; identical to SEQ ID NO: 3851

SEQ ID NO: 9831 - protein, 521 aa, unidentified
  REGION 1..521: note = Human gut metagenome
MSEDSTRDFLISGLQQNKGESVTMRYVYVLDMDGKPLMPTCRYGKVRRILKSGQAKVVDTLPFTIRLNYRTAGILQPVSVGQDPGRTNIGLAATRSDGTELFRAHCETRNKEIPKLMTERLAHRRASRRGERLARKRLAKKLGTTAKNLNERLLPGCKEPLAVKDIINTEARFNNRLRPEGWLTPTATQLLRTHLNLFERISRILPVTDVAVEVNRFAFMELTDPDKMHFEIDFRHGALFGTGGLKQAVREQQQGRCLLCRQREIEHFHHIVPKSKRGSDTIANIAGLCQECHTLVHKSQEAKERLDKKKQGLMKQYGGTSVLNQIIPSLVEELAKRYPGHLHVTTGGKTKVFREQYELDKDHDVDAYCIAVSWLFGIQPRLQTEPFEIKQFRKHNRANIHCQTERTYNLDGRVVAKNRKKRMEQKTDSLEDWFEKMVKQYGSKKSKQLMARLMVQKSTRHYNAKDRIMPGTVFRYAGRRYVMTGQLTGGKYYRAYGMEDKNFPVRKVTICQQNTGLVYVA

SEQ ID NO: 9832 - protein, 440 aa, unidentified
  REGION 1..440: note = Human metagenome
MVIVIDKRRQPCNTISAAYARILLFTKQAVIHKRFPFTIRLRNDNAVLKDRNYTIKLDPGSRITGVAITDNKDSVVMLAEIEHRGHIIKKNLDSRRAVRRSRRQRKTRYRPARFQNRTRPEGWLAPSIKSRADNVINFVKKYKKLLNITKVMIENVSFDTAQMSSDDHLIGTDYQQGPLYDTNLKEFIFSKTKGRCSYCGEKAEEIDHIIPRAKGGSNSTYNLTPACRSCNEKKSNLSLKEFGKLMNKDYSHLEPKKLPKDAAIVQSARNYMVKEITKIIPDTTTYDAWMTKYNRNQLGLSKQHYYDALSVGEIPTKFNFLTDKILQISAKGRGSRQMCRMDSYGFPRTSAKSSKSVKGFQTGDIVKAIVPKGSKQGEYLGKVAVRSSGYFDIQIKTQVIQGIGYKYCNIVQRSDGYSYNYKERDFLSDINNRVSIADFK

SEQ ID NO: 9833 - protein, 453 aa, unidentified
  REGION 1..453: note = Human gut metagenome
MSVAVVSKTGMLLMPTSEYRARKLLKSKKAIILGYHPFTIQLTEREAGYIQPVELCMDTGYIHIGTSVKSEKHEYLGEQIDTLTDERQKHDACRMYRRQRRNRKRYRQPRFNNRERDDGWIAPSLEHKKTIHIQALSRICKVIPVTDITLEMGNFDTQVLKAREEGRPLPQGLDYQHGERYGIATLREAVFTRDGYTCQCCGRAIKDGAILHVHHIVYRSQGGTNRMSNLITVCDKCHTPANHKPGGKLYGWKPKVASFKGATYMTTIQWKLYNEVKVLFPDIDIHITYGAETKERRRAFDITKSHVNDAFVMGQFHPKHRSKPVCYKKKRRNNRCLEKFYDAKYIDSRNGKTRTGQELFNGRISHNHKKDSENLHQYRRQKISTGKRTIRKQHYAIQPHDIVIFNGEKFETSGCHNNGTRVILLPQKKSVAIKKLNIYRYAGGYFKSAFNQK

SEQ ID NO: 9834 - protein, 512 aa, unidentified
  REGION 1..512: note = Human gut metagenome
MSTVYVLNKDGKPLMPTTRCGHVRYLLKEKKARVVTSKPFTIQLLYEADDVVQSLYLGIDPGRTNIGVAVVKTDGTAVFTAHLETRNKEIPKLMQGRKKARRARRTNGRRCRRQRRAKANGTISKKCVKQDTAQNGSVSKRAKEIGVIKRHLPGCEKDVLCIGIKNKEAKFSNRTRPEGWLTPTANQLLQTHINLVKKIQKFLPISNVVLEINKFAFMQLDNPNIQKRQYQQGPLYQKGSLESAVSEMQEHHCLFCKNAIDHYHHVVPQHKNGSNTISNIVGLCTKHHDLIHKETAWQEKLAKKKTGLNKKYGALSVLNQIIPALTKELSSLFPKHFFATNGKSTYDYRAAHAVSKDHWLDAYCIACSILPNDVCDSDINNRVPYELKQFRRHDRRALHKENMSRVYTLNGKKVATNRHKAVEQTTDSLEEFRQRQPNDVCKLKVKEHHPEYRNPKRNFPGCVFLIGKRTHVMQGTSGSHNGKADGYYDTNGNSYSSGKCKFVAKNEGIVFT

SEQ ID NO: 9835 - protein, 336 aa, Moorena sp.; identical to SEQ ID NO: 3928

SEQ ID NO: 9836 - protein, 419 aa, Geobacillus sp.; identical to SEQ ID NO: 4579

SEQ ID NO: 9837 - protein, 413 aa, unidentified; identical to SEQ ID NO: 9603
  REGION 1..413: note = Human gut metagenome

SEQ ID NO: 9838 - protein, 427 aa, unidentified; identical to SEQ ID NO: 2980
  REGION 1..427: note = Cyanobacteria bacterium UBA11149

SEQ ID NO: 9839 - protein, 430 aa, unidentified; identical to SEQ ID NO: 4504
  REGION 1..430: note = Human gut metagenome

SEQ ID NO: 9840 - protein, 436 aa, unidentified
  REGION 1..436: note = Human metagenome
MAKTLTTQTTQACVLDRNGKPLMPTTRLGKVYHLLKTQKAHIVSYEPFTIQLDYEPDTQIIQPMTLGVDSGAIHSGYSVANEHREYYSAEVIARNDISNRLSDRRMYRQHRRSRKTRYRQPRFSNRKNKKKGWLPPSLEQKVAVQVNEINHIHRYFPIETIIVETAEFDIQKIKNPDICGIEYQQGTLQGYNIRNYLLEKHGRKCFYCGKTVSGFEVEHMLPKSRGGSNRIDNLTLSCHDCNQKKDTLTAEEFIQQTLPAKQAATKLKQLPKEKRLFKYMAYMNATRWTLYDAIKERYPNVKMTYGYITKYNRIQAGLPKAHHIDAKCITGFPTVPSIDQIVVKVKMRRHNRQLHRATFSKGHVRKTACLPTTVFGFQLYDIVLFNNHRYYIKGRRSSGSFALVSVEGLKDENRMYKKLTLLAHTNAYLTNRYVNA

SEQ ID NO: 9841 - protein, 442 aa, unidentified; identical to SEQ ID NO: 2903
  REGION 1..442: note = Human gut metagenome

SEQ ID NO: 9842 - protein, 426 aa, unidentified
  REGION 1..426: note = Human gut metagenome
MVYVQNHLGQPLMPTQDHRKVRLLLKAGAAVVVRRTPFTIRLTTSTKTYVQPVILGVDAGSKTVGMSAATHEEEVFAAELTPRNDVVKNLADRRKFRSSRRGRTTRYRQPRFNNRVHSKHKGWLAPSVEVKIQEHITSIKRACELLPIGKVVVETAEFDLQLLKSIADGMPVPQGEDYQKGEMYGFYNVRQYVFFRDGYTCQCCGAHGKGIKFHTHHLESRKTGGNAPDDLVTVCDKCHKAFHAGLITDAKLKKRRRKSTRDAAFMGIMRKTLLQRLRAELPIPVVETRGYITKATRERLLKLPKSHTNDALAIAMGRHGFGIKEVTYMPQSDRIYQIKPVRHHNRQLHKAIPKKGGRRQRSQGPKYVQGFRRFDKVLYRGQECFIWGLRTRGYFQLKLLNGTKVHESAKASELILLEHSSGYLIA

SEQ ID NO: 9843 - protein, 512 aa, unidentified
  REGION 1..512: note = metagenome
MSTVYVLNKDGKPLMPTTRCGHVRRLLKEQKARVVTSKPFTIQLLYETNDVVQPLYLGIDPGRTNIGVAAVKTDGTAVFTAHLETRNKEIPKLMQGRKKARRARRTNGRRCRRQRRAKANGTISKKCVKQTTAQNGSVSKRAKEIGVIKRHLPGCEKELLCIGIKNKEAKFSNRTRPEGWLTPTANQLLQTHINLVKKIQKFLPISDVVLEINKFAFMQLDNPNIQKWQYQQGPLYQKASFEEAVSEMQEHHCLFCKKPIAHYHHVVPQSENGSNTIGNIVGLCTKHHDLVHKDATWQKKLAKKKTGLNKKYGALSVLNQIIPALTKELSSLFPKHFFATNGKSTYDYRAAHGVSKDHWLDAYCIACSVLANDVCDSNINSHVPYELKQFRRHDRRALHKENMSRVYTLNGKSVATNRHKAIKQTTDSLEEFRQRQPNDVYKLKVKEHHPEYRNPKRNFPGCVFLVGKHTHVVQGTSGSHNSKADGYYDTNGNSYSSGKCKFVAKNKGIVFA

SEQ ID NO: 9844 - protein, 334 aa, Lactobacillus sp.
  REGION 223..229: note = misc_feature - Xaa can be any naturally occurring amino acid
MKHENANRVFLLNKDGKPLMPCRPRKARLLLKSGKAFVVKKYPFTIQLKYGSYGYKQKVSLGIDTGQRHIGFAVVSKDKVLHQSEVELRQDMHTNLYTRKIYRRGRRNRKTRYRQARFLNRVHGKRDGLWLPPSVKSKVGHNIAWIKRYLAVLPSPDLHIEVGKFDMAKMVNPDISGKQYQEGSLKDWKNYEYYVLARDEYTCQLCHKHGEGIKLVVHHIVYXXXXXXXQLKGATFMNILRKRIMTTFPEASFQYGSQTYVDRKNLLLPKGHFMDAIAISGIKSVGQMPLTVTMISQFRKKKRSLHEATARKGRKQPNMSSKRNEKNTKYACGL

SEQ ID NO: 9845 - protein, 427 aa, Aphanizomenon sp.
MSKVFVIDTDKRPLNPIHSAQARQLLRNKKAAVFRQFPFTIILKESRPDLPVSPLRLKIDPGAKFTGMALVNDWTGEVIFAAELKHRGFAIRDALTSRRQLRRSRRAKKTRYRQPRFLNRTRPKGWLAPSLQSRVENIKTWVGKLRQLVPIGAISQELVRFDMQLIANPDIQGREYQQGTLAGYETREYLLEKWGRQCAYCGVKDVPFQVEHIHPRAKGGSNSITNLTLSCEKCNTKKGTEDIKDFLKKDPSKLEKILKQAKRPLADAAAVNTTRFALLFVLKATRLPVENGSGGLTKFNRSQQKLDKTHWIDAACVGQSTPILNIKGVKPLLITANGHGSRQSCRTDKFGFPNRHCSRTKFHFGFQTGDIVKSIVKTGKKVGEYIGRIATRATGSFNISTRNGLVQGISYKTCKTIHKKDGYGYSN

SEQ ID NO: 9846 - protein, 515 aa, unidentified; identical to SEQ ID NO: 3725
  REGION 1..515: note = Human gut metagenome

SEQ ID NO: 9847 - protein, 431 aa, unidentified
  REGION 1..431: note = Human gut metagenome
MPNKVYVINKHGRPLMPCSPAKARHLLDAGKAKVKKRTPFTIQLVYGSSGYTQEVILGVDAGSKTIGMSVSTTKEELLSAEVKPRNDVVDLLSTRREFRRARRNRKTRYRKPRFDNRVRSKHRGWLAPSVEVKIQEHITSIKRVCRILPVSKVVVETAEFDLQLLKAIADGKPVPQGEDYQQGEMYGHYNVRQYVLWRDGYTCKCCGAHTTKKKEVRLHVHHLESRKVGGDAPDNQVTLCESCHEKLHKGLIAEKDFKKRKRKSTRDATFMGIMRKTLMQRLCSELPIPVIETRGYITKATREKLLVLPKSHTNDALAIAQGKQGFNVGYLPGIIQTDKICTIRPVRHHNRQLHKATILKGGIRKSNQAEKYVFGYRLFDKVQFNGQDCFIWGRRTTGIFTIKTINGKMIKDGISFKKLKPVEKSTSYLIA

SEQ ID NO: 9848 - protein, 335 aa, unidentified
  REGION 1..335: note = Human gut metagenome
MVYVQDINGKPMMPTTRHGKVRRLLKENKAVVVSLCPFTIKLTYVTSDYKQEIVLGVDAGTKHVGLSATTKSKELYSSEVILRNDIVDLLSTRRELRKTRRNRLRYRKPRFNNRIKSKRSGWIAPSVKYKVDAHIRVIDNVCSILPIFRIVIEVAQFDTQKIKNPNISGKEYQEGDQLGFWNTREYVLARDGHKCQYCKGKSKDKILNVHHIESRKTGGNSPSNLITLCETCHKEYHKGNIDLKIRRGKSLRDAAVMGIMKWRLYEELKSKYDNISMTFGYVTKYNRINHDIEKSHVSDAFVISKNFNAIRLGYYYKVRLVRRHNRQIHKQKIQK

SEQ ID NO: 9849 - protein, 457 aa, unidentified
  REGION 1..457: note = Human gut metagenome
MDAVAVISASGKPLMPTNPMRARKLIKKGKAVIYKYRPLFTIRLTERTDGDIQTIEYCCDTGYQHIGLSIKSRKHEYVNEQRDLLPNETERHNDSRKYRKARRRRKLRHRACRRDNRHDNQICKDGYAPSIRNKRDQHISLYRSYTEILPVERAVFEMGQFDTQVLKAIEKGEPLPQGKDYQHGERYGYATLREAVFARDDYTCICCGKNAFKDKRILCVHHLGFRIGDRTNRLANLATVCTKCHTPKNHQPKGKLYNLKPELKDFKGATFMTMVRWDMLDKLKVVSKDIQVDVTYGAATKEARRDLKIKKSHANDAYCMGSFHPSHRTDLKRYEKCRRNNRVLSKFYDATYIDIRDGKKKKANALGCNRTKRRESRRSEKNERIYRGKKVSKGRIVLRTKRAVIRPGDIVYVGKKKYIVASSKNLGKQLKLADGSLLTTSKVTKIIHCGGWKTVTL

SEQ ID NO: 9850 - protein, 525 aa, Xylanimicrobium sp.
VLPQPRTLEPASADKAGVGRLHIKPSVATKRAAGDKHLASTTGVQHGRGETTRTGGDISQPATAGSGGRTGDRPLLVGRVFVLDRHGRPLQPTHPARARELLRKGRARVHRVVPFVIRLVDVDATTPGIEVDGVELGIDPGSKHTGMAVFTTDRAGTRQAVFLADLIHRGLTIKNAMTARKQLRRGRRSRNLRYRAPRFDNRRRRPVDGLDVWLAPSTRHRVVTTLSWVDRLAGWAPVTNVWVEAVRFDTQQMENPEIAGVQYQQGTLAGFEVREYLLTKYGHTCVYCDTQGVPLNIDHVRPRSKGGSDRVSNLVLACVPCNQAKDARPVETFLAHDPARLARIKAGLTRPLRDAAAVNSTRWALTRAIEARGFPTKTSTGGRTKYNRTQFAVPKAHALDALCVGDLTAVTGWPATTLTVTCTGRGTYQRAHVDKHGFPRKNKAGTPAVRSRTKVHHGFQTGDLVRAVVPTGKKKGTHVGRIGVRATGSMLVGKTDGINHKHIRRIQRADGYAYQTTPTVTKDET

SEQ ID NO: 9851 - protein, 406 aa, unidentified; identical to SEQ ID NO: 2752
  REGION 1..406: note = Human gut metagenome

SEQ ID NO: 9852 - protein, 512 aa, unidentified; identical to SEQ ID NO: 2792
  REGION 1..512: note = Human gut metagenome

SEQ ID NO: 9853 - protein, 424 aa, Moorena sp.; identical to SEQ ID NO: 8578

SEQ ID NO: 9854 - protein, 413 aa, unidentified; identical to SEQ ID NO: 2636
  REGION 1..413: note = Human gut metagenome

SEQ ID NO: 9855 - protein, 406 aa, unidentified; identical to SEQ ID NO: 7944
  REGION 1..406: note = Human gut metagenome

SEQ ID NO: 9856 - protein, 418 aa, unidentified; identical to SEQ ID NO: 4424
  REGION 1..418: note = Human gut metagenome

SEQ ID NO: 9857 - protein, 481 aa, unidentified
  REGION 1..481: note = Human gut metagenome
VWHALQTKITLAKVSTQAVGNLCNYGSQIPSRVLFSAIHLAIRKGGIIMYVYVINKHGQPIMPCKPRKTRVLLQKGKATVVKQVPFTIRLLYGSSGYKQPVSLGMDAGSKHIGIAATTEKKVLYAEELKPRNDVIKLLSTKRQNRRARRNRKTRYREARFDNRVSSKQKGWIAPSVEVKIQEHISAILRIQKILPLTEIYVETAEFDTQRLKAVAEGKPLPTGTDYQLGEQYDSYNTRQYVLFRDGYKCQCCGKHGDDVKLHVHHKESRQTGGDAPNNLITLCEDCHKAIHTGTTQLPNDKAKRGKSYKDAAFMGIMRKAMVSQLRKLVDIPVTETYGYITKYHRELYHVEKSHINDAIMISKNYEAVAADTYYVSKAVRHHNRQLHKNTILKGGIRKRNQAPHVVKNFRLFDLVKYKNSYYYVFGRRSNGFMDIRTLDGKKVNKGSISNKRLKFVSASKGLLAERKKAIPLADKSASFLA

SEQ ID NO: 9858 - protein, 518 aa, unidentified; identical to SEQ ID NO: 7359
  REGION 1..518: note = Human gut metagenome

SEQ ID NO: 9859 - protein, 416 aa, unidentified
  REGION 1..416: note = Human gut metagenome
MVYVLDKNGQPLMPTDRHRKVRLMLQSGQAKVIKRCPFTIQLNYDSGHQTQEISLGIDAGSKHIGVSTTTKIKVLYEVDVELRNDIVDLLSSRRELRRGRRNRKTRYRQAKFNNRRRGNGWLAPSIRQKIGPHLTVVENICKMLPISRIMVETASFDIQKIKNPDIQGAEYQQGDQLEFWNVREYVLFRDGHTCQCCKGKSKDKILNVHHIESRKTGGNAPNNLITLCEICHTGYHKGAVQLPKTVKRGMRFKDAAFMGIMRWAFYEALKQQYEPVGTPVHNTYGYITKHTRIEHNLPKEHYVDARCISGNPDAFPNGEYYYQKKVRCHNRQIHKLTILKGGIRKQNQATYLVKGYRLFDKVSYQRKEYFVFGRRKSGFFDIRTLSGKQVNKGSLSCKKLKFIATRMYYLIERRAV

SEQ ID NO: 9860 - protein, 547 aa, Streptomyces sp.; identical to SEQ ID NO: 7542

SEQ ID NO: 9861 - protein, 433 aa, unidentified
  REGION 1..433: note = Human gut metagenome
AKIVKHHPFTIQLLYDSKTNTQPIEICEDVGYNYIGISVKSQSHEYVSAQYDTLQDEKACHDSCRKLRRTRRNRLRYRKPRFDNRKRGEGWLAPSLRHKKELNVNVVKMYCAVMPITHATVEVGSFDTMLVKAIQEGKAIPEGADYQKGPRYNLATLREAVFYRDNYTCQVCGRKVADGAILHMHHMFYWKGRHGDSLNELLTVCEKCHTPANHQKGGKLYGFGENVKFADLSGAAFMNTVRWQIVNELYAAFGKDFVTVTYGAMTKEKRIALRLEKSHNNDAYAMGEFHPNCRCTFEHYEKVRRNNRILEKFYDSRYIDIRTGEIATGKELFNGRINRNHKKDSENLHRYRGKRTYAGHRALLRKKVNLNPGDLVSLNGEVLVVHSTHTNKKGAVNVEFKVPAKNGQKSASLKKLKIVKTTDSMHSAWEKIS

SEQ ID NO: 9862 - protein, 413 aa, Clostridium sp.; identical to SEQ ID NO: 4134

SEQ ID NO: 9863 - protein, 420 aa, unidentified; identical to SEQ ID NO: 3685
  REGION 1..420: note = Human gut metagenome

SEQ ID NO: 9864 - protein, 413 aa, unidentified
  REGION 1..413: note = Human gut metagenome
MTSYAFVLDANGKQLAPAKEQKAWFLIRKKRAALVSKYPMVIQLKKEIPENEICKDEIRCGIDDGGLHVGIALVQKCKTKNKVVFKGTIEQRNDVKHLMEVRRSYRRYHRYHKRYRPARFDNRKSSKRKKRIAPSILQKRQAIIRVIHWLNKWINITNYWLEDVSIDIRALTDGYKPYRWQYQKSNRLDENIRKAAILRDGGKCMECGKLNCRLEVHHIKPRRRNGSDTLDNLITLCKSCHQKTEGQEELYMDRYFSLLKSSDHKNLNYAQHVMIGKEWLRKQLSSLGVLYLTNGGDTANKRIDWNIEKSHANDAVCITNLQPDTYDMKEWTVKPMRRQSKAKTDNVLGIKHRDLVEYTLKNGETHRGYVTALYPEQKAINFQSPTKHCKKVNARKCKLLWKYSKIYWFENAS

SEQ ID NO: 9865 - protein, 442 aa, unidentified; identical to SEQ ID NO: 3234
  REGION 1..442: note = Human gut metagenome

SEQ ID NO: 9866 - protein, 415 aa, unidentified; identical to SEQ ID NO: 6534
  REGION 1..415: note = Human gut metagenome

SEQ ID NO: 9867 - protein, 425 aa, unidentified
  REGION 1..425: note = Human gut metagenome
LKDVDARNIYKLPSYRIKIDPGAVHTGIAIVCNETNEVMYFLQIEHRGSEVKKALITRKQTRRNRRSRETRYRRCKFKNGGDFDSSRKNGWLPPSVKSTADNVIHWVEKLCRYINITECSFEAVRFDSQLMDNPEIGGEEYQQGTLSGYELREYLMEHFRHTCQYCGGESGDPVLEWEHKIPRSRGGSDSVKNASLACSCCNRDKGNRTLEEYLEDSKHISPKGKSEKALNEARISHISGILEKGTIYGSNRYSAWVNSTRRYIEKYLFLMFDDVECCSGGRTKYNRIKLKLPKDHHYDALCVGSVPKEGYTDRTNSYVLYVKATGRGTRFRGQCNSCGVITVKYKNNSKRKFGFQTGDIVQLNKPKGKDTGQYTGKVAVRSSGSFDLIRKGCKRITANYKYFRMMQYSDGYEYLGPLRPIPHSA

SEQ ID NO: 9868 - protein, 431 aa, Escherichia sp.; identical to SEQ ID NO: 4170

SEQ ID NO: 9869 - protein, 427 aa, Moorena sp.
MHVFVLDKDKNPLAPCHPAKARRLLKSGRASVFRRYPFTLILHEIEAKDCVVPETQLKIDPGSQTTGLAILSENRVIWVSELSHRGQQIKNDLEKRRALRRSRRHRKTRYRKPRFLNRTRPKGWLPPSLNHRVETTMTWVNRLRKLCPIVSIAQELVRFDTQKLQDPEVSGIEYQQGELLGYEIREFLLEKWGRKCAYCGAENLPLEVEHIHPKSQGGSDRVSNLALACHQCNQAKGNRDIREFLSGKPSVLDRILKQAKAPLKDAAAVNATRWKLYQQLKETGLPVEVGTGGLTKFNRTQLGLPKTHWLDAACVGKSTPDRLDVAVEKPLLVAAKGHGVRQRCRPDRYGFPRAVAPKAKSFQGFQTGDIVKATIPQGKFAGNYTGRIAIRFRPSFRLNAGVKPFDVHPKYLTTVQKSDGYEYRFSK

SEQ ID NO: 9870 - protein, 428 aa, Microcoleus sp.
MSILKPNYVFVLDTKHKPLTPCKPSLARKLLKVGKAKVFRMYPFTIILRKEVADDPRPMILKIDPGSKVTGLAILLGSDIIWVAQLTHRGQAIKASLDSRRSLRRSRRSRHTRYRQARFLNRTRPKGWLAPSLRHRVETTLTWVKRLSRLAPVRTIFQELVRFDLEQIENPEISGVEYQQGVLAGYEVREYLLNKWDRRCAYCSAENVPLQVEHIQPRASGGTNRVSNLCLACEPCNTKKGTQDIKIFLAKKPDVLKKILAQAKRPLKDASAVNSTRWTLFNRLKETGKVIATGSGGLTKFNRIRLELPKTHFFDAACVGDTPSISVLANQPLNIKATGHGSRQMCRTDKFGLPSRYVPRFKFVKGFQTGDIVKAVVTSGKKVGTYTGRVAVRSSGSFNVSAVQGLIQGINHKYCFSIHQKDGYNYGF

SEQ ID NO: 9871 - protein, 427 aa, Leptolyngbya sp.
MQNYVFLLNADLTPLNMVHPARARELQDQGKAAVFCTYPYTLVLQQQVLNPTLQSYRLKIDPGSKFTGFAIQQGADIVFRMELKHRGLGISVGLTKRAGFRRRRRSRNLRYRKARFNRCKPPGWLAPSLSHRVQTVSTWIKRFSRYCPIVTLEIEQVRFDLQQLQNPEISGLDYQQGTLAGYEVREYLLEKWQRQCAYCGAKDTPLQIEHIHPKSRGGSDRVSNLCLACEPCNTKKGNQDVGDFLAGKPDVLKRVLAQAKAPLKDAAAVNSTRFAIVSMARQHCSDIRCWTGGRTKFNRCQQGLAKSHSLDAACVGESGAKVNILTAQPLLVDCKGQGSRQSRRVNASGFPAVKQPKAVYTHVRTGDVVAFVLTKDRKHVKQGKYTSRVRTPTAKGFEVLLNGFRVELSSMIGVKFKHKQDGYAYGF

SEQ ID NO: 9872 - protein, 434 aa, unidentified; identical to SEQ ID NO: 5659
  REGION 1..434: note = Fermentation metagenome

SEQ ID NO: 9873 - protein, 413 aa, unidentified
  REGION 1..413: note = Human gut metagenome
MTNYAFVLDADGKQLAPTKEQKAWFLIRKKRAALVSKYPMVIQLNKEVPDEEICKDEIRCGIDDGGLHVGIALVQKCQTQNKIVFKGTIEQRNDVKHLMDIRRGYRHYHRYHKRYRQARFNNRSSSKQKGRITPSILQKRQATVRVINQLNKWINITDYWLEDVAIDIRAMTDGYKPYKWQYQKSNRLDENIRKAVILRDGCKCMECGKSNCKLEVHHIKPRRSKGSNTLGNLITLCAKCHHKTKGVEELYMDRYFALLNSSDNKNLNYAQHVMIGKKWLREQLSSLGILHLTNGGDTANKRIDWDIAKSHSNDAICITNLRPDECEIKEWTIKPMRRQSKAKTDNVLGIKHRDFVEYTFKNGETHRGYVTALYPEQNALNFQSPTKHCKKVNVRKCKVLWKYSKIYWLDNVS

SEQ ID NO: 9874 - protein, 502 aa, unidentified; identical to SEQ ID NO: 2616
  REGION 1..502: note = Human gut metagenome

SEQ ID NO: 9875 - protein, 417 aa, unidentified
  REGION 1..417: note = Human gut metagenome
MPCSPAKARLLLKEKKAIVKRRTPFTIQLTIATGEAKQPVSLGVDSGYKHIGLSATTEKAELYASQVELRQDITDLLSARLALRRSRRSRKTRYRAPRFNNRVANKREGWLAPSVENRIAAHVSRVETVIRLLPVTAITVETAAFDTQLLKNPDIAGVAYQQGDQIGFWNVREYVLFRDGHVCQHCRGKSKDPILNVHHIESRRTGGDAPNNLITLCETCHRAFHRGEIELKVKRGKSFKAETFMGIMRRTLLERLKKAHPELNVRNTYGYLTKHKRISHGIAKSHCADAYCIADNLGAKRLEGFFFQKQTRKHNRQIHKLSILKGGLRKKNQAPYEVKGFRLFDKVICKGEEAFIFGRRTSGSFDVRRLDGTRISAGINYKKLRLLEPRTTYLTEFRKEAAHPPLHECRGFRAEFL

SEQ ID NO: 9876 - protein, 719 aa, unidentified
  REGION 1..719: note = Human gut metagenome
MTSLTEFFSRQEDDNLKGISHKNNLFKRNIIAHMAVNGECTLSELTKELHISVPTITKLVQELVQENIVTDLGKVETPGGRRPNIFGLASSAIYFAGVNIGRDNMSFLITDLHNNIVKEEILNDFELQDRPQCLEKICSNIAHFIDTCGVERAKILGAGVSVSGRVNPTTGRSYRYFTSSEQSLRDMIEQRIGIRVLLENDTRARCYAEYTNSKSKDETDVLYLHLGRGLAIGIVMNGKLYYGKSGFAGEFGHIPFFDNEIICSCGKKGCLETEVSGIAIEQKFGRLISQGVNTILREKYNKHEAIHVDEIIDAAKHDDNLSIELIEEVGEKAGKAVAVRRTPFTIKLTIATGETKQDVTLGVDAGARHVGISATTEKEEVFASEVALRQDITGLLADRLAFRRARRNRKTRYRAPRFNNRVRSKHKGWLAPSVENRIQAHISRIEAVCRLLPVTKIVIETASFDVQKIKNPTIEGTDYQQGDQLGFWNVREYVLFRDGHVCQHCHGRSRDKILNVHHLESRKTGGDAPNNLITLCETCHKAYHAGKIKLKVKRGQSFRAEAFMGIMRWTLLDRVRKTYPKLPVENTYGYLTKHKRIALGLPKTHCADAFCIAGNLKALRRGDFLFQQQTRKHNRQIHKCSILKGGVRKLNQAPFLVKGFRLFDKVRIGGQIGFVFGRRVRGTFNIRRLDKTVIGTDINCKKLSLLETRKTFLTELRKE

SEQ ID NO: 9877 - protein, 442 aa, unidentified
  REGION 1..442: note = gut metagenome
MSTSVFVLDKKHRPLMPCRPARARRLLRAGRARVVKRFPFVIRLVDRTVEQSEVQPVLIKLDPGSRETGAAVVRDDGKKRHHALAFFVIEHRGGAIRDALKARSAFRRRRRSQNFRCRSPRFLNRVKPKGWLPPSLRHRVETTLSFVRRMCRYLPVSGIAAELVKFDSQKLQTPEVSGIEYQQGTLFEYEVREYLLEKFGRKCVYCGAEGVPLNIDHVVPRAKGGSNRVSNLVLACVSCNQKKGARSLEDFLKGKPEVLARVRRELKTPLRDAAAVNATRWVLFNELKATGLPVETGSGALTKLNRHAFGVEKEHWLDALCVGRLNGVVTRKGLNVLEIRCMGRGSRQRTRLTKYGFPRGYLMRQKCVHGFATGDMVEANVPKGKKAGLWRGRVAVRVSGSFNIQTPKGVIQGVGWKHCRLISHNDGYGYAWLGHAPHSSPA

SEQ ID NO: 9878 - protein, 428 aa, Mastigocladus sp.
MSNYVFLIDANQTPLNPVHPAQARKLLDCGKAAVFRRYPFTLVLKRVIENPNVYPLTLKIDPGSKFTGIALVTNQGDVIWAMELQHRGQQIKDALLHRLAVRRGRRNRNTRYRQARFLNRKRPDGWLAPSLRHRVLTTETWVKRLKKFAPIGSIAQELVRFDTQAMQNPEISGTEYQQGTLHGYECREYLLEKWNRQCAYCGVKDVPLEIEHIHPKSKGGSERISNLCLACHKCNQRKGNKDVKDFLKGKPEVLNRVQKLAKAPLKDAASVNSTRWMLFNTLKSFGLPVTTGTGGQTKFNRTRFELPKAHWIDAACVGVVEIIKLVTNKILKVRATGFGGRQRCQTDKFGYPQKHRPLRPIHGFSTGDIVRADVPKGKYAGTFTARVCPMSHGYGEFVIDKKRRSIKLEYLTPVHMKDGYDYVYTCTK

SEQ ID NO: 9879 - protein, 415 aa, unidentified
  REGION 1..415: note = Human gut metagenome
LKVFVLNMRGKPLMPCSPAKARHMLKAGKAFVVRRTPFTIKLTIATGETKQDVTLGVDAGARHVGISATTEKEEVFASEVALRQDITGLLADRLAFRRARRNRKTRYRSPRFNNRVRSKHKGWLASSVENRIQAHMSRIDAVCRLLPVTKIVIEAASFDVQKIKNPTIEGTDYQQGDQLGFWNVREYVLFRDGHVCQHCHGRSRDKILNVHHLESRKTGGDAPNNLITLCETCHKAYHAGKIKLKVKRGQSFRAEAFMGIMRWTLLDRVRKTHPKLPVENTYGYLTKHKRIALGLPKTHCADAFCIAGNLKALRRGDFLFQQQTRKHNRQIHKCSILKGGVRKLNQAPFLVKGFRLFDKVRIGGQIGFVFGRRVRGTFNIRRLDKTVIGTDINCKKLSLLWATAQAAVRAIGNDT

SEQ ID NO: 9880 - protein, 420 aa, unidentified
  REGION 1..420: note = Human gut metagenome
MQYAYVLNKRGEPLMPCSPGKARILLKQQKACVVKRTPFTIKLLHGSAGYKQPITLGVDAGSKHVGLSASTEKRELYSEEFTPRNDVVELLSTRRQNRRSRRNRKTRYRAPRFNNRVHSKHKGWLAPSVEVKIQEHITVIKHICRILPITLVRVETAEFDTQRLKAMLAGKPLPVGTDYQLGEMYDEYNVRQYVLKRDNYTCQCCGAHTTAKKTVKLHVHHLESRKVGGNAPSNLITLCTTCHNNLHKGKITLDGKKRGKTLRDAAFMGIMRNTLLTRLRNELNIPVQNTYGYITKLLREQNDIKKSHVNDARCISKHPLAKPCSVCYRTKAIRHHNRQIHKAKILKGGIRKANQAPYIVKGFRLWDKVLYNEQECFISGRRSSGYFALRKFDGTTITNSISFKKLRLLEPATNYLIERK

SEQ ID NO: 9881 - protein, 416 aa, unidentified
  REGION 1..416: note = Human gut metagenome
MVYVLSQHGQPLMPTENHAKVRALLKHGKAKVIQRCPFTIQLLYESTTHTQKINLGIDAGSKTIGVSATTETKVLYESEVVLRNDIVELISGRRALRSSRRNRKTRYRKPRFDNRKRPDGWLAPSVRQKIETHITVVENVMKILPVTKIIVETASFDIQKIKNPEIEGVGYQHGEQLDFWNVKEYVLFRDGHTCQCCKGKSKDNILNVHHIESRKTGGNAPNNLITLCETCHKAYHKGIITLPKEIHRGMRFRDAAFMGIMRWAFYDRLKELYNPLGAEVINTYGYITKNTRIEHGLPKEHYVDARCISDNPAAKPLDHYYFQKKVRCHNRQIHKNTILKGGIRKRNQASYEVKGFRLYDQVLWKGQKCFIFGRRSTGRMDLRLLDGTHVNASVGYKNLKLLSMRKNYLIEQRKAG

SEQ ID NO: 9882 - protein, 427 aa, unidentified
  REGION 1..427: note = coral metagenome
MQNYVFVIDTKKQPLNPISPKKARRLLDKGKAAVFRMYPFTIILKTAIDNPTISPCQIKIDPGSKVTGFALVQNNQVIWGMELEHRGGLIKKKLESRKAVRHRRRNRNTRYRKPRFLNRRRKEGWLAPSLEHRVLTIETWVKRLIKFCPINQIWVERVKFDTQKMQNPEINGVEYQQGELAGYEVKEYLLEKWGRECTYCGKQSVPLQIEHIHPKSLGGSNRVSNLCLACEKCNQRKGNKPIEEFLKKKPNLLQKIKTKTKQPLPDAAAVNTTRNKLVKVLRSIKFVVTGTGAQTKYNRTRLGLPKQHWIDAACVGNIETLVLKTSQPLLVTCKGQGGRQKAALNKYGYPIRHNPLKPIKGWLTGDIAKHQKLGIGKVTPRSKGSFGFTPLGMKGYKSCFPQDISAIHRKDGYTYSFCQHMPEFTWK

SEQ ID NO: 9883 - protein, 413 aa, unidentified
  REGION 1..413: note = Human gut metagenome
MTSYSFVLDVNGKPLAPTKEQKAWFLIRKKRAALVSKYPMVIQLMKEIPENEICQDEIRCGIDDGGLHVGIALVQKCKTKNKVVFKGTMEQRNDVKHLMEVRRGYRRYHRYHKRYRQARFDNRKSSKREGRIAPSILQKRQATIRVIHWLNKWINITNYWLEDVSVDIRALTDGYQSYRWQYQKSNRLDENIRKAAILRDDGKCMECGKSNCRLEVHHIKPRRRNGSNTLDNLITLCESCHQKTEGQEELYMDRYFSLLKSSDNKNLNDAQHVMIGKMWLRKQLSGLGVLYLTSGGDTANKRIDWNIEKSHANDAVCITDLQPDTCDMKEWTMKPMRRQSKAKTDHVLGIHHRDLVEYTFKNGETHRGYVTALYPEQKAINFQSPTKHCKKVNARKCKLLWNYSKIYWFENAS

SEQ ID NO: 9884 - protein, 458 aa, unidentified
  REGION 1..458: note = Ga0315273_10129197
MQKFKGKLKNVPRNTSLVPCSTNLELNRDQSLSVSGGLKDSKLTLNNPEVNQVQQTERSLKAKVFVLNKQGKPVMPCSYAKSKRMVKKGAARVVKRFPFTIQLNFECENVVQEVNLGIDTGFGNIGFSATTEKEELICGTLVLDGRTKERLDERRMYRRNRRNRLWYRKQRFDNRISTKKESWLPPSTERRYQTHLTLINRLKKILPISSITLEFAKFDIQKLKNPDIEGQDYQQGNLYQYQNVRSYLMAREKGKCQFCGQDFKNQPSHVHHIKPRSQDGNNQVDNLAILHEKCHEKIHREHLENQLKSNSKDYKQSTFMSIIHKRFWRDIPDLKVTYGNITFVNRTRLNLSKAHYNDAFVISGGTNQKRSEPLEINQVHRNNRVLQLNRKGFKPSIKKEKSKVNPRDLFWIKKKQYVCKGMFSYGRYILFGTVKKKEYFKFSEVTKIFHFGSFVWNS

SEQ ID NO: 9885 - protein, 431 aa, Escherichia sp.; identical to SEQ ID NO: 3801

SEQ ID NO: 9886 - protein, 465 aa, unidentified
  REGION 1..465: note = Human gut metagenome
MSTCVCVLSNNGERLMPTIRLGKVCHLLKDGKAKIIKHHPFTIQLLYDSKTNTQPIEICEDVGYNYIGISVKSQSHEYVSAQYDTLQDEKACHDSCRKLRRTRRNRLRYRKPRFDNRKRGEGWLAPSLRHKKELNVNVVKMYCAVMPITHATVEVGSFDTMLLQAIQKGESKPEGVDYQKGPRYNLATLREAVFYRDNYVCKVCGRKATEGAILHMHHMFYWKGRHGNSLDELLTVCEKCHTPANHQKSGKLYGFGENVKFADLSGAAFMNTVRWQIVNELYAAFGKDFVTVTYGAMTKEKRIALHLEKSHNNDAYAMGEFHPNCRCTFEHYEKVRRNNRILEKFYDSRYIDIRTGEIATGKELFNGRINRNHKKDSKNLHKYRGKRLYKGHRALVRKKVNFNPGDLVSLNGEVLVVHGTHTNKKGAVNVEFKTPAKNGRKSANLKKLKIVKAAGSIHPAWEKVS

SEQ ID NO: 9887 - protein, 473 aa, unidentified
  REGION 1..473: note = Human gut metagenome
MAVFVIGLTEKRLMPTTERKARILLKQKKAEVFCKNPFTIKLLYQTGGTTQHVTLGVDTGSQHLGFAVAGDNGNIIHEQEVSLRRSMEKRKLLVKCKESRRGRRYRKVRYRHPRWRHHTVRAYIQKGCRKKGAKRYWKKLKVQFSSPRPEGWLPPSLQSKTDHHIRWIHRFLDVLPKNIRMVLEVGRFDAARMKNPEIHGELYQRGPQYDYENVKAYVFDRDSYKCRCCHAKAGTRRKDGTVVKLIAHHIDYRSRGASDNPDALASVCDVCHTAANHQPGGVLYDWMVKNKRFKRGQRDTTFMNILRRRLFEAFPDAEYTYGNITAARRKELMLPKSHADDAVAIACTGMDINSIRKRPDHVVYVQQVRKKKRSLHEANPRKWSKTKNHFAVRNSKNTKEVNGVCLFDKVEVPGKGYGWVTGFSGTSCYVLDRNGNYVTTADTYKQVAISRLKVIQHSGNWISGLKCPIGNGS

SEQ ID NO: 9888 - protein, 339 aa, Pseudoalteromonas sp.
LRTDVSKKMQQRAMYRRTRRNRKLRYRPARWLNRASMRKEGRLAPSLKSKLDSHLREKKQVEAILPISHWKVETASFDIHKITNPTVTGAGYQQGAQLGYYNVKAYVLQRDNYKCQSGRKTKHSAKLHVHHKVFRSQGGTDAPSNLITLCETCHNDLHAGKFELKVKRSKTKHATEIGIVKVQLKQCWDFEETFGYVTKFKREQVLGLPKTHYYDAVSICCENGELVQQAKHVLRKRHVASGDYQQTKGVRSEKWIPVGKLFGLKKHDFVQTPQGTGFVKGKRSSGYFALETILGNKVHACANIKKNTVRISARTTTLTQPMEAARILVTKVPSILAVN

SEQ ID NO: 9889 - protein, 415 aa, Bacillus sp.; identical to SEQ ID NO: 2671

SEQ ID NO: 9890 - protein, 411 aa, unidentified
  REGION 1..411: note = Human gut metagenome
MVYVQDIDGKPMMPTTRHGKVRRLLKDNKAVVVNTCPFTIKLTYKTSDYKQEIVLGVDSGTKHVGLSATTKSKELYASEVILRSDVVDLLSTRRGLRRTRRSRLRYRKQRFNNRVKSKKDGWIAPSVRHKIDSHIRIISFVYSILPVSKLIVEVAQFDTQKIKNPEISGKEYQEGEQLGFWNVREYVLARDGHKCQHCKGKSKDPILNIHHIESRKIGGDSPSNLITLCETCHKEFHKGNIKLKVSRGKSLRDAAVMGIMKWKLYEELKSKYDNVSMTFGYITKYNRINHGIEKSHVSDAFVISRNFNSCRLGYYYKRKLVRRHNRQIHKMKILKGGIRKRNQAPFKVFGFRLFDKVMFQGEEHFIYARRLSGQFNIRDINGENKKDVSCKKLKYVSHGLVSVKTNLFLSQ

SEQ ID NO: 9891 - protein, 396 aa, unidentified
  REGION 1..396: note = Human gut metagenome
VVRRTPFTIQLTIATGESKQPVSLGVDAGYKHVGLSASTEKAELYASEVELRQDITDLLSARRALRQSRRNPKTRYRAPRFDNRIRTKRKGWLAPSVENRINAHLSRIETVIRLLPVTKISVETTSFDMQLLKNSDIAEKEYQESEQLGFWNVREYVLFRDGHVCQHCHGRSKDPVLNVHHLESRRTGGDSPGNLIALCETCHKELHRGEITLKAKRGQSFRAETFMGIMRWEVLDRLKASHPKLEVQNTYGYRTKHARIVNGIAKSHCADAFCIAGNLGAERLGEFLFQKQTRRNNRQIHKLSILKGGIRKRNQVPFEVKGFRLFDKVACKGEEGFIFGRRSSGYFDVRKLDGTRISAGISYKKLRLLEKRQTYLTEIRKEEALPPLPEGRGLRA

SEQ ID NO: 9892 - protein, 388 aa, unidentified
  REGION 1..388: note = Human gut metagenome
MPNKVYVINKHGRPLMPCSPAKARHLLDAGKAKVKKRTPFTIQLVYGSSGYTQEVILGVDAGSKTIGVSASTKKEELFAANVIPRNDVVDLLSTRREFRRARRNRKTRYRKPRFDNRVRSKHKGWLAPSVEVKIQEHITAIRRVCGILPVSKVVVETAEFDLQLLKAIADGKPVPQGEDYQKGEMYGHYNVRQYVLWRDDYTCQCCGAHATKKKEVRLHVHHLESRKVGGDAPDNQVTLCESCHEKLHKGLITEKDFKKRKRRSTRDATFMGIMRKTLMQRLCSELPIPVVKTRGYITKATREKLLVLPKSHTNDALAIAQGKRGFNVGYLPGIIQTDKIYTIRPVRHHNRQLHKAAILKGGIRKSNQAGKYVFGYRLFDKVQFNGQD

SEQ ID NO: 9893 - protein, 372 aa, Moorena sp.; identical to SEQ ID NO: 8481

SEQ ID NO: 9894 - protein, 423 aa, Moorena sp.
MRVFVLNSNRQPLDPCKPARARILLSTGKAKVYRRYPFTIILTEEIQEPITHGSQFKIDPGSKTSGLAIVQGNRIVWGGELTHRGFQIRDALTSRRQLRCARRNRKTRYRKPRFLNRSRPEGWLAPSLMSRVHNILTWVKKLTRLCPIAGISQELVRFDTQKLQNPEISGIEYQQGTLYGYELREYLLEKWNRKCAYCGTTGTQLEIEHIKPLSKGGSNRVSNLAIACHSCNQSKSAQEIEQFLSGKPDVLKRVLSQAKRPLTDAAAVNTTRWKLYHELKSIGLPVEVGSGGLTKFNRCRQNLPKTHWLDAANVGKVDTLIIEGYQPLLIAAKGHGTRKICRTNKYGFPIRYCSRTKIHKGFQTGDIVRAVVTKGKKIGTYVGRVATRKSGSFNISTKSGLVQGISHKYCQFIHRKDGYAYRH

SEQ ID NO: 9895 - protein, 465 aa, unidentified; identical to SEQ ID NO: 4783
  REGION 1..465: note = Human gut metagenome

SEQ ID NO: 9896 - protein, 440 aa, Lactobacillus sp.; identical to SEQ ID NO: 5150

SEQ ID NO: 9897 - protein, 443 aa, Fervidobacterium sp.
  REGION 75..77: note = misc_feature - Xaa can be any naturally occurring amino acid
MVFVLDKNKKPLMPCSEKRARLLLSRGRAVVHKMHPFTIRLKDRTVQQSELQPLRLKLDQGAKVTGLSVLREDGXXXDVAETVFLCEIHHKTDIKQKLDARRAVRRSRRNRKTRYRKPRFLNRRRPEGWLPSSFKARADQLVNVVIKLTKLLPISAISIEDAKFDTQKLQNPEISGIEYQRGTLFGYEVREYLLEKWGRRCAYCGRSDVPLEIDHIVPRSRGGTDRVSNLTLACRECNQKKSNKTAAEFGYPHIEERARQTYKQAAFMNSIRSYLSKSLSSFGIPVEYGTGALTKANRIRLGFPKEHYFDACCVGESTPSEIRITQSYVQIWRAVGRGTRQMCNTDKFGFPRGHRQRCKKHFGFQTGDIVKAIVPRGKYAGIWMGMVAVRASGFFDIKDKNGKRVCQGIRYKYCKLIQTADGWQYSKTKTNYSISHTTEVACI

SEQ ID NO: 9898 - protein, 423 aa, Deinococcus sp.; identical to SEQ ID NO: 6340

SEQ ID NO: 9899 - protein, 427 aa, Moorena sp.
VCKVFVIDSEKRPLNPIHSAQARQLLRNKKAAIFKRFPFTIILKESCPDSPVQSLRLKIDPGAKFTGIALVNDGTGEVVFAAELKHRGFAIRDALTSRRQLRRSRRARKNRYRKPRFLNRTRPEGWLAPSLQSRVENIKTWVKKLRKLAPIQSISQELVRFDMQLMRNPEIEGKEYQQGTLAGYETREYLLEKWGRQCAYCGVKDVPLQIEHIHPRAKGGSNSITNLTLSCEKCNTKKGTKDIKDFLKKDPSKLSKILAQAKRPLFYAAAVNTTRFALLNELKETGLPVETGSGGLTKFNRSQQNLSKTHWLDATCVGKSTPILKVKGIKPLLITANGHGSRQSCRTDKFGFPNRYVPKFKFVKGFQTGDIVKCVVLSGKKIGEYVGRVAVRTTGSFNISPKKGLIQGISHKFCKCIHAKDGYSYAT

SEQ ID NO: 9900 - protein, 427 aa, Calothrix sp.
MSKVFLIDTNFKPLNPIHPARARQLLRSKKAAVFRKFPFTLILKERLPDVEVEPLRLKIDPGAKTTGFALVNDSTGEVVFAAELQHRGFKIRDALTSRRQLRRSRRNRKTRYRAPRFNNRKRREKWISPSLQSRVDNIITWVKRLQKFAFISAISQELVRFDTQLMQNSEVSGVEYQQGTLAGYETRQYLLEKWGRKCAYCGVEHVPLQIEHIQARAKGGSNRISNLTLSCEKCNLKKGTKDVKEFLKKDPKKLEAIIKQAKKPLADAAAVNTTRFTLLATLKATGLEVETGSGGLTQFNRVQQNLDKTHWIDAACVGKSTPILKFKGVKPLLITAKGYGTRQMCGTNKYGFPTRHRSNKQIHFGFQTGDIVKAIVTKGKKIGVYIGRIATRSTGSFNVSTKAGLVQGISYKDCKVIHHKDGYAYAN

SEQ ID NO: 9901 - protein, 408 aa, unidentified
  REGION 1..408: note = Human gut metagenome
MVYVQDIDGKPMMPTTRHGKVRRLLKANKATVVNLCPFTIRLTYATSGYKQEIVLGVDAGTKHVGLSATTKSKELYSSEVILRSDIVELLSTRRELRRTRRNRLRYRKPRFGNRVKSKHHGWVAPSVRHKVDAHIRVIDNICSTLPISRIIVEIAQFDTQKIKNPDISGNEYQEGDQLGFWNVREYVLARDGHKCQHCKGKSKDPILDVHHIESRKTGGDSPSNLITLCETCHKEYHKGNIDLKVKRGKALRDAAVMGIMKWKLYEELKSRYPNVSMTFGYITKYNRIKYGIEKYHISDAFVISKNFNALRLEYHYKVRLVRRHNRQIHKQKVLKGGAKKPNQSPFEVFGFRLFDRVMFEGNYYFIFGRRKSGSFNIRDINGGNQRNVTYKKLKLSIGKRFMIQKEMN

SEQ ID NO: 9902 - protein, 411 aa, unidentified
  REGION 1..411: note = Wastewater metagenome
MLVYVLNQHSKPLMPCKPQKARKLLESGKAKVVSRVPFTIKLLHGSSGHKQEITAGMDTGSETVGCAAIANGKVIYQSEVKIRTDVSKKMQRRAMYRCTRRGRKCRYRKPRFLNRSSARKAGRLAPSLLSKLQSHLREKAQIEKILPISHWKVETASFDIHKITNPDVSGSDYQKGKLKGYYNIKAFVLNRDNYKCLSGRKVKHSKKLHVHHIIFKSKGGTNTPDNLLTLCESCHSDLHAGKFELRAKKSKTKHATEMGIIKARLLKIWDFEEAFGYETKFKREQVLNLAKSHSNDAIAICCGDNKTVKQSKFIIHKRHVAKGDYQQTKGVRSEKIIPTGKLFGFKKHDFIKTDKGTGFIKGKRSTGYFSLETILGEIIHNSANIKKNAVRLTARTTTLTQIMEMAIHPAA

SEQ ID NO: 9903 - protein, 460 aa, unidentified
  REGION 1..460: note = Human gut metagenome
MVAVVDLFGKPLMPTNEYRARKLLKRKKAKIFGYRPFTIQLTERKDTEIQPIELCMDTGYIHIGISAKSERHEYLGMQIDTLTDEKLKHDDKRQYRRQRRNRKRYRAPRFDNRRRKEGWIAPSLEHKKEIHIDAIQRICKVMPITDLTLEMGNFDTQVLKAVEEGKTLPQGSDYQHGERYGIATLREAVFLRDGYKCQCCEKSVKDGAILHVHHIKYRSQGGTNRMSNLITVCDKCHTPKNHKPGGRLWDWKPKLAEFKGASYMTSIRWMLYNEVTALLPNSSVHITYGAKTKESRRELDIEKSHVNDAYVMGLFHPKHRTQPVYFKKKRRNNRVLERFYDAKYIDGRDGKKRSGQELFNGRISRNHKKDSENLHLYRKQKVTKGKRSIRNRHYPIQPHDILLYQKKKYETAGCHNNGTRAILLPEKKSVALRQLTIYQYAGGYYRVPYESNKKEERTGS

SEQ ID NO: 9904 - protein, 439 aa, unidentified
  REGION 1..439: note = Human metagenome
MVLVVDKRKRPCNTISEAYARRLLFKKQAVIHKRFPFTIRLKNDNAVLKDRAYTVKLDPGSKHTGIAITDDKDSVVMLAELEHIGHLIKKDLNSRRIVRKSRRQRKTRYRPARFLNRVKPKGWLAPSIRSRADNVINFIKKYKKLINIDKVMIENVSFDTAQMSSNAKLWGSNYQQGPLYQNKLRSFIFSRSNDKCVYCGAKATEVDHVVPRSSGGTNSTYNLVASCRACNQIKSNQTLKEFGKIMNKDYSHLEPKKLPRDAAIVQSARNYMVREITKLVSDTTTHDAWLTRYNRDELGLPKEHYYDALSVGEIPTKFNFFTDKILQISAKGRGSRQMCRMDKYGFPGTKPKGSKLVEGFQTGDMVKAVVPKGLNKGEHLGRVIVKSSGYFEIKSKNSSVQGINHKYCRLIQKGDGYLYNYKESDFLSAIAKRVMICLH

SEQ ID NO: 9905 - protein, 419 aa, Scytonema sp.; identical to SEQ ID NO: 6324

SEQ ID NO: 9906 - protein, 414 aa, unidentified; identical to SEQ ID NO: 2588
  REGION 1..414: note = Human gut metagenome

SEQ ID NO: 9907 - protein, 408 aa, unidentified; identical to SEQ ID NO: 6729
  REGION 1..408: note = Human gut metagenome

SEQ ID NO: 9908 - protein, 482 aa, unidentified
  REGION 1..482: note = Human gut metagenome
LVGNVQAPWDVDPSPTLCGLCLKVLRGRNGDADKKPFPTLTKDENRPLGRTTGLRAEQAEPAGIRKGDTLKVFVLNMRGKPLMPCSPAKARHMLKAGKAVVVRRTPFTIKLTIATGETKQDVTLGVDAGARHVGISATTEKEEVFASEVALRQDITGLLADRLAFRRARRNRKTRYRAPRFNNRVRSKHKGWLAPSVENRIQAHMSRIDAVCRLLPVTKIVIEAASFDVQKIKNPTIEGTDYQQGDQLGFWNVREYVLFRDGHVCQHCHGRSRDKILNVHHLESRKTGGDAPNNLITLCETCHKAYHAGKIKLKVKRGHSFRAEAFMGIMRWTLLNRMRKAHPSLPVENTYGYLTKHKRIALGLPKTHCADAFCIAGNLKALRRGDFLFQQQTRKHNRQIHKCSILKGGVRKLNQAPFLVKGFRLFDKVRIGGQIGFVFGRRVRGTFNIRRLDKTVIGTDINCKKLSLLETRKTFLTELRKE

SEQ ID NO: 9909 - protein, 512 aa, unidentified
  REGION 1..512: note = Human gut metagenome
MSTIYVLNKDGKPLMPTTRGGHVRHLLKEQKAQVVTSKPFTIQLLYETDDVVQPLYLGIDPGRTNIGVAVVKIDGTAVFTAHLETRNKEIPKLMQGRKKARRARRTNGRRCRRQRRAKANGTISKKCVKQTTAQNGSVSKRAKKIGVIKRHLPGCEKEVLCIGIKNKEAKFSNRARPEGWLTPTANQLLQTHINLVKKIQKFLPISDVVLEINKFAFMRLDNPNVQKWQYQQGPLYQKASLEEAVSEMQEHHCLFCKNTIDHYHHVVPQHKNGSNTIGNIVGLCAKHHDLVHKDTSWQEKLAKKKTGLNKRYGALSVLNQIIPALTKELSSLFPKHFFATNGKSTYDYRAAHGVSKDHWLDAYCIAGSVLPNDACDNNINSHVPYELKQFRRHDRRALHKENMSRVYTLNGKSVATNRHKAIKQTTDSLEEFRQSHPGDVCKLKVKEHHPAYRNLNRNHPGSVFFVGEQAHVMQSIVASKDGKATRYKDTNVNKIAAGQCRFVAKNEGIVFT

SEQ ID NO: 9910 - protein, 515 aa, unidentified
  REGION 1..515: note = Human gut metagenome
MIPNERRHLMPYIYVIGMDGKPQMPTKRRRHVQKLLDTGKARITERVPFTIQLLYDNDPVLQPVILAEDPGRTNIGVATLDLKGNLLLSAAVETRNKEIAKLMEKRRQCRRASRNGERKARQRLAKKYGTMIQAGMRMRKLPQYAADAFITCKVIRNTQARFCNRRRLDGWLTPSARHLVQTHINLVHKVQKYLPVTDVAIEVNRFAFMQLEDPAICGVDFQTGPLKGYDDRDAAVYDLQDGKCLMCKHEITQYHHIVPRSRNGSNTIGNIAGLCDQCHDRVHKDADFAEQMKEKKEGMDKKYGALSVLNQAIPFICKQLETEFGRGHVHYCTGRETSLVRQSTGYQKTRKNQLHEVDAWCIGALALAEIPENVPDFKEIHLIRQFRRQDRSLVNAQTERVYKLGGKMVAKNRKKRTGQEIYALEDWYNRQVETYGKQEADCMRSRLKITKSRRRYNNPNRMMPGAVFLYEGVRYVMRGQHSKGAYLQAVGMENRDFPVRKCKILTRNTGLVFVS

SEQ ID NO: 9911 - protein, 430 aa, Moorena sp.
MSNFIFVVDTNGQPLNPVPPGQARRLLKLQKAAIYRRYPLTIVLKYTVSAPQIQPHQLKIDPGAKVSGLAIVRDDKVIWGAELTHRGQQIKHDLASRRALRSHRRNRKTRYRQPRFLNRTRKSGWLPPSLESRVENILTWVNRIRRYVPITGISQELVKFDTQAMQNPEISGIQYQQGELAGYEIREYLLEKWGRKCAYCNAQNIPLEIEHIHLRSKGGSSRVSNLTIACRHCNEAKGNQELKDFLAQQPELFDRIAKQAKQPLKDAAAVNSTRWQLFNRLKETSLPVEIGTGGQTKYNRTRLELPKTHWLDAACVGLVSQLKILTAGPLLIQASGWGSRQICQPNKYGFPIRHKTRCKEFFGFKTGDMVQATLPTGKFAGTHRGRLIVRASGVFEMISPTGKVSPVRHKYCRAIHHNDGYTYTLSTCVQ

SEQ ID NO: 9912 - protein, 512 aa, unidentified; identical to SEQ ID NO: 3057
  REGION 1..512: note = Human gut metagenome

SEQ ID NO: 9913 - protein, 406 aa, unidentified; identical to SEQ ID NO: 7944
  REGION 1..406: note = Human gut metagenome

SEQ ID NO: 9914 - protein, 413 aa, unidentified
  REGION 1..413: note = Human gut metagenome
LKVFVLNMRGKPLMPCSPAKARHMLKAGKAVVVRRTPFTIKLTIATGETKQDVTLGVDAGARHVGISATTEKEEVFASEVALRQDITGLLADRLAFRRARRNRKTRYRAPRFNNRVRSKHKGWLAPSVENRIQAHMSRIEAVCRLLPVTKIVIETASFDIQKIRNPEVEGTGYQQGDQLGFWNVREYVLFRDGHICQHCRGRSKDPILNVHHLESRKTGGDAPNNLITLCETCHKAYHAGKIKLKVKRGHSFRAEAFMGIMRWTLLNRMRKAHPSLPVENTYGYLTKHKRIALGLPKTHCADAFCIAGNLKALRRGDFLFQQQTRKHNRQIHRCSILKGGVRKLNQAPFLVKGFRLFDKVRIGGQIGFVFGRRVRGIFNIRRLDKTVIGTDINCKKLSLLETRKTFLTELRKE

SEQ ID NO: 9915 - protein, 413 aa, unidentified; identical to SEQ ID NO: 2636
  REGION 1..413: note = Human gut metagenome

SEQ ID NO: 9916 - protein, 426 aa, unidentified
  REGION 1..426: note = Human gut metagenome
MVYVQDINGKPLMPTTRHGKVRRLLKDKKAVVVNLCPFTIKLMYVTSDYKQEIVLGVDAGTKHVGLSATTKSKELYSSEVILRNDIVDLLSTRRELRRSRRNRLRYRKPRFDNRVKSKRPGWIAPSVKYKIDAHIRVVENVCSILPISRIVIEVAQFDTQKIKNPNISGKEYQEGDQLGFWNTREYVLARDGHKCQYCKGKSKDKILNVHHIESRKTGGDSPSNLITLCETCHKEYHKGNIDLKIKRGKSLRDAAVMGIMKWRLYEEIKSKYDRVSMTFGYVTKYNRINHGFEKSHVSDAFVISKNFNAIRLGYYYKVRLVRRHNRQIHKQKIQKGGIKRLNQSPFEVFGFRLFDRVMFENSYYFIFGRRKTGSFDIRYIDGKNQKNVTYKKLKLSRCKRFMIQMELNKKTRTCFENERNSDRDAA

SEQ ID NO: 9917 - protein, 561 aa, unidentified
  REGION 1..561: note = Human gut metagenome
LLRLSIFPVDSSARVVLPRVMPFAASTQPRETQPPVSAGETYSKRRVAYMPTVYVLNKDGKPLMPTTRCMHVRHLLKEQKAQAVASKPFTIQLLYETDDVVQPLYLGIDPGRTNIGVAVVKTDGTAVFTAHLETRNKEIPKLMQGRKKARRARRTNGRRCRRQRRAKANGTISKKCVKQTTAQNGSVSKRAKEIGVIKRHLPGCEKEILCIGIKNKEAKFNNRTRPEGWLTPTANQLLQTHINLVKKIQKFLPISDVVLEANKFAFMQLDNPNIQKWQYQQGPLYQKANLKEAVSEMQEHHCLFCKKPIAHYHHVVPQSENGSNIIGNIVGLCTKHHDLVHKDAAWQEKLAKKKTGLNKKYGALSVLNQIIPALTKELSSLFPKHFFATDGKSTYDYRTAHGVSKDHWLDAYCIACSVLPKDVCDSSINSRVPYELKQFRRHDRRALHKENMKRMYTLNDKVVATNRHKAIKQTTDSLEEFRQRQPHDVCKLKVKEHHSEYRNPKRNFPGCVFLVGKHTHVMQGTRGSHNGKADGYYDTNGNSYSSGKCKFVVKNEGIVFT

SEQ ID NO: 9918 - protein, 419 aa, unidentified; identical to SEQ ID NO: 4877
  REGION 1..419: note = Human gut metagenome

SEQ ID NO: 9919 - protein, 425 aa, unidentified
  REGION 1..425: note = Human gut metagenome
MENTLKVFVLNMRGQPLMPCSPPKARKLLRAGKAVPVRRTPFVIQLTVPTGETKQPITLGVDAGYKHVGLSATTAKEELLASEVELRQDVTGLLSDRLALRRARRNRKTRHRAPRFANRVRSKHKGWLAPSVENRIQAHISRIEAVCRVLPITKIVIETASFDIQKIKNPEVEGTDYQQGEQLGFWNVREYVLFRDGHVCQACKGRSKDLILNVHHIESRKTGGDAPGNLITLCEACHKAYHAGKLKQFSPRRGASFRAETFMGIMRWTVLNRLRERHPELPVTNTYGYLTKHKRIVAGLPKTHCADAFCIAGVLDAKRRGEYLFQKQTRRHNRQIHKLTILKGGVRKRHQAPYLVHGFRLFDKVLCKGEVGFIFGRRSSGAFDVRRLNGTKISAGISYKKLSLLEKRKMFLTELRKEGRDSSRV

SEQ ID NO: 9920 - protein, 396 aa, unidentified
  REGION 1..396: note = metagenome
VVRRTPFTIQLTIATGESKQPVSLGVDAGYKHVGLSASTEKAELYASEVELRKDITDLLSARRALRQSRRNRKTRYRAPRFDNRIRTKRKGWLAPSVENRINAHLSRIEAVLRLLPITKITVETASFDMQRLKNPDISGKEYQEGEQLGFWNVREYVLFRDGHVCRHCHGRSKDPVLNVHHLESRRTGSDSPDNLITLCETCHKALHRGEITLKAKRGQSFRAQAFMGNMRREVLNRLKASYPELKVHETYGYLTKHARIANGIVKSHGADAFCIAGNLGAERLGEFFFQKQTRRNNRQIHKLSILKGGIRKRNQAPFEAKGFRLFDKVACQGEEGFIFGRRSSGSFDVRKLDGTRISAGISCKKLRLLEKRRTYLTEIRKEEALPPLPEGRGLRA

SEQ ID NO: 9921 - protein, 419 aa, unidentified; identical to SEQ ID NO: 4877
  REGION 1..419: note = Human gut metagenome

SEQ ID NO: 9922 - protein, 452 aa, Moorena sp.; identical to SEQ ID NO: 3322

SEQ ID NO: 9923 - protein, 499 aa, unidentified; identical to SEQ ID NO: 3817
  REGION 1..499: note = Human gut metagenome

SEQ ID NO: 9924 - protein, 415 aa, Bacillus sp.; identical to SEQ ID NO: 2431

SEQ ID NO: 9925 - protein, 513 aa, unidentified
  REGION 1..513: note = Human gut metagenome
VLEELLSKTEYIYVIGTDGRPQMPTKRKRYVLKLLNTGKARIAEKVPFTIQLKYDNTPVLQPVTLAEDPGRTNIGAAALSPFGDLMFAAVIETRNKEIKKLMADRKAHRQASRRGERKARQRLAKKYGTMIKAGMAMRKLPQYAADKFVTCKFIRNTEARFCNRKRCSDWLTPTVNHLVQTHLNVIKKISRYLPVTDIAIEVNRFAFMQMENPNASGVDFQNGPLRGFDDVKAAIREQQNNKCLMCKNDIKHFHHMVPRSRGGSDTIQNQVGLCPKCHSKIHTDPAFKKKLEDKKSGLLKKYGALSALNQAIPFTCKALLEEYGGEHVHFCTGRETSLIRTSLGYEKTNDNQMHEVDAYCIGLAALGLKDIKLQSFVNTYKIKQFRRHGRSIIHHQTERSYYLDKQKIATNRKPRFEQAGDALSDWYEKQVKACGNAKAAKMLSTLKVKKSSRFYNSEGRLMPGTVFSYNGQRHVMSGQLTGGRYLRAYGDTKTNYPASKCKILRSNEGLVFI

SEQ ID NO: 9926 - protein, 545 aa, unidentified
  REGION 1..545: note = Human gut metagenome
VQFAWWLCHPKPSDNIEDVNHETALMLLQIKAGTETFGTAPCGSGPKAEGVSHERKSMNIVSVVTNTNKPLMPTSPYRARKLLSSGKAKIVKHRPFTILLVNRSDGNVQEIEYKSDTGYLHVGISVCSEKREFVREQRDLLPDEREKHNDRRKYRRTRRNRKRYRKARFDNRIGKIRKAEKNKHVWLPPSLDHKVDAQVQLFLRLYQVMPIKRAVFEMGQFDPALMKALEKGEAAPQGIDYQMGERYQIATRRAAAFTRDRYACVFCGRSIKDHAILHVHHIGFWKQDRSNRLDNLATCCEQCHTSENHRPGGILYGVEPKLESLASATYMNVVRFELLQRLKEAAPDVEFHISYGAKTSVIRKQRSISKSHTNDAYCLGQYFPKLRAEEIGFQKIRRNDRILQKFYDAEYLDSRDGTTKKGKELTNGRISRNHMKDHKNLHQYRGKKLSKGRVTIRRGRSSLKTGSLVRFDGEVLTVHGTHRSRRKNKAGHIKVSVNVEFECPSKTGRKSAALSKCQIISQSYNTGWKKIQLRKEEQGKIAAVG

SEQ ID NO: 9927 - protein, 430 aa, unidentified
  REGION 1..430: note = Human gut metagenome
MPKVYVLNRHGRPLMPCTPAKARHLLDAGKAKVRHRTPFTIQLLYGSTGYTQEVILGVDAGSKTIGLSAATETEELFSAEVKPRNDVVELMSARRQFRRARRNRTTRYRKPRFDNRVRSKHKGWLAPSVEVKIQEHMTAIRRACAILPVSKVVVETAEFDLQLLKAVAEGKPVPQGEDYQKGEMYGHYNVRQYVLWRDSYTCCICGVHGSVRKGVPLHVHHLESRRVGGDAPDNLVTLCTACHDKLHKGIIMVADIKKRKRRSTRDTTFMGIMRMTLLRRLWEQLPVPVVETRGYITKATRENLLVLPKSHANDALAIAHGPQGFRAEHLPNIRQADRLYTIRPVRHHNRQLHKATILKGGVRKANQAEKYICGFRLYDKVLYNGIECFVWGRRTSGSFLLRQLNGEKVKDGVSYKHLKLLERSQSYLVA

SEQ ID NO: 9928 - protein, 413 aa, unidentified; identical to SEQ ID NO: 2636
  REGION 1..413: note = Human gut metagenome

SEQ ID NO: 9929 - protein, 470 aa, unidentified; identical to SEQ ID NO: 2825
  REGION 1..470: note = Human gut metagenome

SEQ ID NO: 9930 - protein, 514 aa, unidentified
  REGION 1..514: note = Human gut metagenome
MSTVYVLNKDGKPLMPTTRCGHVRNLLKEKKARAVASKPFTIQLLYETDDVVQPLYLGIDPGRTNIGVAVVKTNGTAVFTAHLETRNKEIPKLMKKRKDSRRTRRTNGRRCRRQRRAKANGTISKKCVKQATAQNGSVSKRAKKIGVIKRHLPGCEREVLCIGIKNKEAKFSNRTRPESWLTPTANQLLQTHINLVKKIRKFLPISDVVLEINKFAFMQLDNPNIQKWQYQQGPLYQKASLEEAVSEMQEHHCLFCKKPIAHYHHVVPQSENGSNTIGNIVGLCTKHHDLVHKDATWQEKLAKKKTGLNKKYGALSVLNQIIPALTKELSSLFPKHFFATNGKSTYDYRAAHAVSKDHWLDAYCIACSVLANYVCDSNINSHVPYELKQFRRHDRRALHKENMNRVYTLNGKSVATNRHKAIKQTTDSLEEFRQRQPNDVYKLEVKEHHPEYRNPKRNFPGCVFLVGKHTHVMQGTSGSHNGKADGYYDTSGNSYSSGKCKFVAKNEGIVFTLN

SEQ ID NO: 9931 - protein, 431 aa, unidentified
  REGION 1..431: note = Human gut metagenome
MPNKVYVLNKHGRPLMPCSPAKARHLLDEGKAKVKKRTPFTIQLVYGSSGYTQEVILGVDAGSKTIGMSASTKKEELFAANVNPRNDVVDLLSTRREFRRARRNRKTRYRKPRFENRVRSKHKGWLAPSVEVKIQEHITCIKRVFSILPVSKVVVETAEFDLQLLKAIEEGKPAPEGEDYQKGEMYGHYNVRQYVLWRDGYTCQCCGARATKKKEVRLHVHHLESRKTGGDAPGNQITLCEDCHKKFHKGLIPDGTLKKRKRKPNRDVAFMGIMRKTLIERLRAELPIHVVETRGYITKATREKLLVLPKSHTNDALAIAQGKHGFNVGYLPGIVQIDKIYTVRPVRHHNRQLHKVTILKGGIRKANQAEKYVFGYRLFDKVQFDGQDCFIFGRRSTGIFNIKTIYGKMIKDGISFKKLKLVEKSTSYLIA

SEQ ID NO: 9932 - protein, 465 aa, unidentified
  REGION 1..465: note = Human gut metagenome
MNTCVCVLSNNGERLMPTFRLGKVRRLLKDGKAKIVKHHPFTIQLLYDSKTNTQPIEICEDVGYNYIGISVKSESHEYVSAQYDTLQDEKEHHDDCRMHRRTRRNRLRYRKPRFDNRKRGEGWLAPSLKHKKELNVNIVKMYCAVIPITHATVEVGSFDTMLVKAIQEGKAVPEGANYQKGPRYNLATLREAVFYRDNYACKVCGRKATEGAILHMHHMFYWKGRHGNSLGELLTVCEKCHTPANHQKSGKLYGFGEKIKFADLSGAAFMNAVRWQIVNELYTAFGKPFVTITYGAMTKEKRIALQLEKSHNNDAYAMGEFHPNLRCSFEHYEKARRNNRILEKFYDSRYIDIRTGETATGKELFNGRINRNHKKDSENLHKYRGKKTYAGHRALLRKKVSLNPGDLVSLNGENLIVHGTHTKKNGAVYVEFETPAKSGQKSASLKKLKIVKAADSIHPAWKKVS

SEQ ID NO: 9933 - protein, 436 aa, unidentified
  REGION 1..436: note = Human metagenome
MTKTLTKQTTQACVLDQHGKPLMPTKRLGKVYRLLKTKKAHIVSYEPFTIQLDYEPDTHIIQPMTLGVDSGAIHSGYSVANEQREYYSSEVIARDNISKNISDRSMYRRNRRSRKTRYRKPRFNNRKNKKKGWLPPSLEQKVAVQLNEIDHLHRHFPIETIIVEVAEFDIQKIKNPNISGKEYQQGTLQGYNIRNYLLEKHGRKCFYCNKEVSTFEVEHMIPKAKGGSNRIDNLTLSCHSCNQKKGTLTAEEFIKQTLPVEKAAKKLKQLPKEKRLFKYMAHMNATRWTLYNAINDKYSNVKMTYGYITKYNRIRAGLPKAHHIDAKCITGFAQVPSFDITVVKTKMRRHNRQLHRATFSKGHVRKAASLPTVMFGFRLYDIVMYNNHCYYIKGRRSSGAFTLVSVEGLKDENRTYKKLTLLAHTSAYLTNHYIDM

SEQ ID NO: 9934 - protein, 413 aa, unidentified
  REGION 1..413: note = Human gut metagenome
MRGQPLMPCSPAKARHLLKANKATVRRRTPFTIQLSIATGETKQDVTLGVDAGSKHIGLSATTEKAEVFASEVELRQDISGLLADRLALRRGRRHRKTRYRAPRFNNRVHSKHKGWLAPSIENRIQAHMSRIDAVCKLLPVNKIVIETASFDIQKIKNPGVEGKGYQQGDQLGFWNVREYVLWRDGHVCQHCRGRSKDKILNVHHLESRKTGGDAPNNLITLCETCHKALHSGKIKLKVKRGKSFKAETFMGIMRWTLLERVRLTHPHLPVENTFGYLTKHKRIVLGLPKTHCADAFCIAGNLKAQRTGVYLYQKQTRKHNRQIHKCSILKGGVRKLNQSPYLVKGFRLFDKVKCLGQVGFIFGKRSSGYFDVRTLGGKKLSPAIHAKKLTLLEKRKTFLTELRKENSASSPV

SEQ ID NO: 9935 - protein, 430 aa, Moorena sp.; identical to SEQ ID NO: 4002

SEQ ID NO: 9936 - protein, 420 aa, Petrotoga sp.; identical to SEQ ID NO: 5114

SEQ ID NO: 9937 - protein, 425 aa, Moorena sp.
MFVFVLSKDKRPLSPCHQARARKLLKEGKAAVYRKYPFTIILKEEVNPSKPQPCRIKLDPGAKVTGIALIQGDRMIFGAELEHRGFRIKDSLESRRQLRRGRRGRKTRYRKPRFLNRTRPKGWLPPSLQSRVENINTWVNRLRKLCPVDSISVELVRFDTQQLENPEISGVEYQQGTLCGYEVREYLLEKYHRTCQYCGAKEVPFEIEHIVPKSKGGSDRVSNLTLSCHKCNQKKGNRSVEEFLKGKPEVLKRVKANAKKPLRDAAAVNAARWAVFNRLKASGLEVEAGSGGLTKFNRTKHELPKTHWLDAACVGKSTPSKLRMLVQKPLKIKATGHGTRQMCRTNKYGFPTRYVPHKKDVKGFQTGDIVKAVVTKGKKTGIYVGRVAVRSTGSFNISTAKGVIQGINHKYCRQIHKKDGYSYAT

SEQ ID NO: 9938 - protein, 447 aa, unidentified; identical to SEQ ID NO: 3915
  REGION 1..447: note = Human gut metagenome

SEQ ID NO: 9939 - protein, 490 aa, unidentified
  REGION 1..490: note = Human metagenome
MYVVYVLDRQGKPLMPTKRFGHVRRMLKTGKAKAISTKPFVIQLQYESTDFVQPLYGGTDPGRTNIGEAVLNNKGEVVYAAHLVTRNKEIPKLMADRAAHRRASRRGERLRRKRRAKANGTMTCFPEGRKLPGYKDGVLKLKGIINTESRFNNRKRPAGWLTPTARQCIQTHLNMVRNICKILPVTDWTLEYNRFAFMQLEDGSVRGWDFQNGRLKGYASKEDYIYALQGGVCACCGTPIEHYHHIKPRHKGGSNTPENLVGLCSVCHAEIHTGKRSLDRIGKYKEYAGAFIVNIAIPFIWDGIARMFGDKAHICEGQETAELRRANNIPKEHFADAVCIASIGSGITPQYDNNQPFELRQFRCHDRSRINAQVERTYMDGKTIVAKNRKPRFEQKWDALFDLQSKMTKEHGELAARRAVSKLVAKKSYRRYNASERIKPSAVFIFNNKKYLLRGQLTNGMYYRAFGEGTKNFPSRNCEVVSSGCSLTYM

SEQ ID NO: 9940 - protein, 266 aa, unidentified
  REGION 1..266: note = Human gut metagenome
VCSILPISSIVIEVAQFDTQKIKNPEILGKEYQEGDQLGFWNTREYVLARDGHKCQYCKGKSKDKILNVHHLESRKTGGDSPSNLITLCETCHKEYHKGNIDLKIKRGSSLRDAAVMGIMKWKLYEELRSRYDRVSMTFGYITKHNRIKYGIEKSHTSDAFVISMNINAKRIERQYLKRLIRRHNRQIHKMKILKGGKKKNNQAPFEVFGFRLFDKVLYNNKILFVYGRRKSGSFNIRDFNGENSKDVSRKKFKLIRGKRHPIILK

SEQ ID NO: 9941 - protein, 413 aa, unidentified; identical to SEQ ID NO: 2636
  REGION 1..413: note = Human gut metagenome

SEQ ID NO: 9942 - protein, 415 aa, Bacillus sp.; identical to SEQ ID NO: 2431

SEQ ID NO: 9943 - protein, 427 aa, Moorena sp.
MHVFVLDKDKKPLAPCHPAKARRLLKSGRASVFRRYPFTLILHEIEAKDCVVPETQLKIDPGSQTTGLAILSENRIIWASELSYRGQQIKNDLEKRRALRRSRRHRKTRYRKPRFLNRTRPKDWLPPSLNHRVETTMTWVNRLRKLCPIVSIAQELVRFDTQKLQNPEVSGIEYQQGELLGYEIREFLLEKWGRKCIYCGAENLPLEVEHIHPKSKGGSDRVSNLTLACHTCNQAKGNRDIREFLSGKPTVLNRILKQAKAPLKDAAAVNATRWKLYQQLKETELPVEVGTGGQTKFNRTRLGLPKTHWLDAACVGKSTPDRLDVAVEKPLLVAAKGHGVRQRCRPDKYGFPRTHAPKAKSFQGFQTGDIVKATIPQGKFAGNYTGRIAIRFRPSFRLNAGVKPFDVHPKYLTTVHQSDGYEYRFSK

SEQ ID NO: 9944 - protein, 428 aa, unidentified
  REGION 1..428: note = Human gut metagenome
LKVFVLNMRGQPLMPCSPAKARHLLKAGKAVVKRRTPFTIQLRIATGETKQNVTLGVDAGAKHVGLSATTEKEEVFASEVELRQDITGLLAARLSLRRDRRHRKTRYRAPRFLNRVRSKHKGWLAPSVENRIQAHMSRIDAVCRLLPVTKIVIETASFDIQKIKDPSVEGTDYQQGDQLGFWNVREYVLFRDGHVCQHCHGRSKDKILNVHHLESRQTGGDAPNNLITLCETCHKAYHAGKIKLKVKRGQSFRAEAFMGIMRWTLLDRVRKAHPGLPVENTYGYLTKHTRITHGLPKTHCVDAYCIAGNLKAVRRGVYLHQRQMRKHNRQIHKFTVLSKRLEDGTKIGYRKLNQSPYLVHGFRLFDKVRCLVQIGFIFGRRSSGYFDVRRLDGVKLSPSISWRKLTLLEKRSTYLTELRKEDGASSPV

SEQ ID NO: 9945 - protein, 520 aa, unidentified
  REGION 1..520: note = Human gut metagenome
MNYLDFVLMVDKNKVPCIPIKESTAAYLLRHNKAKIINHDPTVIQRFDEYSADYEIRNIFELKIDSGYLNIGFSVSDSEHEYLAGQVNLLQGMSERLTVRASNRKFKRARLRYRKNKNVDYKTVHNSTYKNGNQDGWIAPSIQHKIDSHIRLIKKIAQWVPIDRIIIEVAKFDIQKMIADLDGRIISGKDYQNGEMKGYENVTAYVRDRDKHTCQMCLSSGKVKNKNNDTIEVHHIIPRAAGGTNRPSNLICLCHHHHRLVHSNNNNNKYFKELQNKKMPDTYKDSTFMNIVRYKIYNALCADFKDVELAYGYETKINRRLIGLPKFHYTDAVCLKEWKNISLTKFIYIVDQKRCNDRKMESFFDAKYIDIRDGKTKSGTELCYTRLDNASSWRTTCKNEVDNLRQYREKKITKGRKQRECHFYCLKPGDLIFINLGNHKGNLAEVKTMQIHKGKYKIFFTYKNQKVDNPTISLSPEEYGQLKKNECSKVKIVRTRRGMIWRKYNRLEYENTYKDQYDKN

SEQ ID NO: 9946 - protein, 413 aa, unidentified; identical to SEQ ID NO: 2636
  REGION 1..413: note = Human gut metagenome

SEQ ID NO: 9947 - protein, 416 aa, unidentified
  REGION 1..416: note = Freshwater metagenome
MVYVLTQNNLPLMPCTEVIARLLLTQGKAKCVSRTPFCIKLNYQTTNYLQEITLGVDTGSSKLGTAAVTKSGIVLYTAQVEIRNDITGKMTQRSKYRRNRRNRKTRYRAPRFLNRSNSTKTNRFSPTVISKINSHLKEIAFVQSILSITKVILETASFDLHALKDPKVLKNKWLYQKGINYGFANTKAFVLFRDDYTCQNCKGKTKNIKLETHHIIFRSNGGSDEQENLIALCKSCHDKVHTGELNLKRTGKIKSKLKYATQMNSIRIQLLKLLPNAEETFGFITKENRQALNLSKKHHFDAVSIATQSSNLKFKTNLLLKKCVPDGDYQQFKGIRSEQKIPTNKILGFRKFDKVLYLKNLYFIKGRMSSGYAILMDIEGTKIEFTNPKTVKLVKCKRISDRKSWLIQERGLRPLP

SEQ ID NO: 9948 - protein, 420 aa, unidentified
  REGION 1..420: note = Human gut metagenome
MQYVYVLNKHGEPLMPCSPRKARLLLKQKKACVVKRTPFTIKLLYGSTGYKQPITLGVDAGSKHIGISATTEKCELYREEAIPRNDVVDLLSARRAFRRSRRNRKTRYRAPRFNNRVHSKHKGWLAPSVEVKIQEHITLIKRVCRILPVTLVRVETAEFDTQRLKAMLEGKPLPVGTDYQLGETYDEYNVRQYVLKRDNYTCQCCGAHPAKTKAVKLHVHHIETRRTGGNAPNNLITLCTACHKALHSGKVTLNGKKRGKPLKDAAFMGIMRKTLMERLLKELKIPVQETYGYITKYLREKHSIPKSHTNDARCISKNPLAIPCDTCYYTKAIRHQNRQLHKATILKGGIRKANQAPYTVKGYRLWDKVFYHGSECFITGRRTSGYFALKKLDGTVVSNSASYKKLRLLEVATNYITERR

SEQ ID NO: 9949 - protein, 430 aa, unidentified; identical to SEQ ID NO: 4504
  REGION 1..430: note = Human gut metagenome

SEQ ID NO: 9950 - protein, 413 aa, unidentified
  REGION 1..413: note = Human gut metagenome
MTSYSFVLDVNGKPLAPTKEQKAWFLIRKKRAALVSKYPMVIQLKKKIQENEICKDEIRCGIDDGGLHVGIALVQKCKSKNKVVFKGTIEQRNDVKHLMEVRRNYRRYHRYHKRYRQARFDNRKSSKREGRIAPSILQKRQATIRVIHWLNKWINITNYWLEDVSVDIRALTDGYQSYRWQYQRSNRLDENIRKAAILRDGGKCMECGKSNCRLEVHHIKPRRRNGSNTLDNLITLCESCHQKTEGQEELYMDRYFSLLKSSDHKNLNYAQHVMIGKMWLRKQLSGLGVLYLTSGGDTANKRIDWNIEKSHANDAVCITDLQPDTCDMKEWTMKPMRRQSKAKTDHVLGIHHRDLVEYTFKNGETHRGYVTALYPDQKAINFQSQTKHCKKVNARKCKLLWNYSKIYWFENAS

SEQ ID NO: 9951 - protein, 396 aa, unidentified; identical to SEQ ID NO: 4508
  REGION 1..396: note = Human gut metagenome

SEQ ID NO: 9952 - protein, 431 aa, unidentified
  REGION 1..431: note = Human gut metagenome
MPDKVYVISRLGHPLMPCSPAKARHLLDDGKAKVVKRTPFTIKLLYGSTEYTQPVILGVDAGSKTIGLSASTTKEELFAAEVMPRNDVVENLSTRREFRRARRNRTTRYRKPRFNNRVHSKNNGWLAPSVEVKIQEHITSIKRVCAILPISKIVVETAEFDLQLLKAVQDGKPVPEGEDYQKGEMYGSYDVRQYVLWRDNYTCTCCGVKGTDKKPVKLHVHHFESRKHGGNAPDNYGTLCEDCHKKLHLGIITGISLKTRKRPSTRDAAFMGIMRKTLMQRLITGLSIPVAETKGYITKAAREEILKLPKTHTNDALAIAQGRHGFGIREQAYVKPTNRIYTVRPVRHHNRQLHKATMLKGGIRKLNQASKYIFGFRLYDKVLYQGGECFVWGRRRSGSFLLRTIDGTKVKDGVGYRNLTLLERSTNYLIA

SEQ ID NO: 9953 - protein, 423 aa, Arthrospira sp.
MSNHIFVLDTNRKPLTPCKPGMARSLLKAGKASVFRRYPFTIILNKEVDANPEPLELKLDPGSKVTGIALKQGNHIIFAAELQHRGQQIKEALLSRRQLRRSRRNRKTRYRPARFLNRTRPEGWLAPSLQHRVDTLMTWVHRFRRLAPVGRIAQELVRFDLQLMENPEISGVEYQQGELQGYEIREYLLEKWGRTCAYCGAQNVPLEVEHIQPRSKGGSDRVSNLTMACHSCNQAKGNGDIRDFLSGQPDVLSRLLRQAKSPLKDAAAVNSTRWALFKALKATGLPVTTGTGGQTKFNRLRLNLPKAHWLDAACVGPVESLEVLTSKPLLILAKGHGTRQMCGTNKYGFPNRHRSRRQIHKGFQTGDMVTATVTAGKKIGSYLGRVLCRASGSFDITTASVRVAGISHKYCQPIHRKDGYAYA

SEQ ID NO: 9954 - protein, 424 aa, Enterococcus sp.; identical to SEQ ID NO: 5552

SEQ ID NO: 9955 - protein, 420 aa, unidentified
  REGION 1..420: note = Human gut metagenome
MQYVYVLNKHGEPLMPCSPRKARLLLKQKKACVIKRTPFTIKLLYGSTGYKQPVTLGVDAGSKHIGISATTEKHELYREEATPRNDVVDLLSARRAFRRSRRNRKTRYRAPRFDNRVHSKHKGWLAPSVEVKIQEHITLIEHVCRILPVTLVRVETAEFDTQRLKAMLEGKPLPVGTDYQLGEMYDEYNVRQYVLKRDNYTCQCCGAHSTKTKGVKLHVHHIETRRTGGNAPNNLITLCKACHKALHAKKVTLDGKKRGKPLKDAAFMGIMRKTLMERLRKELKIPVQGTYGYITKYLREKNGIPKSHTNDARCISKNPLAIPCDTCYYTKAVRHHNRQLHKATILKGGIRKANQAPYIVKGYRLWDKVAYNGTECFITGRRTSGYFALKELDGTVVSNSISYKKLRLLEAATNYIIERK

SEQ ID NO: 9956 - protein, 414 aa, unidentified
  REGION 1..414: note = Human gut metagenome
MPTFKKYAFVLDAEGKRLDPTIEQNAWRLVRQHKARLVSKFPMVIQLNKVVDNPNNDEIRCGIDDGANHVGLALAQKCQTRNKVLFKGTIEQRKDVKHLLTVRRGYRRYHRYHKQYRPARFLNRASSRRSGRLMPSIIQRKQAILRVIDRLCQWINIDGYWLEDVKIDIRALTDGYKPYRWQYQKPNRLDNNLRLAAIHRDGCKCVECGKTKTRFEVHHITPREVGGADTISNLITLCPKCHAKTFGRESQFADRYYVFIGSTGHVEGLADAQRVMQGKHWFREQLQQRGSLVLTTGGNTANKREDWDIAKTHSNDAVCITDLQPENIAIEEWTIKPMRRKNKAGVDEVCGFHHRDYVTYTYRNGETHTGYVTAMYPELHALNFQSPTKHCKKANALKCKLVWRYSKIYWFKYA

SEQ ID NO: 9957 - protein, 431 aa, unidentified
  REGION 1..431: note = metagenome
MPNKVYVINKHGRPLMPCSPAKARHLLDAGKAKIKKRTPFTIQLVYGSSGYTQEVILGVDAGSKTIGVSASTKKEELFAANVIPRNDVVDLLSTRRESRRARRNRKTRYRKPRFDNRVRSKHKGWLAPSVEVKIQEHITSIKRVCRILPVSKVVVETAEFDLQLLKAIADGKPVPQGEDYQKGEMYGHYNVRQYVLWRDNYTCQCCGAHATKKKEVRLHVHHLESRKTGGDAPGNLVTLCDSCHEKLHKGLIAEKDFKKRKRRSTRDATFMGIMRKTLMQRLCSELPIPVVETRGYITKTTREKLLVLPKSHTNDALAIAQGKQGFNVGYLPGILQIDKIYTIRPVRHHNRQLHKAAILKGGIRKSNQAGKYVFGYRLFDKVQFNEQDCFIWGRRTTGIFTIKTINGKMIKDGISFKKLKLAEKSTSYLIA

SEQ ID NO: 9958 - protein, 442 aa, Anaerostipes sp.; identical to SEQ ID NO: 2903

SEQ ID NO: 9959 - protein, 431 aa, unidentified; identical to SEQ ID NO: 9952
  REGION 1..431: note = Human gut metagenome

SEQ ID NO: 9960 - protein, 418 aa, unidentified
  REGION 1..418: note = Human oral metagenome
MLNNQKEYAFVLDTKGKKLDPTIVQNAWRLVRQKKATLIAKRPMTIQLKKVIDNPNDDEIRIGIDDGAKHVGLALVQKCKTKNKVIFIATMEQRNDVHKLMEQRKNYRRYRRYWKRYRKARFSNRVSVRRKGRIAPSILQKRQAVVRIFDRLNKYIRINSIYLEDVAIDVRVLTDEKRLYSWQYQQSNRLDENLRKATILRDRCQCQMCGKRNCRLEVHHITPRRMNGANTIGNLITLCADCHSKVTGCEMEFAEQLYSKIGKKKNNAGLQYSSHVMVGKTWLREELSKRVPVLLTTGGDTANKRIDWNLEKSHEIDAICITNLEPESVGVKSWNIKPLRHQRKTMKVKEILGFRHRDIVCYTFKNGEYHEGYVTALYPSEGKQKEGLNFLSPTKHCKRVNPKKCQRLDRPDKFLWLV

SEQ ID NO: 9961 - protein, 431 aa, unidentified
  REGION 1..431: note = Human gut metagenome
MPNKVYVINKHGRPLMPCSPAKARHLLDDGKAKVKKRTPFTIQLLFGSTGYTQEVILGVDAGSKTIGLSASAETKELFSAEVKPRNDVVDLLSTRRESRRARRNRKTRYRKPRFDNRVRSKHKGWLAPSEEVKIQEHITAIKMVCRILPVSKVVIETAEFDLQLLKAIADGKPVPQGEDYQQGEMYGHYNVRQYVLWRDDYTCQCCGAHATKKKEVRLHVHHLESRKVGGDAPDNQVTLCESCHEKLHKGLITEGDFKKRKRRSTRDATFMGIMRKTLMQRLCSELPIPVVETRGYITKTTREKLLVLPKSHTNDALAIAQRKHGFNVGYLPGIAQIDKIYTIRPVRHHNRQLHKAAILKGGIRKSNQAGKYVFGYRLFDKVQFNEQDCFIWGRRTTGIFTIKTINGKMIKDGISFKKLKLLEKSTSYLIA

SEQ ID NO: 9962 - protein, 404 aa, unidentified
  REGION 1..404: note = Human gut metagenome
LRVFVLNKRGKPLMPCSPAKARLLLKEKKAIVVRRTPFTIQLTIATGETKQPVSLGVDAGYKHVGLSASTEKAELYASEIELRQDITDLLSARRELRRARRNRKTRYRAPRFDNRIRTKRKGWLAPSVENRINAHLSRIEAVLRLLPITKITVETASFDTQLPKNPDIAGKEYQEGEQLAFWNVREYVLFRDGHVCQHCHGRSKDPVLNVHHLESRRTGGDSPGNLITLCETCHKALHRGEIKLSAKRGQSLRAEAFMGIMRWEVLNRLKLSHPELEVNNTYGYRTKHARIANGIAKSHCADAFCIAGNLGAKRLGEFFFQKQTRRNNRQIHKFSILKDGIRKRNQAPFEVNGFRLFDKVACKGEEGFIFGRRSSGYFDVRKLDGTRISAGISYKKLHLLEKRQ

SEQ ID NO: 9963 - protein, 450 aa, Moorena sp.; identical to SEQ ID NO: 2935

SEQ ID NO: 9964 - protein, 493 aa, unidentified
  REGION 1..493: note = Human gut metagenome
MAAVYVISASGKPLMPTTRCGHIRGLLNAGKARVVEREPFTIQLKYETPDVTQPLYLGIDPGRTNVGSAVVREDGECVFTAQLTTRNKDVPKLMKARKQFRMAHRRLKRRCKRQGRAKAAETLSQKGEFQRLLPGYEEPILCKGIRNKEARFNNRQRPAGWLTPTANHLLLTHLNMVKKLQKLLPITDVVLEVNRFAFMAMENPSIRRWQYQQGPLYGKGSVEDAVYAQQDGHCLFCGKPIAHYHHVVPQHKNGSETLENRVGLCNEHHDLVHKDRAWDAKMKETKAGLNKKYHALSVLNQIIPALTEQLTAMFPQHAFVTTGKDTADFREDYGIAKEHHLDAYCIACSVLAEPTKVAAPTGKPHRLMQFRRHDRQVCHKENIKRVYLSEGKAVATNRHKAIEQKDDSLEEFRKTHTQQEVSALTVKDHQPVYKDMRRFMPGGVFLFNGKVHTLQRSHGRYKGMPFYYIDTDGSKNHAKGCIFLQQNCGLRWV

SEQ ID NO: 9965 - protein, 470 aa, unidentified; identical to SEQ ID NO: 2825
  REGION 1..470: note = Human gut metagenome

SEQ ID NO: 9966 - protein, 344 aa, Streptomyces sp.; identical to SEQ ID NO: 7891

SEQ ID NO: 9967 - protein, 518 aa, unidentified
  REGION 1..518: note = Human gut metagenome
MTPKKRKEASRMSEYIYVLGMDGDPQMPTKRKRHVEKLLQAGRARVFRQIPFTIQLTYENKPVLQPVTIAEDPGRSNIGMAVVSLSGELLSAAVVQTRNKEIVKLMEKRKQHRRASRNGERKARQRLAKKCHTMIKTGFLMRKLPMYGKDKRVRCNVIKNTEAKFCNRKREDGWLTPSAEHLVRTHINLIHKMQKFLPITDVAIEINRFAFLSLEDPSISGVDFQNGPLKGYDDLNAAVEDLQDGHCLMCNSPIGHRHHIVPRSMQGSNTIGNIAGLCCKCHERVHKDARFEDRLKKKKAGLNKRYAAVSVLNQAIPFICKRLEQEFGKEHVHYCSGRDTSMVRRSLGYHKTKEEQLHEVDAWCIAVLSLQHVPEKAPEFDHVHEILQFRRQDRSRIKAQTSRAYYHEGKKIAKNRKKAEGQKDDSLQGWRKRQVERYGEEQTRKMISQLKVKKSIRRYNRLDRLMPGAVFYYQGVRYVMRGQHSNGQYLQAVGMRDKDFPAKKCKIVVHNQGLVFVS

SEQ ID NO: 9968 - protein, 408 aa, Bacillus sp.
MFVYVLNHHGEPLMPCSPRKARKLLQQQRAKVVQRTPFTIQLLYGSSGYKQPISLGVDAGTKQMGVSATTETNVLLEGEVQLRTDIQELLATRLQFRRARRNRTTRYRKSRFLNRKRNVGWLAPSVQNKVDAHIKLVKMIHKILPLTSITVEVAQFDTQLLKNPSIEGEAYQQGDQMGFWNAREYVFYRDRHTCQWCKGKKKDLILNAHHIESRKTGGDSPDNLMTLCETCHDELHAKGLEHLFKKKSQSFRDASQMTVMRWFIYNGLKNIYPHIQLTYGYLTKHTRISNRLVKEHAVDARCISGNPLAKPTASTYLWKFVRKNNRQLHKATIAKFGKRKSNKAVRFVKGFQLFDKVTYEGKECFVFGRRSSGYFDLRSLNGTKIHASASYKKLRLTECATTLLCERR

SEQ ID NO: 9969 - protein, 413 aa, unidentified; identical to SEQ ID NO: 2636
  REGION 1..413: note = Human gut metagenome

SEQ ID NO: 9970 - protein, 245 aa, unidentified
  REGION 1..245: note = Human gut metagenome
GSYNAFQYVLWRDNYTCICCGVRGTPKNPVRLHVHHFESRKYGGNAPDNHGTLCDDCHKKFHLGIIADVKLKTRRRQSTRDAAFMGIMRKTLMWKLRTELFIPVAETKGYITKATREKLPVLLNSHTRDALAIAQGRHGFSIKEYAYVEPANHIYTVRPVRHHNRQLHKASILKGGIRKRNQASKYVFGFRLYDKVLYQGKACFVWGRRTSGTFLLRTIDGIKVKDGVSYRNLTLLERSSNYLIA

SEQ ID NO: 9971 - protein, 459 aa, unidentified
  REGION 1..459: note = uncultured beta proteobacterium
VVFVLDKRGKPLMPCTERRARILLERRRARIHRLYPMVIRLVDRFAEDSEFQKLNLKLDPGSKTTGMALNCVDDSTEAVLSLFELMHRGALISKKLEQRRALRRTRRNRHTRYRQARFLNRGNKQKGWLAPSLMHRVNTTMAWIDRIMRWSPVSLLTQELVRFDTQKLENPEISGVEYQQGTLLGYEVREYLLNKWNRACAYCDAQNVPFEVEHIHPKSKGGSNRVSNLALACRSCNNKKDNLPIDVFLAKDQSRLKRILVQAKAPLKDPAAVNSSRWRLFNELKATGIVVKTGTGGQTKFNRVQNKIPKTHALDAACAGHVEFVSDWQKPTLSIKCSGRGTYARTKLDSYGFPRGYCLRQKQVHGFATGDIVRAKVTKGKKSGTYFGKVAIRESGSFNISTNAGVIQGVSHQYCKVVQRADGYGYLFNQDSKQSRVQGIALQSALSLPALKDGVSRAN

SEQ ID NO: 9972 - protein, 406 aa, unidentified; identical to SEQ ID NO: 7246
  REGION 1..406: note = Human gut metagenome

SEQ ID NO: 9973 - protein, 420 aa, unidentified
  REGION 1..420: note = Human gut metagenome
MVYVIGKDGKPLMPIRRHGKVRRLLNSGRVKVVSRDPFIIQLLFETKKELSDLVLGVDTGSSKIGCAVVTPKNEVLYISEVKIRNDITTKMERRKVYRRERRSRKLRYRKQRFLNRGNSNKKDRFSPTMVSKINSHIKEIEFIKNILPISTIVLETSTFDPHLLKMQEGGNPFNRHWGYQRGPNYGFANAKAACLNRDNYTCRCCKTKKGTLHAHHIVYRSNGGSDTLDNLITLCENCHKKLHDGKLESFESKLKGKKKGQLKYATQMNSIRLQLLKYYPEAIETFGFITKENRQLAGLEKTHYNDAVVIAMGSSDKPKFRIDILYKKQHIAKGQYKLYQGQRSHQKLPRGKVKGFLNKDIVEYRGGFYLIKGLMSSGYCKLSDIDDIEQKFENPKTVKLSSIKRISARRTTRCISQKII

SEQ ID NO: 9974 - protein, 273 aa, unidentified
  REGION 1..273: note = Human gut metagenome
VLTRKGSSAVKAAKACVVKRTPFTIKLLYGSAGYKQPITLGVDAGSKHVGLSASTEKRELYREEFTPRNDVVDLLSTRRQNRRSRRNRKTRYRAPRFDNRVHSKHKRWLAPSVEVKIQEHITVIKRICRILPITLVRVETAEFDTQRLKAMLKGKPLPVGTDYQLGEMYDEYNVRQYVLKRDNYTCQCCGAHPTEKKPVRLHVHHLESRHVGGNAPNNLITLCVACHKALHEGKITLDKGKKRGKPLRDAAFMGIMRNTLLARLKDELNIPVK

SEQ ID NO: 9975 - protein, 408 aa, unidentified
  REGION 1..408: note = Human gut metagenome
MVYVQDINGKPMMPTTRHGKVRRLLKDKKAIVVNLCPFTIKLMYVTSDYKQEIVLGVDAGTKHVGLSATTKSKELYSSEVILRNDIVDLLSTRRELRRSRRNRLRYRKPRFDNRIKSKRPGWVAPSVKYKVDAHIRVIDNVCSILPISRIVIEVAQFDTQKINNPNISGKEYQEGDQLGFWNVREYVLARDGHKCQHCKGKSKDPVLNVHHIESRKTGGDSPSNLITLCETCHKEYHKGNIDLKIKRGSSLRDAAVMGIMKWRLYEELRSRYDRVSMTFGYITKHNRIKYGIEKSHVFDAFVISKNFDAIRLGYYYKVRLVRRHNRQIHKQKIPKGGIKRPNQSPFEVFGFRLFDRVMFENSYYFIFARRKTGSFNIRDIDGKNQRDITYKKLKLSRCKRFMVQKEMD

SEQ ID NO: 9976 - protein, 419 aa, unidentified
  REGION 1..419: note = Human gut metagenome
MKKRKDSRRARRTNGRRCRRQRRAKANDTLSTKRVKQTTAQNGSASKRAKEIGVIRRRLPGCEKDVLCIGIKNKEAKFNNRTRPEGWLTPTANQLLQTHINLVKKIQKFLPISDVVLETNKFAFMQLDNPNIQKWQYQQGPLYKKESLESAVSEMQEHHCLFCKKQIDHFHHVVPQHKNGSNTIGNIVGLCARHHDLVHKETAWQEKLAKKKTGLNKKYGALGVLNQIIPALTKELGVLFPKHFFVTTGKSTYDYRAAHGVCKDHWLDACCIACSVLPNDVCDSSINNRVPYELKQFRRHDRRVLHKENMNRVYTLNSKKAATNRHKATEQESASLEEFRKEHPDDVCKLKVKEHHPTYRNMNRNYPGSVFFVDKQVHVMQGIARSKDGKATTYKDTNANLITAEGCKFVAKNSGILFV

SEQ ID NO: 9977 - protein, 413 aa, unidentified; identical to SEQ ID NO: 7541
  REGION 1..413: note = Human gut metagenome

SEQ ID NO: 9978 - protein, 376 aa, unidentified
  REGION 1..376: note = Human gut metagenome
MEKRELIEARAAFRRSRRYRNTRYRRPKWKHHTKRVYNEVPDSKGRHWRKVKISTQSPRPEGWLPPSLQSKCDHHMGIIDRYLAFLPDCISKNLVIEAGRFDMARMQDPSIHGEMYQRGPMYDAENLKAYVFARDGYRCTCCGQKAGSIRKDGTAVKLLVHHVLFRSRGATDNPKYLASVCNACHTAAAHRPGGKLHQWMLEAKEFTRGLRDATFMNILRRRLFTKYPEAAFTYGNITAADRKRLLLDKSHANDAVAISLFGKDVSSVKVACQTLHYRQVRRYKRSLHEANPRKGCKAPNTKAVRNAKNTSEVKGFHLWDTVKAGGQKLYITGFTGTSAYLTDQYKNYVSPPGKNYRQWTLSKITRLHPNGGWIMF

SEQ ID NO: 9979 - protein, 443 aa, unidentified
  REGION 1..443: note = Human metagenome
MRDYNLKGKLLMVFVLNRSKKPLNMITNAEARILLRKKLAVIHKIYPFTIRLRDNSCVSQDRAYTVKLDPGSRTTGVAIIDDTNQVVMLAEIEHRGSVVKKKLDSRRVVRHHRRQRKTRYREARFDNRVKPKGWLAPSVKSRADNVINFIKKYKKFLNITKVEIERVSFNVSQMSSETKLYGADYQQGPLYQKKLRDFIFSRSNGKCSYCGAKAEEIDHIIPRSNGGTNSTYNLVAACKSCNQMKSNLSLKEFGKLVGKDFSKIKAKALPKDAAIVQSARNYMAREISKFVADTTTHDAWLTKYNRNELGLSKEHYYDALSVGNLQDYKFLTDKVLQISAKGRGSRQMCRVDRYGFPRTSAKASKSVRGFQTGDIVKAIVPSGFKKRGEYLGRVIVRSNGGFNIETNEETTQGIGYKYCRLIQRGDGYSYKYKERNRVSVAKI

SEQ ID NO: 9980 - protein, 414 aa, unidentified
  REGION 1..414: note = metagenome
MPCSPAKARLLLKEKKAIVKRRTPFTIQLTIATGETKQPVGLGVDAGYKHVGLSASTDKAELYASQVELRQDITDLLSARRALRRARRKRKTRYRAPRFNNRIRTKRKGWLAPSVENRINAHLSRIEAVLRLLPVTKITVETASFDMLLLKNPDIAGKEYQEGEQLGFWNVREYVLFRDGHVCQHCYGRSKDPVLNVHHLESRRTGGDSPGNLITLCETCHEALHRGEIALKTKRGHSFRAEAFMGMMRWEVLNRLKASHSELEVNNTYGYRTKHARIVNGIDKSHCADAFCIAGNLGAERLCEFFFQKQTRRNNRQIHKLSILKGGIRKRNQAPFEIKGFRLFDKVACKGEESFIFGRRSSGYFDVRKLDGTRISAGISYKKLRLLEKRRTYLTEIRKEEALPPLPEGRGLRA

SEQ ID NO: 9981 - protein, 434 aa, unidentified; identical to SEQ ID NO: 5659
  REGION 1..434: note = Fermentation metagenome

SEQ ID NO: 9982 - protein, 411 aa, unidentified; identical to SEQ ID NO: 6901
  REGION 1..411: note = Human gut metagenome

SEQ ID NO: 9983 - protein, 415 aa, unidentified; identical to SEQ ID NO: 6534
  REGION 1..415: note = Human gut metagenome

SEQ ID NO: 9984 - protein, 469 aa, unidentified
  REGION 1..469: note = Human gut metagenome
MVITLDKRKRPLGVCTERRARILLEKKRACVYKTFPFVIILKDKDTREIKPEGTYRVKIDPGAKYTGIAVVRNEDNAVVFFQQIEHRGDQVKKNLQTRSQCRRNRRNRETRYRRPKWGNKQLPEGKKPQYDSSRPDGWLPPSQRSIGDNVISWVIRLKQLFNITDCSFEAVRFDSQLMDNPDIEGVQYQQGTLAGTEIREYLLEKYAHTCQYCGGESNDSIMEWEHVIPRSRGGSDSVKNATLSCHTCNQEKGSMKLEEWLESINVKPKKTKLDKARLKGIKAVMNGKVQKNSNRYSAWAGILRRYEENGLFAIFDDVECSTGGKTKYNRTKLNLPKDHHYDALCVGTVPKKGFKDLTNGYFLYAEAMGRGTHFRGKINKCGIIIQKLGKTPKRIFGFQNGDIVTADVPKGKYKGKHTGRVSTRASGYFDIKTTEGERITVNYKNCKLKQYGDGYRYSYKRTPLGDSSR

SEQ ID NO: 9985 - protein, 425 aa, unidentified; identical to SEQ ID NO: 3151
  REGION 1..425: note = Human gut metagenome

SEQ ID NO: 9986 - protein, 423 aa, Moorena sp.
LSNYVLVIDTNKQPCNPIHPGTARKLLNDGKAAVFRRYPFTIILKTISTKPIKPIQIKLDPGSKTSGIALIQSNKVIFGAELTHRGATIKASLESRKSLRRARRSRHTRYRQARFLNRTRCQQWLAPSLQHRVETTITWVNRLIKFVPVTCISQELVRFDLQQLENPEISGIEYQQGELLGYEVREYLLNKWDRRCSYCDVENVALQVEHIHALSRGGTNRISNLCLACDRCNKKKGTQDIEKFLAKKPDVLKRILSQTKRPLKDASAVNSTRWALFNRLKETGLPISTGSGGLTKFNRTRLGLPKTHWLDAACVGKVETLEILTNKPLLIKATGHGTRKMCGTNKFGFPIRHRERKKFHFGLQTGDIVKALVITGKYIGNYVGRIAVRAKGSFSVTHKLGKFDTSHKFCKTIHKNDGYEYSI

SEQ ID NO: 9987 - protein, 419 aa, Geobacillus sp.
LFVYIINKHGKPLMPCSPRKARLLLKQKKAKVVRRTPFTIQLLYGSSGYKQPVSLGVDMGTRHVGISATTKKDVLFEAEAQLRTDIVELLAIRRQFRRSRRNRKTRYREARFLNRRKPEGWLPPSIQHKINSHIKLIDLVHNILPATSVTIEVAAFDTQKLKNLNIRGVEYQQGEQMGFWNVREYVLYRDNHTCQYCKGKKKDPVLQVHHIESRKTGGDSPDNLITLCKTCHHEIHEKGLEHIFQRKRPPMRDASQMTAMRWAMFSRIREKYSHANITYGYITKCIRIANGLSKSHMVDARCISGNPLAKPSGTVYLLKFVRKNNRQLHKATILKGGKRKSNKAPRFVKGFQLFDKVVYERKECFIFGRRSSGYFDLRLLDGTKVHASASWKKLKRVEHASTLLIERRKGDSSPTFALA

SEQ ID NO: 9988 - protein, 442 aa, Anaerostipes sp.; identical to SEQ ID NO: 2903

SEQ ID NO: 9989 - protein, 441 aa, Moorena sp.; identical to SEQ ID NO: 6268

SEQ ID NO: 9990 - protein, 442 aa, unidentified; identical to SEQ ID NO: 2637
  REGION 1..442: note = Human gut metagenome

SEQ ID NO: 9991 - protein, 414 aa, unidentified
  REGION 1..414: note = Human gut metagenome
MPCSPAKARLLLKEKKAIVVRRTPFTIQLTIATGEAKQPVSLGVDAGYKHVGLSASTEKAELYASEVELRQDVSDLLSARRALRQSRRSRNTRYRAPRFDNRIRTKRKGWLAPTVENRINVHLSRIETVLRLLPVTKITVETASFDTQLLKNPDIAGKEYQEGEQLGFWNVREYVLCRDGHVCQHCYGRSKDPVLNVHHLESRRTGGDSPGNLITLCETCHKALHRGEITLKAKRGQSFRAETFMGIMRWGVLNRLKASHPKLEVHNTYGYRTKHARIANGIAKSHCADAFCIAGNFGAKRLGEFFFQKQTRRNNRQIHKLSILKGGIRKRNQAPFEVKGFRLFDKVACQGEEGFIFGRRSSGFFDVRKLDGTRISAGISCKKLHLLEKRRTYLTEIRKEEALPPLPEGRGLRA

SEQ ID NO: 9992 - protein, 524 aa, unidentified
  REGION 1..524: note = Human gut metagenome
MEILRIDWKDICPTGRSGLPQKELFMRPVYVLDMNGKPLMPTCRFGKVRRMLKSGEAKVVDTLPFTIQLDRPTKTHVVQSVTLGCDPGRTNIGLAAVRSDGTDLYRSHCETRNKEIVDLMDARRAARRASRRGERLARKRLAAKHETATTFPDGRKLPGCEKPIMLKDIINTEARFNNRVRPAGWLTPTATQLLWTHLNLIKRISRILPVSDIALEINKFAFMQLDEPDKNKWNIDFQHGPLYGTGGLKAAVRQLQNNTCLLCQENVIEHFHHLIPRSKRGDNTINNIAGLCQKCHEAVHKSADTAEKLSTLKKGQTKRYGGTSVLNQIIPKLVEELGKTYHEHLHLTYGWQTKEFRTKHKLEKTHDTDAYCIAAGTMQTVKPNIRTDVYEIKQFRRHNRANIHHQTERTYKLNGQTVARNRRKRTDQKTDSLAEWFENTVKQYGQQKAEHLRAGLKVRKSTRYYNFKDRVMPGAVFQYEGNRYVVTGQLSGGQYYRAYGKGNQNFPAKKIRIISLNRGLVYVA

SEQ ID NO: 9993 - protein, 490 aa, unidentified
  REGION 1..490: note = Human oral metagenome
MYVVYVLNHQGKPLMPTKRFGHVRRMLKTGKAKAISTKPFVIQLQYKSTDFVQPLYGGTDPGRTNIGEAVLNNKGEVVYAAHLVTRNKEIPKLMADRATYRRASRRGERLRRKRRAKANGTMTCFPEGRKLPGYKDGVLKLKGIINTESRFNNRKRPAGWLTPTARQCIQTHLNMVRNICKILPVTNWTLEYNRFAFMQLEDGSVRGWDFQNGRLKGYASKEDYVYALQGGVCVCCGASIEHYHHIKPRHKGGSNTHENLVGLCSVCHAEIHTGKRSLDRIGKYKEYAGASIVNIAIPFIWDGIARMFGDKAHICEGQETAELRRANNIPKEHFADAVCIASIGSGITPQYDNNQPFELRQFRCHDRSRINAQVERTYMDGKTIVAKNRKPRFEQKGDALSDLQSKIAKEHGELAARRAVSKLVAKKSYRRYNASERIKPSAVFIFNNKKYLLRGQLTNGMYYRAFGEGTKNFPSRNCEVVSSGCSLTYM

SEQ ID NO: 9994 - protein, 501 aa, Nocardiopsis sp.; identical to SEQ ID NO: 8413

SEQ ID NO: 9995 - protein, 467 aa, unidentified
  REGION 1..467: note = Human gut metagenome
MSTCVCVLSNNGERLMPTFRLGKVRRLLKDGKAKIVKHHPFTIQLLYDSKTNTQPIEICEDVGYNYIGISVKSESHEYVSAQYDTLQDEKACHDSCRKLRRTRRNRLRYRQKRFDNRKRKRSEGWLAPSLRHKKELNVNVVKMYCAVMPITHATIEVGSFDTMLVKAIQEGKAIPEGADYQKGPRYNLATLREAVFYRDNYVCKVCGRKATEGAILHMHHMFYWKGRHGDSLDELLTVCEKCHTPANHQKGGKLYGFGENVKFADLSGAAFMNTVRWQIVNELYAAFGKDFVTVTYGAMTKEKRIALRLEKSHNNDAYAMGEFHPNCRCTFEHYEKVRRNNRILEKFYDSRYIDIRTGEIATGKKLFNGRINRNHKKDSENLHKYRGKRLYKGHRALVRKKVNFNPGDLVSLNGEVLVVHGTHTNKKGAVNVEFKTPAKNGRKSASLKKLKIVKATSSIHPAWEKVS

SEQ ID NO: 9996 - protein, 628 aa, Streptomyces sp.
MRHVRSLNSNVTHTTPHSGKSMRRCIRGNPTGTTTRSSYPARSACTPRPAAHSVGTPREGRSLAPSYRVTSPGHHDLRIGGGASMTTFFTGEQTHQAVLPQQPALESAGADTPGSRDETARGLPATEPDTGVGHGRGETDAVRTGTRRRHARGAASAAPTAETRSGDAPHPAASRVFVLAKGGEPLMPCHPARARELLGSGRAVVVRRAPFTIRLKHRGCADSAVPGVQLRLDPGSKATGIAVTDERARSTSTGQAAVERRGLIAIELRHRGRQIHSAMTRRAAYRRRRRSANLRYRAPRRDNRSRPDGWLPPSLRHRIDSTMSLVARLCRYAPVREIHVEQVAFDTAAIAASPSADARDIREPAPAGSEIREFLLATWKRSCAYCGAAGVPLNIEHVRPRSRGGSDRVTNLVLACIPCNQAKGTATVDEFLADRPDRLKNVTAQLRKPLHDVAAMNTTRLVLVKALATRGVPVHAWSGGRTAGNRLAMGLPKSHTLDALANGLMDRERGDRIVRVPAQILVVRSTGRGSYARTTPDRYGFPRLQRPRRKVQHGYATGDLVVAVVPRGKWAGKWVGRVAVRTSGQHRITTLTSRFDVSYRNLRLLQRADGHAYGFTEEIRWSEETGPA

SEQ ID NO: 9997 - protein, 406 aa, unidentified
  REGION 1..406: note = Human gut metagenome
MVYVQDINGKSLMPTTRHGKVRRLLKDKKAVVVNLCPFTIKLMYITPDYKQEIVLGVDAGTKHVGLSATTKSKELYASEVILRNDIVDLLSTRRELRRTRRSRLRYRKPRFNNRIKSKRQEWIAHSVKYKIDAHIRVVEKVYSILPVSHIIIEVAQFDTQKIKNPDISGKEYQEGDQLGFWNVREYVLTRDEHKCQHCKGKSKDKILNVHHIESRKTGGNSPSNLITLCKTCHKEYHKGNIKLKVKRGTSLRDAAAMGIMKWKLLDKLKSLFPNVSMTFGYITKYNRIHNNIEKSHISDAFVISKNFKAKRLGYYFKEKLVRRHNRQIHKTKILKGGKKKMNQAPFKVFGFRLFDKVEFQGNEYFIYARRLSGYFNIRDINSENKKDVTYKKLTYIGHGLVSVETE

SEQ ID NO: 9998 - protein, 512 aa, unidentified; identical to SEQ ID NO: 4350
  REGION 1..512: note = Human gut metagenome

SEQ ID NO: 9999 - protein, 442 aa, unidentified
  REGION 1..442: note = Human gut metagenome
MSTSVFVLDKKHRPLMPCRPARARRLLRAGRARVVKRFPFVIRLVDRTVEQSEVQPVLIKLDPGSRETGAAVVRDDGKKRHHALAFFVIEHRGGAIRDALKARSAFRRRRRSQNFRCRSPRFLNRVKPKGWLPPSLRHRVETTLSFVRRMCRYLPVSGIATELVKFDSQKLQNPEVSGVKYQQGTLFEYEVREYLLEKFGRKCVYCGAEGVPLNIDHVVPRAKGGSNRVSNLVLACVSCNQKKGARSLEDFLKGKPEVLARVRRELKTPLRDAAAVNATRWVLFNELKATGLPVETGSGALTKFNRHAFGVEKEHWLDALCVGRLNGAVTRKGLNVLEIRCMGRGSRQRTRLTKYGFPRGYLMRQKCVHGFATGDMVEANVPKGKKAGLWRGRVAVRVSGSFNIQTPKGVIQGVGWKHCRLISHNDGYGYAWLGHAPHSSPA

SEQ ID NO: 10000 - protein, 425 aa, unidentified
  REGION 1..425: note = Human gut metagenome
MVYTLNKDGQPLMPTDRHGKVKHLLKDGKAKVVKRCPFTIKLLYESTTHTQNLTLGVDTGSGTVGAAVSKDNGDIVYMSEVVVRNDITDKMTQRSKYRRNRRNRKTRYRKARWLNRKNSIKPDRFSPTMISKFHSHIKEIEYIRSILPITTMVFETGQFDTHLMKNPSLAGPDIRHWGYQKGSNYGFENTKAMVLNRDGYTCQYCKDRHKDRKLEVHHIMFRSKGGSDEESNLITLCRTCHKDLHSGKIRPDFKGKTKGTLKYATQMNSIRKQLFRSYPEAAETFGYITKANRLAIGVAKGHYYDACTIATQGKPFIVKTSLYKKKCVSDGDFQKTKGTRSEQPIVTDKICGFRKFDKVQYFGKEYFIKGRMSTGYAILMNIDGKKADFSTMPKGCKIPKMTKLKRVEARTTWMVTAVEVTPNIA

SEQ ID NO: 10001 - protein, 493 aa, unidentified; identical to SEQ ID NO: 5942
  REGION 1..493: note = Human gut metagenome

SEQ ID NO: 10002 - protein, 512 aa, unidentified; identical to SEQ ID NO: 5811
  REGION 1..512: note = Human gut metagenome

SEQ ID NO: 10003 - protein, 424 aa, Moorena sp.
MRVFVLDKNKKPLDPCQPARARILLKQGKARVLKRYPFTIIMPELEVKNCVTHEHQLKIDPGAKTTGLAIVQDNKVVWGAELTHRGFQIRDALISRRRLRRSRRNRKTRYRQPRFLNRKRSVGWLAPSLMSRVHNILTWTKKLSRLCPIVGISQELVRFDTQKMENPEISGVEYQQGTLYGYELREYLLEKWHRQCAYCGAANTPLEIEHIKPLARGGSNRVCNLAIACHKCNQTKGVQEIEQFLSGKPSVLKRVLAQAKKPLANAAAVNSTRWKLYNHLKSTGLPIETGSGGLTKYNRCRQNLPKTHWLDAANVGKVDNLYIESYQPLLITAKGHGTRQMCRTNKFGFPTRYVPRYKEVKGFQTGDIVKAIVTKGKKIGTYTGRVATRQTGSFNISTKPGLVQGISHKYCSVIHRKDGYYYSL

SEQ ID NO: 10004 - protein, 422 aa, Petrotoga sp.; identical to SEQ ID NO: 5403

SEQ ID NO: 10005 - protein, 465 aa, unidentified; identical to SEQ ID NO: 3603
  REGION 1..465: note = Human gut metagenome

SEQ ID NO: 10006 - protein, 496 aa, unidentified
  REGION 1..496: note = Mouse gut metagenome
REREREHCSPSFPPFFPVPLLQTPPPLPFSLLLREGKAKVVKTKPFTIQLLYESTEYTQPLYGGTDPGRTNIGEAVLDQCGTVQYAAHVESRNKDIPKLMENRAAHRSASRRGERKRRQRRAVANGTITFPLQKQWILPGCQKPITNKFIINSEAKFLNRKRPANWLTPTTNQLVQTHLNMVKKICSILPVTDWTLEINKFAFMLMEDGTIRGVDFQNGRMKGYPDVEAYIYAIQDGKCPFCGKTIEHYHHIKPRSEGGSNRPENLVGLCSDCHARIHKGDTEMAGLIDKLGEQKKYAALSVLNQAIPYIYQGLVEIFGEEHTHICYGWQTKEMYTKLKIPKTHSNDAICIAALGSGVVPPIQMTNPYEVKQCRRHNRAIVKAQRERTYKLFGETVAKNRHPRFKQEGPSLEDFVESIPAAYRQQVISVLKVTPSKRYYNTMDRDLPGTVFYYQGHRYVKSGQSSGGKDLRAYGMGSKNFPSAKVSIVPSGGLVYL

SEQ ID NO: 10007 - protein, 442 aa, unidentified
  REGION 1..442: note = Human gut metagenome
MVTVQQSTHHLPFGRVFIRRNLFMVYVISQDSKPLMPCSNPIARLLLKQGKAKVKRREPFTIKLIYETTDYTQDLTLGVDTGSGTIGAAVSKDNGDIVYMSEVVVRNDITDKMTQRAKYRRNRRNRKTRYRKARWLNRSNSIKKDRFSPTMQSKFHSHVKEIEYIQSILPITEMVFETGQFDMHLMKNPSLANPKVRPWGYQKGTNYGFENTKAMVLNRDNYTCQCCKGKHKDSKLEVHHIVFRSQGGSDEESNLITLCHTCHKDLHSGKINLKLSGKVKGNLKYATQMNSIRKQLFRLYPNAIETFGYVTKANRLHLGVDKEHYYDACTIATQGNAFNVKSDLYKKKCVSDGDFQKTKGIRSEQPIVTDKICGFRKFDKVRYFGKDYFIKGRMSTGYAILMDIDGNKIDFSTMPRGYKTPKLSNCKRITARSTVMTQVKVV

SEQ ID NO: 10008 - protein, 414 aa, unidentified
  REGION 1..414: note = Human gut metagenome
MPCSPAKARLLLKEKKAVVVRRTPFTIQLTIATGETKQPVSLGVDAGYEHVGLSASTEKAELYASEVELRQDVSDLLSARRALRQSRRNRKTRYRAPRFDNRIRTKRKGWLAPSVENRINAHLSRIEAVLRLLPVTKITVETASFDMQLLKNPDIAEKEYQEGEQLGFWNVREYVLFRDGHVCQYCHGRSKDPVLNVHHLESRRTGGDSPGNLITLCETCHKALHRGEIKLRAKRGQSFRAETFMGIMRWEVLNRLKASHSKLEVNNTYGYLTKHARIKSGITKSHCSDAFCIAGNLGAKRLGEFLFQKQTRRNNRQIHKLSILKGGIRKRNQAPFEIKGFRLFDKVACKGEEGFIFGRRSSGSFDVRRLDGTRISAGISYKKLRLLQKRQTYLTEIRKEEALPPLPEGRDLRA

SEQ ID NO: 10009 - protein, 483 aa, Moorena sp.
MLNKNSVFVLNNNKVPCDPIHPAKARKLLSEGKAAVFRNYPFTIILKSESKPTKNYRIKVDPGAKFTGLALLSNSNIIWCAELEHRGFQISESLIKRRQVRRFRRNRKTRYRQPRFLNRTRPNGWLPPSLISRVQNIKSWVDKLIKLVPVSAISMELVKFNTQKIVNPEIQGTEYQKGELFSYEVREYLLEKFNRTCVYCGTKEAVFNLDHFHPKSRGGSDKVSNLVLSCVQCNQNKRARLPTEFLSDRPKLLALINKQRKLPLADAAAVNATRWKLKLVLESTGLEIETGSGGLTKYNRKRNGISKSHWTDAACVGTSTPDSLNISNYQPLIIKAMGRGNRQMVKPDKYGFPKTKPKLRQKLFYGFQTGDIVKAVVTKGKKIGTYVGRVAVRKTGNFNIKTQTETVQGISYKYCKIIHKSDGYIYSFGELVKQESTNFVKKVVKVLNTPIQLNLFDTSELTTVGVSVAKESTSKSQKEKEKV

SEQ ID NO: 10010 - protein, 507 aa, unidentified; identical to SEQ ID NO: 2446
  REGION 1..507: note = Human gut metagenome

SEQ ID NO: 10011 - protein, 430 aa, unidentified; identical to SEQ ID NO: 5985
  REGION 1..430: note = Human gut metagenome

SEQ ID NO: 10012 - protein, 420 aa, unidentified
  REGION 1..420: note = Human gut metagenome
MQYAYVLNKRGEPLMPCSPGKARLLLKQQKAHVVKRTPFTIKLLYGSTGYKQPITLGVDAGNKHVGLSASTEKRELYCEEFTPRNDVVDLLSTRKQNRRSRRNRKTRYRAPRFDNRVHCKHKGWLAPSVEVKIQEHITVIKRICRILPVALVRVETAEFDTQRLKAMLERKPLPVGTDYQLGEMYDEYNVRQYVLKRDHYTCQCCEAHTTTKKTVKLHVHHLESRKVGGNAPSNLITLCTTCHDALYKGKVSLDGKERGKPLRDAAFMGIMRKALIARLREELPIPVQGTYGYITKMRREQNDIKKSHVNDARCISKHPLAEPCSVCYRTKAIRHHNRQTHKANFSKGGIRKRSQMPYVVEGYRLWDKVLYKGQECFVSGRRASGSFTLKKLDGTRISKGVTFKKLRLLEPATNYLIERM

SEQ ID NO: 10013 - protein, 413 aa, unidentified; identical to SEQ ID NO: 4790
  REGION 1..413: note = Human gut metagenome

SEQ ID NO: 10014 - protein, 424 aa, Anaerostipes sp.; identical to SEQ ID NO: 3434

SEQ ID NO: 10015 - protein, 414 aa, unidentified
  REGION 1..414: note = Human gut metagenome
EMTSYSFVLDANGKQLAPTKEPKAWFLIRKKRAALVSKYPMVIQLKKKIQENEICKDEIRCGIDDGGLHVGIALVQKCKSKNKVVFKGTIEQRNDVKHLMEVRRNYRRYHRYHKRYRQARFDNRKSSKRKGRIAPSILQKRQATIRVINRLNKWINITNYWLEDVSIDIRVLTDGYKSYSWQYQKSNRLDENIRKATILRDGGKCMECGKSNCRLEVHHIKPRRRNGSNTLDNLITLCESCHQKTEGQEELYMDRYFSLLKSSDNKNLNYAQHVMIGKMWLRKQLSGLGVLYLTSGGDTANKRIDWNIEKSHTNDAVCITDLQPDTCDIKEWAIKPMRRQSKAKTDHVLGIHHRDLVEYTFKNGETHRGYVTALYPDQKAINFQSQTKHCKKVNARKCKLLWNYSKIYWFENAS

SEQ ID NO: 10016 - protein, 501 aa, unidentified
  REGION 1..501: note = Human gut metagenome
MPANIYVLNHDGTPLMPSHSYGRVKRMLHTGKARIAGTKPFTIRLTYQIDTPVIQPVILGMDPGRTNIGNCAVETSGKVLYASLVETRNKEIPKLMKERKGHRQMSRRGERKRLQRRAIRADKTGMARATEYWRMLAGQKKPIRCKVIRNQEVKFQNRKRPIGWLTPTAEQLAQTHLNVVRKIQKILPVSAVVIEINRFDFARIENPDIENWEYQRGRLAGYADVREAVSGQQKGKCLLCGRKQIEHYHHIVPKSQGGSESIDNYAGLCMACHEKVHQDEIARGKLQSKKKGIQKKYHALSVLNQIMPALLRELPKLAPAFITTGYETHRIRESVGLQEKQKGDDTHYMDAWCIAMSIVGTYETEPDFSGLYHMKQFRRHDRARVKAQKERTYYHNGKAVAKNRHKRTGQADVKVPFPSLAEYLQEHPEHKGRLTVRKSTRSYNNTKRDLPGTVYTECGNPFVLRATQSNGTRLYGMGEGMDYHKTVRCKLSQHNAGLVYI

SEQ ID NO: 10017 - protein, 424 aa, Moorena sp.; identical to SEQ ID NO: 6716

SEQ ID NO: 10018 - protein, 402 aa, unidentified
  REGION 1..402: note = Human gut metagenome
MPKVYVLNRHGRPLMPCTPAKARHLLDAGKAKVRHRTPFTIQLLYGSTGYTQEVILGVDAGSKTIGLSAATETEELFSAEVKPRNDVVELMSARRQFRRARRNRTTRYRKPRFDNRVRSKHKGWLAPSVEVKIQEHMTAIRRACAILPVSKVVVETAEFDLQLLKAVAEGKPVPQGEDYQKGEMYGHYNVRQYVLWRDSYTCCICGVHGSVRKGVPLHVHHLESRRVGGDAPDNLVTLCTACHDKLHKGIIMAADIKKLKRRSTRDATFMGIMRMTLLRRLREQLPVPVVETRGYITKATRENLLVLPKSHANDALAIAHGPQGFRAEHLPNIRQADRLYTIRPVRHHNRQLHKATILKGGVRKTNQAEKYICGFRLYDKVLYNGIAVSYTHLTLPTNSRVI

SEQ ID NO: 10019 - protein, 371 aa, Moorena sp.; identical to SEQ ID NO: 2871

SEQ ID NO: 10020 - protein, 392 aa, unidentified
  REGION 1..392: note = Human gut metagenome
FTIQLVYGSSGYTQEVILGVDAGSKTIGMSASTTKEELLSAEVKPRNDVVDLLSTRREFRRARRNRKTRYRKPRFDNRVRSKHKGWLAPSVEVKIQEHITAIRRVCGILPVSKVVVETAEFDLQLLKAIADGKPVPQGEDYQQGEMYGHYNVRQYVLWRDGYTCQCCGAHATKKKEVRLHVHHLESRKVGGDAPDNQVTLCESCHEKLHKGLIAEKDFKKRKRKSTRDATFMGIMRKTLMQRLCSELPIPVIETRGYITKATREKLLVLPKSHTNDALAIAQGKQGFNVGYLPGIVQINKIYTIRPVRHHNRQLHKATILKGGIRKSNQTEKYVFGYRLFDKVQFNGQDCFIWGRRTTGIFTIKTINGKMIKDGISFKKLKLVEKSTSYLIA

SEQ ID NO: 10021 - protein, 396 aa, unidentified
  REGION 1..396: note = Human gut metagenome
VLKQQKAHVVKRTPFTIKLLYGSAGYKQHITLGVDAGSKHVGLSASTEKLELYCEEFTPRNDVVDLLSTRRAFRRSRRNRKTRYREPRFDNRVHSKHKGWLAPSVEVKIQEHITVIKHICKILPITLVRVETAEFDTQRLKTMLEGKPLPVGKDYQLGEMYDEYNVRQYVLKRDNYTCQCCGVHTTAEKMVKLHVHHLESRKTGGNAPSNLITLCTTCHDALHKGKVSLDGKERGKPLRDAAFMGIMRKTLMGRLREELPISVQGTYGYITKMRREQNDIKKSHMNDALCIAKHPKAQHCENSYRSKAVRHHNRQIHKAKMLKGGIRKLNQAPYIVKGFRLWDKVLYNGQECFISGRRSSGYFALRKLDGTTITNSASFKKLQLLEATSSYLIERM

SEQ ID NO: 10022 - protein, 373 aa, Moorena sp.; identical to SEQ ID NO: 3006

SEQ ID NO: 10023 - protein, 431 aa, unidentified; identical to SEQ ID NO: 7729
  REGION 1..431: note = metagenome

SEQ ID NO: 10024 - protein, 418 aa, unidentified
  REGION 1..418: note = Human gut metagenome
MVYVLSKTGQPLMPTENHAKVRVLLKQQKAKIVHGCPFTIQLLYDSTDYTQPVSLGIDAGSRHIGVSATTETKVLYEADVTLRNDIVDLLSTRREARRTRRSRKTRYRKPRFNNRTRKDGWLAPSIQQKVDTHLTTVRKVTEILPVNSITVETASFDIQKIKNPDIAGTGYQQGEQLDFWNVREYVLFRDGHKCQCCKGKSKDPVLNVHHIESRKTGGNAPNNLITLCETCHKGYHNGTVSLPKNIRRGMKFNDAAFMGIMRWAFFNRVKETYEPLGIMVKMTYGYITKNTRIEHDLPKDHFIDARCISGHPDATSDGTVFYQKKVRCHNRQIHKQKILKGGIRKRNQAPYLVKGFRLFEKVKYHGKQYFIFGRRSSGFFDIRTLDGTKVNKGSVSCKKIRSLDMPRSYLTEERKAIV

SEQ ID NO: 10025 - protein, 420 aa, unidentified; identical to SEQ ID NO: 3617
  REGION 1..420: note = Human gut metagenome

SEQ ID NO: 10026 - protein, 426 aa, unidentified; identical to SEQ ID NO: 3614
  REGION 1..426: note = Human gut metagenome

SEQ ID NO: 10027 - protein, 420 aa, Moorena sp.; identical to SEQ ID NO: 3094

SEQ ID NO: 10028 - protein, 423 aa, unidentified; identical to SEQ ID NO: 3951
  REGION 1..423: note = Human gut metagenome

SEQ ID NO: 10029 - protein, 420 aa, unidentified; identical to SEQ ID NO: 6017
  REGION 1..420: note = Human gut metagenome

SEQ ID NO: 10030 - protein, 411 aa, unidentified; identical to SEQ ID NO: 9653
  REGION 1..411: note = metagenome

SEQ ID NO: 10031 - protein, 438 aa, Petrotoga sp.
MEKRSVQRVFVLDKNKQPLMPCHSARARELLKKGKAAVFRYHPFTIILKEREGGDTQPIQVKIDPGSKITGVTLVGDFKNGKKVIWGAEIHHRGQSIKKALDTRRGVRRSRRNRKIRYRIARFDNRKRSKGWLPPSLISRVENILTWIKRIRRFSPITGISLELVRFDTQKLQDPEINGIEYQRGTLYGYEIKEYLLEKWGRKCVYCGKENVPLEIEHIVPKSKGGSDRISNLTLACHECNQKKGNQSIEEFLTNNPERLKQIKSESKRPLKDTAALNATRWYIFNQLRGNSLTAGKEELPIEVGTGGRTKYNRETQNYPKKHWIDAACVGESGQNVQIEPDMQVLEIKAMGHGMRRMCFVDKYGFPKSYRPKERTYMGYKTGDIVLAVIPKGKNMGIHIGRIAIRHRPSFLLNGVGDVHPKYLTLLQKNDGYGYQIS

SEQ ID NO: 10032 - protein, 512 aa, unidentified
  REGION 1..512: note = Human gut metagenome
MSTVYVLNKDGKPLMPTTRCGHVRYLLKEKKARVVASKPFTIQLLYETDDVVQPLYLGIDPGRSNIGVAVVKTDGMAVFTAHLETRNKEIPKLMKKRKDSRRTRRTNGRRCRRQRRAKANGTISKKCVKQTTAQNGSVSKRAKEIGVIKRHLPGCEKDVLCIGIKNKEAKFNNRTRPTGWLTPTANQLLQTHINLVKKIQKFLPISDVVLEVNKFAFMQLDNPNIQKWQYQKGPLYQKESLKSAVSEMQEHHCLFCKKKIDHYHHVVPQHKNGSNTIDNIVGLCTQHHDLVHKDATWQKRLAKKKTGLNKKYGALSVLNQIIPALTKELSSLFPKHFFVTNGKSTFDYRAAHGVSKDHWLDAYCITCSVLPNDTCDKTINSRVPYELKQFRRHDRRALNNENMSRVYTFNGKMVATNRHKATEQTTDSLEEFRQRQPNDVCNLKIKEHHPTYRNMSRNYPGSIFLVEKQVHIMQGIAGSKDGKATTYKDTNANSIAAGKCKFVAKNSGILFV

SEQ ID NO: 10033 - protein, 480 aa, unidentified
  REGION 1..480: note = Human gut metagenome
LYTKPLDNIGEGSLPSSGEINLKGMTFMVYVKSIDGKALMPTSNAKARKLLKQKKAKVVSLRPFVVKLTYKTKTEYTQKLNLGVDSGYSNIGFSVIDAKQEYIAGEVKLLEGMKKRLLKKASYRRIRRSRLRYRKARWNNRVKSKKKGWLAPSLKHKLDTHIKFIDYLKNILPIGKITIEVANFDIQKMKDDLISGVDYQNGDMFGFWNVREFVLHRDGHKCQNPNCKHKDKKEQILKVHHIRYRSEGGSDRPENLITLCSKCHTPANHKKGKFLYDWCVNGKKVRGFKDATFMSMIRWYLVNDLKSKHNNVSITYGYITKNHRIQNGIEKSHLNDAFAIAKGTNQARTKDRFLVIQDRLKNRSLEKFYDSKIIDIRTGKKVSGGDLSCGRSTRNKNLNTENLRKYRGAKISKGQRRIRKQKYFYQPNDLVKYDGKVYTVKGTQNEGKYIALKEIKKVPKVELLIPYVFKKGLNWSYGLC

SEQ ID NO: 10034 - protein, 427 aa, Enterococcus sp.; identical to SEQ ID NO: 5630

SEQ ID NO: 10035 - protein, 453 aa, Moorena sp.; identical to SEQ ID NO: 4156

SEQ ID NO: 10036 - protein, 470 aa, unidentified
  REGION 1..470: note = Human gut metagenome
MSVFVVGLNGCRLMPTSERKARLLLKQGKAFVEQKVPFTIRLNYKTGSTTQLGYLGIDTGSQHIGVSVVREDGTVLHKEEIGLRDSMSKRKLLEAKASLRRGRRYRKTRYRHPKWRPKTKRVYCEVPDRKGRHWQKKKITFTSKRPKGWLPPSLQSKTDHHIRWIKKLQDLLPEGYRLSIELGRFDPARMKNPEIHGDLYQKGPQYDYENVRAYVLDRDRYTCQICKKKGGKLHVHHILYRSHGATDDPQYMVTVCSDCHSAQNHLPGGILYQWMQEQKRFSRGLRDATFMNILRKRLIRAFPEAVFTYGNVTKVNREKLKLPKSHGNDATAIALVKTGITAVKDKESVICIQQVRRKKRSLHEETPRKGRKEPNRTAARNNKNTKAVTVTKRQNKKKVSMTGCLFDRVELNGKKGWISGFTGKSCYVKDADDQYLSTSPKYKQVSLSKLRILHHCGNWIIGAKKTLGKG

SEQ ID NO: 10037 - protein, 414 aa, unidentified; identical to SEQ ID NO: 2588
  REGION 1..414: note = Human gut metagenome

SEQ ID NO: 10038 - protein, 512 aa, unidentified; identical to SEQ ID NO: 4572
  REGION 1..512: note = Human gut metagenome

SEQ ID NO: 10039 - protein, 433 aa, unidentified
  REGION 1..433: note = Human gut metagenome
VGAVLQAPNPVQHWRRMSTGLRAVQAEPAGIRKGDALKVFVLNMRGRPLMPCSPARARHLLKAGKAVVRRRTPFTIQLRIATGETKQSVTLGVDAGAKHVGLSAATEKEEVFASEVELRQDITGLLAARLSLRRDRRHRKTRYRAPRFLNRVRSKHKGWLAPSVENRIQAHMSRIDAVCRLLPVTKIVIEAASFDVQKIKNPTIEGTDYQQGDQLGFWNVREYVLFRDGHICQHCRGRSKDPILNVHHLESRKTGGDAPNNLITLCETCHKAYHAGKIKLKVKRGQSFRAEAFMGIMRWTLLDRVRKTHPKLPVENTYGYLTKHKRIALGLPKTHCADAFCIAGNLKALRRGDFLFQQQTRKHNRQIHRCSILKGGVRKLNQAPFLVKGFRLFDKVRIGGQIGFVFGRRVRGIFNIRRLDKTVIGKDINCKKN

SEQ ID NO: 10040 - protein, 466 aa, unidentified
  REGION 1..466: note = Human gut metagenome
HYYFTKGVSCMSTCVCVLTNNGERLMPTFRLGKVRHLLKDGKAKIVKHHPFTIQLLYDSKTNTQPIETCEDVGYNYIGISVKSESHEYVSAQYDTLQDEKEHHDDCRKYRRTRRNRLRYRKSRFDNRKRDKGWLAPSLEHKKHLNISLIERYVSVIPITHVTVEVGSFDTMLLQSIQKGEAKPEGADYQKGPRYNLATLREAVFYRDNYTCQVCKRKIADGAILHMHHMFYWKGRHGYQLDELVTVCEKCHTPANHQKDGKLYGFGKDKKFANLSGAAFMNAVRWQIVNALYATYGKEFVTITYGAMTKEKRIALQLEKTHNNDAYAMGDYHPARRCKFRHYQKRRRNNRVLEKFYDANYVDTRTGNKAKGKELFNGRISRNHKKDCKNLHKYRSKKVSKGRRSIRRQHYAIQPYDTVRLEGKTYITSGCHNKGTRLLIPVNGKSKSVAISKVQVVCHAGAWIQII

SEQ ID NO: 10041 - protein, 415 aa, unidentified
  REGION 1..415: note = Human gut metagenome
MENRIEYCFVVDKNNRPLTPTKVNKGWYLVRKSRAKLKSKYPMVIQLEKEVKSDEDDESHIVCGIDDGSAHVGLAIVQKCPTKNKVVFKGTIEQRQDVKHLMDVRRGHRRYHRYHKRYRQARFNNRSSSKRTCRLAPSIKQKKDAILRVLYQLNKWVNIQEYHLEDVCIDIRALTDDYKPYRWQYQKSNRLDENLRKATILRDECRCQECGKSNCVLEVHHIRARKYGGADTIGNLITLCSGCHQKTEGRERDFEDRYFNMIKSKPKRFDYAMYVMQGKTYLREKISGLGSLYLTNGGETANKRIEWNMEKSHGNDAICVTDCIPDNCDVKEWIIKPMRRKSKAKTNNLLGIRHRDLVSYTYKNGETHTGYVTALYPEQLVLNFQSKTKHCKKVNARKCRLLWKFNKIYWLEQCV

SEQ ID NO: 10042 - protein, 509 aa, unidentified; identical to SEQ ID NO: 5057
  REGION 1..509: note = Human gut metagenome

SEQ ID NO: 10043 - protein, 414 aa, unidentified; identical to SEQ ID NO: 2588
  REGION 1..414: note = Human gut metagenome

SEQ ID NO: 10044 - protein, 406 aa, Geobacillus sp.; identical to SEQ ID NO: 3747

SEQ ID NO: 10045 - protein, 314 aa, unidentified
  REGION 1..314: note = Marine metagenome
VNRLSRLAPVTAISQELVRFDTQKLDNPEISGVEYQQGTLLGYEVREYLLEKWGRECAYCGTADTPLEIEHVVPRSRGGSNRVSNLTLSCHPCNQSKDALSLVDFFATDKGLKKRLKANGHTANARLERVQRQLKQPMRDASAVNATRWALFSALKTTDLPVAVSSGGRTKYNRQRLNIPKTHALDAACVGAFGKLYDWTVPTLTIKAMGRGSYQRTRLTKHGFPRGFLMRQKQVHGFQTGDMVRAIVPTGKKAGTHTGRVAIRKTGSFNIQAEYGAVQGISHKYCTLIQRSDGYGYYVTLFSNLTGEAGRAVA

SEQ ID NO: 10046 - protein, 423 aa, Moorena sp.; identical to SEQ ID NO: 2845

SEQ ID NO: 10047 - protein, 451 aa, unidentified; identical to SEQ ID NO: 3061
  REGION 1..451: note = Human gut metagenome

SEQ ID NO: 10048 - protein, 427 aa, Nostoc sp.; identical to SEQ ID NO: 2670

SEQ ID NO: 10049 - protein, 373 aa, Moorena sp.; identical to SEQ ID NO: 6300

SEQ ID NO: 10050 - protein, 413 aa, unidentified; identical to SEQ ID NO: 2636
  REGION 1..413: note = Human gut metagenome

SEQ ID NO: 10051 - protein, 442 aa, unidentified; identical to SEQ ID NO: 9771
  REGION 1..442: note = Human gut metagenome

SEQ ID NO: 10052 - protein, 541 aa, unidentified
  REGION 1..541: note = Wastewater metagenome
LKQGKRYLTRYVSNRSFRRTRECFLSSLLCKARIMQTKGKGSKVLVATRKSRSRLLTFPRGDWSQGQRNKSRKGERFEMAVFVLDRSGRPLMPCTEKRARLLLERGRACVHLVMPFTIRIVDLKAENCAFQALRVKLDPGSKATGIALVRETEGKGVAVVNLFELVHRGRQISEALTARRGHRRLRRSKLRYRPPRFDNRGNKQRGWLAPSLQHRVDTSMAWVSRIQRLAPVSAISTELVRFDMQAMENPEIEGAQYQQGTLAGYEVREYLLEKWDRTCAYCGAKDVPLQVEHIQPKAKGGSNRISNLALACQCCNQKKAALPVEMFLAKKPELLKRILAQAKRPLKDAAAVNSTRWALVNALKATGLPVETASGGQTKFNRSQLGIPKTHALDAACVGEVGSITDWQKPTLSIKAMGRGSYQRTRLDKFGCVRGYLTRSKSIKGFQTGDMVKAEVTTGKKIGSYTGRVAVRATGSFNIQTSAGLVQGVSHRYCTVVQRGNGYGYSLVAKTDVRGTPPQHRDASHPALYLPGLKAEVSRAN

SEQ ID NO: 10053 - protein, 418 aa, unidentified; identical to SEQ ID NO: 4424
  REGION 1..418: note = Human gut metagenome

SEQ ID NO: 10054 - protein, 442 aa, Lactobacillus sp.; identical to SEQ ID NO: 9469

SEQ ID NO: 10055 - protein, 417 aa, unidentified
  REGION 1..417: note = Human gut metagenome
MPCSPAKARLLLKERKAIVKRRTPFTIQLTIATGEAKQPVALGVDSGYKHIGLSATTEKAELYASEVELRQDITDLLSARLALRRSRRSRKTRYRAPRFDNRVASKREGWLAPSVENRIVAHMSRVEAVMRVLPVTAITVETAAFDTQLLKNPDITGAAYQQGEQLGFWNVREYVLFRDGHVCQHCRGKSKDPILNVHHIESRRTGGDAPNNLITLCETCHKAFHRGEIKLKVKRGKSFKAETFMGIMRWTLFERLKKAHPELSVRHTHGYLTKHKRISHGIAKSHCADAYCIADNLSAKRLKGFFFQKQTRKHNRQIHKLSILKGGLRKKNQAPYEVKGFRLFDKVICKDEEAFIFGRRSSGSFDVRRLDGTRISAGISYKKLRLLEPRTTYLTEFRKEAALPSLHKCRGFRAEFL

SEQ ID NO: 10056 - protein, 421 aa, unidentified; identical to SEQ ID NO: 4757
  REGION 1..421: note = Human gut metagenome

SEQ ID NO: 10057 - protein, 413 aa, unidentified
  REGION 1..413: note = Human gut metagenome
MTSYAFVLDANGKQLAPTKEQKAWFFIRKKRASLVSKYPIVIQLMKEIPEKEICQDEIRCGIDDGGLHVGIALVQKCKTKNKVVFKGTIEQRNDVKHLMEVRRGYRRYHRYYKRYRQARFDNRKSSKREGRIAPSILQKRQATIRVIHWLNKWINITNYWLEDVSVDIRALTDGYQSYRWQYQKSNRLDENIRKAAILRDGSKCMECGRANCRLEVHHIKPRRRNGSNTLDNLITLCESCHQKTEGQEELYMDRYFSLLKSSDHKNLNYAQHVMIGKKWLRKQLSNLGVLYLTNGGDTANKRIDWNVEKSHANDAVCITDLQPDTYDMKEWAIKPMRRKSKAKTDNVLGIRHRDLVEYTFKNGETHRGYVTALYPEQKAINFQSPTKHCKKVNARKCKLLWNYSKIYWFENAS

SEQ ID NO: 10058 - protein, 432 aa, unidentified
  REGION 1..432: note = Human metagenome
MLVYVLKQNGQPFMPTARFGKVRRLLKTKKAKVVRREPFTIKLLYEPETDVVQECYCGVDTGSRHIGVAVVSNDKVLYQSQTELRSDIKRKMDARGACRRNRRQRKTHYRKPRFLNRGNSTKSDKLPPSVKHKVQAHIDEIEFCKKILPISDSNLIIEVSQFDTALMKDPSLLNEKVKHWGYQQGFNYGYSSRREAILYRDNYTCQCCGKKNCRLEVHHIKFKSNGGTDDEENLITLCEDCHKGVHAGTIVLSKKPKKSKNLKHATHMSIIRSWLLKKYPNAIETFGFVTAENRNHLNLEKDHYIDACVIASGGFKIKQLDVIFCKRRVPKGNYQLAKGHRGEQKIPTGKICGFRKFDKVKYLGNEYFISGRMSKYGYCLFTDILGNKIDFSNMPKGMKTPKLSNCKRISARSSCLCIISQIRKERAIPVLS

SEQ ID NO: 10059 - protein, 431 aa, Escherichia sp.
MNRVFVLGKTGQALMPCHPARARQLLQSKKARVKRLYPFTIQLTQRSDGYIQPVELKFDPGSKQTGVGLVLHGKNRLSAIYAAVLTHRGQEIKSNLDSRRMIRRARRNRKTRYRQERFLNRVRSKHKGWLAPSVQSRVDNIMEWSKRFMRLSPVGFITVESVKFDMQKMENAAVEGLEYQRGTLFDYEVKEYLLEKYHYSCVYCGAKNVPFEKEHVIPRSRGGSNRISNLVLSCHDCNQKKDNLIIEEFLKDNPALLKKIKAQLKSSLKDAAAVNITRKQIVKELINLNVPVLTGTGAETKYNRVSQKYPKEHYIDALCAGTTGAKIYIPKKLKPLLIKKERRNNRQMCLVDKYGFPRGKAKGSKIVHGFKTGDIVKAVVLKGKKKGVYKGKVAVRSSGSFNINVKQGRIEGIGWKNCVMLHRFDGYSYTY

SEQ ID NO: 10060 - protein, 456 aa, Halomonas sp.
MAVFVLGKNKQPLMPCSEKRARLLLERGRAAVVNLTPFVIRLRDRCLSDCTLQPTLLAADPGSKETGLALMRLENNATEEKAPATRHVLCLCQLVHRGFQIRQALEQRAGFRRRRRSKNLRYRQPRFDNRTRKKGWLPPSLQHRVDTTMAWVDKLCRWAPVTHLSMELVRFDLQKMENPEISGVEYQQGTLLGYEVREYLLEKWGRVCAYCGTGDTPLEIEHVVAKSRDGSSRVSNLTVACHDCNQAKDSQWLADFFATNKGLKKRLKANGLSAEVRLERVQRQLKLPLRDAAAVNATRWALYGSLKTTGLPVAVGSGGRTKYNRQRLGIPKTHALDAACVGKFDTLKGWRVPTQVIKAMGRGSYQRTRLDKFGFPRGYLMRQKQVKGFQTGDRVRAVVPSGKKTGTHTGRVAIRKTGSFNIQTEQGAVQGISWRHCTLLQRGDGYGYHPLPTIQY

SEQ ID NO: 10061 - protein, 427 aa, unidentified
  REGION 1..427: note = Human gut metagenome
MVYVLAIDGEPLMPTERHGKVRRLLKENKAKVVKRCPFTIQLLYDSTRYVQEINLGIDAGSKHIGVSATTKEKVLYEADVELRNDIVDLISTRRELRHLRRIRKTRYRKARFNNRVSTKKTGWLAPSVKQKIHTHLTVINNVYKILPIKNLIVETASFDIQKIKNPDISGEEYQQGEQKDFWNVREYVLFRDNHTCQCCKGKSKDKVLNVHHIESRKIGGNAPNNLITLCETCHKGYHNGSVKLPKFIHRGMSFRDAAFMGIMRKTLLSELRKIYPNVKETYGYITKNTRITYNLPKDHYIDARCISGNPDAKPLGYYFYQKKARCHNRQIQKMSILRGGLRKNNQAEYLVKGFRLFDKVKHNSKEYFIFGRRKTGYFDIRNFFGEKVNKGSVSYKKLKFLETRHNMLTERRKTIPYPAIKAEGLLA

SEQ ID NO: 10062 - protein, 419 aa, unidentified; identical to SEQ ID NO: 4877
  REGION 1..419: note = Human gut metagenome

SEQ ID NO: 10063 - protein, 406 aa, unidentified
  REGION 1..406: note = Human gut metagenome
MVYVQDIDGKPLMPTTRHGKVRRLLKSNKAVVVNLCPFTIRLTYISDSYKQEIVLGVDAGTKHVGLSATTKSKELYSSEVILRNDIVDLLSTRRELRKARRNRLRYRKPRFDNRVKSKRPGWIAPSVKYKVDAHIRVVENVCSILPISRIVIEVAQFDTQKIKNPEISGKEYQEGDQLEFWNTREYVLARDGHKCQYCKGKSKDSILNVHHIESRKTGGDSPSNLITLCETCHKEYHKGNIDLKIRRGKSLRDAAVMGIMKWRLYEELKSRYDRVFMTFGYITKHNRIKYGIEKSHTSDAFVISKNINAKRIERQYLKRLIRRHNRQIHKMKILKGGKKKNNQAPFEVFGFRLFDKVLYNNKIFFVYGRRKSGSFNIRDFNGENSKDVSRKKFKLIRGKRHPIILK

SEQ ID NO: 10064 - protein, 554 aa, unidentified
  REGION 1..554: note = Human gut metagenome
MIEQSSDIPFAVRVTPSPTLRLGMPMLWKLNRSRQNRISTGPELAVTGLQQKRRTMRYVYVLDMNGEPLMPTCRYGKVRRMLKSGQAKAVDTLPFTIQLLKPTKTRILQPVIAGQDPGRTNIGMAAVRSDGTELYRAHIETRNKEIVSLMNDRRSFRQASRRGERLARKRLAKKLHTTAKHLNGRILPGCKEPLAVKDIINTESRFNNRLRPEGWLTPTATQLLRTHLEAFRKLSGILPVTEMVLEVNRFAFMQLDNPDMEKRDIDFCRGPLHGTGGVKAAVSLQQDELCLLCREREIEHYHHIVPRSKRGSNTINNIAGLCEKCHERVHKDQAAAEKLQSRKDGLSKKYGGTSVLNQIIPSLTEELGIRYPGHTHVTNGWNTKEFREKHELEKNHDIDAYCIAASILKDVQPVMQTEPYEIKQFRRHNRARIHHQTERTYRYDGKIIAKNRKKRMDQKTDSLEDWVADMTKQYGQGTANRMLSKVTVQKSTRHYNAKGRMMPGTVFTYQKKRFVMTGQLTGGTYYRAYGQDKKNFPAKVVRVVQKNKGLVYVA

SEQ ID NO: 10065 - protein, 420 aa, unidentified
  REGION 1..420: note = Human gut metagenome
MQYVYVLNKHGEPLIPCSPGKARLLLKQQKACVVKRTPFTIKLLFGSAGYKQPITLGVDAGSKHVGLSASTEKRELYSEEFTPRSDVVELLSTRRQNRRSRRNRKTRYRVPRFDNRVHSKHKGWLAPSVEVKIQEHITVIKHICKILPISLVRVETAEFDTQRLKAMLAGKPLPVGTDYQLGEMYDEYNVRQYVLKRDHYTCQCCGTHNTAKKVVKLHVHHLESRKTGGNAPSNLVTLCTTCHKNLHKGRVTLDGKERGKPLRDAAFMGIMRKTLMVRLKEELPIPVQGTYGYITKMRREQNDIKKSHTNDARCISKHPLAEPCSVCYRTKAIRHHNRQTHKANFSKKGIRKRSQMPYLVEGFRLWDKVLYKGQECFVSGRRTSGSFTLKKLDGTRISKGVTFKKLRLLEPATNYLIERM

SEQ ID NO: 10066 - protein, 436 aa, unidentified
  REGION 1..436: note = Human oral metagenome
MTKTLTTRTIQACVLDRQGKPLMPTTRLGKVYRLLKAKKAHIVSYEPFTIQLDYEPDTQVIQPMTLGVDSGAIHSGYSVANEHREYYNAEVIARNDISNRLSDKRMYRQNRRSRKTRYRKPRFNNRKNKKKGWLPPSLEQKVAVQVNEINHLHRYFPIETIVVEVAEFDIQKIKNPDISGIEYQQGTLQGYNIRNYLLEKHGRKCFYCGKAVSDFEVEHMFPKSKGGSNRIDNLTLSCHDCNEKKGTLTAEEFIQQTLPAKKAVAKLKQLPNEKRLFKYMAYMNATRWALYDAIKERYPNVKMTYGYITKYNRIQAGLPKTHHIDAKCITGFATVPSMSQTVVKVKMRRHNRQLHRATFSKGHVRKAASLPTTVFGFQLYDLVCFNNHRYYIKGRRSSGSFALVSVEGLKNEERNYKKLTLLAHTNAYLTNRYVNA

SEQ ID NO: 10067 - protein, 420 aa, unidentified; identical to SEQ ID NO: 6836
  REGION 1..420: note = Human gut metagenome

SEQ ID NO: 10068 - protein, 268 aa, unidentified
  REGION 1..268: note = Human gut metagenome
VETAEFDTQRLKAMLKGKPLPVGTDYQLGEMYDEYNVRQYVLKRDNYTCQCCGAHPTEKKPIRLHVHHIESRHVGGNAPNNLITLCVACHKALHEGKITLDKGKKRGKPLRDAAFMGIMRNTLLARLKDELNIPVKQTYGYITKLLREKNKIPKSHVNDARCIAKAPNAKPCDTMLYTRALRHHNRQIHKAKILKGGIRKKNQAPYLVKGFRLWDKVRYNGEECFITGRRSSGYFALKKYDGTVISNSASYKKLMLLEAATNYITERS

SEQ ID NO: 10069 - protein, 308 aa, unidentified
  REGION 1..308: note = Human gut metagenome
LAPSVEVKIQEHITTIKRICQILPISEIQVETAEFDLQRLKAMKEGKPLPVGTDYQLGEQYDFYNTRQYVLHRDGYTCQCCGTHDNNIKLHVHHIESRQTGGDAPNNLIILCEHCHKALHEGKLELPKGKKRGKSYRDATFMGVMRKTLLERLKKEIDVPVEGTYGYITKCWREKTGLEKSHINDAICISKHPYAKPLDTYYLTKAVRHHNRQIHKSNFSKGGIRKRNQAPYLVKGFRLFDKVLYQGKEYFIFGRRATGYFDIRTLDGTKVNKGSIKYKKLRIQDTAKAYLKEARAIPHVNKFTCVLA

SEQ ID NO: 10070 - protein, 430 aa, Calothrix sp.
MEGLMSKIFLLDTNKKPLNPIHPAQARQLLKNKKAAIFRQFPFTLILKEAKPDIEVQPLRIKIDPGAKNTGFALVNDTTGEVIFAAELQHRGFQIRDALTSRRQLRRSRRNRKTRYRAPRFNNRKRNEGWIPPSLQSRIVNILTWVKRLQKLALIDSISQELVKFDMQIMQNPDIQGKEYQQGTLAGYEVREYLLEKWNRKCAYCGVEHVPLQIEHIRPRSKGGSNSISNLTLSCEKCNLKKGTQDIKDFLKKDTKKLESILKLCSRPLADAAAVNTTRFALLNALKATGLPVETGSGGLTKFNRSQQGLSKTHWIDAACVGKSIPILNIKGVKPLLIAAKGHGTRQMCRTDKHGFPTRYVPRIKLVHGFQTGDIVKAIVKTGNKVGVYIGRIATRSTGSFNISTKAGLVQGISHKYCKLIHKKDGYSYS

SEQ ID NO: 10071 - protein, 393 aa, Moorena sp.; identical to SEQ ID NO: 6115

SEQ ID NO: 10072 - protein, 379 aa, unidentified
  REGION 1..379: note = Clostridiaceae bacterium UBA4052
LVYILSKNGNPLMPTNRHGKVKHLLKDGKAKVVRRTPFTIQLLYDSPEYTQPITLGVDAGSKVVGLSATTEKKELFVSEATLRDDITELLSTRRQNRRTRRNHLRYRMARFLNRTASKKEGWLAPSVKHKVDSHLKVIGNVHRILPISRIVIETASLDIQKIRNPEISGREYQQGEQLGFWNTREYVLWRDNHECQHCHGKSKDRILNVHHKESRKTGGDSPGNLVTLCETCHKSHHAGRIKLKLTPNKSYRDASFMGIMRWYVFNSLNELYPEVSITYGYITKNNRIRNNIEKTHSADAYCISGNLNAMRIDEIYYQVFKRKHNRQIHKANFLKGGKKELDQSAYEVKGFRLFDHVRYWDEDCFIFGRRISGYFDLRK

SEQ ID NO: 10073 - protein, 536 aa, unidentified
  REGION 1..536: note = Human gut metagenome
VLRPRYQCPTRWYPSREQGSGNGCLSGEENTDLEQEVSGTLSKGDHSHPGEQDFCVPAITIQGGPAMSVFVVGLNGCRLMPTSERKARLLLKHGKASVYRKVPFTIKLNYKTGSTTQSGYLGIDTGSQHIGVSVVREDGTVLHKEEIGLRDSMSKRKLMQSRASSRRGRRHRKTRYRHPKWRPKAKRVYCKTPDRKGRHWKKRKITFASKRPKGWLPPSLQSKTDHHIRWIKKLQDLLPEGYRLSIELGRFDPARLKDPEIHGELYQKGPQYDYENVRAYVLNRDRYTCQVCGKKGGKLHVHHILYRSHGATDDPQYMATVCSDCHNTENHHQGGILYQWMQKQKKFTRGLRDATFMNILRKRLIEAFPGATFTYGNITKADRERLILPKSHGNDATAIAIVKTGIMTVKDKEPVIYIQQVRRKKRSLHEETPRKGRKEPNRKASRYDKNTKAVTVTKRKNKKKISITGCLFDRVELNGKKGWISGFTDKSCYVKDENDQYIRTSPKYKQVSLSKLKILHHCGNWAIGARRSLGKG

SEQ ID NO: 10074 - protein, 419 aa, unidentified; identical to SEQ ID NO: 4877
  REGION 1..419: note = Human gut metagenome

SEQ ID NO: 10075 - protein, 442 aa, unidentified; identical to SEQ ID NO: 2903
  REGION 1..442: note = Human gut metagenome

SEQ ID NO: 10076 - protein, 421 aa, unidentified; identical to SEQ ID NO: 4238
  REGION 1..421: note = Human gut metagenome

SEQ ID NO: 10077 - protein, 487 aa, Moorena sp.
MTYVYVLSRSGRPLMPTARCGHVRILLKEKKARVVCGRPFTVQLLYDTDEAEPYLYGGTDPGRTNIGNAVVTEDGECVYRDKVETRNDEVAKGMSDRKKNRQARRRGERLVRKRRAKRCGTLSTKLGSGRLIPGTKKPTLVKDIINQEARFRNRKKRQLITPSVKQLVDTHLNHVDQIRKILPVKGWCLEANRFAFMKLEDGSVRGIDFQNGRLKGYASVDDFVYERQKGKCFCCGAPIEHYHHVKEQNDNGFDGPENKVGLCNSCHTKIHIGELELDVEGFGKKYQALSVLNQAIPYIYLGLVERFDEENVFICAGYDTKEIREAAGLDKDHDIDALCIASMATGVIPKQPEEQAFSVKQYRRHDRAKINNQPERTYKLDGKTVARNRKPRIDQKGLALSQWYEKQVRLCGRKEADRMLSRLKVRKSYRRYNNLYRVMPGAIVRHDGRIEVMERQQNNGYYFNLRCGRIKASECEILHHNAGLVYI

SEQ ID NO: 10078 - protein, 340 aa, Aneurinibacillus sp.
VQLRTDIPQLLATRLQFRRARRSRTTRYRKARFLNRKKSKGWLAPSVQHKVDSHLKVVQLVHRILPVTKITVEVAQFDTQLLKNPSIKGEEYQQGEQMGFWNVREYVLFRDKHTCQRCKGKKKDNILNVHHIESRKTGGDSPDNLITLCETCHNEIHQKGLEHTIKRKTQTLRDASQMTVMRWFIYNGLKERYPHIQLTYGYITKNTRITNGLGKSHEVDARCISGYPLAKPMDTVYHLKFVRKNNRQLHKATISKGGKRKSNKAERFVKGFQLFDKVLYEGQECFIFGRRSSGYFDIRKLDGTKIHASASYKKLTRIEYARTLLIERRKGDSSPTYATA

SEQ ID NO: 10079 - protein, 420 aa, unidentified
  REGION 1..420: note = Human gut metagenome
MQYVYVLNKHGEPLMPCSPRKARLLLKQKKACVVKRTSFTIKLLYGSTGYKQPITLGVDAGSKHIGISATTEKHELYREEATPRNDVVDLLSARRAFRRSRRNRKTRYRAPRFNNRVHSKHEGWLAPSVEVKIREHITLIKRVCRILPVTLVRVETAEFDTQRLKAMLEGKPLPVGTDYQLGEMYDEYNVRQYVLKRDNYTCQCCGAHSTKTKDVKLHVHHIETRRTGGNAPNNLITLCTDCHKALHAGKVTLDGKKRGKPLKDAAFMCVMRKTLMERLHKKLKIPVQGTYGYITKYLREKNGIPKSHTNDARCISKNPLAIPCDTCYYTKAVRHHNRQLHKATILKGGIRKANQAPYIVKGYRLWDKVSCNGTECFITGRRTSGYFALKKLDGTVISNSISYKKLRLLEVATNYITERR

SEQ ID NO: 10080 - protein, 415 aa, unidentified; identical to SEQ ID NO: 6883
  REGION 1..415: note = Human gut metagenome

SEQ ID NO: 10081 - protein, 537 aa, Streptomyces sp.
MTTFPAGEQTHQAVLPQQLALESVGADTPGSRDETAHGHPAIARGTGREHGRGETDGHGTEARRRHAKAENGSGDAPTPDRSYTGGVGASRVFVLAKHGQPLMPCHPARARELLGKGKAVVARQVPFTIRLKDRTFAESEVDGVQLRIDPGSKGTGLALTDEKKQVNGQGTVVTARRGLISVELQHRGDQIRMCMQQRAGYRHRRRSANCRYRAPRSNNRTRPTGWLPPSLRHRVETIVSWTARLCRYTPVTEIHVENVAFDTHAMSAARPLNGAEYQQGPLAGTEARAYLRAKWNNACAYCGATGVPLNIDHVRPRSRGGSNRISNLVLACVPCNKAKDNTPVEVFLAHQPDRLTKILHQAKTPLHDAAAINATRWQLTEALSGLGRQVHTWSGGRTKRNRSAMGLAKTHTLDALSVGRLDHESGDALVRLPGQVLVAKAAGRGSYARTTPDRFGFPRLQRARVKQHFGYVTGDLVRATMPTGKWAGTWTGRISVRARGQHSLTTPEGRINVSHWNLRLLQRGDGYGYSLRQEAAP

SEQ ID NO: 10082 - protein, 420 aa, unidentified; identical to SEQ ID NO: 3546
  REGION 1..420: note = Human gut metagenome

SEQ ID NO: 10083 - protein, 494 aa, unidentified
  REGION 1..494: note = Human gut metagenome
MTMVYVQNKDGKPLMPTTRYCYVRLLLKEKKARVVSRTPFTIQLNYDTPDITQALILGIDPGRTNIGVAVVKEDGQCVFSAHLETRNKEVPLLMKKRAAFRRNHRTLDRRRKRQRRAKAAGTTIAEGSVERLLHGYSTPIVCHHIRNKEARFNNRSRPAGWLTPTANHLLQTHINLIAKIAKVLPITKVVVELNRFAFMAMDNPNIRRWEYQQGPLYGLGSVEDAVYAQQDGHCLFCKKPIDHYHHVVPRHKGGSETLANRCGLCERHHALVHKDKAWAEKLVTRKGGMNKKYHALSVLNQIIPFLMEYLGEETPYDVYATDGRSTKGFRVAKNVPKEHYTDAYCVACSILGTDIDVSAPVEPFELKQFRRHDRQACIRQMVDRKYLLDGKVVAANRHKAIEQKSDSLEEFREAYGEAAVSQLTVRPHLPQYKDMTRIMPGAVMDFDGTIGVFQGSEGFHNGKPDYYKSTKGERVLTRRCALLAQNAGMVFIPA

SEQ ID NO: 10084 - protein, 424 aa, Petrotoga sp.
MLVYVLNKHGKPLMPCKPSKARKLLKEEKAKVIRKEPFTIQLLYGSSGYKQPITLGVDAGSKTVGLSATTENKELFAAEVELRDDIPKLISQKRQYRRDRRFRKTRYRKPRFLNRVHSKNKGWLAPSVEHKIKSHIKLIDLVHSLLPVTKIVVEVASFDIQKIKNPNIEGKQYQQGEQLDFWNVREYVLWRDNYTCQHCKGKTKDKRLNIHHIESRQIGGDAPNNLITLCETCHKDYHDGKIKLNFKRGQKFKDATFMGIMRWTLYNRLKTLYPNIHLTYGYITKNTRIQNGLPKTHRIDALCISGHPQAKQLEHYYHIKEVRRHNRQIHKANILKGGIRKLNQAPYLVHGFRLFDKVKYNGIKCFIYGRRSTGYFDIRKVDGTVIHRSAKSKDLILVSKTKTLLWERRENSAFLSPLNRASAS

SEQ ID NO: 10085 - protein, 413 aa, unidentified; identical to SEQ ID NO: 2636
  REGION 1..413: note = Human gut metagenome

SEQ ID NO: 10086 - protein, 415 aa, unidentified; identical to SEQ ID NO: 3500
  REGION 1..415: note = Human gut metagenome

SEQ ID NO: 10087 - protein, 425 aa, unidentified
  REGION 1..425: note = Anaerobic digester metagenome
MVYVISKDGKPLMPTKRHGKVRRLLKQGLAKVVRREPFTIQLLYDTTTYTQPVVVGVDIGSKVVGISAVTNKQELFSAEVELRQDIRKLLLKRREHRRFRRYRKRRYRKPRFLNRRRPEGWLAPSVKWKADAHIRLVNFVAKILPVTKVVVEVAPFDIHKIVNPTVESTKYQEGPQKDFRDVREYCLWRAGYKSELSGKKGVLEVHHIVPKSQGGTDNPSNLIVLTAEEHKAIHEGKIKIPRSKLEKVKILKDASHVSTIGWYIVNRLKYQYEVEMTYGSITKAKRVEMGLEKTHRNDAFVIAGGNKNVNRVPEWYFGKFFRRQNRSLHKANPIKGGKRPVNTVKEVHGFRRFDKIEYQGRTYIIFGLRSSGYFATSTLSGEKISDSVKYTCLRLVEKAKTLMFERREQRIPLHLTEDGVSCTGL

SEQ ID NO: 10088 - protein, 430 aa, unidentified
  REGION 1..430: note = Human gut metagenome
MPKVYVLNRHGRPLMPCTPAKARHLLDAGKAKVRHRTPFTIQLLYGSTGYTQEVILGVDAGSKTIGLSAATETEELFSAEVKPRNDVVELMSARRQFRRARRNRTTRYRKPRFDNRVRSKHKGWLAPSVEVKIQEHMTAIRRACAILPVSKVVVETAEFDLQLLKAVAEGKPVPQGEDYQKGEMYGHYNVRQYVLWRDSYTCCICGVHGSVRKGVPLHVHHLESRRVGGDAPDNLVTLCTACHDKLHKGIIMAADIKKRKRRSTRDATFMGIMRMTLLRRLREQLPVPVVETRGYITKATRENLLVLPKSHANDALAIAHGPQGFRAEHLPNIRQADRLYTIRPVRHHNRQLHKATILKGGVRKANQAEKYICGFRLYDKVLYNGIECFVWGRRTSGSFLLRQLNGEKVKDGVSYKHLKLLERSQSYLVA

SEQ ID NO: 10089 - protein, 414 aa, unidentified; identical to SEQ ID NO: 2588
  REGION 1..414: note = Human gut metagenome

SEQ ID NO: 10090 - protein, 209 aa, unidentified
  REGION 1..209: note = Human gut metagenome
MECGQSNCRLEVHHIKPRRLNGSNTLGNLITLCESCHQKTEGKEEQYMQHYFNILESSDNKNLNYASYVMIGKTWLRKQLSQLGVLNLTTGGNTANKRIDWNIEKSHSNDAVCITDLQPDSCNVKDWIIKPMRRQSKAKTDNVLGIKHRDLVSYVYKNGELHTGYVTALYPELNALNFQSPTKHCKKVNVRKCRVLWKYNKIYWLDSVS

SEQ ID NO: 10091 - protein, 392 aa, Anoxybacillus sp.
VVGSASVLHITSIYNMVEENMTCFMQRKGENPMVFVLDTNKRPLAPCHEAVARKLLKQGKAAIYKRFPFTIILKKSVDESEIKTTYRLKIDYGSRHTGLAILRGQEVVWLGQLDHRTDIKERIDKRRAFRRARRNRKTRYRKPRFLNRRRKDGWLPPSLESRVQNIQTWVNRLKKLCPIGYISYENTKFDTQLMRNPEINGVEYQQGTLQGYEVREYLLEKFGRKCCYCGKENVPLEVEHIIPKSRGGTDRVDNLCLACHDCNQRKGSKTAEEFGYPHIQKQVKETLKDTSAINSTRWKAYEVLKQTGLDVECGTGARTKMNRIRLDLPKTHYFDACCVGESTTNHLYFKTKEVLFIKAKGRGSRSRTNLDRYGFPRGYLARQKFFFGFQTG

SEQ ID NO: 10092 - protein, 451 aa, unidentified
  REGION 1..451: note = Mouse gut metagenome
MTTFVFVLDRKGRSLMPCHPARARKLLKKGRARVHKVFPFTIRLTDRELENSSVQPMLIKIDPGSKETGIALVREEKNKEHHALYFINLQHRGQQIRNALYKRRCLRRSRRSRNLRYRSPRFLNRRRAEGWLAPSLQHRADSILSWVSRLRKITPVERISQELVKFDTQLTQNSKIEGIEYQQGELAGYELREYLLEKFGRKCIYCGADNVPLNIDHVIPKSKGGSNRVSNLVLACVQCNQKKGSRSIEEFLKDKPEVLRQIKNQLKQPLKDAASVNATRWKLFNKLKSTGFPFEVGSGALTKFNRKKFGIPKAHWLDALCVGNVPSVTNWRNLNVLNIKCCGRGAYQRTRTDKYGFPRGICMRQKKVYGFSTGDMVKAIIPKGKKKGVYVGKVAVRKTGSFNLQTSGQTIQGISYRYCRLITHSDGYSYSWKSGPLPPRVETRGILGEVR

SEQ ID NO: 10093 - protein, 459 aa, unidentified
  REGION 1..459: note = uncultured beta proteobacterium
LVFVLDKRGKPLMPCTERRARILLERGRARVHRLYPMVIRLVDRFAEDSEFQELNLKLDPGSKTSGVALNRVDGSTEAVLNLFELIHRGAFISKKLEQRRALRRNRRNRHTRYREERFLNRGNKQRGWLAPSLMHRVNTTTAWVDRIMRWSPVPLITQELVRFDTQKLENPEISGVEYQQGTLLGYEVREYLLNKWHRACAYCDAQNVPFEVEHIHPKSKGGSNRISNLTLACRPCNEKKDNRDIREFLASDPTRLAKILAQAKAPLKDAAAVNSTRWRLFNELKTMGIVVKTGTGGQTKFNRLQNKIPKTHALDAACAGHVEFVSDWQKPTLSIKSSGRGTYVRTKLDSYGFPRGYCLRQKQVHGFATGDIVRAEVTKGKKIGSYFGKVAIRESGSFNISTNAGVIQGVSHKYCKVVQRADGYGYLFNQDSKQSRVKRIALQSALSLPGMNAEVSRAL

SEQ ID NO: 10094 - protein, 415 aa, unidentified; identical to SEQ ID NO: 7777
  REGION 1..415: note = Human gut metagenome

SEQ ID NO: 10095 - protein, 457 aa, Moorena sp.; identical to SEQ ID NO: 4365

SEQ ID NO: 10096 - protein, 439 aa, unidentified
  REGION 1..439: note = Human metagenome
MVLVIDRQKQPCNAISAAYARILLFTKQAVIHKRFPFTIRLRNDNAVLKDRSYTVKLDPGSRTTGVAITDDQDSVVMLAELEHRGHIIKKNLDSRRAIRRSRRQRKTRYREVRFLNRTKPEGWLAPSVKSRADNVINFIKKYNKLINIDRVMIENVSFDTAQMSSDSYLIGTDYQQGNLYNKNLRKFIFSKTKGRCSYCEEKATEIDHIVPRAKGGTNSTYNLTPACRSCNEKKSNLSLKEFGKLMNKDYSKLEPKKLPKDAAIVQSARNYMVKEISKLVPDTTTHESWITKYNRDQLGLTKQHYYDALSVGEIPTKFNFLTDKILQISAKGRGSRQMCRMDSYGFPRTSAKASKSVKGFQTGDIVKAVVPTGSKQGEYLGRVAVRSRGFFDIKTKSNLVKDIGYKFCRLLQRNDGYSYNYKERDFLLAMNCRVSVAEF

SEQ ID NO: 10097 - protein, 416 aa, unidentified
  REGION 1..416: note = Bioreactor metagenome
MLVYVLNKHGKPLMPCKPSKARKLLKQGKAKITQREPFTIQLIYGSSGYKQPITLGIDAGSKFIGVSATTEKQELFSAEVELRNDIVQLLSERRQYRRSRRYRKTRYRKPRFSNRVRSKNKCWLAPSIENKIQTHLKIVEKVHKILPITKIITEVASFDIQKIKNPNIEGVEYQQGEQLGFWNVREYVLWRDNHTCQICKGKSKDNRLNVHHIESRQTGGNAPNNLITLCETCHNKYHKGELNVKLKRGQSFRDTAFMGIMRWTFYNRLKNIYPNVELTYGYITKNTRITHKLPKSHRIDALCISGNPKAKQLDYWYYIKQVRKHNRQIHKAKILRGGIRKLNQAPYLVKGFRLFDKVKYKRQECFIFGRRSSGYFDLRKLDGTVIHRSASYKDLQLLSKRKTLLLERREGVSSLT

SEQ ID NO: 10098 - protein, 473 aa, unidentified
  REGION 1..473: note = uncultured beta proteobacterium
MPCSEKRARLLLERGRARVHRLHPFTIRIVDLRLKDCVLQPLRLSLDPGSKTTGLAIARVETKGASEASGEAQEAQQDEGEPVMHIRFLMELAHRGAQIRQDLQGRAALRRGRRSRKLRYRAPRFDNRKRPEGWLAPSLQHRVLTTMTWVRRLRRLAPVTHIAQELVRFDMQAMQAAQDGQTIEGVEYQRGTLAGYEVGEYLLAKWDRTCAYCDAQNVPFEKDHILARSRGGSNRVSNLALACRPCNECKASRDVREFLARDPVRLRRILAQAKAPLRDAAAVNSTRWALYQALQRTGLPVEAASGGRTKFNRTRLGIPKRHALDAACVGAVHDVRGPAQPALQVKCCGRGSRCRTRVNAAGFPRGYLMRSKSVHGFRTGDMVRATVPASSRKAGVHAGRVAVRASGSFNIQTAARVVQGISHKHCVVLMRGDGYAYAQQATPSTRADNKTREAGEVSTATAVSTGHALPPHG

SEQ ID NO: 10099 - protein, 515 aa, unidentified
  REGION 1..515: note = Human gut metagenome
MTALEERLSKTEYIYVLGFDGKPQMPTRRKRHVLKLLKTGRARIAEDIPFTIRLTYRNAPVLQPVTLAEDPGRTNIGAAVLSPLGDLLFAAVIETRNKEIKKLMADRQKSRQASRRGERKARQRLAKRYGSMVKSGMVMRKLPMYAADRFVTCKFIRNTQARFCNRKRCPDWITPTVQHLVQTHLNIIRKISRYLPVTDIAFEVNRFAFMHMENPEAMGVDFQNGPLKGYGDVKEAIRTQQHGKCLMCKKPISHFHHIVPRSRGGSDTIQNLAGLCPECHTKVHTDTAFRKDFDEKKSGQLKKYGALSALNQAVPFICKKLLKEYGEEHVHFCRGLDTSLIRTALGFEKTKKNQMHEVDAYCIGLAALEVNEVETPAFDHTFQIRQFRRQDRSIIHHQTGRSYYQGKEKVTQNRKPGFEQKTTALSQWYKEQVRIHGEKEAEKLRSQLRVEKSCRHYNDMDRFLPGAVFLYEGKRYVLSGRITNGKYLRACGQGMKNFPAAECTFIRHNAGLVFI

SEQ ID NO: 10100 - protein, 413 aa, unidentified; identical to SEQ ID NO: 2636
  REGION 1..413: note = Human gut metagenome

SEQ ID NO: 10101 - protein, 416 aa, unidentified; identical to SEQ ID NO: 7736
  REGION 1..416: note = Human gut metagenome

SEQ ID NO: 10102 - protein, 412 aa, unidentified; identical to SEQ ID NO: 4932
  REGION 1..412: note = Human gut metagenome

SEQ ID NO: 10103 - protein, 529 aa, Burkholderia sp.; identical to SEQ ID NO: 4276

SEQ ID NO: 10104 - protein, 529 aa, unidentified; identical to SEQ ID NO: 6786
  REGION 1..529: note = Human gut metagenome

SEQ ID NO: 10105 - protein, 487 aa, Moorena sp.
IRGSPRRNCYETVLILDDGETFGLGVVERCKTQDRANLAAEGKPRGREISGALADRRALRASRRNRRNKKRGKQGESKIAYRRGQEYPPSIRADVQAKVNAVKSALRWFPVSRIILEPVKIDLVKERRPGVKGKGYQNGLSSGIRADSRSQKRRLAILRRDGYRCLCCGDPVTKENACIHHFKARKSGGTNRYDIQGTLCEKCHTSVVTEKLSLVFDPDRYPDPRAAGRCMHGRYLLEQKLRSLGLPVEIRYGHETKAKRYALSLPKSHANDAVALGARGTVPLRLSPVTYRVEYRKRHCNRKLFNANPGVAHYRAAAGRQPGVDPERMKVDDHDQGANKKNRSYRRHVRSEYYKKLKAEREFNHDLLPGRKALNEPFAVNEAVYVDEAGNPVVVKSRRIWRDQDTSNLPYRNKLFEKGDLVCTKEGWLVKVISLMSDGQVKILFCERKEGRKCQFTQRRPASLRTAQKGRGRCWIPQKTALLPSIN

SEQ ID NO: 10106 - protein, 420 aa, Pseudoalteromonas sp.
MLAYVLNKHGKPLMPCKAAKARKLLKAGEAKVVKRTPFTIKLLHGSSGHTQHVVAGMDTGSKHVGCAAIANGKVIYQSEVALRTDVSKKMQQRAMYRRTRRNRKLRYRPARWLNRASMRKEGRLAPSLKSKLDSHLREKKQVEAILPISHWKVETASFDIHKITNPIVTSAGYQQGALLGYYNVKAYVLQRDNYKCQSGRKTKHNVKLHVHHKVFRSQGGTDAPSNLIALCETCHNDLHAGKFELKVKRSKTKHATEIGILKAQLKQCWDFEETFGYVTKFKREQVLGLPKTHYYDAVSICCEDGELVQQGKHVLRKRHVASGDYQQTKGIRSEKRIPVGKLFGLKKHDFVQTPQGTGFVKGKRSSGYFALETILGDKVHASANIKKNTVRISARTTTLTQLMEAAIPLGTKVPSILAVN

SEQ ID NO: 10107 - protein, 376 aa, unidentified
  REGION 1..376: note = Human gut metagenome
LRVFVRNKRGKPLMPCSPAKARLLLKEKKAIVVRRTPFTIQLTIATGEAKQPVSLGIDAGYKHVGLSASTEKAELYASEVELRQDITDLLSARRALRQSRRNRKTRYRAPRFDNRISTKRKGWLAPSVENRINAHLSRIEAVLRLLPVTKITVETASFDLQLLKNPDISGKEYQEGEQLGFWNIREYVLCRDGHVCQHCYGRSKDPVLNVHHLESRRTGGDSPGNLITLCETCHKALHRGEITLKPKRGQSFRAEAFMGIMRWEVLGRLKASHPELEVNNTYGYRTKHARIANDIAKSHCADAFCIAGNLGAERLGEFFFQKQTRRNNRQIHKLSILKGGIRKRNQAPFEVKGFRLFDKVACQGEEGFIFGRRSSG

SEQ ID NO: 10108 - protein, 465 aa, unidentified; identical to SEQ ID NO: 3603
  REGION 1..465: note = Human gut metagenome

SEQ ID NO: 10109 - protein, 310 aa, unidentified; identical to SEQ ID NO: 8570
  REGION 1..310: note = Human gut metagenome

SEQ ID NO: 10110 - protein, 279 aa, unidentified; identical to SEQ ID NO: 5082
  REGION 1..279: note = Human gut metagenome

SEQ ID NO: 10111 - protein, 451 aa, unidentified; identical to SEQ ID NO: 6972
  REGION 1..451: note = Human gut metagenome

SEQ ID NO: 10112 - protein, 414 aa, unidentified
  REGION 1..414: note = Human gut metagenome
MPCSPAKARLLLKEKKAIVKRRTPFTIQLTIATGETKQPVGLGVDAGYKHVGLSASTEKAELYASEVELRQDITDLLSARRALRQSRRNRKTRYRAPRFDNRIRTKRKGWLAPSVENRINAHLSRIEAVLRLLPVTKITVETASFDMQRLKNPDISGKEYQEGEQLGFWNVREYVLFRDGHVCRHCHGRSKDPVLNVHHLESRRTGGDSPGNLITLCETCHKALHRGEITLKTKRGHSFRAEAFMGMMRWEVLNRLKASHSELEVNNTYGYRTKHARIANDIAKSHCADAFCIAGNLGAERLGEFFFQKQTRRNNRQIHKLSILKGGIRKRNQAPFEVKGFRLFDKVACQGEEGFIFGRRSSGSFDVRKLDGTRISAGISCKKLRLLEKRRTYLTEIRKEEALPPLPEGRGLRA

SEQ ID NO: 10113 - protein, 413 aa, Moorena sp.; identical to SEQ ID NO: 2636

SEQ ID NO: 10114 - protein, 416 aa, Parasutterella sp.
MPCSPAKARLLLKEKKAIVVRRTPFTIQLTIATGESKQPVSLDVDAGYKHVGLSASTEKAELYASEVELRQDITDLLSARRALRESRRNRKTRYRAPRFDNRIRTKRKGWLAPSVENRINAHLSRIESVLRLLPVTKITVETASFDTQLLKNPDISGKEYQEGEQLGFWNIREYVLCRDRHVCQHCYGRSKDPVLNVHHLESRRTGGDSPGNLITLCETCHKALHRGEITLKAKRGQSFRAEAFMGIMRSEVPNRLKASHPELEVNNTYGYRTKHARIANDIAKSHCADAFCIAGNLGAERLCEFFFQKQTRRNNRQIHKLSILKGGIRKRNQAPFEVKGFRLFDKVACQGEEGFIFGRRSSGFFDVRKLDGTRISAGISCKKLHLLEKRRTYLTEIRKEEALPPLPEGRGLRAKM

SEQ ID NO: 10115 - protein, 425 aa, Planktothrix sp.
MSNYVLAIDASKQPLSPCHPSVARKLLNQGRALVYRKYPFTIIITKTVENPNPEPIQIKLDPGSKTTGIALVQGNKLLWGAELTHRGQGIKASLESRRSLRRSRKNRHTRYRQARFLNRTRHKGWLAPSLQHRVETTWTWVKKLMKFAPIKGIDQELVRFDLQQLENPEISGVEYQQGELAGYEVREYLLNKWERKCAYCGIENVCLQVEHIHPKAKGGSNRVSNLCLACEKCNIKKGTKNIEQFLAKKPDVLKRILSQAKRPLQDATAVNSTRWTLFNRLKETGLPVSTGSGGLTKFNRTRLNLPKTHWLDAACVGQVESLEVLTRKPLLIKATGHGTRQMCRTDKFGFPSRYVPRLKFVKGFQTGDIVRAIVTSGKKIGTYIGRVAVRTTGSFNISLKETLVQGISHKYCSLIHRKDGYLYAT

SEQ ID NO: 10116 - protein, 512 aa, unidentified
  REGION 1..512: note = Human gut metagenome
MSTVYVLNKDSKPLMPTTRCWHVRRLLKEQKARVVTSKPFTIQLLYETDDVVQPLYLGIDPGRTNIGIAVVKIDGTAVFTAHLETRNKEIPKLMKERKDSRRTRRTNGRRCRRQRRAKANDTISKKCVKQDTAQNGSVSKRAKRIGVIKRHLPGCEKEVLCIGIKNKEAKFSNRTRPEGWLTPTANQLLQTHINLVKKIRKFLPISDAVLEINKFAFMRLDNPNIQKWQYQQGPLYQKASLEEAVSEMQEHHCLFCKKPIAHYHHVVPQSENGSNTIGNIVGLCTKHHDFVHKDTAWQKKLAKKKTGLNKKYGALSVLNQIIPALTKELSSLFPKYFFATNGKSTYDYRAAHGVSKDHWLDAYCIACSVLPNDVCDSNINSRVPYELKQFRRHDRRVLHKANMNRVYTLDGKKVATNRHKAIKQTTDSLEEFRQRQPDDVCKLKVKEHHPEYRNPERNFPGCVFLVGKHTHVMQGTSGSHNGQADGYYDTNGNSYSSGKCKFVAKNEGIVFT

SEQ ID NO: 10117 - protein, 430 aa, Desulfobacter sp.
LSVFVLDTNKKPQNPVHPAKARLLLTEGKAAVFRQFPFTIILKETVLDVASNPLRIKIDPGSRESGIAVINDDSGEIVFAMELRHRGQQIKNNLESRRAIRRSRRNRKTRYRKPRFDNRTRAEGWLPPSLKSRVHNIETWVNRLCRFCNIQAISMELVRFDMQKIQNPEISGVAYQQGELMGYEVREYLLEKWDRTCAYCGKTDIPLEIEHIVPKSKGGSNRVSNLTLACTACNRKKGNKPLEQFLSRKPGLLKRIQKQSKVPLKDAGAVNTTRWDLFRTLKKTGLPVETGSGGLTKFNRTTRGLHKTHWLDAACVGKSTPEKMFQIDKAVLIVKADGHGSRQMCRVNKFGFPRTTAKSTEKKVKGFQTGDIVKAVVTSGKKVGTYTGRVAVRKSGSFNIKTVDKTVQGINWKYCRLLHASDGYSYNTTC

SEQ ID NO: 10118 - protein, 419 aa, unidentified
  REGION 1..419: note = Human gut metagenome
MYVYVINKHGEPLMPCSSRKARTLLNNKKACVVKRTPFTIKLLYGSAGYKQPITLGVDAGSRHVGLSASTETHEFYREEFTPRNDVVDLLSTRREFRHARRNRKTRYRAPRFNNRVHSKHKGWLAPSVEVKIQEHITAVKHVCKIMPISLVRVETAEFDTQRLKAMLEGKPLPVGTDYQLGEMYDEYNVRQYVLKRDNYTCQCCGAHATKTKQVKLHVHHLESRKVGGNAPNNLITLCPTCHKAIHEGKKTLGNKKRGRPFRDAAFMGIMRKTLLARLRKELSVPVQQTYGYITKMLREKNNLLKSHMNDALCIAKHPEAAPCENCYRSKAVRHHNRQIHKATILKGGIRKNNQAPYIVKGFRLWDKVRYNGQECFISGRRVTGYFALKRLDGTFATNSASYKKLRLLETAKNYLRERI

SEQ ID NO: 10119 - protein, 420 aa, unidentified; identical to SEQ ID NO: 7011
  REGION 1..420: note = Human gut metagenome

SEQ ID NO: 10120 - protein, 278 aa, unidentified
  REGION 1..278: note = Human gut metagenome
LTHQFKKGVPVMVYVLDKNGQPLMPTDRHRKVRLMLQSGQAKVIKRCPFTIQLNYDSGHQTQEISLGIDAGSKHIGVSATTKIKVLYEADVELRNDIVDLLSSRRELRRGRRNRKTRYRQAKFNNRRRGNGWLAPSIRQKIGTHLTVVENICKMLPISRIMVETASFDIQKIKNPDIQGAEYQQGDQLEFWNVREYVLFRDGHTCQCCKGKSKDKILNVHHIESRKTGGNAPNNLITLCETCHTGYHKGTVQLPKAIKRGMRFKDAAFMGIMRWAFYE

SEQ ID NO: 10121 - protein, 434 aa, Lactobacillus sp.
MQNRVFVINRQGEPLMPCKQQKCRKLLQGGRAKVIKKEPFTIQLLFGSTGYKQPISIGVDSGQHHIGLAVTSQDKVLFQGEVSLRQDVKKLLDTRRSYRRGRRNRNTRYRPPRFLNRAKPAGWLPPSVANKVQHNINWIQRIQAVLPKAELHIEVGKFDMAKMVQPGITGLGYQQGDLYGYETTKQYVLDRDNYTCQICRGKNKDPKLKIHHIIYRSNGGTNQVSNLLTVCASCHTQANHQPGGKLFVLQAKKFQSHRSLKGATFMNILRRRLFTAFPEAKFQYGAQTTLDRAKLDLPKAHYNDAVTISGIQKIAQRPTAVVMFHQFRKKKRSLHEATARKGRKTPNRASKRNAKNTKAVSGFHLNDYVQLPDGQKGNISGFSGKTKCFVKAGDGHYLAISSKYKHISLSKLKVIRHQNNWNVTEIKAMTYEMA

SEQ ID NO: 10122 - protein, 451 aa, unidentified; identical to SEQ ID NO: 3061
  REGION 1..451: note = Human gut metagenome

SEQ ID NO: 10123 - protein, 512 aa, unidentified; identical to SEQ ID NO: 3720
  REGION 1..512: note = Human gut metagenome

SEQ ID NO: 10124 - protein, 423 aa, unidentified; identical to SEQ ID NO: 3538
  REGION 1..423: note = Human gut metagenome

SEQ ID NO: 10125 - protein, 369 aa, Caldalkalibacillus sp.
MGYVIPVMAPRGAWASFGQLPSGIKQAYGVEASVPDRTSRDNIGEAHITHKEGRVTAMKTVNRVFVVDRKGNPLMPCHPARARKLLRKGRAAVYRRYPFTILLKDREARDDGKDIQTVRLKIDPGSKVTGISLVGEFQCGKTVIWAAELYHRGEQIRTALLERRSLRRLRRNRKTRYRAPRYLNRRRPKGWLPPSIMSRVFNVFTWVRRLRKFVPLAHLSLELARFDTQKLQNPEIKGIEYQQGTLFGYEVKEYLLDKFGRRCVYCDVENVPFEIEHVIPRSKGGSDRVSNLVIACHDCNREKDNRSLEEFLAHDPERAGRIKAQLKTPLRDAAAINASRWVLFDRLKELGLELEIGTGGRTKYNRSAQ

SEQ ID NO: 10126 - protein, 512 aa, unidentified
  REGION 1..512: note = Human gut metagenome
MPTVYVLNKDGKPLMPTTRCMHVRHLLKNGKARVVKSKPFTIQLLYETDDVVQPLYLGIDPGRTNIGVAVVKADGAAVFTAHLETRNKEVPKLMKKRKESRCARRTNGRRCRRQRRAKTNGTISKKCVKQTTAQNGSVSKRAKEIGVIKRHLPGCEKDVLCIGIKNKEAKFTNRARPKGWLTPTANQLLQTHINLVKKIQKFLPISDVVLEVNKFAFMQLDNPNIQKWQYQQGPLYQKGSLENAVSEMQEHHCLFCEKPIEHYHHVVPKSENGSNTIANIVGLCTEHHNLVHKDATWQKKLAKEKVGLVKKYSALSVLNQIIPALTKEMNSLFPKHFFVTNGKSTYDYRTAHGVSKDHWLDAYCIACSVLPNDVCDSNINSHVPYELKQFRRHDRRVLHKANMSRVYTLNGKTVATNRHKAIKQTTDSLEEFRQSHPGDVCKLKVKEHHPAYRNLNRNYPGSVFLVDGQVHVMQGVSGSHNGKADGYYNTNGNAYPYYKCKFVVKNEGIVFA

SEQ ID NO: 10127 - protein, 559 aa, Streptomyces sp.
MTTFPAGEQTHQAVLPQQPALESVRADTPGSRDETAHGHPATGRGTGREHGRGETDGRGIRARRRHAKSAAPAAKAAETGSGDAPTQSQTYTGGVGAGRVFVLSKDGQPLMPCHPARARELLGNGRAVIARQMPFTIRLKDRTRADSEVDGVQLRIDPGSKGTGLALTDDKKETGGQGTVVTVRRGLVAVELQHRGDQIRNCMKQRAGYRHRRRSANCRYRAPRPNNRTRPEGWLPPSLRHRVDTTLSIANRLCRYAPVTEVHMEHGSFDTHAMSAGRPLYGAEYTQGPLAGTTARAYLHAKWNSACAYCGATGVPLNIEHLRPRSRGGSNRISNLVLSCIPCNKAKGSKSVESFLANRPDLLARILEQAQAPLRDTAAMNAIQWQLMEALETLGKPVHTWPGHLTKANRDAMGLDKTHTLDALSVGHLDRESGDVIAQFPDQVLIVKATGRGSYARTTPDRYGFPRLRRARKKQHFGYVTGDLVHAVMPFGKWAGTWTGRISVRARGQHSLTTPAGRFNVSHWNLRLLQRGDGYGYAVRPEAAPQYLQKSLERHEPAA

SEQ ID NO: 10128 - protein, 443 aa, Clostridium sp.
VPLMIYVLNKEGKPLMPTNRYAKIRVLLKSKKAVVVNSKPFTIKLLYDTKNFTQSITLGIDSGYINIGFSAITKEKELIAGEVKLLKGMSERLKEKAMYRRQRRSRLRYRKPRFDNRKRSKDWLAPSIQHKYDSHIKFIDKLKKLLPITNIIIEVANFDTHKLKDSSIEGAAYQNGEQKEFFNLREYILHRDGHKCQNPNCKNKNAESILQVHHIGFWKQDRSDRPGNLITLCNKCHTPKNHKKNGFLYGWQPKVKSFKEATFMSMIRWRLVNTLDCKHTYGYITKHNRISLNLQKTHYNDAFCIAGGSSQSRVKPLIFEQIKRNSRSLEKFYDAKIIDIRTNTKVSGVELFNGRRTRNKNLNLENLRKYRGIKVSKGQRRIRTKRYFYQPGDLVKYEDKVYTVKGTQNKGKYIALKELKKVPKVELLTPYKFRKGLVCVENN

SEQ ID NO: 10129 - protein, 426 aa, Moorena sp.; identical to SEQ ID NO: 3294

SEQ ID NO: 10130 - protein, 427 aa, Moorena sp.
MRVFVLDKNRKPLDPCHPAKARKLLKSGRAKVVRRYPFTIIIKDLELENCVTHDHQLKIDPGAKTTGLAITQSNRVIWGAELTHRGFQIREALTSRRQLRRSRRNRKTRYRKPRFLNRTRPKGWLPPSLMSRVHNILTWVNKLIKFCPVTGISQELVRFDTQKMLNSEVSGIEYQQGTLYGYELREYLLEKWNRTCAYCGANNTRLEIEHIKPKSKGGSDRVSNLAIACHNCNQAKGNQEIEQFLSRKPSILKRILSQAKKPLVDAAAVNATRWKLHNELKLIGLPVEVGSGGLTKYNRCRQNLPKTHWLDAANVGKVGTLYIEDYQPLLITAKGHGTRQICRTDKFGFPRLHCSIKKIHKSFQTGDIVRAVVTKGKKIGTYIGRVATRKTGSFDITTPKGRVSGISYKYCQAIHRKDGYNYQFYGG

SEQ ID NO: 10131 - protein, 456 aa, Halomonas sp.; identical to SEQ ID NO: 7909

SEQ ID NO: 10132 - protein, 512 aa, unidentified
  REGION 1..512: note = Human gut metagenome
MSTVYVLNKDGKPLMPTTRGGHVRHLLKEQKARVVRTNPFTIQLLYETDNLVQPLYLGIDPGRTNIGVAVVKTDGTAVFTAHLETRNKEIPKLMQGRKKARRARRTNGRRCRRQRRAKANGTISKKCVKQATAQNGSVSKRANEIGVIKRHLPGCEEEVLCIGIKNKEAKFSNRTRPEGWLTPTANQLLQTHINLVKKIQKFLPISDVVLEINKFAFMRLDNPNVQKWQYQQGPLYQKASLEEAVSEMQEHHCLFCKNTIDHYHHAVPQSENGSNTIGNIVGLCTKHHDLVHKDTSWQEKLAKKKTGLNKRYGALSVLNQIIPALTKELSSLFPKHFFATNGKSTYDYRAAHGVSKDHWLDAYCIAGSVLPNDACDNNINNHVPYELKQFRRHDRRALHKENMGRVYTLNGKSVATNRHKAIKQTTDSLEEFRQRQPNDVCKLKVKEHHPEYRNPKRNFPGCVFLVGKHTHVMQGTSGSHNGKADGYYDTNGNSYSSGKCKFVVKNEGIVFT

SEQ ID NO: 10133 - protein, 425 aa, Tolypothrix sp.; identical to SEQ ID NO: 8621

SEQ ID NO: 10134 - protein, 404 aa, unidentified
  REGION 1..404: note = Human gut metagenome
LDAKRKQLDPTIEQNAWRLVRQYKARLVSKFPMIIQLNKVMDNPNNDEIRCGIDDGANHVGMALVQKCQTRNKVLFKGTIEQRKDVKHLLTVRRGYRRYHRYHKQYRPARFLNRASSRRSGRLMPSIIQRKQAILRVIDRLRQWVRIDGYWLEDVKIDIRALTDGYKPYRWQYQKSNRLDNNLRLAAIHRDGCKCVECGKTKTRFEVHHITPRKTGGADTISNLITLCPKCHAKTFGRESQFADRYYALIGSTGHVEGIDDAQRVMQGKHWFREQLQQRGSLVLTTGGNTANKREDWDIAKTHSNDAVCITDLKPENIDIEEWTIKPMRRKNKAGVDEVCGFHHRDYVTYTYRNGETHTGYVTAMYPDKNQLNFQSPTKHCKRVNALKARLLWRYDKIYWFKCA

SEQ ID NO: 10135 - protein, 442 aa, unidentified; identical to SEQ ID NO: 2903
  REGION 1..442: note = Human gut metagenome

SEQ ID NO: 10136 - protein, 445 aa, unidentified
  REGION 1..445: note = Microcoleaceae bacterium UBA10368
MSKIFVVDTNKNPLNPIHPGRARMLLQEGKAAVWKRYPFTIILKDVLPNPQIAPLRLKIDPGAKFTGLALVDDATGEVAWAAELEHRGFQIRDALTKRRQLRRGRRHRKTRYRQPRFDNRKRPTGWLPPSLQSRVENIVTWVRRLQKLALISDISQELVKFDTQLMENPDISGFAYQQGELAGYEVREFLLFKFNHTCMYCGAKDTRLEIEHLLPKSKGGSNRISNLGIACRNCNQKKGRQALREFLAQKPDLLQRILRQVKQQKADTAAVNSTRWALFNRLKETGLSVEVGTGGRTKFNRCRQNLPKTHWLDAACVGASTPLKLKVSGVVPLSIRAVGYGNRQMCQVDKFGFPKRGKEGKLIKRERQKNYFGFQTGDMVKAIVPTGKHAGTHVGKVTVRKSGAFDLTVAHVRLQSIRWKHCRAVHRFDGYSYASLSTNVEFLND

SEQ ID NO: 10137 - protein, 477 aa, unidentified
  REGION 1..477: note = Human gut metagenome
MKSHKSVLVIGMNGIGLMPTTACKARKLLEAKKAKVYSKMPFTIKLLYKTGCAVQNISLGIDTGSQHIGVAVTTDNCVQLKDEYELRSTMEKRKLIETRAEARRSRRYRKTRYRKPKFKPHCKHVYMNSMTKRHGHKTHWHNVKNEYGTNRQPGWVPPSIQQKIDHHIQIINRYLEALPKKTKVNIEVGRFDTQKVKNPDIKGKQYQLGRMYDYENKKAYILAKYDYKCPICGRKFGSVRENGSIVKFRKHHLHFVSNGATDNPDSYMAICDCCHTAEAHGDGGILNKIMKESKKTSRGLRDMPFMNILRRRLWNAFPEACFTYGNITNADRKWISLPKTHANDAVAIAMHEYLQQAKSYDVKDVPYTKIYKEVRKKKRSLHEMNPRKGRRIPNMSATRNSKNTKSVINKHRTFSLYDKVRYAGQIGWITGFSGTNTAYLKNKEGKYITIQGKNYKNIPLSNVQILERNNTWITYTK

SEQ ID NO: 10138 - protein, 462 aa, unidentified
  REGION 1..462: note = Human gut metagenome
MSVLVIGRNGRALMPTNPRKARLLLKKKTASVVCRHPFTIQLLYKTGCATQEGCIGIDTGSQHIGVGITCGDRVILKDEHALRSSMEKRSLLATRTVMRRGRRYRKVRYRKPKWRHHTKRMYFEKANRRGQHWRKVKTTTQSPRPKGWLPPSLQSKCDHHFRIIDRYLKYLPDPITRNLVIEAGRFDMARMNDPTIHGEMYQRGPMYDAENLRAYIFARDNYQCACCKAKAGTTRKADGTTVKLVAHHILFRSRGATDNPKYIISVCDHCHTTKAHQPGGILYSWMENNKKVARGLRDATFMNILRKRLFARYPQSAFTYGNITATDRKQLRLPKSHANDAVAISLFGKEASTVKNICQTMHYKQIRKSKRSLHEAIPRKGRKNPNTKAVRNKKNTTQVNGFKLWDSVLADGKKLFICSFTGTSAYLIDKNGCYISQPGKTYKQWPLSKLKRLHPNGNWLMA

SEQ ID NO: 10139 - protein, 408 aa, unidentified; identical to SEQ ID NO: 5302
  REGION 1..408: note = Human gut metagenome

SEQ ID NO: 10140 - protein, 411 aa, unidentified
  REGION 1..411: note = Human gut metagenome
LRVFVLNKRGQPLMPCSPAKARLLLKEKKAIVKRRTPFTIQLTIATGESKQPVTLGVDSGYKHIGLSATTEKAELYASQVELRQDITDLLSARLALRRSRRSRKTRYRAPRFDNRVASKHKGWLAPSVENRIAAHLSRVEAVMRVLPVTAITVETAAFDTQLLKNPDVAGAAYQQGEQLGFWNVREYVLFRDGHVCQHCRGKSKDPILNVHHIESRRTGGDAPNNLITLCETCHKAFHRGEIKLKVRRGKSFKAETFMGIMRRTLVERLKKAHPELNVRNTYGYLTKHKRISYGIAKSHCADAYCIADNLGAKRLEGFFFQKQTRKHNRQIHKLLILKGGLKKKNQAPYEVKGFRLFDKVICKGEEAFIFGRRTSGSFDVRRLDGTRISAGINYKKLRLLEPRTTYLTEFR

SEQ ID NO: 10141 - protein, 413 aa, unidentified
  REGION 1..413: note = Human gut metagenome
MVYILNENGQPLMPTENHAKVRVLLRQGKAKVVNNCPFTIQLLYSSTNYTQPVTLGVDAGSKHIGLSATTEDKELYAADVELRNDIVKLLATRRASRRSRRNRKTRYRKPRFNNRKRDKGWLAPSIKEKIGTHLKVVDDTCKLLPVSKIIVETASFDIQKIKNPDVKGTDYQQGEQLGFWNVREYVLFRDGHKCQCCKGKSKDKILNVHHIESRQTGGNAPNNLITLCETCHTGYHKGTIKLPAKIKRGMKFKDAAFMGIMRWAFYGELKKRYPDVSLTYGYITKNTRIENELPKEHYVDARCISGHPLARPLGTVFYIKKVRCHNRQIYKFKILKKGVRKRNQAEYEVYGFRLYDKVSWKGRTCFVFSRKSTGYITLRLLDGTRVKESASYKKIKLLRMRSGYLIESRSVIF

SEQ ID NO: 10142 - protein, 427 aa, Anabaena sp.; identical to SEQ ID NO: 3216

SEQ ID NO: 10143 - protein, 442 aa, unidentified; identical to SEQ ID NO: 3218
  REGION 1..442: note = Human gut metagenome

SEQ ID NO: 10144 - protein, 413 aa, unidentified; identical to SEQ ID NO: 2636
  REGION 1..413: note = Human gut metagenome

SEQ ID NO: 10145 - protein, 406 aa, unidentified; identical to SEQ ID NO: 3475
  REGION 1..406: note = Human gut metagenome

SEQ ID NO: 10146 - protein, 449 aa, Allochromatium sp.
MAVFVLDKQKRPLMPCTEKRARRLLERGRAVVVRLAPFTIRLKDRIGGETQPLRLKLDPGSRVTGLALVRESEIVDLDTGAVERREHGLWFGELAHRGQQISDALTLRRHYRRARRSRKTRYRAPRFLNRTRREGWLPPSLQHRLDTTLNWVERLRRIAPITALSQELVRFDTQALQNPEISRVEYQQGELAGYEVREYLLEKWHRTCAYCGATNVPLEIEHIVPRARGGSDRVSNLTLACRPCNQRKGSRSIEDFLKRQPARLHQIQAQAKAPLKDAAAVNATRWALFDALKATGLPVETGSGGRTKFNRTRLDIPKTHALDAACVGQVDTLSGWQCPALAIKATGRGSYSRSRLDRFGFPRGYLMREKRVYGFQTGDWVRAEVPTGKKAGVHVGRVAVRQTGSFNIQAQGGTVQGISYRHCRVLQRADGYGYAFQPKPDTEAARRAA

SEQ ID NO: 10147 - protein, 456 aa, unidentified; identical to SEQ ID NO: 6138
  REGION 1..456: note = Human gut metagenome

SEQ ID NO: 10148 - protein, 431 aa, unidentified; identical to SEQ ID NO: 5232
  REGION 1..431: note = Human gut metagenome

SEQ ID NO: 10149 - protein, 342 aa, unidentified
  REGION 1..342: note = Human gut metagenome
VEATPRNDAVDLLSARRAFRRNRRNRKIRYRAPRFNNRVHSKHKGWLAPSVEVKIQEHITLIKRVCRILPVTLVRVETAEFDTQRLKAMLEGKPLPVGTDYQHGEMYDEYNVRQYVLKRDNYTCQCCGAHPTKTKAVKLHVHHIETRRTGGNAPNNLITLCTACHKALHAGKATLNGKKRGKPLKDAAFMGIMRKTLMERLLKELKIPVQETYGYITKYLREKHSIPKSHTNDARCISKNPLAIPCDTCYYTKAIRHHNRQLHKATILKGGIRKANQAPYTVKGYRLWDKVFYHGSECFITGRRTSGYFALKKMDGTVVSNSASYKKLRLLEVATNYIAERR

SEQ ID NO: 10150 - protein, 401 aa, Anoxybacillus sp.
MVFVLDTNKCPLAPCHEAVARKLLKQGKAAIYKRFPFTIILKKSVDESENETTYRLKIDYGSRHTGLAILRGQEVVWLGQLDHRTDIKERIDKRRAFRRARRNRKTRYRKPRFLNRKRKEGWLPPSLESRVQNIQTWVSRLKKLCPIGHISYENAKFDTQLMRNPEISGIEYQQGTLQGYEVREYLLEKFGRKCCYCGKENVPLEVEHIIPKSRGGTDRIDNLCLACRDCNQRKGNQTAEEFGCPHIQKQVKESLKDTSIINATRWKVYEVLKQARLDVECGTGARTKMNRIRLGLPKTHYFDACCVGESTPNHLYFKTKEVLFINAKGRGSRSRTNLDRPPCRKKFGTIGRMKTNIVEISPCSWGHEVDVSMVRKSPKDRRTPVAWCTTECRSRVGKHAG

SEQ ID NO: 10151 - protein, 438 aa, Anoxybacillus sp.
VLDTNKRPLAPCHEAVARKLLKQGKAAIYRRFPFTIILKKSVDESEIKATYRLKIDYGSRHTGLAILRGQEVVWLGQLDHRTDIKERIDKRRAFRRARRNRKTRYRKPRFLNRKRKEGWLPSSLESRVQNIQTWVNRLKKLCPIGYISYENTKFDTQLMRNPEINGVEYQQGTLQGYEVREYLLEKFGRKCCYCGKENVPLEVEHIIPKSRGGTDRVDNLCLACHDCNQRKGSKTAEEFGYPHIQKQVKESLKDASAINSTRWKAYEVLKQTGLDVECGTGARTKMNRIRLDLPKTHYFDACCVGESTTNHLYFKTKEVLFIKAKGRGSRSRTNLDRYGFPRGYLARQKFFFGFQTGDMVKAVVPRGKYQGVWFGEVACRKTGSFDIKGKDGKRIAQGINYRYVQVIQRFDGYAYGKGGRNLRKVQFLPVPKGRGFLA

SEQ ID NO: 10152 - protein, 279 aa, unidentified
  REGION 1..279: note = Human gut metagenome
VVVETAEFDLQLLKAIADGKPVPQGEDYQKGEMYGHYNVRQYVLWRDNYTCQCCGTHPSKKKEVRLHVHHLESRKVGGDAPDNQVTLCESCHEKLHKGLIAEKDFKKRKRRSTRDATFMGIMRKTLMQRLCSELPIPVVKTRGYITKATREKLLVLPKSHTNDALAIAQGKRGFNVGYLPEIAQIDKIYTIRPVRHHNRQLHKATILKGGIRKSNQTEKYVFGYRLFDKVQFNGQDCFIWGRRTTGIFTIKTINGKMIKDGISFKKLKPVEKSTSYLIA

SEQ ID NO: 10153 - protein, 511 aa, Ruminococcus sp.
MTTLEERLSKTEYIYVLGFDGKPQMPTRRKRHVLKLLKTGRARIAEDIPFTIRLTYRNAPVLQPVTLAEDPGRTNIGAAVLSPLGDLLFAAVIETRNKEIKKLMADRKKSRQASRRGERKARQRLAKRYGSMVKSGMIIRKLPMYAADKFVTCKFIRNTQARFCNRKRCPDWITPTVQHLVQTHLNIIRKISRYLPVTDIAFEVSRFAFMHMENPEAIGVDFQNGPLKGYGDVKEAIRTQQHGKCLMCKKPIAHFHHIVPRSRGGSDTIQNLAGLCTEFHTKVHTDTAFRKDFDEKKSGQLKKYGALSALNQAVPFICKKLLEEYGEEHVHFCRGLDTSLIRTALGFEKTKKNQMHEVDAYCIGLAALEVNEVETPAFDHTFQIRQFRRQDRSIIHHQTGRSYYQGKEKVAQNRKPGFEQKTTALSQWYEEQVRIHGEKEAEKLRSQLRVEKSCRHYNDMDRFLPGAVFLYEGKRYVLSGRITNGKYLRACGQGMKNFPAAECTFIRHNAG

SEQ ID NO: 10154 - protein, 470 aa, unidentified
  REGION 1..470: note = Human gut metagenome
MSVFVVGLNGCRLMPVSERKARLLLKGGKASVYRKVPFTIKLNYKTGNTVQPGYLGIDTGSQHIGVSVVQKDGTVLHKEEIGLRDSMSKRKLLESRASSRRGRRYRKTRYRHPKWKPKTKRIYNEKADRKGRHWKKQKNTFTSKRQAGWLPPSLQSKTDHHIQWIRKLLDLLPEGYRLSIELGRFDPARMKDPGIHGELYQKGPQYDYENVRAYVLARDGYTCRVCKKKGGKLHVHHILYRSRGASDNPKYMAAVCSKCHTTENHLPGGILYQWMQDQKKFTRCLRDATFMNILKKRLRKAFPDAVFTYGNITKADREKLELPKSHGNDATAIALVKTEVKSVKDEEPVIHIQQVRRKKRSLHEETPRKGRKGPNRTASRSDKNTKSVTVTKGSGEKKASMTACLFDRVELDGKKGWITGFTGTSCYVKDKEDNYICTSPKYKQVSISRLRILHHCGNWAIGAEKPLGKG

SEQ ID NO: 10155 - protein, 512 aa, unidentified
  REGION 1..512: note = Human gut metagenome
MSTIYVLNKDGKPLMPTTRGGHVRHLLKEQKARVVRAKPFTIQLLYETDDAVQLLYLGIDPGRTNIGVAVVKANGTAVFTAHLESRNKEILKLMQDRKKARRARRTNGRRHRRQRRAKANGTISKKCVKQDTAQSKNPSKRAKEIGVIKRRLPGHKKDLLCIGIKNKEAKYTNRARPEGWLTPTANQLLQTHINLVKKIQKFLPISDVVLEVNKFAFMRLDNPDIQKWQYQQGPLYQKGSLENAVSEMQEHHCLFCDKPIDHYHHVVPQSENGSNTIANIVGLCSEHHNLVHKDAAWQKKLAEEKVGLNKKYGALSVLNQIIPALTNKLSALFPKHFLVTTGKSTHDYRESHSVSKDHWLDAYCIACSVLPSNVCDSNINNHVPYELKQFRRHDRRALHKENMSRVYTLNGKAVATNRHKAIKQTTDSLEEFRQSHPGDVCKLKVKEHHPAYRNLNRNHPGSVFFVGEQAHVMQSIVASKDGKATRYKDTNVNKIAAGQCRFVAKNEGIVFT

SEQ ID NO: 10156 - protein, 289 aa, Parasutterella sp.; identical to SEQ ID NO: 7402

SEQ ID NO: 10157 - protein, 346 aa, unidentified; identical to SEQ ID NO: 5507
  REGION 1..346: note = Human gut metagenome

SEQ ID NO: 10158 - protein, 428 aa, unidentified
  REGION 1..428: note = Human gut metagenome
LKVFVLNMRGQPLMPCSPAKARHLLKAGKAVVRRRTPFTIQLRIATGETKQSVTLGVDAGAKHVGLSAATEKEEVFASEVELRQDITGLLAARLSLRRDRRHRKTRYRAPRFLNRVRSKHKGWLAPSVENRIQAHMSRIDAVCRLLPVTKIVIETASFDVQKIKNPTIEGTDYQQGDQLGFWNVREYVLFRDGHVCQHCHGRSRDKILNVHHLESRKTGGDAPNNLITLCETCHKAYHAGKIKLKVKRGQSFRAEAFMGIMRWTLLDRVRKAHPGLPVENTYGYLTKHTRITHGLPKTHCVDAYCIAGNLKAVRRGVYLHQRQMRKHNRQIHKFTVLSKRLEDGTKIGYRKLNQSPYLVHGFRLFDKVRCLGQIGFIFGRRSSGYFDVRRLDGVKLSPSISWRKLTLLEKRSTYLTELRKQDGASSPV

SEQ ID NO: 10159 - protein, 557 aa, Streptomyces sp.; identical to SEQ ID NO: 7397

SEQ ID NO: 10160 - protein, 507 aa, unidentified
  REGION 1..507: note = Human gut metagenome
MSEYIYVLGVDGKPQMPTKRRRHVRKLLNTGKARIAEHVPFTIQLLYDNEPILQPIVMAEDPGRTNIGTAAVGLKGQLYFAAVVETRNKEIRRLMDKRRACRRASRNGERKARQRRAKRFGTMLNAGRIMRKLPQYGENGFITCNIIRNTEARFCNRKHPKGWVTPTVEHLIRTHINLIHKMQRFLPITDVAIEINRFAFMLLDDPTIAGVDYQNGPLKGYKNVNDAIFDMQDGKCLLCGQPIEHYHHIVPRSKNGSNTLENIVGLCCHCHNAVHKDETMQKTLKDKKSGLIKKYAALSVLNQAIPLIYKRVVEEFGKEHVYYCTGRETAIVRKSLGYTKTQKNQLHEVDAYCMALLALCYTDAKAPSFEHVYQIKQFRRQNRANINSQRERSYYYEGKLVAKNRKDRIEQKDDSLKTWYQKMVQQYGEKEAERRRSVLQVKKSIRHYNTSGRVAPGAVFYCNGERHVLNGQITNGQYFKAVGDAKTNHPAKKCRIVKQNEGLVFIG

SEQ ID NO: 10161 - protein, 419 aa, Geobacillus sp.; identical to SEQ ID NO: 3993

SEQ ID NO: 10162 - protein, 431 aa, Klebsiella sp.; identical to SEQ ID NO: 2435

SEQ ID NO: 10163 - protein, 374 aa, unidentified
  REGION 1..374: note = Human gut metagenome
SKRANEIGVIKRHLPGCEKNVLCIGIKNKEAKFSNRTRPEGWLTPTANQLLQTHVNLVKKIQKFLPISDVVLEVNKFAFMRLDNPNVQKWQYQQGPLYQKASLEEAVSEMQEHHCLFCKNTIDHYHHVVPQHKNGSNTIGNIVGLCAKHHDLVHKDTSWQEKLAKKKTGLNKRYGALSVLNQIIPALTKELSSLFPKHFFATNGKSTYDYRAAHGVSKDHWLDAYCIAGSVLPNDACDNNINNRVPYELKQFRRHDRRALHKENMSRVYTLNGKSVATNRHKAIKQTTDSLEEFRQRQPNDVCKLKVKEHHPEYRNPKRNFPGCVFLVGKHTHVMQGTSGSHNGKADGYYDTNGNSYSSGKCKFVVKNEGIVFT

SEQ ID NO: 10164 - protein, 436 aa, unidentified
  REGION 1..436: note = Human metagenome
MTKTLTKQTTQACVLDQQGKPLMPTTRLGKVYRLLKTQKAHIVSYEPFTIQLDYEPDTHIIQPMTLGVDSGAIHSGYSVANEHREYYSAEVIARDNISKRLSDRRMYRQNRRSRKTRYRKPRFKNRKNKKKGWLPPSLEQKVAVQLNEIDHLHRHFPIKNIIVEVAEFDIQKIKDPNISGIEYQQGTLQGYNIRNYLLEKHERKCFYCGKSVSKFEVEHMLPKSKGGSNRIDNLTLSCHDCNQKKDTLTAEEFIKQTLPAKKATAKLKQLPNEKRLFEYMAHMNATRWALYNAIAKKYPNVEITYGYITKYNRIRADLPKAHHIDAKCITGFANVPSIDQTIVKVKMRRHNRQLHRATFSKEHVRKAACLPTTTFGFQLYDLVSFDNHHYYIKGRRSSGIFALASIEGLKDTNRSYKKLTQLAHTNAYLINRYVNA

SEQ ID NO: 10165 - protein, 465 aa, unidentified
  REGION 1..465: note = Human gut metagenome
MSTCVCVLSNSGERLMPTFRLGKVRRLLKDGKAKIVKHHPFTIQLLYDSKTNTQPIEICEDVGYNYIGISVKSQSHEYVSAQYDTLQDEKACHDSCRKLRRTRRNRLRYRKPRFDNRKRGEGWLAPSLRHKKELNVNVVKMYCAVMPITHATVEVGSFDTMLLQAIQKGESKPEGVDYQKGPRYNLATLREAVFYRDNYFCKVCGRKATEGAILHMHHMFYWKGRHGNSLDELLTVCEKCHTPANHQKSGKLYGFGENVKFADLSGAAFMNTVRWQIVNELYAAFGKDFVTITYGAMTKEKRIALQLEKTHSNDAYAMGEFHPNCRCTFEHYEKVRRNNRILEKFYDSRYIDIRTGEIATGKELFNGRINRNHKKDSENLHKYRGKRLYKGHRALVRKKVNFNPGDLVSLNGEVLVVHGTHTNKKGAVNVEFKTPAKNGRKSANLKKLKIVKAAGSIHPTWEKVS

SEQ ID NO: 10166 - protein, 426 aa, Parasutterella sp.; identical to SEQ ID NO: 3045

SEQ ID NO: 10167 - protein, 413 aa, unidentified; identical to SEQ ID NO: 2636
  REGION 1..413: note = Human gut metagenome

SEQ ID NO: 10168 - protein, 502 aa, unidentified; identical to SEQ ID NO: 2616
  REGION 1..502: note = Human gut metagenome

SEQ ID NO: 10169 - protein, 462 aa, unidentified
  REGION 1..462: note = Human gut metagenome
MSVLVIGQNGRTLMPTTTRKARILLKENKASVVCRHPFTIHLRYKTGCATQEGSIGIDTGSQYIGVGVTCGNKVILKDEHELRSSMEKRSLMETRATMRRGRRYRKVRYRKPKWRHHTKRMYFEKENRKGQHWRKVKTTTQSPRPKGWSPPSLQSKCDHHFRIIDRYLKYLPDSITKNLVIEVGRFDMAHMNDPTIHGEMYQRGPMYDTENLRAYIFARDGYKCACCKAKAGSIRKKDGTSVKLVAHHIQFRSRGATDNPKYMISVCDHCHTTKAHQLGGILYSWMETNKKVTRGLRDATFMNILRRRLFDGYPQAAFTYGNITAVDRKRLLLPKSHANDAVAISLFGKDVSVINATCQTLRYKQVRKSKRSLHEATPRKGRKEPNTKAIRNKKNTTHVNGFKLWDSVLVNGQKLFICGFTGSSAYLVDQDGHYVSPPGKTYKQWTLSKLSRLHPNGNWLMA

SEQ ID NO: 10170 - protein, 442 aa, unidentified
  REGION 1..442: note = Human gut metagenome
MVTVQQSTHHLPFGRVFIRRNLFMVYVISQDGKPLMPCSDPIARLLLKQGKAKVKKREPFTIKLTYETTNHTQGLTLGVDTGSGTIGTAVSKDNGDIVYMSEVVVRNDITDKMTQRAKYRRNRRNRKTRYRKARWLNRASSIKKDRFSPTMQSKLHSHVREIEYIQSILPVTEMVFETGQFDMQLMKNPSLANPKVRPWGYQKGANYGFENTKAMVLNRDNYTCQCCKGKHKDSKLEVHHIVFRSQGGSDEESNLITLCHTCHKDLHSGKINLKLSGKVKGNLKYATQMNSIRKQLFRLYPNAIETFGYVTKANRLHLGVDKEHYYDACTIATQGNAFNVKSNLYKKKCVSDGDFQKTKGIRSEQPIVTDKICGFRKFDKVRYFGNDYFIKGRMSTGYAILMDIDGNKIDFSTMPRGYKTPKLSNCKRITARSTVMTQVKVV

SEQ ID NO: 10171 - protein, 424 aa, unidentified; identical to SEQ ID NO: 8578
  REGION 1..424: note = Human gut metagenome

SEQ ID NO: 10172 - protein, 442 aa, unidentified; identical to SEQ ID NO: 3234
  REGION 1..442: note = Human gut metagenome

SEQ ID NO: 10173 - protein, 450 aa, Moorena sp.; identical to SEQ ID NO: 2935

SEQ ID NO: 10174 - protein, 428 aa, Enterococcus sp.; identical to SEQ ID NO: 4335

SEQ ID NO: 10175 - protein, 442 aa, Deinococcus sp.; identical to SEQ ID NO: 5259

SEQ ID NO: 10176 - protein, 418 aa, unidentified; identical to SEQ ID NO: 2710
  REGION 1..418: note = Human gut metagenome

SEQ ID NO: 10177 - protein, 430 aa, unidentified; identical to SEQ ID NO: 4817
  REGION 1..430: note = Human gut metagenome

SEQ ID NO: 10178 - protein, 431 aa, unidentified; identical to SEQ ID NO: 3801
  REGION 1..431: note = Human gut metagenome

SEQ ID NO: 10179 - protein, 431 aa, unidentified
  REGION 1..431: note = Marine sediment metagenome
METTMNRVFVLDGNKRPLMPCRPARARLLDAGKAAVYRLVPFTLVLKDREGGAVQPVELKAGPGSRTTGLALVAEFSRGREVMWAGELVHRGLPIRAALDKRRALRRGRRSRKTRYRAPRFDNRTRPAGWLPPSLQSRVGNTAAWGRKLQALAPLSAVAVETARFDTQAMEHLGITGVEYQQGTLAGYEVREYVLEHWDRKCAYCGTKNVPLEAEHIVPRSQGGSDRVSNLTLACVPCNRAKGNRPLAEFLAHDPDRLRRIQAHTKAPLKDAAAVNATRYVLGNALKTLGLPTSFWSRGRTKFNRGRQSHPKAHWVDAACVGESGVAVALDPAQKPLVIKAKDRGRRQGQRTDRFGFPRGKAGRVKQVRGFRTGDRVRLTRLSGKYAGVHVGRLAGLRADGRFDIKTPAGKITSSWRNFTLIQKNDGYDYA

SEQ ID NO: 10180 - protein, 490 aa, Moorena sp.
MLNRNSVFVLDTNKTPCDPTHPAKARKLLSEGKAAVFRKYPCTIILKEESKPTKKYRIKIDPGAKTTGLALLSDTNIVFCAELEHRGFQISEALTKRKTLRSSRRNWKTRYRKPRFLNRKRPKGWLAPSLMSRVHNIKSWVDKLIKYAPVDSISMELVRFDTQKIVNPEIQGTEYQRGELFGYEVRQYLLEKFNHTCVYCGTKEAALNLDHFHPKSRGGSDKVSNLVLSCVNCNQVKSNKLPEDFLSDRPKLLEIINKQRKQPLANAAAVNATRWKLKEVLESTGLPVEVGSGGLTKYNRKRLGISKYHWTDAACVGVSTPDTLNIRSYQPLLIKAMGRGSRQMVKPDKYGFPRTAPKLRQKSFYGFQTGDIVKAVVTKGKKIGTYVGRVAVRKTGSFNIKTKTETVQGISYKYCKHLHKSDGYTYNFGELVKQKTINFVQKVEEVLDTPVQLNLFDISELTTESKPKAKRIQRKKFDCLDGKQLSLFLL

SEQ ID NO: 10181 - protein, 414 aa, unidentified
  REGION 1..414: note = Human gut metagenome
MPCSPAKARLLLKEKKAIVVRRTPFTIQLTIATGESKQPVSLGVDAGYKHVGLSASTEKAELYASEVELRQDITDLLSARRALRQSRRNPKTRYRAPRFDNRIRTKRKGWLAPSVENRINAHLSRIETVIRLLPVTKISVETTSFDMQLLKNSDIAEKEYQESEQLGFWNVREYVLFRDGHVCQHCHGRSKDPVLNVHHLESRRTGGDSPGNLITLCETCHKALHRGDITLKAKRGKSFHAEAFMGIMRWEVHNRLRALHPGIEVSNTYGYRTKHARIANGIAKSHCADAFCIAGNLGAERLCEFFFQKQTRRNNRQIHTLSILKGGIRKRNQAPFEVKGFRLFDKVACQGEEGFIFGRRSSGFFDVRKLDGTRISAGISCKKLHLLEKRRTYLTEIRNEEALPPLPEGRGLRA

SEQ ID NO: 10182 - protein, 418 aa, unidentified; identical to SEQ ID NO: 4950
  REGION 1..418: note = Human gut metagenome

SEQ ID NO: 10183 - protein, 414 aa, unidentified
  REGION 1..414: note = Human gut metagenome
MPCSPAKARLLLKEKKAIVVRRTPFTIQLTIATGESKQPVSLGVDAGYKHVGLSASTEKAELYASEVELRQDITDLLSARRALRQSRRNRKTRYRAPRFDNRIRTKRKGWLAPSVENRINAHLSRIETVIRLLPVTKISVETTSFDMQLLKNSDIAGKEYQESEQLGFWNVREYVLFRDGHVCQHCHGRSKDPVLNVHHLESRRTGGDSPGNLITLCETCHKELHRGEITLKAKRGQSFRAETFMGIMRWEVLDRLKASHPKLEVQNTYGYRTKHARIVNGIAKSHCADAFCIAGNLGAERLGEFLFQKQTRRNNRQIHKLSILKGGIRKRNQVPFEVKGFRLFDKVACKGEEGFVFGRRSSGYFDVRKLDGTRISAGISYKKLRLLEKRQTYLTEIRKEEALPPLPEGRGLRA

SEQ ID NO: 10184 - protein, 419 aa, unidentified
  REGION 1..419: note = Human gut metagenome
MVYVQDIDGKPLMPTTRHGKVRRLLKDKKAVVVNLCPFTIKLMYVTSDYKQEIVLGVDAGTKHVGLSATTKSKELYASEVILRNDIINLLSTRRELRKARRNRIRYRKPRFNNRIKSKRQGWIAPSVCQKIDSHIKVVSFIHSILPVSRLIIETSQFDTQKIKNPDILGKEYQQGEQLGFWNVREYILFRDGHKCQHCKGKSKNPILNIHHIESRKTGGDSPSNLITLYETCHKEYHKGNIKLKVKRGTSLRDAAAMGIMKWKLFDKLKSLYPNVSMTFGYITKHNRIKHRIEKSHVSDAFVISENFKAKRLGYHFKMKLTRRHNRQIHKMKMQKGGIKRMNQSPFRVFGFRLFDKVMFYGEKRFIYARRLSGSFKIKDIDGENEKNISYKKLKYIGHGLTSIEVDQSYGYKANTHNNE

SEQ ID NO: 10185 - protein, 518 aa, unidentified; identical to SEQ ID NO: 3878
  REGION 1..518: note = Human gut metagenome

SEQ ID NO: 10186 - protein, 465 aa, unidentified
  REGION 1..465: note = Human gut metagenome
MSTCVCVHSNSGERLMPTFRLGKVRRLLKDGKAKIVKHHPFTIQLLYDSKTNTQPIEICEDVGYNYIGISVKSQSHEYVSAQYDTLQDEKACHDSCRKLRRTRRNRLRYRKPRFDNRKRGEGWLVPSLKHKKELNVNVVKMYCAVMPITHATVEVGSFDTMLVKAIQEGKAIPEGADYQKGPRYNLATLREAVFYRDNYVCKVCGRKATEGAILHMHHMFYWKGRHGNSLDELLTVCEKCHTPANHQKSGKLYGFGENVKFADLSGAAFMNTVRWQIVNELYATFGKDFVTVTYGAMTKEKRIALHLEKSHNNDAYAMGEFHPNCRCTFEHYEKVRRNNRILEKFYDSRYIDIHTGEIATGKELFNGRINRNHKKDSENLHKYRGKRLYKGHRALVRKKVNFNPGDLVSLNGEVLVVHGTHTNKKGAVNVEFKTPAKNGRKSANLKKLKIVKAAGSIHPAWEKVS

SEQ ID NO: 10187 - protein, 509 aa, unidentified
  REGION 1..509: note = Human gut metagenome
LKKEAAGHRQGKDCRPVRYGPPYRAGMPDGRRKPERKHMVAVVTSTGKPLMPTSAYRARKLLKKGRAVIFKYRPYFTIQLVDRADGEVQEVEYKSDTGSVHVGISVCTEKKELLSEQRDLLENEPEHHNDRKKNRRTRRNRKRYRKPRFDNRKKKPQEGHEKWLPPTLLHKMEVQVRLFREFCRVVPVTSACFEMGKFDTQALKAVSKGEPVPEGEGYQKGERYGRAAVFLRDGHTCRFCGRSVKDGAILHVHHVGYWKGDRTNRPANLASACEQCHTPANHGKNGILYGKEPEFKTLKDASYMTSVRWIMLDEIKKAAPGVQVSVTYGVTTKRKRQELHLPKSHVNDAFSMASFHPKKRSDTEYWKKIPRHDRVLQKFYDAIYLDTRDGSEKKGSELSNGRISRNHKKDSENLHQYRGHKVSKGHNSIRRGASSLKPGSIVMYKGEKMTVHGTHTRYVKGKDGKTAKKVNVQFTCPASDGKKSASLEKCTPVSRVYNTGWKRYWPDKK

SEQ ID NO: 10188 - protein, 430 aa, unidentified; identical to SEQ ID NO: 4504
  REGION 1..430: note = Human gut metagenome

SEQ ID NO: 10189 - protein, 472 aa, unidentified
  REGION 1..472: note = Human gut metagenome
VVGNNLLSIKPLINIGEGVIYSSICTGLSLQTYQKRKEVPYMVYVLDIDGQPLMPTTRHGKVRRLLNNHLAKVVKRCPFTIQLLYQSTKETQPVSLGVDAGSKHIGMAATTEKKVVYQEELSPRNDVVKLLSARRTLRRTRRNRKTRYRKPRFNNRAHSKHKGWLAPSVEVKIQEHITAIKRICQILPISEIHVETAEFDLQRLKAMDEGSPLPVGIDYQLGEQYDFYNTRQYVLHRDGYTCQCCGTHDNNIKLHVHHIESRQTGGDAPNNLIILCEHCHKALHEGKLELPKGKKRGKSYRDATFMGVMRKTLLERLKKEIDVPVEGTYGYITKYWRERAGLEKSHIHDAVCISKYPYAKPLDIYYLTKTVRHHNRQIHKSNFSKGGIRKRNQAPYLVKGFRLFDKVLYQGKEYFIFGRRATGYFDIRTLDGTKVNKGSISYKKLRIQDTAKAYLKEARAIPHMNEFTCVLA

SEQ ID NO: 10190 - protein, 465 aa, unidentified
  REGION 1..465: note = Human gut metagenome
MSTCVCVLSNSGERLMPTFRLGKVRRLLKDGKAKIVKHHPFTIQLLYDSKTNTQPIEICEDVGYNYIGISVKSESHEYVSAQYDTLQDEKEHHDDCRKYRRTRRNRLRYRKPRFDNRKRSEGWLAPSLEHKKQLNIRLIERYVSVIPITHATVEVGSFDTMLVKAIEEGKATPESADYQKGSRYNLATLREAVFYRDNYICKVCGRKATEGAILHMHHMFYWKGRHGNSLSELITVCEKCHTPANHQKGGKLYGFGEDIKFANLSGAAFMNTVRWQIVNELYVAFGKPFVTFTYGAMTKEKRIALHLEKSHNNDAFAMGSFHPADRCAFEHYEKVKRNNRILEKFYDSQYIDTRTGELTNGKSLFNGRISRSHKKDSENLHKYRGKRICKGHRALRRKKLALNPGDLVSLNGEILVVHGTHTKKNGSVNVEFKTPSRGGKKSASLKKLKIVKTSNLMHSAWTKVS

SEQ ID NO: 10191 - protein, 423 aa, Arthrospira sp.; identical to SEQ ID NO: 5339

SEQ ID NO: 10192 - protein, 419 aa, unidentified
  REGION 1..419: note = Human gut metagenome
MVYVISQDGKPLMPCSNSIARLLLKQSKAKVKKREPFTIKLTYETTNYTQDLTLGVDTGSGTIGTSVSKDNGDIIYMSEVVIRNDITGKMTQRAKYRRNRRNRKARYRKARWLNRANSIKNDRFSPTMQSKLHSHVKEIEYIKFILPITEMVFETGQFDTHLMKNPNLANPKIKHWGYQKGINYGFENTKAMVLNRDNYTCQYYKGKHKDSKLEVHHILFRSQGGSDEESNLITLCHTCHKDLHSGKINPKLSGKVKGNLKYATQMNSIRKQLFKLYPDAVETFGYVTKANRLLLGIDKEHYYDACTIATQGNIFTVKSNLYKKKCISDGDFQKTKGIRSEQPIITDKICGFRKFDKVRYFGNKYFIKGRMSTGYAVLMDIDGNKVDFSAMPKGYKTPKLSNCKRIMARSTEMIQTLVI

SEQ ID NO: 10193 - protein, 442 aa, unidentified
  REGION 1..442: note = Human gut metagenome
MSTTVFVLDKKHRPLMPCRPARARRLLRAGRARVVKRFPFVIRLVDRTVEQSEVQPVLIKLDPGSRETGAAVVRDDEKKRHHALAFFVIKHRGGAIRDALKARSAFRRRRRSQNFRCRSPRFLNRVKPKGWLPPSLRHRVETTLSFVRRMCRYLPVSGIAAELVKFDSQKLQTPEVSGIEYQQGTLFEYEVREYLLEKFGRKCVYCGAEGVPLNIDHVVPRAKGGSNRVSNLVLACVSCNQKKGARSLEDFLKGKPEVLARVRRELKTPLRDAAAVNATRWVLFNELKATGLPVETGSGALTKLNRHAFGVEKEHWLDALCVGRLNGAVTRKGLNVLEIRCMGRGSRQRTRLTKYGFPRGYLMRQKCVHGFATGDMVEANVPKGKKAGLWRGRVAVRVSGSFNIQTPKGVIQGVGWKHCRLISHNDGYGYAWLGHAPHSSPA

SEQ ID NO: 10194 - protein, 512 aa, unidentified
  REGION 1..512: note = Human gut metagenome
MSTVYVLNKDGKPLMPTTRGGHVRHLLKEQKARVVRTKPFTIQMLYETDDVVQLLYLGIDPGRTNIGVAVVKTDGTAVFTAHLETRNKEIPKLMKKRKNSRRARRTNGRRCRRQRRAKANGTISKKCVKQDTAQNGSVSKHAKKIGVIKRHLPGCEKEVLCIGIKNKEAKFSNRVRPEGWLTPTANQLLQTHINLVKKIQKFLPISDVVLEVNKFAFMQLDNPNIQKWQYQQGPLYQKANLEEAVSEMQEHHCLFCKKPIAHYHHVVPQSENGSDTIGNIVGLCTKHHDLVHKDTEWQKKLAKKKTGLNKKYGALSVLNQIIPALTKELSSLFPKHFFATNGKSTYDYRAAHAVSKDHWLDAYCIACSVLANDVCDSNINSHVPYELKQFRRHDRRALHKENMNRVYTLDGKKVATNRHKATEQTTDSLEEFRQCQQDDVCKLKVKEHYPEYRNPKRNFPGCVFLVGKHTHVMQGTSGSHNGKADGYYDTNGNSYSSGECKFVAKNEGIVFA

SEQ ID NO: 10195 - protein, 381 aa, Moorena sp.
MQNYVFVIDTNKQPLNPISPKKARRLLDKGKAAVFRMYPFTIILKTAINNPTISPCQIKIDPGSKVTGFALVQNNQILWGMELEHRGGLIKKKLESRKAVRRGRRNRNTRYRKPRFLNRRRPPGWLTPSLDHRILTIGTWVKRLIKFCPVNEIWVEKVKFDTQKMQNPEINGVEYQQGELAGYEVREYLLEKWGRECTYCGQQNVPLQIEHISPKSFGGSNRVSNLCLACEKCNQRKGNKPIEEFLKKKPSLLQKIKSKAKQPLKDAAAVNTTRNKLVKVLQKIKPVVTGTGAQTKYNRTKLGFPKEHWIDAACVGDIEALQLRTNQPLLVTCKGQGGRQKAALNKYGYPIRLGKSARLLSLRPLGTVRTSLQVHGATNSN

SEQ ID NO: 10196 - protein, 420 aa, unidentified
  REGION 1..420: note = Human gut metagenome
MVYVLNKNNNPLMPCSERKARLLLKQGKAVIYRKDVFIIKLTNGSYGYKQHITLGIDCGSKHIGISATTDNKELFSANAELRDDIVKLLSDRRMLRRNRRYRKTRYRKPRFNNRRIPEGWLAPSIRQKIDSHVRIVNLIHKLLPVKQVNVEVATFDIQKIKNPYIKGTEYQMGEQLDSYNVREYVLFRDNHTCQNCKGKSKDDVLQVHHIESRKTGGNAPNNLVTLCKTCHEKYHSGEITLNINRGRSFRDASAMSTMRWFLYEELKNKFSNVRITYGYITKYKRIKLGLSKEHYNDAYCIADNLNAKKMEKHHLIRFILRHSRILHVQTFSKGGKRRSASAPYWLNGGRSSKSGIKFTRFDKVKFNGVVCFISGSSNGSASLRDIEWNKVNGCKTVVTINKLALVSRRHGSMLFGELCG

SEQ ID NO: 10197 - protein, 411 aa, unidentified; identical to SEQ ID NO: 8372
  REGION 1..411: note = Human gut metagenome

SEQ ID NO: 10198 - protein, 423 aa, unidentified
  REGION 1..423: note = Bioreactor metagenome
LVYVISIDGKPLMPCKPVIARLLLKQHKAKVIKKCPFTIKLLYKTKTEYTQPLILGIDTGSSKIGSAVVDGNNNVLYLSQIEVRNDITDKMKQRAKYRRNRRNRKTRYRKPRWLNRKNSIKKDRFSPTMISKINSHLKEIKFVKSILPITNIILETATFDPHALKNPAVLYNKWLYQKGINYGFANTKAYVLNRDNYTCQYCKGKSKDSKLEVHHIIFRCYGGSDEPENLITLCKTCHDKLHAGKINLKRNGKVKGQLKHATQMNSIRQQLLRLLPEAVETFGFITKEHRQLMELPKEHYYDAVAIACLKNIENTGLIDVNFKTNNILLKKCIADGDFQQTKGIRSEQRIITGKIRGFRKFDKVKYQGKEYFIKGRMSTGYTILMDIAGNKIDLKPIPKFDKMKRIQARKSWIISQETIQNTY

SEQ ID NO: 10199 - protein, 456 aa, unidentified
  REGION 1..456: note = Human gut metagenome
MSTCVCVLSNSGERLMPTFRLGKVRHLLKDGKAKIVKHNPFTIQLLYDSKTNTQPIETCEDVGYNYIGISVKSESHEYVSAQYDTLQDEKEHHDDCRKYRRTRRNRLRYRKSRFDNRKRDKGWLAPSLEHKKQLNISLIERYVSVIPITHVTVEVGSFDTMLVKAIQEGKVIPEGADYQKGPRYNLATLREAVFYRDNYVCKVCGRKATEGAILHMHHMFYWKGRHGYQLDELVTVCEKCHTPANHQKGGKLYGFGKDKKFANLSGAAFMNAVRWQIVNALYATYGKEFVTITYGAMTKEKRIALQLEKTHNNDAYAMGDYHPARRCKFRHYQKRRRNNRVLEKFYDATYVDTRTGNKAKGKELFNGRISRNHKKDCENLHKYRSKKVSKGRRSIRRQHYAIQPYDTVRLEGKTYITSGCHNKGTRLLIPVNGKSKSVAISKVQVVCHAGAWIQII

SEQ ID NO: 10200 - protein, 390 aa, unidentified
  REGION 1..390: note = Human gut metagenome
LKVFVLNMRGRPLMPCSPAKARHLLKAGKAVVRRRTPFTIQLRIATGETKQSVTLGVDAGAKHVGLSAATEKEEVFASEVELRQDITGLLAARLSLRRERRQRKTRYRAPRFLNRVRSKHKGWLAPSVENRIQAHMSRIDAICGLLPVTKIVIETASFDIQKIKHPDVEGTDYQQGDQLGFWNVREYVLFRDGHVCQHCHGHAKDKILNVHHLESRQTGGDAPNNLITLCERCHKACHAGKIKLKVKRGQSFREEAFIGIMRWTLLDRVRKAHPGLPVENTYGYLTKNTRITLGLPKAHCVDAYCIAGNLKAVRRGVYLHQRQVRKHNRQIHKCTVLSKTLKDGTKIGYRKLNQTPHLVKNFRLFDKVRCLGQTGFIFGRRSSGYFDVRR

SEQ ID NO: 10201 - protein, 414 aa, unidentified
  REGION 1..414: note = Human gut metagenome
MPCSPAKARLLLKEKKAIVVRRTPFTIQLTIATGESKQPVSLGVDAGYKHVGLSASTEKAELYASEVELRQDVSDLLSARRALRQSRRSRNTRYRAPRFDNRIRTKRKGWLAPTVENRINVHLSRIETVLRLLPVTKITVETASFDTQLLKNPDIAGKEYQEGEQLGFWNVREYVLFRDGHVCQHCHGRSKDPVLNVHHLESRRTGGDSPGNLITLCETCHKALHRGEIKLKAKRGRSFRAETFMRIMRWGVLNRLKASHPKLEVHNTYGYRTKHARIANGIAKSHCADAFCIAGNFGAKRLGEFFFQKQTRRNNRQIHKLSILKGGIRKRNQAPFEVKGFRLFDKVACQGEEGFIFGRRSTGYFDVRKLDGTCISAGISYKKLHLLEKRRTYLTEIRKEEALPPPPEGRGLRA

SEQ ID NO: 10202 - protein, 416 aa, unidentified
  REGION 1..416: note = Human gut metagenome
MVYVLDKNGQPLMPTDRHRKVRLMLQSGQAKVIKRCPFTIQLNYDSGHQTQEISLGIDAGSKHIGVSTTTKIKVLYEVDVELRNDIVDLLSSRRELRRGRRNRKTRYRPARFDNRRREDGWLAPSIRQKIGTHLTVVENICKMLPISRIMVETASFDIQKIKNPDIQGAEYQQGDQLGFWNVREYVLFRDGHTCQCCKGKSKDKILNVHHIESRKTGGNAPNNLITLCETCHTGYHKGTVQLPKAIKRGMRFKDAAFMGIMRWAFYEALKQQYEPVGTPVHNTYGYITKHTRIAYDLPKEHYVDARCISGNPDAFPSGEYYYQKKVRCHNRQMHKLTILKGGIRKQNQATYLVKGYRLFDKVSYQGKGYFVFGRRQSGFFDIRTLSGEKVNKGSLSCKKLKFIATRTYYLTERRAV

SEQ ID NO: 10203 - protein, 454 aa, Moorena sp.
MKAKCVTSTTSFYNIVVRVAGRSPANITNRDALKMPNYVFVIDTNFQPLNPILPKKARRLLDKGKAAVFRMYPFTIILKTAVDNPTISPCKIKIDPGSKVTGFALVQNNQVIWGMELEHRGGLIKKKLESRKAVRHRRRNRNTRYRKPRFLNRRRPEGWLPPSLEHRILTIQTWVKRLIKFCPVNEIWVERVKFDTQKMPNPEISGVQYQQGELAGYEVREYLLEKWGRECTYCGKQSVPLQIEHIHPKSKGGSDRVSNLCLACEKCNQRKGNKPIEEFLKKKPKLLQKIKTKAKQPLKDAAAVNATRNKLVKVLRVIKPVVTGTGAQTKYNRTKSGFPKEHWIDAACVGDIEPLKLKTKQPLLVTCKGQGGRQKAALNKYGYPVRHNPLKPIKGWCSGDIAKNILTGEFGRVNPRSKSNSFNYTVPGKKAINLHVKNLVRVHQKDGYTYSFCL

SEQ ID NO: 10204 - protein, 461 aa, Moorena sp.
MIIRLNIIVEMKTEKRYGNSSVEYAEPVSIHRERNSNMVYVIDTDNKALSPCKNRTARWLLKHNKAKCVKREPFTIKLNHEGTREIPKLTLGMDTGSDKIGTAAVDDDNHIYYVSEVQVRNDIADKMKQRSKYRRSRRNRKTRYRKARWQNRKNSKRNDRFSPTMRSKIDSHIKEIRFARSILPIAEIIMETGTFDAHAMKNPEALKNKWLYQRGTNYGYANTRAYVLDRDGYICRQCSGKSKDSKLEVHHIQFRSEQGSDDVENLITLCKNCHDKVHGSTTELKLKGKAKGTLRHATQMNGIRVQLLKRVPSKETFGFVTKEHAWAMGLEKTHYNDATAIACLNNIERNGLVSYVLKTDKVLVKKCVSDGDYQQTKGVRSERRIQTGKMQGFRKFDKVRYKGTEYFIKGRMSTGYAILMDIEGNKQELKPIPKLDKMERIGARKGWIVQERRFAAIHPAT

SEQ ID NO: 10205 - protein, 458 aa, Halomonas sp.; identical to SEQ ID NO: 7411

SEQ ID NO: 10206 - protein, 426 aa, Methanosarcina sp.
MLVFVINQNKKPLMPCKPSKARKLLQAGKAKVVRNTPFTIKLLFRSSGYTQPVTAGMDTGSKVVGCAAIANGKVLYQSEIYLRENVSKKMEQRKMYRRTRRSRKTRYRPARFDNRGNSKKEGRLAPSIRSKLEAHFREKRFVESLLPVTEWKVELASFDIHKITNPEVSGIGYQEGDLKGFYNIKAYVLDRDGYTCQHCRGKSKDSRLHCHHIVFRSQKGTDAPENLITLCETCHKALHNGEFKLSGKKSKTKHATEVGIIKSQIRKSGWNFAETFGYETKYRREQVLKLLKTHYFDAVAICCRDEQKVEVEESVFLKRNVSKGDYQQRTGKRSEKKIHTGKLFNLRKFDLVKTSKGIGFVKGKRSSGFFAISDMFGNKISDSVNVKKICERLRARTSTLIQQSRTGKFTHSSPELKTQGFPAEGL

SEQ ID NO: 10207 - protein, 469 aa, unidentified
  REGION 1..469: note = Human oral metagenome
VKSAGGAGYAHRRGGHYAVRQKESNLMRVFVLDTNKRPLSPCHPARARQLLRKSKAAVFRRVPFTIILKYVPEGDPTPVRVKLDPGSKTTGIALVMKRRGTDEVVWAAELEHKGLEVKAKLDKRRAIRRARRARKTRYRPSQFLNRRRKEGWLPPSLKSRVNNVVTWMRRLCRWAYVNGIAMELVKFDTQAMQNPEVSGIEYQQGTLFGYEVREYLLATRFLSETLVPLGEKWERRCAYCGAENVPLEVDHIVPRSRGGSDRVSNLTLVCHTCNQRKGNRPVEEFLLWKPEVLNKVLSQAKTPLRDAAAVNTTRFVLLERLRATGLPVEVGTGGRTKFNRTTQGYPKAHWIDAACVGQSGSAVRLSPETNVLSIKAMGRGSRQMCRMDRYGFPRTGPKMARTVHEFRTGDLVRANVQNGRHAGVHTGYATVRASGSFRVGNADGVSWRHCRLLQRGDGYRYNVSNSAGV

SEQ ID NO: 10208 - protein, 426 aa, unidentified; identical to SEQ ID NO: 6306
  REGION 1..426: note = Human gut metagenome

SEQ ID NO: 10209 - protein, 431 aa, unidentified
  REGION 1..431: note = Human gut metagenome
MVYVLDINGQPLMPTARHGKVRRLLNSHLAKVVKRCPFTIQLLYQSTKEIQPVSLGVDAGSKHIGLAATTEQKVLYQEELTPRNDVVKLLSAKRACRHSRRNRKTRYRKPRFNNRVHSKHKGWLAPSVEVKIQEHITAIKNICKILPASEIHVETAEFDLQRLKAMEEGKTFPVGTDYQLGEQYDFYNTRQYVLHRDGYTCQCCGVHDKDVKLHVHHIESRQTGGNAPNNLITLCEHCHKALHEGKIKLPKGKKRGKSHRDAAFMGIMRNTLLERLKKEVSVPVLMTYGYITKYWREKADLEKSHINDAICISKHPYTKPLDTYYLTKVVRHHNRQIHKANFSKGGIRKRNQAPYLVKGFRLFDKVLYQGKEYFIFGRRTTGYFDIRTLDGTKANKGSVSYKKLRIQDTAKAYLKEVRAIPHMNKFTCDLA

SEQ ID NO: 10210 - protein, 405 aa, unidentified; identical to SEQ ID NO: 7624
  REGION 1..405: note = Human gut metagenome

SEQ ID NO: 10211 - protein, 544 aa, unidentified
  REGION 1..544: note = Human gut metagenome
MKQKKQKVMVYILNKKGKPLMPTTRCGHVRKLLDSKKAVVVSSNPFTIRLKYDTPNGVQDVFAGIDSGRENIGSGASNEDGDCLYLGELKTSNKSIKMKITERAGFRKERRRRDRQNKQRKARKDHTEIQNGNADICRTTISCKSVQISYPAAEKSVTHKIIRGKEGKFANRHRDEGWITPSARQLVQMHMNDLKSMCKILPISHVTLERVAFDFQKLENENIKAWEYGKGKLYGYDSPEEYIHDVQGGKCLICGKPHIDYLHHIIPRSKGGSNKVSNLAGLCYDCHYGPMGVHNCQDTQDRLPELKNEANKQYKVSLLNSVMPVLIEEMDKFCKANSIIFSICEGHDTAKVRDIYDLQKDHCVDGFAISLVGRNVKSVDVMPDRIHQKQRYKKKSKNIIKKRNCREYYDGKKLVAVNRHKGTDQKADSLEEYMNTYAETHTADECKKHFESLTVKPARRTYTFHKEGRICPFHIGDKVRYEKKNKIKGNTKVETFICEGIRFPKDENKAKVEHNKTKSKKMKFCRVLEPGCTPYIDYRKLVLI

SEQ ID NO: 10212 - protein, 442 aa, unidentified; identical to SEQ ID NO: 3218
  REGION 1..442: note = Human gut metagenome

SEQ ID NO: 10213 - protein, 417 aa, Moorena sp.
MVYVISHTGKALMPTVRHGKVKHLLRKGRARVVRREPFTVQLLYDNTEYTQPITLGVDAGTTHVGLSATNESDELFAAEVTLRRDIPGLLTVRREARRTRRNRRTRYRAPHFNNRTKPDGWLAPSVEHAVQSHLSLIRKVHSFLPVTKTVIEVAQFDTQLLKNPDIQGEQYQQGEQMGFWNTREYVLFRDGHTCQHCHGKSGDKVLNVHHIESRQTGGDAPNNLITLCETCHKAYHRGAFQLKVRRGASLRDAALMSIMRWTVYNRAKEEFGNVRLAYGYITKNTRIRHGQEKSHAIDARCISGHPLASSSDTLWLMRQRRRHNRQIYKANTLKGGIRKKNQAPYLVKGFRLLDKVLYDGLECFIFGRRSSGSFDIRKFDGTRVNAGISYKKLKFKSISNSFIVSQLKRNVCVSSPA

SEQ ID NO: 10214 - protein, 431 aa, unidentified
  REGION 1..431: note = Human gut metagenome
MPNKVYVINKHGRPLMPCSPAKARHLLDEGKAKVKKRTPFTIQLVYGSSGYTQEVILGVDAGSKTIGMSASTTKEELLSAEVKPRNDVVDLLSTRREFRRAQRNRKTRYRKPRFDNRVRSKHKGWLAPSVEVKIQEHITAIRRVCGILPVSKVVIETAEFDLQMLKAIADGKPVPQGEDYQQGEMYGHYNVRQYVLWRDGYTCQCCGAHTTKKKEVRLHVHHLESRKVGGDAPDNQVTLCESCHEKLHKGLIAEKDFKKRKRKSTRDATFMGIMRKTLMQRLCSELPIPVIETRGYITKATREKLLVLPKSHTNDALAIAQGKQGFNVGYLPEIAQIDKIYTIRPVRHHNRQLYKATILKGGIRKSNQTKKYVFGYRLFDKVQFNEQDCFIWGRRTTGIFTIKTINGKMIKDGISFKKLKLVEKSTSYLIA

SEQ ID NO: 10215 - protein, 415 aa, Bacillus sp.; identical to SEQ ID NO: 5517

SEQ ID NO: 10216 - protein, 414 aa, unidentified
  REGION 1..414: note = Human gut metagenome
MPCSPAKARLLLKEKKAIVVRRTPFTIQLTIATGETKQPVSLGVDAGYKHVGLSASTEKAELYASEVELRQDITDLLSARRALRQSRRNRKTRYRAPRFDNRIRTKRKGWLAPSVENRINAHLSRIEAVLRLLPVTKITVETASFDLQLLKNPDISGKEYQEGEQLGFWNIREYVLCRDGHVCQHCYGRSKDPVLNVHHLESRRTGGDSPGNLITLCETCHKALHRGEITLKAKRGQSFRAEAFMGIMRWEVLGRLKASHPELEVNNTYGYRTKHARIANDIAKSHCADAFCIAGNLGAERLGEFFFQKQTRRNNRQIHKLSILKGGIRKRNQAPFEVNGFRLFDKVACQGEEGFIFGRRSSGFFDVRKLDGTRISAGISYKKLHLLEKRRTYLTEIRKEEVLPPLPEGRGLRA

SEQ ID NO: 10217 - protein, 431 aa, unidentified
  REGION 1..431: note = metagenome
MPNKVYVINKHGRPLMPCSPAKARHLLDAGKAKVKKRTPFTIQLVYGSSGYTQEVILGVDAGSKTIGVSALTKKEELFAANVIPRNDVVDLLSTRREFRRARRNCKTRYRKPRFDNRVRSKHKGWLAPSVEVKIQEHITTIRRVYGILPVSKVVVETAEFDLQLLKAIADGKPVPQGEDYQKGEMYGHYNVRQYVLWRDDYTCQCCGAHATKKKEVRLHVHHLESRKVGGDAPDNQVTLCESCHEKLHKGLIAEKDFKKRKRRSTRDATFMGIMRKTLMQRLYSELPIPVIETRGYITKATREKLLVLPKSHTNDALAIAQGKRGFNVGYLPEIAQIDKIYTIRPVRHHNRQLHKATILKGGIRKSNQTEKYVFGYRLFDKVQFNGQDCFIFGRRTSGYFVVKTIDGKVIHNSASFKKLKLVERASNYLIA

SEQ ID NO: 10218 - protein, 346 aa, Moorena sp.; identical to SEQ ID NO: 2872

SEQ ID NO: 10219 - protein, 317 aa, unidentified
  REGION 1..317: note = Human gut metagenome
LSTRRELRKARRNRLRCRKPRFDNRVKSKRPGWIAPSVKYKVDAHIRVVENVCSILPISRIVIEVAQFDTQKINNPEISGKEYQEGDQLEFWNTREYVLARDGHKCQYCKGKSKDSILNVHHIESRKTGGDSPSNLITLCETCHKEYHKGNIDLKIRRGKSLRDAAVMGIMKWRLYEELKSRYDRVFMTFGYITKHNRIKYGIEKSHTSDAFVISKNINAKRIERQYLKRLIRRHNRQIHKMKILKGGKKKNNQAPFEVFGFRLFDKVLYNNKIFFVYGRRKSGSFNIRDFNGENSKDVSRKKFKLIRGKRHPIILK

SEQ ID NO: 10220 - protein, 508 aa, unidentified
  REGION 1..508: note = Marine metagenome
VLLQPQALEDAVADNQKGTDETGHITTHVVDAGVQHGRGETANAPVRVSQRHPSTASAVAGTGREPSAQPRVFVLSKDGKPLDPTTPARAKWLLKKSRAVVARRTPFTIRLKDKHSSECETQGVVIGIDPGSKTTGIAVWMENEPGVREAVFLSEVEHRGSTISKKLGQRSNYRRRRRSKNLRYRAPRFNNRTKPKGWLAPSLQHRVDTTVAWVERLSRWLPVQGVMMELVRFDIQKMEKSEISGVEYQQGELAGYEVREYLLNKWGRQCVYCDAQNVPLQVEHIRPKARGGSNRVSNLTLACGPCNQAKDARPVEEFVTDPKRLERILRNAKAPLRDAAAVSSTRWALFNALSEQHTVLTGTGGQTKYNRSRFGLAKTHALDALAVGRPDTVEAIHATVTATLAITCNGRGQYARTKPDKHGFPRLALTRQKAHFGFQTGDLVRAVVPTGKKAGTHTGRVAVRATGSFNITTAAGTVQGISHKHCTVLQRGDGYGYLWKEEAFSSRP

SEQ ID NO: 10221 - protein, 437 aa, Sulfobacillus sp.; identical to SEQ ID NO: 7950

SEQ ID NO: 10222 - protein, 493 aa, unidentified; identical to SEQ ID NO: 2644
  REGION 1..493: note = Human gut metagenome

SEQ ID NO: 10223 - protein, 406 aa, unidentified
  REGION 1..406: note = Human gut metagenome
MVYVQDIDGKPMMPTTRHGKGRRLLKANKATVVNLCPFTIQLTYKSTDHKQPVTLGIDAGAKHIGFSATTEKEELFACETILRTDIVDLLSTRSQNRRTRRSRLRYRKPKFNNRVFSKNKGWVAPSVKQRIDSHLNEVNEIHKILPITKIVIEAAQFDTHKMKNPNISGIDYQNGEQLGFWNVREYVLFRDGHKCSYCKGKSKDLILNIHHIESRKTGGDSPSNLITLCETCHKEYHKGNIDLKVRRGKSLCGAAIMGIMKWRLYDELKSRYSNVSMTFGYITKYNRIKYGIEKSHTSDAFVISKNFNAKRIEYQYLKRLVRRHNRQIHKMKILKGGKKKNNQAPFEVFGFRLFDKVLYNNEINFIYGRRKSVNFNIRDFNGENPKDVSYKKLKLIRGKRHPIILK

SEQ ID NO: 10224 - protein, 431 aa, unidentified
  REGION 1..431: note = Human gut metagenome
MPNKVYVINKHGRPLMPCSPAKARHLLDEGKAKIKKRTPFTIQLVYGSSGYTQEVILGVDAGSKTIGMSASTTKEELLSAEVKPRNDVVDLLSTRREFRRARRNRKTRYRKPRFDNRVRSRHKGWLAPSEEVKIQEHITAIKMVCRILPVSKVVVETAEFDLQLLKAIADGKPVPQGEDYQKGEMYGHYNVRQYVLWRDGYTCQCCGAHTTKKKEVRLHVHHLESRKTGGDAPGNLVTLCDSCHEKLHKGLITEKDLKKRKHRSTRDATFMGIMRKTLMQRLCSELPIPVAETRGYITKATREKLLVLPKSHTNDALAIAQGKHGFNVGYLPGIEQIDKIYTIRPVRHHNRQLHKATILKGGIRKSNQAEKYVFGYRLFDKVQFNGQDCFIWGRRTTGIFTIKTINGKMIKDGISFKKLKPVEKSTSYLIA

SEQ ID NO: 10225 - protein, 431 aa, Escherichia coli; identical to SEQ ID NO: 4170

SEQ ID NO: 10226 - protein, 411 aa, unidentified; identical to SEQ ID NO: 3917
  REGION 1..411: note = Human gut metagenome

SEQ ID NO: 10227 - protein, 439 aa, Scytonema sp.; identical to SEQ ID NO: 2714

SEQ ID NO: 10228 - protein, 416 aa, unidentified
  REGION 1..416: note = Human gut metagenome
MVYVLGQDGHPLMPTCRHGKVKRMLKSGMAKVVKKCPFTIQLQYESTTHTQKINLGIDAGSKTIGVSATTESKVLYESEVVLRNDIVELLSGRRALRRSRRNRKTRYRKPRFDNRRRPDGWLAPSIRQKIKTHVTVVENVMKILPVTKIIVETASFDIQKIKNPKIEGAEYQYGEQLDFWNVREYVLFRDGHTCQCCKGKSKDNILNVHHIESRKTGGNAPNNLITLCETCHKAYHKGVITLPKEIHRGMRFRDAAFMGIMRWAFYDRLKELYTPFGVTVVNTYGYITKNTRIEYGLPKEHYVDARCISGNPAAKPLGHYYFQKKVRCHNRQIHKNTILKGGYRKRNQVEYEVKGFRLYDQVLWKGQKCFIFGRRSTGRMDLRLLDGTHVNASVGYKNLKLLSMRKNYLIEQRKAG

SEQ ID NO: 10229 - protein, 417 aa, unidentified
  REGION 1..417: note = Human gut metagenome
MPCSPAKARLLLKERKAIVKRRTPFTIQLTIATGEAKQPVALGVDSGYKHIGLSATTEKAELYASEVELRQDITDLLSARLALRRSRRSRKTRYRAPRFDNRVASKREGWLAPSVENRIVAHMSRVEAVMRVLPVTAITVETAAFDTQLLKNPDITGAAYQQGEQLGFWNVREYVLFRDGHVCQHCSGKSKDPILNVHHIESRRTGGDAPNNLITLCETCHKAFHRGEIKLKVKRGKSFKAETFMGIMRWTLLERLKKAHPELSVRHTHGYLTKHKRISHGIAKSHCADAYCIAGNLGAMRLNSYLFQKQTRKHNRQIHKLSILKGGLRKKNQAPYEVKGFRLFDKVICKDEEAFIFGRRSSGSFDVRRLDGTRISAGISYKKLRLLEPRTTYLTEFRKEAALPPLHECRGFRAEFL

SEQ ID NO: 10230 - protein, 512 aa, unidentified; identical to SEQ ID NO: 7964
  REGION 1..512: note = Human gut metagenome

SEQ ID NO: 10231 - protein, 426 aa, unidentified; identical to SEQ ID NO: 3614
  REGION 1..426: note = Human gut metagenome

SEQ ID NO: 10232 - protein, 442 aa, unidentified
  REGION 1..442: note = Human gut metagenome
MVTVQQSTHHLPFGRVFIRRNLFMVYVISQDGKPLMPCSDPIARLLLKQGKAKVKKREPFTIKLTYETTNHTQGLTLGVDTGSGTIGTAVSKDNGDIVYMSEVVVRNDITDKMTQRAKYRRNRRNRKTRYRKARWLNRASSIKKDRFSPTMQSKLHSHVREIEYIQSILPVTEMVFETGQFDMQLMKNPSLANPKVRPWGYQKGANYGFENTKAMVLNRDNYTCQCCKGKHKDSKLEVHHIVFRSQGGSDEESNLLTLCHTCHKDLHSGKITPKLSGKVKGNLKYATQMNSIRKQLFRFYPNAIETFGYVTKVNRLHLGVAKEHYYDACTIATQGNAFNVKSNLYKKKCVSDGDFQKTKGIRSEQPIVTDKICGFRKFDKVRYFGNDYFIKGRMSTGYAILMDIDGNKIDFSTMPRGYKTPKLSNCKRITARSTVMTQVKVV

SEQ ID NO: 10233 - protein, 445 aa, unidentified
  REGION 1..445: note = Bioreactor metagenome
MVFVLDKHKKPLMPCTEKRARLLLQRGRAVIHKMEPFTIRLRDRTLEKSNVQLLRLKLDPGSKTTGVAIIDESKPDCSRVIFLGEIRHKAGIKKSLDNRRAIRHSRRNRKTRYRKARFDNRKRPEGWLPPSLQARVDQTLNTVTKLRKFLPIAAISTEHVKFDTQFMQNAEISGIEYQQGELFGYEVREYLLEKWGRKCAYCGKTDVPLEIEHIIPKSRGGSNRVSNLTLSCKLCNQKKGTMTAAEFGFPEVQAQAKKSLRDAAMMNATRWALFNKLKKIGLPVECGTGARTKKQRIEHGLPKTHYYDACCVGISTPKRLMIIPQYISVWTVIGRGTRRMCNTDKYGFPKGHRTSKKMYFGFQTGDIVKAAVPKGKYMGTWIGRVAVRASGYFDLKDGQGKRICQGVSYKHCRLIQRANGWQYEKYLRKEKSRIPPTAKAVGFLR

SEQ ID NO: 10234 - protein, 426 aa, unidentified; identical to SEQ ID NO: 3427
  REGION 1..426: note = Human gut metagenome

SEQ ID NO: 10235 - protein, 431 aa, unidentified
  REGION 1..431: note = Human gut metagenome
MDAWDIIVVLNKRGKPLMPCSPAKARLLLKEKKAIVKRRTPFTIQLTIATGESKQPVSLGVDAGYKHVGLSASTEKAELYASEVELRQDVSDLLSARRALRQSRRNRKTRYRAPRFDNRIRTKRKGWLAPSVENRINAHLSRIEAVLRLLPVTKITVETASFDLQLLKNPDISGKEYQEGEQLGFWNVREYVLFRDGHVCQHCHGRSKDPVLNVHHLESRRTGGDSPGNLITLCETCHKALHRGDITLKAKRGKSFRAEAFMGIMRWEVLNRLKASHPELEVNNTYGYRTKHARIANGIAKSHCADAFCIAGNLGAERLGEFFFQKQTRRNNRQIHKLSILKGGIRKRNQAPFEVNGFRLFDKVACQGEEGFIFGRRSSGFFDVRKLDGTRISAGISCKKLHLLEKRRTYLTEIRKEEALPPLPEGRGLRA

SEQ ID NO: 10236 - protein, 431 aa, unidentified
  REGION 1..431: note = Human gut metagenome
MPNKVYVINKHGRPLMPCSPAKARHLLDAGKAKVKKRTPFTIQLVYGSSGYTQEVILGVDAGSKTIGMSASTTKEELLSAEVKPRNDVVDLLSTRREFRRARRNRKTRYRKPRFDNRVRSKHKGWLAPSVEVKIQEHITSIKRVCRILPVSKVVIETAEFDLQLLKAIADGKPVPQGEDYQQGEMYGHYNVRQYVLWRDGYTCQCCGAHTTKKKEVRLHVHHLESRKVGGDAPDNQVTLCESCHEKLHKGLIAEKDFKKRKRKSTRDATFMGIMRKTLMQRLCSELPIPVIETRGYITKATREKLLVLPKSHTNDALAIAQGKQGFNVGYLPGIVQINKIYTIRPVRHHNRQLHKAAILTGGIRKSNQTEKYVFGYRLFDKVQFNGQDCFIWGRRTTGIFTIKTINGKMIKDGISFKKLKLVEKSTSYLIA

SEQ ID NO: 10237 - protein, 442 aa, unidentified; identical to SEQ ID NO: 2903
  REGION 1..442: note = Human gut metagenome

SEQ ID NO: 10238 - protein, 415 aa, unidentified; identical to SEQ ID NO: 2674
  REGION 1..415: note = Human gut metagenome

SEQ ID NO: 10239 - protein, 424 aa, Anabaena sp.
MSNYALVIDTNKQPLSPCHPSVARKLLDSGKAAVFRMYPFTIILNKSCSDVVNQAIELKIDPGSKTTGIALVQGEKIIFGAELSYRGSAIKASLESRRSLRRGRRNRHTRYRQARFLNRTRTKNWLAPSLQHRVETTLTWVNKLIKFAPLTRISQELVRFDLQQIDNPEISGIEYQQGTLFGYEVREYLLEKWKRKCAYCGIENVPLQVEHIHPKARGGTNRISNLCLACEKCNIKKGTQDVEKFLAKKPDLLKCILAQAKRPLKDAAAVNSTRWALFSRLKETGLPVSTGSGGQTKFNRTKFNFPKTHWLDAACVGQIGELEIFTNKPLLIKATGHGTRQMCRTDKFGFPSRYVPRIKFVKGFQTGDIVKAIVTTGKKIGKYIGRVAVRATGSFNISASKLVQGISYKCCKIVHRKDGYNYAF

SEQ ID NO: 10240 - protein, 442 aa, unidentified; identical to SEQ ID NO: 3234
  REGION 1..442: note = Human gut metagenome

SEQ ID NO: 10241 - protein, 431 aa, Moorena sp.; identical to SEQ ID NO: 8350

SEQ ID NO: 10242 - protein, 446 aa, Pseudomonas sp.
VAVYVLDKTGTPLMPCSEKRARLLLERGRARIHRQVPFVIRLVDRRQADSALQSLTLKFDPGSKFTGIALVRQKGQRVSVLSLMELAHRGAAIRQAMQQRAAFRRRRRGQNLRHRAPRFDNRTRPEGWLPPSLRHRLDTTLGWVGRMRNWAPISDLAVERVKFDMQAIQNPEISGVQYQQGELAGYEVREYLLEKWGRCCAYCDAENTPLEIEHIVPRSAGGSDRVPNLTLACRPCNQRKGNQPVEVFLKARPELLARIKAKAKAPLRDAAAVNATRNALFRGLLDTGLSVTTGTGAQTKYNRRRLDLPKTHALDAACVGEIRAIEHWHRPTLAIKATGRGDYQRTRLTAHGFPRGYLTRQKRHFGFQTGDQVRAEVPTGKKAGTHQGRVAVRKTGSFNIQTSDGVVQGVHHRHFTLIQRADGYAYSHIQTDSPQSQKEAARAEVR

SEQ ID NO: 10243 - protein, 499 aa, unidentified
  REGION 1..499: note = Human gut metagenome
MRYVYVLDVDGKPLMPTCRFGKVRRMLKSRQAKAVDTLPFTIQLTYKPRTRILQPVTLGQDPGRTNIGMAAVRFDGKELGRFHCITRNKEIPKLMADRMATRRASRRGERLARKRLARKLHTTVKHLEGRMLPGCSEPIAVKDIINTESRFNNRLRPEGWLTPTATQLLRTHINLFRKLSGILPVTDVAVELNKFAFMQLDNPEMKKREIDFCHGPLCGTGGLEAAVKEQQDGKCLLCGKESIGHYHHIVPRSRRGSNTIANIAGLCPKCHELVHKDADTAERLTEMKTGLTKKYGGTSVLNQIIPKLVETLADLFPGHFHVTNGWNTKEFREKHHLEKDHDVDAYCIACSHLKPEETLVETEPFEILQFRKHNRAIIHHQTERTYKLDGVTVAKNRKKRMEQKTDSLEDWYVDMAKEHGKTQADAMRSRLTVIKSTRYYNTPGRMMPGTVFLYEGKRYVMTGQITNGKYYRAYDQEKRNFPAVKVRILTKNTGLVFVA

SEQ ID NO: 10244 - protein, 426 aa, unidentified; identical to SEQ ID NO: 6376
  REGION 1..426: note = Filamentous sp.

SEQ ID NO: 10245 - protein, 472 aa, unidentified; identical to SEQ ID NO: 2965
  REGION 1..472: note = Human gut metagenome

SEQ ID NO: 10246 - protein, 427 aa, Nostoc sp.; identical to SEQ ID NO: 2670

SEQ ID NO: 10247 - protein, 427 aa, unidentified
  REGION 1..427: note = Human gut metagenome
MVYVISKSGKPLMPCENVVARLLLKDGKAKVKKRCPFTIQLTYDSDEYTQEVVLGQDTGAKHIGTACIGNDKVLYQSNIELRDDIKSTMDSRRRARRSRRNRKTRYRESRFLNRKNSTKLNRLPPSVKHKVQAHIDEIEFCRKILPISKIVLEVSQFDTHLMKNPSLILEKVKHWGYHKGFDYGWASRREAILNRDGYTCQICGKKHTRLEVHHIVYRSQSGTDDENNLITLCEDCHTGVHSGKIALDKKPKKMNLKYATHTNIIRSRLLKAYPDAIETFGFVTKINRENLNLPKDHFIDACVISSGGKEFTPNDTIYQKRRVSKGDYQLTKGVRGEQKIPVGKIQGFRKFDKVKYFGKEYFIKGKRSSGFATLMDIFNNKIDFSYMPRGHKTPKLSKCNRISARRSCLCISQKNHSCGEGANYDAI

SEQ ID NO: 10248 - protein, 432 aa, unidentified
  REGION 1..432: note = Human gut metagenome
MSSARYWHEEKFSERKVSEMTNYAFVLDANGKQLAPTKEQKAWFLIRRKRATLVSKYPMVIQLKKKIPDKEICKDEVRCGIDDGGLHAGIALVQKCQTRNKVVFKGVIEQRNDVKHLMDARRGFRRYHRYHKRYRPARFDNRKSSKRKERIAPSILQKRQAAVRVINQLNRWINITDYWLEDVAIDIRALTDGYKPYKWQYQKSNRLDENIRKAVILRDGCRCMECGKSNRRLEVHHIKPRRLKGSSTPGNLITLCTECHQKTEGVEELYMDRYFALLNSSDNRNLDYAQHVMIGKKWLREQLSNLGMLYLTNGGDTANKRIDWDIAKSHSNDAVCITDLRPDTCEIKEWVIKPMRRQSKAKTDNVLGIKHRDLVEYTFRNGETHIGYVTALYPEQNALNFQSPAKHCKKVNAGKCKVLWKYSKIYWLDNAS

SEQ ID NO: 10249 - protein, 412 aa, Shewanella sp.
MFVFVLNKNGKPLMPCKPQKARVLLRRGDAKVIKRTPFTIKLVGGSSGYKQPLVAGMDTGSKAIGCAVIGLGQVIYQSQVALRQDVSKKMEQRAMYRRNRRGRKCRYRPARWSNRASMRATGRLAPSLKSKLDSHLRERNFVESILPINEWKVETASFDIHKLTKPDVSGAGYQNGVQKGFYNVKAYVLHRDGYKCQSGRKGKHSNKLHVHHIQFRSNGGTDTPTNLTTLCETCHADLHANKFELKAKKSRTKHATEIGVIKSRLKKEWQFAETFGYETKFKREQVLRLPKEHYYDAVAICLEDGELVEPASSVYFKRHVAKGDYQQTKGARSEKRIPVGKLFGLKKHDFISTPQGSGFVKGKRSTGYFALETITGEKVHASANVKKNTIRVTARTTTLTQKMESASNSSSH

SEQ ID NO: 10250 - protein, 536 aa, unidentified; identical to SEQ ID NO: 2718
  REGION 1..536: note = Human gut metagenome

SEQ ID NO: 10251 - protein, 452 aa, unidentified
  REGION 1..452: note = Human gut metagenome
VCVLSNNGERLMPTFRLSKVRRLLKDGKAKIVKHHPFTIQLLYDSKTNTQPIEICEDVGYNYIGISAKSKSREYVSAQYDTLQDEKEHHDDCRKMRRSRRNRLRYRKPRFDNRKRDEGWLAPSLEHKKQLNISLIERYVSVIPITHATVEVGSFDTMLLQSIQKGEAKPEGADYQKGPRYNLATLREAVFYRDNYTCQVCKRKITDGAILHMHHMFYWKGRHGYQLDELVTACEKCHTPANHQKGGKLFGFGKDKKFANLTGAAFMNAIRWQIVNALYATFGKEFVTITYGAMTKEKRIALQLEKSHNNDAYAMGKLHPSRRCTFVHYEKIKRNNRVLEKFYDATYIDARTGNKAKGKELFNGRISRDHKKDSENLHKYRNKKVSRGRRSIRRQRYAIQPYDTVRLEGKTYITSGCHNKGTRLLIPVNGKSKSVAISKVQVVCHAGAWIQII

SEQ ID NO: 10252 - protein, 517 aa, Streptosporangium sp.; identical to SEQ ID NO: 6269

SEQ ID NO: 10253 - protein, 440 aa, Clostridium sp.
VPLMIYVLNKEGKPLMPTNRYAKIRVLLKSKKAVVVNSKPFTIKLLYDTKNFTQSITLGIDSGYLNIGFSAITKEKELIAGEVKLLKGMSERLKEKAMYRRQRRSRLHYRKPRFDNRKRSKDWLAPSIQHKYDSHIRFIDKLKKLLPITNIIIEVANFDTHKLKDPSIEGAAYQNGEQKDFFNLREYILHRDGHKCQNPNCKNKNAESILQVHHIGFWKQDRSDRPGNLITLCSKCHTPKNHKKNGFLYGWQPKVKSFKEATFMSMIRWRLVNTLDCNHTYGYITKHNRISLNLQKTHYNDAFCIAGGSSQSRVKPLIFEQIKRNSRSLEKFYDAKIIDIRTNTKVSGVELFNGRRTRNKNLNLENLRKYRGIKVSKGQRRIRTKRYFYQPGDLVKYEDKVYTVKGTQNKGKYIALKELKKVPKVELLAPYKFRKGLVCA

SEQ ID NO: 10254 - protein, 373 aa, Moorena sp.
MQNYVLVIDTEKQPLNPISPKKARRLLDKGKAAVFRMYPFTIILKAAIANPTISPCQIKIDPGSKVTGFALVQDDQVIWGMELEHRGGLIKKKLESRSAVRGGRRNRNTRYRKPRFLNRKRPEGWIAPSLEHRVLTIETWVRRLTKFCPVNEIWIEIVKFDTQKMQDPEINGVEYQQGELAGYEVREYLLEKWGRECAYCGKPNIPLQIEHIHPKSKGGSDSAKPTLRERVSNLCLACEKCNQRKGNRPIEEFLKKKPGLLQKIKNKALSPLRDAAAVNTTRNKVVKVLKEIKPVVTGTGAQTKYNRTKLGLPKQHWIDAACVGDVEALVLRTSQPLLVTCKGQGGRQKAALNKYGYPIRHNPLKPIKGWKAW

SEQ ID NO: 10255 - protein, 464 aa, Moorena sp.
MAVFVLDRQGRPLMPCTEKRARLLLERARARVHRVVPFVIRLTDRRAEDSFFQPRRLKLDPGSKTTGIALVREKVDGIAVLSLMDLVHRGRQIREALTQRRALRRRRRGANLRYRAPRFNNRTRAAGGLAPSLQHRVNSTMSWVRRVMRWAPVSALSMELVRFDMQAMQNPEISGLEYQQGELFGYEVREYLLEKWGRKCAYCDAEGVPLQIEHILARARGGSNRVSNLTLGCAPCNIGKGRRDVREFVKDEARLRRILSKAKAPLRDAAAVNSTRWALPNALKETERALETGSGGRTKWNRARLGIPKAHALDAVCVGEVKAVSGWQRPTLEVRCTGRGSYQRTRLTAQGFARGYLTRKKRVHGFQTGDRVRAIVPKGKKAGTHVGRVAVRASGSFNIQTPTGVVQGIAHRHCTTVQRADGYGYLTVPLTKERESGNGTKAWLAAQAALSHPGMNAEVSRAKR

SEQ ID NO: 10256 - protein, 428 aa, Enterococcus sp.; identical to SEQ ID NO: 4335

SEQ ID NO: 10257 - protein, 431 aa, Moorena sp.; identical to SEQ ID NO: 5265

SEQ ID NO: 10258 - protein, 420 aa, unidentified; identical to SEQ ID NO: 3884
  REGION 1..420: note = Human gut metagenome

SEQ ID NO: 10259 - protein, 453 aa, Anaerotruncus sp.
MSVAVLSSTGRKLMPTSNYRARKLLKSGRAAIECYRPIFTIRLTDRKEGETQPIEYACDTGYQHVGVSIKSEKHEFVHAQYDTLSNETERHNDRRKYRRKRRNRKRYRKPRFNNRSRKNQEMAPSLRHRRENQINLFESFCKVMPITSATFEMGKFDTQLLQAIADGKPLPEGKDYQQGLKYLFQTEREAVFSRDHYTCQVCGKSVKDGVILHTHHIGFWKGYRPNRISNLLTVCEHCHTAKNHKPGGALWGLEPKSTNLAAATYMSTVRWAIYRELVLKYPEIDIHIQYGAKTSVTRKSLHLAKTHANDAYCIGSLHPRHRTTELVYQKKRRNNRILAKFYDAKYIDIRDGAKKSGAVLSCGRTNRRESRRSDKNQRIYRGNKCSSGRTSVRKNRYAYQPGDTIVFHSQRFVVNGSHCKGARVILGTGKSVKATDLTCIKKEGGWRFLPAQA

SEQ ID NO: 10260 - protein, 413 aa, unidentified
  REGION 1..413: note = Human gut metagenome
LKVFVLNMRGRPLMPCSPARARHLLKAGKAVVRRRTPFTIQLRIATGETKQSVTLGVDAGAKHVGLSAATEKEEVFASEVELRQDITGLLAARLSLRRDRRHRKTRYRAPRFLNRVRSKHKGWLAPSVENRIQAHMSRIDAVCRLLPVTKIVIETASFDIQKIKDPSVEGTDYQQGDQLGFWNVREYVLFRDGHVCQHCHGHAKDKILNVHHLESRQTGGDAPNNLITLCETCHKACHAGKIKLKVKRGQSFRAEAFMGIMRWTLLDRVRKTHPKLPVENTYGYLTKHKRIALGLPKTHCADAFCIAGNLKALRRGDFLFQQQTRKHNRQIHKCSILKGGVRKLNQAPFLVKGFRLFDKVRIGGQIGFVFGRRVRGTFNIRRLDKTVIGTDINCKKLSLLETRKTFLTELRKE

SEQ ID NO: 10261 - protein, 430 aa, unidentified; identical to SEQ ID NO: 4817
  REGION 1..430: note = Human gut metagenome

SEQ ID NO: 10262 - protein, 490 aa, unidentified
  REGION 1..490: note = Human oral metagenome
MYVVYVLNRQGKPLMPTKRFGHVRRMLKTGKAKAISTKPFVIQLQYESTDFVQPLYGGTDPGRTNIGEAVLNNKGEVVYAAHVLTRNKEIPKLMADRATHRRASRRGERLRRKRRAKANGTMTCFPEGRKLPGYKDGVLKLKGIINTESRFNNRKRPTGWLTPTARQCVQTHLNMVQNICKILPVTDWTLEYNRFAFMQLEDGSVCGWDFQNGRLKGYASKEDYIYALQGGVCVCCGASIEHYHHIKPRHKGGSNTHENLVGLCSVCHAEIHIGKRNLDKIGKYKKYAGTSIVNIAIPFIWDGIVKMFGDKAHICEGQETAELRRANNIPKEHFADAVCIAGIGSGITPQYDDNQPFKLRQFRCHDRSRINAQVERTYLDGKTIVAKNRKPRFEQKGDALSDLQSKIAKEHGELAARRAVSKLVVKKSYRRYNVPERIKPSAVFMFNNKKYLLRGQLTNGMYYRAFGEGTKNFPSRNCEIVSSGCSLTYA

SEQ ID NO: 10263 - protein, 419 aa, unidentified; identical to SEQ ID NO: 6355
  REGION 1..419: note = Human gut metagenome

SEQ ID NO: 10264 - protein, 431 aa, unidentified
  REGION 1..431: note = Human gut metagenome
MPNKVYVINKHGRPLMPCSPAKARHLLDAGKAKVKKRTPFTIQLVYGSSGYTQEVILGVDAGSKTIGMSASTTKEELLSAEVKPRNDVVDLQSTRREFRRARRNRKTRYRKSRFDNRVRSKHKGWLAPSVEVKIQEHITSIKRACRILPVSKVVVETAEFDLQLLKAIADGKPVPQGEDYQKGEMYGHYNVRQYVLWRDNYTCQCCGAHATKKKEVRLHVHHLESRKVGGDAPDNQVTLCESCHEKLHKGLITAKDLKKRKRRSTRDATFMGIMRKTLMQRLCSELPIPVVKTRDYITKATREKLLVLPKSHTNDALAIAQGKQGFNVGYLPEILQIDKIYTIRPVRHHNRQLHKAAILKGGIRKSNQAGKYVFGYRLFDKVQFNEQDCFIWGRRTTGIFTIKTINGKMIKDGISFKKLKLVEKSTGYLIA

SEQ ID NO: 10265 - protein, 430 aa, unidentified
  REGION 1..430: note = Human gut metagenome
LSWSNYSNIQEVIETLVYVLNNQGNPLMPCKEAKARKLLKQNKAIIAKYEPFTIQLTFECENQTQEVYLGVDSGSKHIGISATTEKQVLYEADVELRNDIVDKLSSRREARRTRRNRLRYRPVRFNNRVRSKHKGCLAPSIEQKINSHIQVIKKIHQILPISKIIVETAQFDIQKIKNPDIEGKQYQQGEQMEFWNVREYVLFRDGHQCQCCKGKSKDNRLNVHHLESRKTGGNATNNLITLCETCHNDYHQGKTKLNIKRGKSFRDAAFMGIMRKTLLSRLRQIYPNVQETFGYITKNIRIENGLLKEHYIDARCISGNPLAKPLGYYLYQKCVRRQNRKMTKDNFIRGGVKKSNQLVGDVFGFGLFDTVEYQKKKYFVFGRRKGGNFDIRTLYREKNNNCSINYKKLKLIQKNNNILTERRLSISPRS

SEQ ID NO: 10266 - protein, 442 aa, unidentified; identical to SEQ ID NO: 2903
  REGION 1..442: note = Human gut metagenome

SEQ ID NO: 10267 - protein, 447 aa, unidentified
  REGION 1..447: note = Human gut metagenome
VPAYRIKHITKKEAPYMVYVLDIDGQPLMPTSRHRKVRKLLNSHLAKVVKRCPFTIQLLYQSTKETQPVSLGVDAGSRHIGLAATTEQKVVYQEELVPRNDVVKLLSARRALRSSRRSRKTRYRKPRFNNRVHSKHKGWLAPSVEVKIQEHITAIKRICQILPISDIHVETAEFDLQRLKAMEEGRPLPVGTDYQLGEQYDFYNTRQYVLHRDEYTCQCCGAHDNNVKLHVHHIESRQTGGDAPNNLITLCEHCHKLLHAGKTILPKGKKRGKSYRDATFMGIMRKTLLERLKKEIDVPVEGTYGYITKYWRERAGLEKSHINDAICISKHPYARPLETYYLTKAVRHHNRQIHKTKFSKGGIRKRNQAPYLVKGFRLFDKVLYQGESYFIFGRRITGYFDIRTLDGTKVNKGSTSYKKLRIQDTAEAYLTEVRAIPHMNEFTCVLA

SEQ ID NO: 10268 - protein, 419 aa, unidentified; identical to SEQ ID NO: 3670
  REGION 1..419: note = Human gut metagenome

SEQ ID NO: 10269 - protein, 426 aa, unidentified
  REGION 1..426: note = Human gut metagenome
MRIFVMNMRGDPLMPCTQKKARILLKEGKAVIYKYDPFTIQLTYATGETKQDCHIGIDTGSKHIGMAITSENKVLFKGEIELRQDVKSNIDTKHIYRRSRRNRKTRYRQPRFLNRKRSDKWLPPSLQNRVDHTFHWIDTFCSLISDPILHIEVGKFDTAKMINPEINGVDYQHGQTYGFFEERYFVFARDNYTCQCCGKSKDKILQTHHIIYRSNGGTDRVDNLITVCTDCHTSKNHQKGGILYKWQEQHKKVKQYKEPPFMNAIRKRIFARYPNAHTTYGSETTPHRKELGLEKTHYNDAITISGITNIKEDPKEWLLIKQFRKKKRSLHEATARKGRKEPNCFQKRNSKNTPFYRGFYLNDKVKVFGHGQIGYITGFTSGGAYVKNVDGEYITIPNKSYKQVSIKYLKLLSHNNNWQYVVKSAV

SEQ ID NO: 10270 - protein, 428 aa, unidentified
  REGION 1..428: note = Human gut metagenome
MVTVQQSTHHLPFGRVFIRRNLFMVYVISQDGKPLMPCSDPIARLLLKQGKAKVKKREPFTIKLTYETTNHTQGLTLGVDTGSGTIGTAVSKDNGDIVYMSEVVVRNDITDKMTQRAKYRRNRRNRKTRYRKARWLNRASSIKKDRFSPTMQSKLHSHVREIEYIQSILPVTEMVFETGQFDMQLMKNPSLANPKVRPWGYQKGANYGFENTKAMVLNRDNYTCQCCKGKHKDSKLEVHHIVFRSQGGSDEESNLLTLCHTCHKDLHSGKINPKLSGKVKGNLKYATQMNSIRKQLFRFYPNAIETFGYVTKANRLHLGVDKEHYYDACTIATQGNAFNVKSNLYKKKCVSDGDFQKTKGIRSEQPIVTDKICGFRKFDKVRYFGNDYFIKGRMSTGYAILMDIDGNKIDFSTMPRGYKTPKLSNCKR

SEQ ID NO: 10271 - protein, 442 aa, Sutterella wadsworthensis; identical to SEQ ID NO: 2834

SEQ ID NO: 10272 - protein, 420 aa, unidentified; identical to SEQ ID NO: 6128
  REGION 1..420: note = Human gut metagenome

SEQ ID NO: 10273 - protein, 443 aa, Anoxybacillus sp.
MVEENMTCFMQRKGENPMVFVLDTNKRPLAPCHEAVARKLLKQGKAAIYRRFPFTIILKKSVDESEIKATYRLKIDYGSRHTGLAILRGQEVVWLGQLDHRTDIKERIDKRRAFRRARRNRKTRYRKPRFLNRKRKEGWLPPSLESRVQNIQTWVNRLKKLCPIGYISYENTKFDTQLMRNPEISGIEYQQGTLQGYEVREYLLEKFGRKCCYCGKENVPLEVEHIIPKSRGGTDRVDNLCLACHDCNQRKGSKTAEEFGYPHIQKQVKESLKDASAINSTRWKAYEVLKQTGLDVECGTGARTKMNRIRLDLPKTHYFDACCVGESTPNHLYFKTKEVLFIKAKGRGSRSRTNLDRYGFPRGYLARQKFFFGFQTGDMVKAVVPRGKYQGVWFGEVACRKTGSFDIKGKDGKRIAQGINYRYVQVIQRFDGYAYGKGVAELA

SEQ ID NO: 10274 - protein, 431 aa, Escherichia sp.; identical to SEQ ID NO: 3801

SEQ ID NO: 10275 - protein, 333 aa, unidentified
  REGION 1..333: note = Human gut metagenome
MAMVYVQNKDGKPLMPTTRYCYVRLLLKENKARVVSTTPFTIQLNYDTPDITQDLILGIDPGRTNIGVAVVKEDGQCVFSAHLETRNKDVPLLMQKRAGFRKQHRTLDRRRKRQRRAKVAGTTVEGETIERLLPGYEKPVVCHYIRNKEARFNNRSRPAGWLTPTANHLLQTHINLIAKVAKFLPITKVVVELNRFAFMAMDNPNIRRWEYQQGPLYGLGSVEDAVYAQQDGRCLFCKKPIDHYHHVVPRHKGGSETLANRCGLCREHHALVHTDKVWADKLVTRKEGVNKKYHALSVLNQIIPHLMEYLGSETRYDVYATDGRSTKGFRVAK

SEQ ID NO: 10276 - protein, 306 aa, Moorena sp.
LAPSVEVKIQEHISAIQRVQKILPITEVHVETAEFDTQRLKAMEEGRPLPVGTDYQLGEQYDSYNVRQYVLKRDNYTCQCCGKQGDGVKFHVHHLETRQTGGNAPNNLITLCEDCHKAIHAGTKHLPAKKAKRGKTHKDAAFMGIMRKTLLARLHSLLDIPVTGTYGYITKYYRELYHIEKSHINDAIMNFSAVPDDTWYVSKAVRRHNRQIHKRKILKGGIRKRNQADHTVCGLRLFDLVAYDKHLYYVFGRRKTGYMDIRTLNGAKVNKGSVSIKRLKYVSASTVLVERRKTIPLMDKSMSFLA

SEQ ID NO: 10277 - protein, 465 aa, unidentified
  REGION 1..465: note = Human gut metagenome
MVIALDRHKKPLGFVIERRCRKLLEVRRAVFYRHYPAVIILKDVDARNIYKLPSYRIKIDPGAVHTGIAIVCNETNEVMYFLQIEHRGSEVKKALITRKQTRRNRRSRETRYRRCKFKNGGDFDSSRKNGWLPPSVKSTADNVIHWVEKLCRYINITECSFEAVRFDSQLMDNPEIGGEEYQQGTLSGYELREYLMEHFRHTCQYCGGESGDPVLEWEHKIPRSRGGSDSVKNASLACSCCNRDKGNRTLEEYLEDSKHISPKGKSEKALNEARISHISGILEKGTIYGSNRYSAWVNSTRRYIEKYLFLMFDDVECCSGGRTKYNRIKLKLPKDHHYDALCVGSVPKEGYTDRTNSYVLYVKATGRGTRFRGQCNSCGVITVKYKNNSKRKFGFQTGDIVQLNKPKGKDTGQYTGKVAVRSSGSFDLIRKGCKRITANYKYFRMMQYSDGYEYLGPLRPIPHSA

SEQ ID NO: 10278 - protein, 406 aa, unidentified; identical to SEQ ID NO: 3498
  REGION 1..406: note = Human gut metagenome

SEQ ID NO: 10279 - protein, 423 aa, unidentified; identical to SEQ ID NO: 3951
  REGION 1..423: note = Human gut metagenome

SEQ ID NO: 10280 - protein, 553 aa, Streptomyces sp.
MTTFPVGEQTHLAVLPQQPALESVGADTPGSRDETAHGHPAAVRGAGREHERGETDGHCTGVRRRHAKGVATAAHAAESWSGDAPPHDQSYAGGVGEGQVFVISKDGRPLMPCHPARARELLSRGRAVVARQVPFVIRLKDRTLAASEVDGVHLRIDPGSKGTGLALMDQKPETGGQGGTFTVRRGLISVELRHRGEQIRLCMRQRAGYRHRRRSADRRYRAPRPDNRSRPAGWLPPSLRHRVDTTYAVAARLCRYAPVTEIHVESTAFDVHSMSAGRPLTDVEYQQGTLAGLEVRAYLHSRWKNACAYCGATGVPLNVEHLSPRSRGGSDRISNLVLACVPCNRAKGALPVQIFLADRPDRLARILRQARTPLNDAAAMNATRWRLMESLRTLGRPVHTWSGARTQWNRETAGLHKTHTVDALCVGGMEPERGDVIVRLPDRVLVVKATGRGSYARTTPDRFGFPRLRRARVKRHFGYSTGDLVRAVVPAGKWAGAWTGRVSVRATGRHSLTTPEGRIDVSYRSLRLVQRGDGYGYDFRLEGGWPSPSRKTG

SEQ ID NO: 10281 - protein, 459 aa, unidentified; identical to SEQ ID NO: 3944
  REGION 1..459: note = metagenome

SEQ ID NO: 10282 - protein, 414 aa, unidentified
  REGION 1..414: note = Human gut metagenome
MPCSPAKARLLLKEKKAIVVRRTPFTIQLTIATGESKQPVSLGVDAGYKHVGLSASTEKAELYASEVELRQDVSDLLSARRTLRQSRRNRKTRYRAPRFDNRIRTKRKGWLAPSVENRINAHLSRIGAILRLLPVTKITVETASFDTQLLKNPDISGKEYQEGEQLGFWNVREYVLFRDGHACQHCHGRSKDPVLNVHHLESRRTGGDSPGNLLTLCETCHKALHRREIKLKTKRGQSFRAEAFMGIMRWEVLNRLKASHPELEVHNTYGYRTKHTRIVNGIDKSHCADAFCIAGNLGAKRLGEFFFQKQTRRNNRQIHKLSILKHGLRKRNQAPFEVKGFRLFDKVVCQGEEGFIFGRRSSGSFDVRKLDGTRISAGISYKKLRLLEKRRTYLKEIRKEEALPPLPEGRSLRA

SEQ ID NO: 10283 - protein, 442 aa, unidentified
  REGION 1..442: note = Human gut metagenome
MVTVQQSTHHLPFGRVFIRRNLFMVYVISQDGKPLMPCSDPIARLLLKQGKAKVKKRELFTIKLTYETTNYTQGLTLGVDTGSGTIGTAVSKDNGDIVYMSEVVVRNDITDKMTQRAKYRRNRRNRKTRYRKARWLNRASSIKKDRFSPTMQSKLHSHVREIEYIQSILPVTEVVFETGQFDMHLMKNPSLANPKVRPWGYQKGANYGFENTKAMVLNRDNYTCQCCKGKHKDSKLEVHHIVFRSQGGSDEESNLLTLCHTCHKDLHSGKINPKLSGKVKGNLKYATQMNSIRKQLFRFYPNAIETFGYVTKVNRLHLGVAKEHYYDACTIATQGNAFNVKSNLYKKKCVSDGDFQKTKGIRSEQPIVTDKICGFRKFDKVRYFGNDYFIKGRMSTGYAILMDIDGNKIDFSTMPRGYKTPKLSNCKRITARSTVMTQVKVV

SEQ ID NO: 10284 - protein, 415 aa, unidentified
  REGION 1..415: note = Human gut metagenome
MVYVVANDGQPLMPTERHGKVCRMLKSGMAKVVKKCPFTIQLQYESERNVQPVSLGVDAGSKHIGISATTKTKVLYESDVELRDDIVKLLATRRQLRLSRRSRKTRYRPVRFDNRKRKEGWLAPSIRQKIGSHLTVVANVCKILPINQIIVETASFDIQKIKDPEIQGIEYQQGEQMDFWNIREYVLFRDGHTCQCCKGRSKDKILNVHHIESRKTGGNAPNNLITLCETCHKGYHNGTVILPKNIKHGMQFKDAAFMGIMRWTFYNTLKEQYEPDIPVSMTYGYLTKNTRIEHGLPKEHYIDARCISGNPDAVSDGTYYYQKKVRCHNRQIHKQTILKDGVRKSNQAEYLVKGYRLFDKVRYQDREYFIFGRRKSGFFDIRTLSGEKVNKGSISVKKLTFVDTRKNYFIERRTV

SEQ ID NO: 10285 - protein, 455 aa, unidentified
  REGION 1..455: note = Human gut metagenome
VWLSKPLATLGKDFDSSLEENSFFLVVNLLGKERDIMYVYVINKHGEPLMPCSSRKARTLLNNKKACVVKRTPFTIKLLHGSAGYKQPITLGVDAGSKHIGLSVSTETHEIYREEFAPRNDVVDLLSTRREFRHARRNRKTRHRAPRFNNRVHSKHKGWLAPSVEVKIQEHITVIKHVCQIMPISLVRVETAEFDTQRLKAMIAGKPLPVGTDYQFGEMYDEYNVRQYVLKRDNYTCQCCGAHATKTKQVKLHVHHLESRKVGGNAPNNLITLCPICHKAIHEGKKALGKKKRGKPLRDAAFMGIMRKTLLARLREELSIPVQQTYGYITKMLREKNNLLKSHMNDALCIAKHPKAAPCENCYRSKAVRHHNRQIHKATILKGGIRKNNQAPYIVKGFRLWDKVLYNGQECFISGRRATGYFALKKLDGTVVTTGASYKKLRLLETTKNYLRERM

SEQ ID NO: 10286 - protein, 414 aa, unidentified
  REGION 1..414: note = Human gut metagenome
MPCSPAKARLLLKEKKAIVKRRTPFTIQLTIATGESKQPVTLGVDAGYKHVGLSASTEKAELYASEVELRQDVSDLLSARRALRQSRRNRKTRYRAPRFNNRLRTKRKGWLAPSVENRINAHLSRIEAVLRLLPVTKITVETASFDMQLLKNPDIAGKEYQEGEQLGFWNVREYVLFRDRHVCQHCYGRSKDPVLNVHHLESRRTGGDSPGNLITLCETCHKALHRGDITLKAKRGKSFRAEAFMGIMRWEVHNRLRALHPGIEVSNTYGYRTKHARIANGIAKSHCADAFCIAGNLGAERLCEFFFQKQTRRNHRQIHKLSILKGGIRKRNQAPFEVKGFRLFDRVACQGEESFIFGRRSSGFFDVRKLDGTRISAGISCKKLHLLEKRRTYLTEIRKEEALPPLPEGRGLRA

SEQ ID NO: 10287 - protein, 435 aa, unidentified; identical to SEQ ID NO: 4814
  REGION 1..435: note = Bioreactor metagenome

SEQ ID NO: 10288 - protein, 357 aa, Calothrix sp.; identical to SEQ ID NO: 4929

SEQ ID NO: 10289 - protein, 411 aa, unidentified
  REGION 1..411: note = Human gut metagenome
MVYVLDKNGQPLMPTDRHRKVRLMLQSGQAKVIKRCPFTIQLTYNTGHQAQEISLGIDAGSKHIGVSATTKTRVLYEADVELRNDIVDLLSSRRELRRGRRNRKTRYRPARFDNRRREDGWLAPSIRQKIGTHLTVVENICKILPISRITVETASFDIQKIKNPDIQGAEYQQGDQLGFWNIREYVLFRDNHTCQCCKGKSKDKILNVHHIESRKTGGNAPNNLITLCETCHTGYHKGTVQLPKAIKRGMRFKDAAFMGIMRWAFYEALKQQYEPVGTPVHNTYGYITKHTRIAYNLPKEHYVDARCISGNPEASSNGEYYYQKKVRCHNRQIHKLTVLKGGIRKQNQATYLVKGYRLFDKVSYQGKGYFVFGRRQSGFFDIRTLSGEKVNKGSLSCKKLKFIATDRKSVV

SEQ ID NO: 10290 - protein, 426 aa, Parasutterella sp.; identical to SEQ ID NO: 3045

SEQ ID NO: 10291 - protein, 442 aa, Anaerostipes sp.; identical to SEQ ID NO: 3161

SEQ ID NO: 10292 - protein, 413 aa, unidentified; identical to SEQ ID NO: 3220
  REGION 1..413: note = Human gut metagenome

SEQ ID NO: 10293 - protein, 413 aa, unidentified; identical to SEQ ID NO: 2636
  REGION 1..413: note = Human gut metagenome

SEQ ID NO: 10294 - protein, 406 aa, unidentified
  REGION 1..406: note = Human gut metagenome
VVYVQDIDGNPLMPTTRHGKVRRLLKANKATVVNLCPFTIRLTYATSGYKQEIVLGVDAGTKHVGLSATTKSKELYVSEIILRSDIVELLSSRRESRRRRRNRLRYRKPRFMNRIKTKKEEWVSPSVRQKIDSHLKIIGFVYSILPISKLIIEVAQFDIQKIKNPEISGKEYQEGDQLGFWNVREYVLARDGHKCQHCRGKSKDSILNIHHIESRKTGGNSPSNLITLCETCHKEFHKGKIKLKVKRSASLRDAAVMGIMKWRLYDKLKSLYPNVKMTFGYITKHDRIKHGIEKSHVSDAFVISRNFDSERLGYYYKRKLVRRHNRKIHKMKILKGGIRKRNQAPFKVFGFRLFDKVMFQGEEYFIYARRLSGQFNIRDINRENKKDVSCKKLRYIIHGLISIETG

SEQ ID NO: 10295 - protein, 492 aa, unidentified
  REGION 1..492: note = Ga0373625_0041279
VFTDLVPPSNGRTESVCFSQLRRVGNTVIHSSWLREIHTHLRILRKFVALWSVIKSSEGRNGVMNLKTFTNNLDASLTLKGERNLRVYVVNLRNEPLMPTTPRKAKILLKSGEASVFKRTPFTIQLLHASGETKQPITLGVDSGFQNVGLSVITEKEEVFSAEVKLRTDIVKLNSERRQYRRARRNRKTWYREPRFLNRKKDNGWLAPSIQHKLDSHIKLIDMVKKILPITKINIEVANFDIQKIKNPEIDGIGYQNGDQSGFWNIREYVLYRDGHICQHCKGKSGDKILEVHHINTRQTGGDRPDNLITLCGLCHEKVSQNKLQLKIRVSKGYKAESFMSMVRWRLVNIIREKGDIVSHTYGYITKGKRIALGVEKTHINDAFVISGGTNQIRLNGYLIQQVRKCNRKLYKGIRSHIKNTATRFIRGFQRFDKVLWKGVECFIFGRRTSGYFDIRRLDSTKLSQSVKYTELQLLETFRTFSLERRVASSPA

SEQ ID NO: 10296 - protein, 422 aa, Petrotoga sp.; identical to SEQ ID NO: 5403

SEQ ID NO: 10297 - protein, 442 aa, unidentified
  REGION 1..442: note = Human gut metagenome
MSTSVFVLDKKHRPLMPCRPARARRLLRAGRARVVKRFPFVIRLVDRTVEQSEVQPVLIKLDPGSRETGAAVVRDDGKKRHHALAFFVIEHRGGAIRDALKARSAFRRRRRSQNFRCRSPRFLNRVKPKGWLPPSLRHRVETTLSFVRRMCRYLPVSGIATELVKFDSQKLQNPEVSGVKYQQGTLFEYEVREYLLEKFGRKCVYCGAEGVPLNIDHVVPRAKGGSNRVSNLVLACVSCNQKKGARSLEDFLKGKPEVLARVRRELKTPLRDAAAVNATRWVLFNELKATGLPVETGSGALTKLNRHAFGVEKEHWLDALCVGRLNGAVTRKGLNVLEIRCMGRGSRQRTRLTKYGFPRGYLMRQKCVHGFATGDMVEANVPKGKKAGLWRGRVAVRVSGSFNIQTPKGVIQGVGWKHCRLISHNDGYGYAWLGHAPHSSPA

SEQ ID NO: 10298 - protein, 465 aa, unidentified; identical to SEQ ID NO: 6446
  REGION 1..465: note = gut metagenome

SEQ ID NO: 10299 - protein, 431 aa, unidentified; identical to SEQ ID NO: 3746
  REGION 1..431: note = Human gut metagenome

SEQ ID NO: 10300 - protein, 447 aa, unidentified
  REGION 1..447: note = Sediment metagenome
LVFVLDRRGEPLMPCTEKRARLLLRKGRAVVHRISPFTIRLKDRLAEESNLQPCRLKLDPGFRQTGVAVVREEQDPHGPVHHALHCAVIHHRQEEVRSDMLARRSARRRRRSSLRYRPPRFDNRRRPQRWLPPSLRSRVCNVVSIARLYTRLSPIAAIDVELAKFDTHKLQNPEVSGVSYQQGELWGYEVREYLLEKWGRRCAYCGATNVPLEIDHIVPVSRGGTDRVSNLTLACSACNQAKGNRTAEEFGHPEVQERTKQPLVGAAAMNATRYAMLSALRSFGLSVYSHTAARTKWNRSRLGLSKSHTVDALCVGEMAAVAGWEMPVLGIRAIGRGRRCRTNFDAHGLPRGYLPRTKRVFGFCTGDLVVAEVPSGMYAGRHMGTVLIRSSGRFDIKDLRGRRVAQGIRWQHCRLVQRFCGYSYGKEEAAPSSPRLKAGAFGAAEGW

SEQ ID NO: 10301 - protein, 449 aa, Allochromatium sp.
MAVFVLDKQKRPLMPCTEKRARLLLERGRAVVVRLAPFTIRLKDRIGGAVQPLRLKLDPGSRVTGLALVRESEICDPDTGVVERLEHGLWFGELAHRGQAIREALETRRHYRRARRARKTRYRAPRFLNRTRRAGWLPPSLQHRLDTTLNWVQRLRRLAPITALSQELVRFDTQALQNPEISGVEYQRGELAGYEVREYLLEKWHRTCAYCGATNVPLEIEHIVPRSNGGSDRVSNLTLACRDCNQRKGHRPIEDFLQRQPALLHKIQAQAKAPLKDAAAVNATRWALLNALKTTGLPVETGSGGRTKFNRTRLNLPKTHALDAACVGAVDQVRDWNRPVLSIRATGRGVYSRTRTFNNGFPRGYLMRQKRVHGFQTGDWVRAEVPKGKKAGVHVGRVAVRQTGSFNIQAQAGTVQGISYRHCRLLQRADGYGYSFQLKPEMEAARRAA

SEQ ID NO: 10302 - protein, 434 aa, Marinobacter sp.
MPCTERRAWLLLDRGRAVVVRAYPFTIRLKDRTGGITQPVRIKIDPGSKTTGIAVVRENGQKQHVLALMELAHRGRQISKSLEQRRAFRRRRRNQLRYRAPRFLNRTKPKGWLAPSLQHRVDTTKSLLNRLRSLVPVVSISQELVRFDTQKMANPEISGVEYQQGTLLGYEVREYLLEKWGRECAYCTDKDTPLQIEHIDPKANGGSNRISNLTLACRPCNQEKNRKSLVSFFATSKRLKNHQARLDRILKQCKKPLRDASAVNSTRWALYQTLKQTGLPVEVGTGGRTKFNRRRLNIPKTHALDAACVGEVEIVEGWDVPTLAIKATGRGSYKRTRLTKHGFPRGYLMRQKQVKGFQTGDMVRAVVPTGTKAGTWLGRVAVRKTGSFNIQTNSGAIQGISHRHCALTQRADGYGYHIQPNQRKEEGDRKNESR

SEQ ID NO: 10303 - protein, 435 aa, Desulfobacterium sp.
MRGEALMPTSPRKARVLIAHGKAKIDSYRPFTIQLCIATGESRQDLTLGVDAGYATIGFSVIDSTKELFACEIELLKGQVERNNKRRIYRRQRRSRLRYRKARFEKQNKPEGWLAPSIQHKLDTHIKFIHRLQSIMPITETIIEVAAFDIQKIKANGEIEGKEYQEGEQLGFWNLREYILHRDNHKCQHLDCKNKAKSPILEVHHIGFWKKDRTNRPGNLITLCTKCHTAPRHKKNGSLYGWEPKVKTFKPATFMSMIRWKLVNALQCDHTYGHITKHNRIRLDLPKTHFNDAFCIANGQHQTRAIPVFFQQKRKNNRCLEKFYDAKVLDIRTNKIVSGNDLNNGRRTRNKNLNGENLRKYRGLKKSKGRRQVRRQRYSIRPHDIVEFDGSIYKAVGVQNKGTYLKITNGVKTVVKNIKHVKTIFHQKTLMYVSR

SEQ ID NO: 10304 - protein, 408 aa, unidentified
  REGION 1..408: note = Human gut metagenome
MVYVLNISGKPLMPCKEAKARKLLKQNKAQIAKREPFTIQLLFQCENQTQDISLGVDTGSKHIGLSATTDKKEMYSADVELRNDIVDLLSTRRQNRRTRRNRLRYREPRFNNRMHSKNKGWLAPSIEQKIEKHLRVVDDVYKILPIKNIIVETASFDLQKIQNPEISGEEYQQGEQFSFWNVREYILWRDNHECQCCHGKSKDKILNVHHIESRKTGGDSPNNLVTLCEYCHTQYHKGNIKLHLKRKNSLRDSAFMGIMRWSFYNRLKDKYPNVSMTYGYITKNTRIRNGLPKEHYIDARCISGNPQSEPLGYYFYQKKVRCHNRQIHKANILKGGYKKRNQAEYIVKGFRLFDKVKYDGEEYFIFGRRNSGFFDIRKLDGTKVNNGSVSCKKLQLVDMRKTLLTVRR

SEQ ID NO: 10305 - protein, 414 aa, unidentified
  REGION 1..414: note = Human gut metagenome
MPCSPAKARLLLKEKKAIVVRRTPFTIQLTIATGEAKQPVSLGVDAGYKHVGLSASTEKAELYASEVELRQDVSDLLSARRALRQSRRNRKTRYRAPRFDNRIRTKRKGWLAPSVENRINAHLSRIEAVLRLLPVTKITVETASFDLQLLKNPDISGKEYQEGEQLGFGNIREYVLCRDGHVCQHCYGRSKDPVLNVHHLESRRTGGDSPGNLITLCETCHKALHRGEITLKTKRGQSFRAETFMGIMRWEVLDRLKASHPKLEVHNTYGYRTKHARIANGIAKSHCADAFCIAGNLGAERLCEFFFQKQTRRNNRQIHKLSILKGGIRKRNQAPFEVKGFRLFDKVACKGEEGFIFGRRSSGFFDVRKLDGTRISAGLSCKKLHLLEKRQTYLMEIRKEEAFPPLPEGRGLRA

SEQ ID NO: 10306 - protein, 420 aa, unidentified
  REGION 1..420: note = Human gut metagenome
MQYVYVLNKHGEPLMPCSPRKARLLLKQKKACVIKRTPFTVKLLHGSAGYKQPVTLGVDAGSKHIGISATTEKHELYREEATPRNDVVDLLSARRAFRRSRRNRKTRYRAPRFNNRVHSKHKGWLAPSVEVKIQEHITLIKHVFRILPVTLVRVETAEFDTQRLKAMLEGKPLPVGTDYQLGEMYDEYNVRQYVLKRDNYTCQCCGAHSTKTKGVKLHVHHIETRRTGGNAPNNLITLCKACHKALHAEKVTLDGKKRGKPLKDAAFMGIMRKTLMERLRKELKIPVQGTYGYITKYLREKNGIPKSHTNDARCISKNPLAIPCDTCYYTKAVRHHNRQLHKATILKGGIRKANQAPYIVKGYRLWDKVAYNGTECFITGRRTSGYFALKELDGTVVSNSISYKKLRLLEAVTNYIIERK

SEQ ID NO: 10307 - protein, 408 aa, unidentified; identical to SEQ ID NO: 5302
  REGION 1..408: note = Human gut metagenome

SEQ ID NO: 10308 - protein, 456 aa, unidentified
  REGION 1..456: note = Human gut metagenome
MSTCVCVLSNNGERLMPTIRLGRVRHLLKDGKAKIIKHHPFTIQLLYDSKTNTQPIEICEDVGYNYIGISVKSQSHEYVSAQYDTLQDEKACHDSCRKLRRTRRNRLRYRKPRFDNRKRGEGWLAPSLKHKKELNVNVVKMYCTVMPITHATVEVGSFDTMLVKAIQEGKVIPEGADYQKGPRYNLATLREAVFYRDNYVCKICGRKATEGAILHMHHMFYWKGRHGNSLNELLTVCEKCHTPANHQKSGKLYGFGEKIKFADLSGAAFMNTVRWQIVNELYVAFGKPFVTITYGAMTKEKRIALQLEKSHNNDAYAMGDFHPVHRCGFRHYQKRRRNNRVLEKFYDATYIDARTGNKAKGKELFNGRISRNHKKDSENLHKYRSEKVSKGRRSIRKRRYAIQPYDTVRLKGKTYITSGCHNKGTRLLIPVNGKSKSVTISKVQVVCHAGPWIQII

SEQ ID NO: 10309 - protein, 420 aa, unidentified; identical to SEQ ID NO: 9481
  REGION 1..420: note = Human gut metagenome

SEQ ID NO: 10310 - protein, 442 aa, unidentified; identical to SEQ ID NO: 8963
  REGION 1..442: note = Human gut metagenome

SEQ ID NO: 10311 - protein, 431 aa, unidentified; identical to SEQ ID NO: 4463
  REGION 1..431: note = Human gut metagenome

SEQ ID NO: 10312 - protein, 470 aa, unidentified; identical to SEQ ID NO: 2825
  REGION 1..470: note = Human gut metagenome

SEQ ID NO: 10313 - protein, 316 aa, Succinimonas sp.
MIYVLNSKGEPLMPTGRHGRVRHLLRDKKAFIVNYHPFTVQLTKERSNEIQEVALGIDTGYENVGLSATTKDKVLFECKAELRTDLVENLSTRRETRRTRRSRKLRYRKARFSNRKRTEKWLPPSIKSKLECHLTLVAKLHRFLPIGKIVVEVANFDIQKIKNPEIKGAEYQQGVQSDFWNVREYVLYRDNHKCRYCKGKSKDMVLNVHHLESRKTGGNSPDNLITLCETCHNMYHRGLISLDNVTKGSSYKPETFMSILRKYLIENLRKTYNNVSYTYGYETKSKRIANRLEKDHNVDARCISGNFSAKPDGIYL

SEQ ID NO: 10314 - protein, 415 aa, Eubacterium sp.; identical to SEQ ID NO: 6925

SEQ ID NO: 10315 - protein, 331 aa, unidentified
  REGION 1..331: note = Human gut metagenome
LLSTRRQYRRSRRNRKTRYRAPRFNNRVHSKHKGWLAPSVEVKIQEHITVIKRVCRILPIVLVRVETAEFDTQRMKAMLEGKPLPVGGDYQLGEMYDEYNVRQYVLKRDNYTCQCCGAHPTEKEPVRLHVHHLESRQTGGNAPNNLITLCVACHKALHAGKISLDGKKRGKPLRDAAFMGIMRNTLLARLETELSVPVQQTYGYITKMLREENHIEKSHTNDAHCIAKAPNAKPCDTMLRTRALRHHNRQIHKAKILKGGIRKRNQAPYLVKGFRLWDKVRYNGEECFITGRRTSGYFALKKYDGTVISNSVSYKKLTLLEAATNYITERS

SEQ ID NO: 10316 - protein, 509 aa, unidentified; identical to SEQ ID NO: 3483
  REGION 1..509: note = metagenome

SEQ ID NO: 10317 - protein, 263 aa, unidentified
  REGION 1..263: note = Human gut metagenome
MVYVQDINGKPMMPTTRHGKVRRLLKDKKAVVVNLCPFTIRLTYVTSDYKQEIVLGVDAGTKHVGLSATTKSKELYSSEVILRSDIVDLLSTRRELRKTRRNRLRYRKLRFDNRVKSKRSGWIAPSVKYKIDAHIRIVDNVCSILPISRIVIEVAQFDTQKIKNPNISGKEYQEGDQLGFWNVREYVLARDGHKCQYCKGKSKDKILNVHHIESRKTGGDSPSNLITLCETCHKEYHKGNIDLKIRRGKSRRSRNGNHEMEIV

SEQ ID NO: 10318 - protein, 413 aa, unidentified; identical to SEQ ID NO: 7541
  REGION 1..413: note = Human gut metagenome

SEQ ID NO: 10319 - protein, 420 aa, unidentified; identical to SEQ ID NO: 3089
  REGION 1..420: note = Human gut metagenome

SEQ ID NO: 10320 - protein, 420 aa, unidentified
  REGION 1..420: note = Human gut metagenome
MQYVYVLNKHGEPLMPCSPGKARLLLKQQKAHVIKRTPFTIKLLYGSTGYKQPITLGVDAGSKHVGLSASTEKRELYREEFTPRNDVVDLLSTRKQNRRSRRNRKTRYRPPRFDNRVHSKHKGWLAPSVEVKIQEHITVIKRICRILPITLVRVETAEFDTQRLKAMLEGKPLPVGTDYQLGEMYDEYNVRQYVLKRDNYTCKCCGAHTKVIKAVKLHVHHLESRKMGGNAPGNLITLCITCHDALHKGKVSLDNKKLGKPMRDAAFMGIMRRTLMSRLREELPITVQGTYGYITKMQREQNDIKKSHVNDARCISKHPLAEPCSVCYRTKAIRHHNRQTHKANFSKGGIRKRSQMPYVVEGYRLWDKVLYKGQECFVSGRRTSGSFTLKKLDGTRISKGVTFKKLRLLEPATNYLIERM

SEQ ID NO: 10321 - protein, 434 aa, Prevotella sp.; identical to SEQ ID NO: 9304

SEQ ID NO: 10322 - protein, 465 aa, unidentified; identical to SEQ ID NO: 8068
  REGION 1..465: note = Human gut metagenome

SEQ ID NO: 10323 - protein, 406 aa, unidentified; identical to SEQ ID NO: 10063
  REGION 1..406: note = Human gut metagenome

SEQ ID NO: 10324 - protein, 427 aa, Mastigocladus sp.; identical to SEQ ID NO: 3596

SEQ ID NO: 10325 - protein, 503 aa, Moorena sp.
MDTIYVLNRDGRPLMPMHSWGRVQRFLKSGRASVVSSLPFTIRLKKQIEDPELDRCILGIDPGRTNIGLCVTDGKGKPLFASVLETRNKEIPDLMRDRKQARQASRRGERKRRQRRAIHFDKSGETAMTEYWRVLPGTKKAVCQKHIRGQESKFMHRRRPKGWRTPTAEQLYRTHLNAVAKIEKLLPIADIVIEMNRFDFAKMENPGIRNWEYQRGRLFGFKNVQEAVIARQNGKCLLCGRPIEHVHHVRPRSQGGSDHIDNLAGLCCACHQKVHTDPAAKARLASEAKKRLKKYGALSVINQIMPALLDELAYRYLLWITTGWETAKTRRGCGLPEKEKDDGTHYIDAWCIAVSIMENRLYVPDSRDLDDVFHLMRQFRRHDRQKVEATKARSYYLDGRLVAKNRRPRTGQADGKDPKPALSEWRQGHEKDVARLTVRKSTRSYNDLKRVLPGAEVLCDEKRYVVKGKHNDRWIALDAADHTLEKAQSRFTLLHHNTGIVFV

SEQ ID NO: 10326 - protein, 491 aa, Pseudomonas sp.; identical to SEQ ID NO: 6873

SEQ ID NO: 10327 - protein, 447 aa, Pseudomonas sp.; identical to SEQ ID NO: 5615

SEQ ID NO: 10328 - protein, 451 aa, Ruminococcus sp.
MSVAVISKTGERLMPTSEYRARKLLKLGKAIKHSYHPFTIQLTERETGDIQPIELCMDTGYIHIGISAKSEKHEYLAEQIDTLTDERGRHDACRMYRRQRRSKKRYRQARFNNRKRDQGWIAPSLEHKKKIHIQAISRINNVMPLTDITLEMGNFDTQVLKAKEEGKPLPQGADYQHGERYGIATLREAVFSRDGYKCQCCGRTIKDGAILHIHHIKYRSQGGTNSMSNLSTVCDKCHTPKNHKPGGKLYNWRPKLSSFKGATFMTAIRWQLYNEVKALFHDIDIHITYGAATKEQRRELDIDKSHVNDAFVMGQFHPKHRIKAVLYKKKRRNNRCLEKFYDAKYIDSRDGKKRSGQELFNGRINRNHKKDSENLHQYRLQKVTAGKRTVRKQHYKIQPHDIVIYETRKRETAGCHCNGTRVMLLPDKKSISVKKVKICKYAGGYFKSAFN

SEQ ID NO: 10329 - protein, 442 aa, unidentified; identical to SEQ ID NO: 3161
  REGION 1..442: note = Human gut metagenome

SEQ ID NO: 10330 - protein, 458 aa, Moorena sp.; identical to SEQ ID NO: 4474

SEQ ID NO: 10331 - protein, 456 aa, unidentified
  REGION 1..456: note = Human gut metagenome
MSTCVCVLSNSGERLMPTFRLGKVRRLLKDGKAKIVKHHPFTIQLLYNSKTNTQPIEICEDVGYNYIGISVKSQSHEYVSAQYDTLQDEKACHDSCRKLRCSRRNRLRYRKPRFDNRKRSEGWLAPSLEHKKQLNIRLIERYVSVIPITHATVEVGSFDTMLLQAIQKGKSKPEGADYQKGPRYNLATLREAVLYRDNYTCQVCGRKIADGAILHMHHMFYWKGRHGYQLDELVTACEKCHTPANHQKGGKLFGFGEDKEFANLSGAAFMNAVRWQIVDALHATYGKEFVTITYGAMTKEKRIILGIEKTHNNDAYAMGNYHPAHRCEFGHYQKRCRNNRVLEKFYDATYIDTRTGNKAKGKELFNGRISRNHKKDSEDLHKYRSKKVSKGRRSIRRQRYAIQPYDTVRLESKTYITGGCHNKGTRLLIPANGKSKSVAISKVQVVCHAGAWIQII

SEQ ID NO: 10332 - protein, 507 aa, Anaerostipes sp.; identical to SEQ ID NO: 2841

SEQ ID NO: 10333 - protein, 470 aa, unidentified; identical to SEQ ID NO: 2925
  REGION 1..470: note = Human gut metagenome

SEQ ID NO: 10334 - protein, 421 aa, unidentified
  REGION 1..421: note = Human gut metagenome
MQYVYVLNMHGEPLMPCSPRKARLLLKEGKARVVKRTPFVIKLLHGSAGYKQPVALGVDAGSRHVGLSACTEGRELYKEELSPRNDVVELLSVRRQYRRSRRNRKTRYRAPRFNNRVHSKHKGWLAPSVEVKIQEHITVIKRICRILPVTLVRVETAEFDTQRLKAMLAGKPLPVGADYQLGEMYDEYNVRQYVLKRDNYTCQCCGAYPTEKKPVRLHVHHIESRHVGGNAPNNLITLCAVCHKALHEGKITLGNGKKRGKPLRNAAFMGIMRNTLLARLKDELNIPVKQTYGYITKLLREENHVEKSHTNDARCIAKAPNAKPCDTMFRTRALRHHNRQIHKAKILKGGTRKKNQAPYLVKGFRLWDKVRYNGEECFITGRRTSGYFAIKKYDGTVISNSASYKKLTLLEAATNYITERS

SEQ ID NO: 10335 - protein, 431 aa, unidentified
  REGION 1..431: note = Human gut metagenome
MPNKVYVINKHGRPLMPCSPAKARHLLDAGKAKVKKRTPFTIQLVYGSSGYTQEVILGVDAGSKTIGMSASTTKEELLSAEVKPRNDVVDLLSTRREFRRVRRNRKTRYRKPRFDNRVRSKHKEWLAPSVEVKIQEHITSIKRVCRILPVSKVVIETAEFDLQLLKAIADGKSVPQGEDYQKGEMYGHYNVRQYVLWRDNYTCQCCGAHATKKKEVRLHVHHLESRKVGGDAPDNQVTLCESCHEKLHKGLIAEKDFKKRKRKSTRDATFMGIMRKTLMQRLYSELPIPVVKTRGYITKATREKLLVLPKSHTNDALAIAQGKQGFNVGYLPGIEQIDKIYTIRPVRHHNRQLHKVTILKGGIRKSNQAEKYVFGYRLFDKVQFNGQDCFIWGRRTTGIFTIKTINGKMIKDGISFKKLKLVEKSTSYLIA

SEQ ID NO: 10336 - protein, 417 aa, unidentified
  REGION 1..417: note = Human gut metagenome
MLVYVLNRHGKPLMPCRPAKARILLKEKKAVVVKLEPFTIRLVFGSSGYRQKTFLGIDAGSKHIGVSVTTEQKEVFAAEVEVRNDIVKKLAGRREARRTRRNRLRYRKPRFNNRVHAKKKGWIAPSIQHKVETHLKLVEKICKILPIYRIVVEVASFDIQKIKNPAVQGVEYQQGEQLNFWNVREYVLFRDGHTCQCCKGKSKDKILNVHHIESRQIGGNAPNNLITLCETCHKNYHRGELELPTTIRRGMKFKDSAFMGIMRWAFYNRLKSYCEERQIACSLTYGYRTKHMRIVAGLPKTHCVDARCISGNPLAIPSDTYFYCKKVRRNNRQMYKANLLKGGIVKPNQAPFIVHGYRLFDKVRFKNKLYYIFSRRQRGDFDIRTLDGTKVNKGSVSWKKMMLVQKRTTWLIERRPA

SEQ ID NO: 10337 - protein, 439 aa, unidentified
  REGION 1..439: note = Ga0307928_10013462
LKNVNRVFVLNHDKTPLSPCHPARARQLLFKGKAAIFRKYPFTIILKNQKVNPKFQNTQVKIDPGSKTTGLAITLKGKNKGWILIWAANLEHRGQYIKRLLEKRKNVRRSRRHRKCRYRPSRFLNRTRNEDWLAPSILSRINNVIVWVEKLQEFCYLRSCIMEVARFNMQKMMNPEIRGVEYQQGTLQGYDVREYLLEKYHRTCIYCSKKNVPLEIEHVVPKSKGGSNRVSNLTLACKICNQRKGNQPIEFFLKRKPELLRKIKRSLKVSLKDAAAVNIIRKRLRKEVDYCIETKTSTGSITKFNRTKQYYKKDHWIDAACVGKRSGRNVSIPDNFQPLLIKAMGRGRRQMCLVDKYGFPRAKSKSRNKIIKGFQTGDIVKAIVTEGKKVGTYVGRIAVRNKGTCDISTKESLIQGISLRYCKLLQKIDGYSYKLLTGG

SEQ ID NO: 10338 - protein, 413 aa, unidentified; identical to SEQ ID NO: 2636
  REGION 1..413: note = Human gut metagenome

SEQ ID NO: 10339 - protein, 418 aa, Methanobrevibacter sp.
MFVYVLNMHGEPLMPCKPRKARKLLKEKKAKVVNRTPFTIQLLYGSSGYKQTVNLGVDAGSKYIGLSATTNKKELFKATVELRQDIPKLLESRKTQRKNRRSKLRYRPARFNNRGKKGKLAPSIQHKIDSHLTIIKRICNIIPIENIIVETAEFDMHKLKNPSVSGADYQHGDAEGFYNVKSAVLSRDNYTCQICGAKNTKLQVHHIRFRSDGGSNRMDNLVTLCKECHDKVHTGELKYTKKVKSFKHSSHMNIMRKKLIQSLKKEFRNVFETFGYLTKYTREKLGLVKSHCNDAFVISHNLDAEQSNVEYSYKKVRRHNRQIHKFKPSKGGKRQRNQSPYIVNGFRRYDKVMYNGKGCFITSKRSSGYFQLKTFDGTVISQGVSSKRLKLLEPIKGWLIDWRLAIPPRPKEVGVSLP

SEQ ID NO: 10340 - protein, 465 aa, unidentified
  REGION 1..465: note = Human gut metagenome
MSTCVCVLSNSDERLMPTIRLGKVRHLLKDGKAKIVKHHPFTIQLLYDSETNVQPIEICEDIGYNYIGISVKSESHEYVSAQYDTLQDEKEHHDDCRMHRRTRRNRLRYRKRRFDNRKRDKGWLAPSLGHKKQLNISLLEQYVSVIPITHATVEVGSFDTMLLQAIQKGEAKPEGVDYQKGPRYNLATLREAVFYRDDYTCQVCGRKITDGAILHMHHMFYWKGRHGNSLSELITVCEKCHTPANHQKGGKLYGFGEDIKFANLSGAAFMNTVRWQIVNVLYAAFGKPFVTFTYGAMTKEKRIALHLEKSHNNDAYAMGSFHPVNRCAFEHYEKVKRNNRILEKFYDSQYIDTRTGELTNGKSLFNGRISRSHKKDSENLHKYRGKRICKGHRALRRKKVALNPGDLVSLNGEILVVYGTHTKKNGSVNVEFKTPSRDGKKSASLKKLKIVKTSNLMHSAWTKVS

SEQ ID NO: 10341 - protein, 416 aa, Parasutterella sp.; identical to SEQ ID NO: 10114

SEQ ID NO: 10342 - protein, 442 aa, unidentified; identical to SEQ ID NO: 7396
  REGION 1..442: note = Human gut metagenome

SEQ ID NO: 10343 - protein, 462 aa, Scytonema sp.
MGVNQMITNSVFVLSKNGKILKPTTPVRARILQSQGKAKKLKLFPFTLILEKEVDENVELYLELRVDPGAKFTGISLVDLKKNEVVWAMELEHRGLAIKMELIKRAGVRRSRRSRKLRYRKKRFARKKPSGWLPPSLRHRLLTTETWIKRLLKVAPIKSIAIESVKFDLQKLENPDIESIEYQQGTLFGYTLREALLEHWGRECAYCGKTDVPLQIEHIHCRSRGGSERFSNFTLSCEKCNQKKGTKPVEQFLKNKPEILKKIKSHQKKSLSDAAAVNSTRKAIFEMAHQFGLPVISGNGASTKMIRIQSGLPKQHWLDSSCVGTDQIVKLRICQPLRVTCKGHGTRQVQRVNAKGFPAIASVKKNPITGKKEVKLVAKNQKYTHATTGDYVICFLNQDRKHVKAGIYRARVKTPTEKGVEVLISGHRIAVAQRHVKLIHCSDGYEYSFPRISDDLLRFQAI

SEQ ID NO: 10344 - protein, 415 aa, Bacillus sp.; identical to SEQ ID NO: 2431

SEQ ID NO: 10345 - protein, 493 aa, unidentified
  REGION 1..493: note = Human gut metagenome
MAVVYVISASGKPLMPTTRCGHVRGLLNEGKARVVEREPFTIQLKYETEEMTQPLYLGIDPGRTNVGAVVVREDGECVFTAQLTTRNKDVPKLMKARKQFRMAHRRLKRRCKRQRRAKGAGTLSQKGEFQRLLPGYEKPILCKGIRNKEARFNNRQHPVGWLTPTANHLLLTHLNMVKKLQKLLPITDVVLEVNRFAFMAMENSNIRRWQYQRGPLYGKGSVEDAVYAQQDGHCLFCGKPIAHYHHVVPQHKNGSDTLENRVGLCNEHHDLVHKDRAWEAKMKETKAGLNKKYHALSVLNQIIPALTEQLAELFPQHAFVTTGEDTADFREDHGIAKEHHLDAYCIACSVLAEPSTVAAPTAKPHRLMQFRRHDRQVCHKENIKRVYLLDGKAVATNRHKAIEQKDNSLEEFCKTHTQQEVSALTVKGHKPIYKEIQRFMPGGVFLFNGKVHTLQGSQGRYKGMPKYYIGTDGEKNHAKRCIFLQQNCGLRWA

SEQ ID NO: 10346 - protein, 424 aa, unidentified; identical to SEQ ID NO: 3232
  REGION 1..424: note = Human gut metagenome

SEQ ID NO: 10347 - protein, 396 aa, unidentified
  REGION 1..396: note = Human gut metagenome
VVRRTPFTIQLTIATGESKQPVSLGVDAGYKHVGLSASTEKAELYASEVELRKDITDLLSARRALRQSRRNRKTRYRAPRFDNRIRTKRKGWLAPSVENRINAHLSRIEAVLRLLPITKITVETASFDMQRLKNPDISGKEYQEGEQLGFWNVREYVLFRDGHVCRHCHGRSKDPVLNVHHLESRRTGSDSPDNLITLCETCHKALHRGEITLKAKRGQSFRAQAFMGIMRREVLNRLKASYPELKVHETYGYLTKHARIANGIVKSHGADAFCIAGNLGAERLGEFFFQKQTRRNNRQIHKLSILKGGIRKRNQAPFEAKGFRLFDKVACQGKEGFIFGRRSSGSFDVRKLDGTRISAGISCKKLRLLEKRRTYLTEIRKEEALPPLPEGRGLRA

SEQ ID NO: 10348 - protein, 426 aa, Symploca sp.
MFVLTVDKNRFPLNPTHPARARKFLQQGRAVILRRYPFTIMLKDVESTSDVQKYRLKLDPGSKTTGIAIVADERVIWAAQLHHRGYSIKQSLESRRLLRRGRRNRHTRYRQPRFDNRIRADGWLAPSLQHRVLSTMTWVKRLRQFCPISAISMELVRFDTQLMQNREVSGVLYQQGELAGYEIRQYLLEKWGRQCAYCQKKGVPLEVEHIHPRSKGGSDRVSNLTLACCKCNQKKGNKPIEQFLKKKPELLKGILTAVKSPLKDAAAVNSTRWALYGALKETGLPVEIGTGGRTKFNRTRQQLPKTHWLDAACVGSSTPESLKVLVAKPLTITATGHGTRQMCRTDKYGFPSRYVPRNKFVKGFQTGDIVSAIVTTGKKIGTYVGRIAVRSTGSFNISTANGLVQGISYKYCSRVQGKDGYQYCFS

SEQ ID NO: 10349 - protein, 398 aa, unidentified
  REGION 1..398: note = Human oral metagenome
MLVYVLKQNGQPFMPTERFGKVRRLLKEGKAKVVRREPFTIRLLYESETDVVQECYCGVDTGSKHIGVAVVSDDKVLYQSQTELRDDIKQKMDNRRMYRHNRRSRKTRYRKQRFLNRRNSIREDRLPPSVRHKVQAHIDEIEFCKKILPVSDLILEVSQFDTALMKNPSLMNEKIRHWGYQQGFNYGYSSRREAVLHRDNYTCQCCGKKNCRLEVHHIEFKSNGGTDDEENLITLCKECHDRVHAGTVVLDKKPKKMRLKHATHMSIIRSWLLKIYPDAIETFGFVTSENRNHLNLSKDHYIDACVIASGGLEFKPLDVVFYKRRMSKGNYRLTRKSFGKEIICKGKILGFKSFDKVEYFGVECFIGSRRNSGIATLVDIFRNTLDFSHLQKVSNYLK

SEQ ID NO: 10350 - protein, 513 aa, Micromonospora sp.; identical to SEQ ID NO: 8336

SEQ ID NO: 10351 - protein, 443 aa, unidentified
  REGION 1..443: note = Human metagenome
MTKTATQKVTQVCVLDQNGQPLMPTQRLGKVYRLLETKKAHIVAYEPFTIKLDYEPKTHIIQPLTLGVDSGAIHSGYSIANEHREYYSAEVIARDDISKNISDKRMYRRNRRSRKTRYRKPRFNNRKNKGKGWIPPSLEQKVDVQVNEIEHLHKYFPINNIIIEVAEFDIQKIENPDISGKEYQQGTLQGYNIRNYLLEKYNHKCFYCDKEVSTFEVEHMIPRARNGSNRIDNLTLSCHDCNQKKGTLTAEEFIEQTLSPQKAAQKLRQLPKTKQLLKYMAHMNATRWVLYNTIKETYDSVSITYGYITKHNRINACLPKAHHIDAKCITGFSTVPSFDVIVVKTKMRRHNRQLHRATFSKGHMRRAATLPRIVHDFQLYDIVLFNNHRYYIKSRRSSGSFTIVSLEGLKDEKRSYKKLTFLGHTNAYLTNHVNDEKDYMASK

SEQ ID NO: 10352 - protein, 419 aa, unidentified; identical to SEQ ID NO: 6355
  REGION 1..419: note = Human gut metagenome

SEQ ID NO: 10353 - protein, 415 aa, Bacillus sp.; identical to SEQ ID NO: 5390

SEQ ID NO: 10354 - protein, 426 aa, Anoxybacillus sp.
MVFVLDTNKCPLAPCHEAVARKLLKQGKAAIYKRYPFTIILKEIVDNFRPKTPYRLKIDHGSKHTGLAILRGQEVVWLGQLDHRTDIKERMDKRRAFRRARRNRKTRYRKPRFLNRRRKDGWLPPSLESRVQNIQTWVNRLKKLCPIGYISYENTKFDTQLMRNPEINGVEYQQGTLQGYEVREYLLEKFGRKCCYCGKENVPLEVEHIIPKSRGGTDRVDNLCLACHDCNQRKGSKTAEEFGYPHIQKQVKESLKDASAVNSTRWKVYEVLKQSGCEVECGTGARTKMNRIRLDLPKTHYFDACCVGESTPNHLYFKTKEVLFIRAKGRGSRSRTNLDRYGFPRGYLARQKFFFGFQTGDMVKAVIPRGKYQGVWFGEVSCRKTGSFDIKGKDGKRIAQGINYRYVQVIQRFDGYTYRREGMNIA

SEQ ID NO: 10355 - protein, 431 aa, unidentified
  REGION 1..431: note = gut metagenome
MPNKVYVINKHGRPLMPCSPAKARHLLDAGKAKVKKRTPFTIQLVYGSSGYTQEVILGVDAGSKTIGMSASTTKEELLSAEVKPRNDVVDLLSTRREFRRVRRNRKTRYRKPHFDNRVHSKHKGWLAPSVEVKIQEHITAIRRVCGILPVSKVVVETAEFDLQLLKAIEEGKPVPQGEDYQQGEMYGHYNVRQYVLWRDDYTCQCCGTHATKKKEVRLHVHHLESRKVGGDAPDNQVTLCESCHEKLHKGLITAKDFKKRKRRSTRDATFMGIMRKTLMQRLCSELPIPVVKTRDYITKATREKLLVLPKSHTNDALAIAQGKQGFNVGYLPEILQIDKIYTIRPVRHHNRQLHKAAILKGGIRKSNQAGKYVFGYRLFDKVQFNGQDCFVWRRRTTGIFTIKTINGKMIKDGISFKKLKLVEKSTGYLIA

SEQ ID NO: 10356 - protein, 414 aa, unidentified
  REGION 1..414: note = Human gut metagenome
MPCSPAKARLLLKEKKAIVVRRTPFTIQLTIATGETKQPVSLGVDAGYKHVGLSASTEKAELYASEVELRQDITDLLSARRALRQSRRNRKTRYRAPRFDNRIRTKRKEWFAPSVENRINAHLSRIEAVLRLLPVTKISVETASFDMQLLKNPDIAGKEYPEGEQLGFWNVREYVLFRDRHVCQHCYGRSKDPVLNVHHLESRRTGGDSPGNLITLCETCHKALHRGDITLKAKRGKSFRAEAFMGIMRWEVHNRLRALHPGIEVSNTYGYRTKHARIANGIAKSHCADAFCIAGNLGAERLCEFFFQKQTRRNNRQIHKLSILKGGIRKRNQAPFEVKGFRLFDKVACQGEEGFIFGRRSSGFFDVRKLDGTRISAGISCKKLHLLEKRRTYLTEIRKEEALPALPEGRGLRA

SEQ ID NO: 10357 - protein, 442 aa, unidentified
  REGION 1..442: note = Human gut metagenome
MSTSVFVLDKKHRPLMPCRPARARRLLRAGRARVVKRFPFVIRLVDRTVEQSEVQPVLIKLDPGSRETGAAVVRDDGKKRHHALAFFVIEHRGGAIRDALKARSAFRRRRRSQNLRCRSPRFLNRVKPKGWLPPSLRHRVETTLSFVRRMCRYLPVSGIATELVKFDSQKLQTPEVSGIEYQQGTLFEYEVREYLLEKFGRKCVYCGAEGVPLNIDHVVPRAKGGSNRVSNLVLACVSCNQKKGARSLEDFLKGKPEVLARVRRELKTPLRDAAAVNATRWVLFNELKATGLPVETGSGALTKFNRHAFGVEKEHWLDALCVGRLNGVVTRKGLNVLEIRCMGRGSRQRTRLTKYGFPRGYLMRQKCVHGFATGDMVEANVPKGKKAGLWRGRVAVRVSGSFNIQTPKGVIQGVGWKHCRLISHNDGYGYAWLGHAPHSSPA

SEQ ID NO: 10358 - protein, 450 aa, Clostridium sp.
MVYVIDINGNPLMPTNEAKARKLLKNKKSIVKELKPFTIQLNYKTSNYTQRITLGIDSGYLNIGFSAITDKKELIVGEVKLLQGVKDRIQEKAMYRRQRRSRLRYRKARWNNRTKSKHKGWLAPSLQHKLDNHIKFVDSLYNILPITKCVVEIANFDIQKIKNPDISGEEYQQGEMMGFWNLREYILHRDNHKCQNPNCKNKSKEQILEIHHIKYRSEGGSDSPNNLITLCSKCHTSPNHKKGKFLYDWCMNGKKVRGFKDATFMSMIRWYLINTLKEKHSNISITYGYITKNHRITHKIKKTHYNDAFAIAKGINQIRNNDIFNVSQTRRNNRSLEKFYDCKIIDVRTGNKVSGGDLNCGRRTRNKNHSTENLRIYRGEKISKGQRRIRKQKYFYQPNDLVRYEGKIYTVKGSQNGGKYVALKEIKKVPKVDLLTPYKFQKGFVYEIYK

SEQ ID NO: 10359 - protein, 522 aa, unidentified
  REGION 1..522: note = Human gut metagenome
MATDFIYVLDTDGTPLAPTHRHKHTRMLLKNGQAKVVCYRPYTIQLLYESEIPRVVPQLIAGQDPGRTNQGTNVIDRTGKSVYAAHIETRNKEIPTLMKNRSANRRASRNGERARRIRKAKLHHTTFQYGDHNRKLPKCNETVPIHYIINTEAKFCCRTRPDGWLTPTANQLLQTHISEVKQLMKILPITDFVIELNKFDFAKLKDPTLQKWQYGKGSLYQTNLKDLIDEEQDHHCLLCKNPIEHYHHIVHKADNGSDRVENMVGLCKKCHTRVHKNQKVEEKVLSKKEGLEKKFAGTSILNQIFKPYIIWLIKTFGEDHVFITDGKTTAKFRNDHNVPKTHELDAYCIACSILENPTINYDCVVFEEKQFRHHNRQLINSTRERKYYHVDRVQTTKTLKNGKQVVKTELKNKTLVATNRKKRMDQKTDSLREYHMKLRQKYDKQTVKKMISELVVVKSTRGYRDQNTIMPGAVFMYHGKHYVLSGTSNQGQYFRAVGQGKTNFPTKDCKIVRKNTGLVYLY

SEQ ID NO: 10360 - protein, 465 aa, unidentified; identical to SEQ ID NO: 3603
  REGION 1..465: note = Human gut metagenome

SEQ ID NO: 10361 - protein, 512 aa, unidentified; identical to SEQ ID NO: 3711
  REGION 1..512: note = Human gut metagenome

SEQ ID NO: 10362 - protein, 414 aa, unidentified
  REGION 1..414: note = Human gut metagenome
MPCSPAKARLLLKEKKAIVKRRTPFTIQLTIATGETKQPVSLGVDAGYKHVGLSASTEKAELYASEVELRQDVSDLLSARRALRQSRRNRKTRYRAPRFNNRLRTKRKGWLAPSVENRINAHLSRIEAVLRLLPVTKITVETASFDMQLLKNPDIAGKEYQEGEQLGFWNVREYVLFRDGHVCQHCYGRSKDPVLNVHHLESRRTGGDSPGNLITLCETCHKALHHGEITLKTKRGQSFRAEAFMGIMRWEVLNRLKASHPELEVNNTYGYRTKHARIANDIVKSHCVDAFCIAGNLGAERLGEFFFQKQTRRNNRQIHKLSILKHGLRKRNQAPFEIKGFRLFDKVVCKGEEGFIFGRRSSGYFDVRKLDGTHISAGISYKKLRLLEKRQTYLTEIRKEEALPPLPEGRGLRA

SEQ ID NO: 10363 - protein, 443 aa, unidentified
  REGION 1..443: note = Human gut metagenome
LLEVRRAVFYRHYPAVIILKDVDARNIYKLPSYRIKIDPGAVHTGIAIVCNETNEVMYFLQIEHRGSEVKKALITRKQTRRNRRSRETRYRRCKFKNGGDFDSSRKNGWLPPSVKSTADNVIHWVEKLCRYINITECSFEAVRFDSQLMDNPEIGGEEYQQGTLSGYELREYLMEHFRHTCQYCGGESGDPVLEWEHKIPRSRGGSDSVKNASLACSCCNRDKGNRTLEEYLEDSKHISPKGKSEKALNEARISHISGILEKGTIYGSNRYSAWVNSTRRYIEKYLFLMFDDVECCSGGRTKYNRIKLKLPKDHHYDALCVGSVPKEGYTDRTNSYVLYVKATGRGTRFRGQCNSCGVITVKYKNNSKRKFGFQTGDIVQLNKPKGKDTGQYTGKVAVRSSGSFDLIRKGCKRITANYKYFRMMQYSDGYEYLGPLRPIPHSA

SEQ ID NO: 10364 - protein, 418 aa, unidentified
  REGION 1..418: note = metagenome
MVYVLNIDGQPLMPTTRHGKVKHLLKDGKAKVVKRCPFTIKLLYETPNCTQDLTLGIDTGSGAIGTAVSTDDGEIVYMSEVVVRNDITDKMTQRAKYRRNRRSRKTRYRKARWLNRKNSIKKDRFSPTMVSKLHSHVKEIEYIKSILPITTMVFETGTFDTYLMKNPSLVNENVRHWGYQKGTNYGFENTKAMVLNRDNYTCQYCKGKHKDSKLEVHHIVFRSKHGSDEESNLITLCHTCHKALHSGKISLKLEGKVKGNLKYATQMNSIRKQLFRIYSEAIETFGYITKANRLKLGVDKEHFYDACVIATHGNKFSVRCNLYKKKCVSDGDFQQTKGVRSEQRIPTCKIQGFRKFDKVRYFGKEYFIKGRLSTGYAILMDIDGNKSDFSYMPKGFKTPKIINLKRLEARSSWIVIFK

SEQ ID NO: 10365 - protein, 395 aa, Thiodictyon sp.
VRVKLDPGSKTTGLALVREDQAGAVQQVLLLAEIQHRGPAIRKALLQRRGYRQRRRSANLRYRAPRFNNRTRSAGRLAPSLQHRVDTTLAWVHRFCRWAPVTALSMELVRFDLQLMQNPEISGVEYQQGTLAGYEVREYLLEKWGRKCAYCADEGVPLEIEHITPRSRGGADRVTNLTLACHPCNQAKGNRNAAEFGHPEIQSKAKQPLRDAAAVNSTRWSLFNALTATGLSVETGTGGRTKWNRTRLGMPKTHALDAAGVGAVKHVSGWAIPTLTIRCTGRGAYQRTRVTQDGFPRGYLMRHKQVRGFQTGDLVRATVPSGKKAGVHIGRVAVRATGRFNVQTPQGVVQGIGHRHCRIIQRGDGYGYSQVATTTLPSPAIPPRPEGRGFSRRSG

SEQ ID NO: 10366 - protein, 423 aa, unidentified
  REGION 1..423: note = Human gut metagenome
MVYVLNIDGQPLMPTDRHGKVRHLLKDGRAEVVKCCPFTIRLLYDSTHYTQDIVLGVDAGSKHIGLSGTTETKELYASDVELRNDIVDLISTRRQNRRSRRNRKIRYRKARFQNRVSDKKDWLAPSIRQKVDTHMTVVSRVCKILPVTKIIVETASFDIQKIKDPDISGTGYQHGEQLDFWNVREYVLFRDGHTCQCCKGKSKDPVLNVHHIESRKTGGDAPNNLITLCETCHKGYHSGAVQLPKAIHRGMRFKDAAFMGIMRWAFYNKLKEVYEPQDIEVSMTFGYLTKNTRIRHYLPKEHYIDARCISGHPEAIPNNEVFYQKKVRCHNRQIHKNTILKGGIRKRNQTGYLVKGFRLFDKVAYKGREYFIFGRRQSGFFDLRNLSGCKVNKGSLSYRKIGFLEPRQYYLCERRVMDTQGCA

SEQ ID NO: 10367 - protein, 440 aa, Calothrix sp.; identical to SEQ ID NO: 9761

SEQ ID NO: 10368 - protein, 453 aa, unidentified
  REGION 1..453: note = Human gut metagenome
MSVAVVSKTGMLLMPTSEYRARKLLKSKKAIIHGYHPFTIQLTERETGYIQPVELCMDTGYIHIGTSVKSEKHEYLGEQIDTLTDERQKHDACRMYRRQRRNRKRYRQPRFNNRERDDGWIAPSLEHKKTIHIQAISRICKVIPVTDITLEMGNFDTQVLKAREEGRPLPQGLDYQHGERYSVTTLREAVFLRDGYTCQCCGRTIKDGAILHAHHVVYRSQGGTNRISNLITVCDKCHTPANHKPGGKLYGWKPKVASFKGATYMTTIRWKLYNEVKALFLDIDIHITYGAETKERRRAFDITKSHVNDAFVMGQFHPKHRSKPVCYKKKRRNNRCLEKFYDAKYIDNRNGKTRTGQELFNGRISRNHKKDSENLHQYRRQKISAGKRTIRKQHYAIQPHDIVIFNGEKFETSGCHNNGTRVILLPQKKSVAIKKLNIYRYAGGYFKSAFNQK

SEQ ID NO: 10369 - protein, 428 aa, unidentified
  REGION 1..428: note = Human gut metagenome
LKVFVLNMRGQPLMPCSPAKARHLLKAGKAVVKRRTPFTIQLRIATGETKQSVTLGVDAGAKHVGLSAATEKEEVFASEVELRQDITGLLAARLSLRRDRRHRKTRYRAPRFLNRVRSKHKGWLAPSVENRIQAHMSRIDAVCRLLPVTKIVIETASFDIQKIKDPSVEGTDYQQGDQLGFWNVREYVLFRDGHVCQHCHGRSKDKILNVHHLESRQTGGDAPNNLITLCETCHKAYHAGKIKLKVKRGQSFRAEAFMGIMRWTLLDRVRKAHPGLPVENTYGYLTKHTRITHGLPKTHCVDAYCIAGNLKAVRRGVYLHQRQMRKHNRQIHKFTVLSKRLEDGTKIGYRKLNQSPYLVHGFRLFDKVRCLGQIGFIFGRRSSGYFDVRRLDGVKLSPSISWRKLTLLEKRSTYLTELRKQDGASSPV

SEQ ID NO: 10370 - protein, 423 aa, Arthrospira sp.
MSNHVFVLDTNRKPLTPCKPGVARSLLKAGKASVFRRYPFTIILNKEVDANPEPLELKLDPGSKVTGIALKQGNHIIFAAELQHRGQQIKEALLSRRQLRRSRRNRKTRYRPARFLNRTRSKGWLAPSLQHRVDTLMTWVHRFRRLAPVGRITQELVRFDLQLMENPEISGVEYQQGELQGYEVREYLLFKWGRTCAYCGAQNVPLEVEQIQPRSKGGSDRVSNLTMACHSCNQAKGNGDIRDFLSGQPDVLSRLLRQAKSPLKDAAAVNSTRWALFKALKATGLPVTTGTGGQTKFNRLRLNLPKAHWLDAACVGPVESLEVLTSKPLLILAKGHGTRQMCGTNKYGFPNRHRSRRQIHKGFQTGDMVTATVTAGKKIGSYLGRVLCRASGSFDITTASVRVAGISHKYCQPIHSTDGYAYA

SEQ ID NO: 10371 - protein, 406 aa, unidentified
  REGION 1..406: note = Human gut metagenome
MRGRPLMPCSPARARHLLKAGKAVVRRRTPFTIQLRIATGETKQSVTLGVDAGAKHVGLSAATEREEVFASEVELRQDITGLLAARLSLRRDRRHRKTRYRAPRFLNRVRSKHKGWLAPSVENRIQAHMSRIDAVCRLLPVTKIVIEAASFDVQKIKNPTIEGTDYQQGDQLGFWNVREYVLFRDGHVCQHCHGRSRDKILNVHHLESRKTGGDAPNNLITLCETCHKAYHAGKIKLKVKRGQSFRAEAFMGIMRWTLLDRVRKTHPKLPVENTYGYLTKHKRIALGLPKTHCADAFCIAGNLKALRRGDFLFQQQTRKHNRQIHRCSILKGGVRKLNQAPFLVKGFRLFDKVRIGGQIGFVFGRRVRGTFNIRRLDKTVIGTDINCKKLSLLETRKTFLTELRKE

SEQ ID NO: 10372 - protein, 408 aa, unidentified; identical to SEQ ID NO: 4142
  REGION 1..408: note = Human gut metagenome

SEQ ID NO: 10373 - protein, 539 aa, Marinobacter sp.
LKDGACRKHPASQVDQGKRTPIRYVYHRSLRPTVECFLSSALWKTGITLAKGKAPKVPVAAQAGAGDRHSRGETNRKIRVTRPVRAFIERKTMSVFVLDRRKQPLMPCSEKRARLLVGRGRAVVVRAYPFTIRLKDRTGGIIQPVRIKIDPGSKTTGIAVVRESGQKQHALALMELAHRGRQISKSLEQRRAFRRRRRNQLRYRAPRFLNRTKPRGWLAPSLQHRVDTTKNLVNRLRSLVPVEFISQELVRFDTQKMENPEVSGVEYQQGTLLGYEVREYLLEKWGRECAYCTGKDTPLQIEHIDPKANGGSNRISNLTLACRPCNQEKGRQPLADFFASSKRLKNHQARLDRILKQCKKPLRDASAVNSTRWALYQTLKKTGLKVEVGTGGRTKFNRRRLNIPKTHALDAACVGEVEIVEGWNVPTLAIKATGRGSYQRTRLTRYGFPRGYLMRQKKVQGFQTGDMVRAVVPTGTKAGTWLGRVAVRKTGSFNIQTSSGAIQGISHRHCVLTQRADGYGYHIQPNQPKEEGDREHESR

SEQ ID NO: 10374 - protein, 361 aa, Anoxybacillus sp.
  SITE 361: note = misc_feature - Xaa can be any naturally occurring amino acid
MVFVLDTNKRPLAPCHEAVARKLLKQGKAAIYRRFPFTIILKKSVDESEIKATYRLKIDYGSRHTGLAILRGQEVVWLGQLDHRTDIKERIDKRRAFRRARRNRKTRYRKPRFLNRKRKDGWLPPSLESRVQNIQTWVERLRKICPIEHISYENAKFDTQLMRNPEINGVEYQQGTLQGYEVREYLLEKFGRKCCYCGKENVPLEVEHIIPKSRGGTDRVDNLCLACHDCNQRKGSKTAEEFGYPHIQKQVKESLKDASAINSTRWKAYEVLKQTGLDVECGTGARTKMNRIRLDLPKTHYFDACCVGESTTNHLYFKTKEVLFIKAKGRGSRSRTNLDRYGFPRGYLARQKFFFGFQTGX

SEQ ID NO: 10375 - protein, 442 aa, unidentified; identical to SEQ ID NO: 2903
  REGION 1..442: note = Human gut metagenome

SEQ ID NO: 10376 - protein, 413 aa, unidentified; identical to SEQ ID NO: 2636
  REGION 1..413: note = Human gut metagenome

SEQ ID NO: 10377 - protein, 512 aa, unidentified
  REGION 1..512: note = Human gut metagenome
MPTVYVLNKDGKPLMPTTRCMHVRHLLKNGKARVVKSKPFTIQLLYETDDVVQPLYLGIDPGRTNIGVAVVKADGAAVFTAHLETRNKEVPKLMKKRKESRCARRTNGRRCRRQRRAKTNGTISKKCVKQTTAQNGSVSKRAKEIGVIKRHLPGCEKDVLCIGIKNKEAKFTNRARPEGWLTPTANQLLQTHINLVKKIQKFLPISDVVLEVNKFAFMQLDNPNIQKWQYQQGPLYQKGSLENAVSEMQEHHCLFCEKPIEHYHHVVPKSENGSNTIANIVGLCTEHHNLVHKDATWQKKLAKEKVGLVKKYSALSVLNQIISALTKEMNSLFPKHFFVTNGKSTYDYRTAHGVSKDHWLDAYCIACSVLPNDVCDSNINSHVPYELKQFRRHDRRVLHKANMSRVYTLNGKTVATNRHKAIKQTTDSLEEFRQSHPGDVCKLKVKEHHPAYRNLNRNYPGSVFLVDGQVHVMQGVSGSHNGKADGYYNTNGNAYPYYKCKFVVKNEGIVFA

SEQ ID NO: 10378 - protein, 421 aa, Lactobacillus sp.; identical to SEQ ID NO: 5881

SEQ ID NO: 10379 - protein, 473 aa, unidentified
  REGION 1..473: note = Human gut metagenome
MAVFVIGLTEKRLMPTTERKARILLKQKKAEVFCKNPFTIKLLYQTGGTTQHVTLGVDTGSQHLGFAVAGDNGNIIHEQEVSLRRSMEKRKLLVKCKESRRGRRYRKVRYRHPKWRHHTVRAYIQKGCRKKGAKRYWKKLKVQFSSPRPEGWLPPSLQSKTDHHIRWIHRFLDVLPKNTRMVLEVGRFDAARMKNPEIHGELYQRGPQYDYENVKAYVFDRDSYKCRCCHAKAGTRRKDGTVVKLIAHHIDYRSRGASDNPDALASVCDACHTAANHQPGGVLYDWMIKNKRFKRGHRDTAFMNILRRRLFEAFPDAEYTYGNITAARRKELMLPKSHADDAVAIACTVMDINSIRKRPDHVVYVQQVRKKKRSLHEANPRKWSKTKNRFAVRNSKNTKEVNRVCLFDKVEVIGKGYGWVTGFTGTSCYVLDRNGNYVTTADTYKQVAISRLKVIQHSGNWISGLKCPIGNGS

SEQ ID NO: 10380 - protein, 414 aa, unidentified; identical to SEQ ID NO: 2588
  REGION 1..414: note = metagenome

SEQ ID NO: 10381 - protein, 462 aa, unidentified; identical to SEQ ID NO: 2823
  REGION 1..462: note = Human gut metagenome

SEQ ID NO: 10382 - protein, 465 aa, unidentified
  REGION 1..465: note = Human gut metagenome
MSTCVCVLSNNGERLMPTIRLGRVRHLLKDGKAKIIKHHPFTIQLLYDSKTNTQPIEICEDVGYNYIGISVKSQSHEYVSAQYDTLQDEKACHDSCRKLRRTRRNRLRYRKPRFDNRKRGEGWLAPSLKHKKELNVNVVKMYCTVMPITHATVEVGSFDTMLVKAIQEGKVIPEGADYQKGPRYNLATLREAVFYRDNYVCKICGRKATEGAILHMHHMFYWKGRHGNSLNELLTVCEKCHTPANHQKSGKLYGFGEKIKFADLSGAAFMNTVRWQIVNELYVAFGKPFVTITYGAMTKEKRIALQLEKSHNNDAYAMGEFHPNLRCMFEHYEKTRRNNRILEKFYGSRYIDIRTGEIATGKELFNGRINRNHKKDSENLHKYRGKRTYAGHRALLRKKVNLNPGDLVSLNGENLIVHSTHTKKNGAVNVEFETPAKSGQKSASLKKLKIVKAANSIHPAWKKIS

SEQ ID NO: 10383 - protein, 458 aa, Lactobacillus sp.; identical to SEQ ID NO: 5912

SEQ ID NO: 10384 - protein, 427 aa, Calothrix sp.
MCKVFVIDTNKRPLNPIHSAQARQLLRSKKAAIYRRFPFTLILKESCPDVPVAPLRLKLDPGAKTTGIALVNDATGEVVFAAELKHRGFAIRDALISRRQLRRGRRNRKTRYRKPRFLNRTRPPGWLAPSLMSRVHNVETWVNRLRKFAPITAISTELVKFDMQLMRNPEIEGKEYQQGTLAGYETREYLLEKWNRQCAYCAVKDVPLQIEHIHPCSKGGSNSITNLTLSCEKCNIKKGTKDIKDFLKKDPTTLQKILAQAKKALADAAAVNATRYKLLEVLKATGLPVECGSGGLTKFNRTRQQLIKTHWIDAACVGKSTPTLNIKGIKPLLITANGHGNRQMCGTDKFGFPSRHRTNKQIHFGFQTGDIIKAVVTSGKKVGEYVGRVLCRATGSFDIASKTGRISGISHKYCSAIHKKDGYSYAF

SEQ ID NO: 10385 - protein, 426 aa, unidentified; identical to SEQ ID NO: 3614
  REGION 1..426: note = Human gut metagenome

SEQ ID NO: 10386 - protein, 470 aa, Anaerostipes sp.; identical to SEQ ID NO: 2949

SEQ ID NO: 10387 - protein, 427 aa, Fischerella sp.; identical to SEQ ID NO: 6171

SEQ ID NO: 10388 - protein, 354 aa, Moorena sp.
SEVELRNDIVELISTRREARHARRNRKTRYRAPRFDNRTSSKKEDWLAPSIRQKIHSHLKVIADVHEILPVSKVIIEVASFDTQLLKAAEEGRPLPQGTDYQFGEQLGFYNTREYVLFRDNHTCQCCKGKSKDKVLNVHHIESKKVGGNAPNNLITLCETCHTGYHKGVVKFPSSIRRGMKFNDASFMGIMRWPVYSRLKEIYPSVELTYGYKTKNMRIENQLPKEHYIDARCISGNPKAKSDGIVYYQKKVRCHNRQIHKFKVNKDGLRKLNQAPYLVKGFRLWDKVLYNSEECFVQGRRSSGFFQLKKLDGTMISASASCKKLSLVETGKHFITERKRAIPPTVEECGFSCL

SEQ ID NO: 10389 - protein, 430 aa, unidentified
  REGION 1..430: note = Human gut metagenome
MPKVYVLNRHGRPLMPCSPAKARHLLDAGKAKVRHRTPFTIQLLYGSTGYTQEVILGVDAGSKTIGLSAATETEELFSAEVKPRNDVVELMSARRQFRRARRNRATRYRKPRFDNRVRSKHKGWLAPSVGVKIQEHMTAIRRACAILPVSKVVVETAEFDLQLLKAVAEGKPVPQGEDYQHGEMYGHYNVRQYVLWRDGYTCQCCGAHATQKKEVRLHVHHLESRRVGGDAPDNLVTLCTACHDKLHKGIIMAADIKKRKRRSTRDATFMGIMRMTLLRRLREQLPVPVVETRGYITKATRENLLVLPKSHTNDALAIAHGPQGFRAEYLPNIRQADRLYTIRPVRHHNRQLHKATILKGGVRKANQAEKYICGFRLYDKVLYNGIECFVWGRRTSGSFLLRQLNGEKVKDGVSYKHLKLLERSHSYLVA

SEQ ID NO: 10390 - protein, 425 aa, Moorena sp.; identical to SEQ ID NO: 8924

SEQ ID NO: 10391 - protein, 441 aa, Sulfobacillus sp.; identical to SEQ ID NO: 4231

SEQ ID NO: 10392 - protein, 423 aa, Moorena sp.
MRVFVLNKNRQPLDPCKPARARIILSKGKGKVYRRYPFTIILTEEIEEPITHGSQLKIDPGSKTSGLAIIQNNRVVWGCEITHRGFQIRDALTSRRQLRRARRHRKTRYRQPRFLNRTRPKGWLAPSLMSRVKNILTWVKKLTRLCPVTGISQELVRFDTQKLQNPEISGIEYQQGTLYGYELREYLLEKWNGKCAYCGATGTQLEIEHIKPKSKGGSDRVSNLAIACHPCNQAKSNQDIELFLSGKPKILKRILGQAKRPLADAASVNTTRWRLYHELKSIGLPVEVGSGGLTKFNRCRQSLPKTHWLDAANVGKVETLIVEVTHPLIITAKGHGTRQLCRTNKFGFPVRHCSRTKIHKGFQTGDIVRAVVTKGKKIGTYVGRVATRKSGSFNILTKSGLVQGISHKYCQCIHRKDGYAYTN

SEQ ID NO: 10393 - protein, 442 aa, unidentified; identical to SEQ ID NO: 2834
  REGION 1..442: note = Human gut metagenome

SEQ ID NO: 10394 - protein, 428 aa, Enterococcus sp.; identical to SEQ ID NO: 4335

SEQ ID NO: 10395 - protein, 415 aa, Bacillus sp.; identical to SEQ ID NO: 2671

SEQ ID NO: 10396 - protein, 425 aa, Moorena sp.; identical to SEQ ID NO: 9313

SEQ ID NO: 10397 - protein, 443 aa, unidentified
  REGION 1..443: note = Oil field metagenome
MTYVIAKDGTPLMPTERRGKVRHLLREGKAKVVRNKPFTIQLTYETTHYTQPITLGVDSGHKHIGFSAVTEKEEVLSGEVELRDDVSELIKEKGMYRRIRRNRLRYREPKFDNRISSRKETLRKGIKESWLAPSIKHKLDTHIRFIEFIKKILPITEIIIEVAKFDTQKIKNPNIEGIEYQQGEQQNFYNLREYILYRDNYTCQLCGKINVPLEVHHIGYWKGERTNRPSNLITLCTKCHDPKNHLKGGKLYGMKPVQKPLKEATFMSTVRWKLVNALGCKYTYGYITKSKRIKLNLDKTHYNDAFCIAGGTRQRRIEPIYFEQIRRNNRSLEKFYDAKYIDTRDGSTKKGQELFNGRTTRNKNYNTQNLKKFRGQKVSKGRRSIRTQRYFYQPKDIVIYEGKKYTVKGIQNKGSYIKLAGLSKPVKTEIVEPYIFRKGLCVV

SEQ ID NO: 10398 - protein, 403 aa, unidentified
  REGION 1..403: note = Human gut metagenome
MVYVQDIDGKPMMPTTRHGKVRRLLKANKATVVNLCPFTIQLTYKSTDHKQPVTLGIDAGAKHIGFSATTEKEELFACETILRTDIVDLLSTRSQNRRTRRSRLRYRKPKFNNRVFSKKKGWVAPSVKQRIDSHLNEVNEIHKILPITKIVIEAAQFDTHKMKNPNISGIDYQNGEQLGFWNVREYVLFRDGHKCSYCKGKSKDLILNIHHIESRKTGGDSPSNLITLCETCHKEYHKGNIDLKVRRGKSLCGAAIMGIMKWRLYDELKSRYSNVSMTFGYITKYNRIKYGIEKSHTSDAFVISKNFNAKRIEYQYLKRLVRRHNRQIHKMKILKGGKKKNNQAPFEVFGFRLFDKVLYNNEINFIYGRRKSGNFNIRDFNGENPKDVSYKKLKLIRGKRHPI

SEQ ID NO: 10399 - protein, 420 aa, unidentified; identical to SEQ ID NO: 3288
  REGION 1..420: note = Human gut metagenome

SEQ ID NO: 10400 - protein, 427 aa, Parasutterella sp.; identical to SEQ ID NO: 6030

SEQ ID NO: 10401 - protein, 430 aa, unidentified; identical to SEQ ID NO: 4504
  REGION 1..430: note = Human gut metagenome

SEQ ID NO: 10402 - protein, 458 aa, Scytonema sp.
MMITNSVFVLSKNGKILKPTTPVRARFLQSQGKASCLRLFPFTLILDKDVDENVEPYLELRIDPGSKFTGISLVDLNKNEIVWAMELEHRGDRIKMEMIKRSGVRGSRRTRRLRYRKKRFERQKPNGWLAPSLRHRLLTTQTWIKRLLKIAPIKSIAIESVKFDLQKMETPDIEGIEYQQGTLWGYTLREALLEHWGRECVYCGQTDVPLQIEHINARSNGGSDRFSNLTLSCEKCNQKKGNKPVEQFLKDKGEILQKITSHQKKSLSDAAAVNSTRQAIFEMAHQFGLPVISGDGASTKMIRIKSGLPKAHWIDSACVGTDQIVKLRICQPLRITCTGHGTRQVQRVNAKGFPAIASIKKNPVTGKKEVKLVSKNQKYTHATAGDYVICNLLKDRKHVRSGIYRARVKTPTDKGVEVLINGHRIAVDRQYVKLIHQSDGYEYSFTTIDQDLLRFSAI

SEQ ID NO: 10403 - protein, 413 aa, unidentified
  REGION 1..413: note = Human gut metagenome
MTSYAFVLDANGKQLAPAKEQKAWFLIRKKRAALVSKYPMVIQLKKEIPENEICKDEIRCGIDDGGLHVGIALVQKCKTKNKVVFKGIMEQRNDVKHLMEVRRSYRRYHRYHKRYRLARFDNRKSSKRKKRIAPSILQKRQAIIRVIHWLNKWINITNYWLEDVSIDIRALTDGYKPYRWQYQKSNRLDENIRKAAILRDGGKCMECGKLNCRLEVHHIKPRRRNGSDTLDNLITLCESCHQKTEGQEELYMDRYFSLLKSSDHKNLNYAQHVMIGKEWLRKQLSSLGVLYLTNGGDTANKRIDWNIEKSHANDAVCITNLQPDTYDMKEWTVKPMRRQSKAKTDNVLGIKHRDLVEYTFKNGETHRGYVTALYPEQKAINFQSSTKHCKKVNARKCKLLWKYSKIYWFENAS

SEQ ID NO: 10404 - protein, 420 aa, unidentified
  REGION 1..420: note = Human gut metagenome
MQYVYVLNKHGEPLMPCSPGKARLLLKQQKACVVKRTPFTIKLLFGSAGYKQPITLGVDAGSKHVGLSASTEKRELYSEEFTPRSDVVELLSTRRQNRRTRRNRKTRYRVPRFDNRVHSKHKGWLAPSVEVKIQEHITVIKHICKILPISLVRVETAEFDTQRLKAMLAGKPLPVGTDYQLGEMYDEYNVRQYVLKRDHYTCQCCGTHNTAKKVVKLHVHHLESRKTGGNAPSNLVTLCTTCHKNLHKGRVTLDGKERGKPLRDAAFMGIMRKTLMARLKEELPIPVQGTYGYITKMRREQNDIKKGHTNDARCISKHPLAEPCSVCYRTKAIRHHNRQTHKANFSKKGIRKRSQMPYLVEGYRLWDKVLYKEQECFVSGRRSSGSFTLKKLDGTSVSKGVTFKKLRLLEPATNYLIERM

SEQ ID NO: 10405 - protein, 498 aa, unidentified
  REGION 1..498: note = Human gut metagenome
MPTTRCGHVRYLLKEKKARVVKTKPFTIQLLYETDDVVQPLYLGIDPGRTNIGVAVVKADGMAIFTAHLETRNKEIPKLMKKRKDSRRARRTNGRRCRRQRRAKANGTISKKCVKQAPAQNGSASKRAKKIGVIKRHLPGCEKEVLCIGIKNKEAKFNNRTRPAGWLTPTTNQLLQTHTNLIKKIQKLLPISDVVLEINKFAFMQLDNPNIQKWQYQQGPLYQKANLEEAVSEMQEHHCLFCKKKIDHYHHVVPQHKNGSNTIDNIVGLCTKHHDLVHKDTAWHEKLTKKKTGLNKKYGALSVLNQIIPALTKELSSIFPKHFFVTTGKSTYDYRAAHGVSKDHWLDAYCIACSVLPNDVCDSSINNRVPYELKQFRRHDRRALHKENMSRVYTLNGKKVATNRHKATEQTADSLEEFRQNHPDDVCKLKVKEHHSEYRNPKRNFPGCVFLVGKRTHVMQGTNGSHNGRADGYYDTNGNSYPFGKCKFVAKNGGIVFT

SEQ ID NO: 10406 - protein, 396 aa, unidentified; identical to SEQ ID NO: 10347
  REGION 1..396: note = Human gut metagenome

SEQ ID NO: 10407 - protein, 401 aa, unidentified
  REGION 1..401: note = Human gut metagenome
RRQRRAKANGTISKKCVKQTTAQNGSVSKRAKDIGVIKRRLPGCEKDVLCIGIKNKETKFTNRTRPEGWLTPTANQLLQTHINLVKKIQKFLPISDVVLEVNKFAFMRLDNPNIQKWQYQQGPLYKKESLESAVSEIQEHHCLFCKKPIDHYHHVVPQHKNGSNTIGNIVGLCAKHHDLVHKDSAWEKKLAKKSTGLYKKYGALGVLNQIIPTLTNELSSLFPKHSFVTNGKSTYDYRAAHGVSKDHWLDAYCIACSVLPSNVCDSNINNHMPYELKQFRRHDRRVLNNENMNRVYTLNNKAVAINRHKAKDQKTVSLEEFRKEHPDDVCKLKVKEHHPTYRNMNRNFPGSVFLVGKQIHVMQGIASSKDGKATKYNDTSATAIAAGKCKFVAKNTGILFV

SEQ ID NO: 10408 - protein, 429 aa, Moorena sp.; identical to SEQ ID NO: 8379

SEQ ID NO: 10409 - protein, 410 aa, Bacillus sp.; identical to SEQ ID NO: 3163

SEQ ID NO: 10410 - protein, 454 aa, unidentified
  REGION 1..454: note = Human gut metagenome
YNFGEGLASSEVTPLRRRGQLIISCHTNRKEHGIMQYVYVLNKHGEPLMPCSPRKARLLLKQKKACVVKRTPFTIKLLYGSTGYKQPITLGVDAGSKHIGISAATEKYELYCEEATPRNDVVDLLSARRAFRRSRRNRKTRYRAPRFNNRVHSKHKGWLAPSVEVKIQEHITLIKRVCRILPVTFVRVETAEFDTQRLKAMLEGKPLPVGTDYQLGEMYDEYNVRQYVLKRDNYTCQCCGAHSTKTKDVKLHVHHIETRRTGGNAPNNLITLCTACHKALHAGKVTLDGKKRGRSLKDAAFMGVMRKTLMERLLKELKIPVQGTYGYITKYLREKHSIPKSHTNDARCISKNPLAIPCDTCYYTKAIRHHNRQLHKAAILKGGIRKANQAPYTVKGYRLWDKVSYNGSECFITGRRTSGYFALKKLDGTVVSNSASYKKMRLLEVATNYITERR

SEQ ID NO: 10411 - protein, 512 aa, unidentified; identical to SEQ ID NO: 3493
  REGION 1..512: note = Human gut metagenome

SEQ ID NO: 10412 - protein, 426 aa, unidentified; identical to SEQ ID NO: 3614
  REGION 1..426: note = Human gut metagenome

SEQ ID NO: 10413 - protein, 429 aa, Moorena sp.
MCNYVFVLDASHKPLNPCRPVTARKLLTAGKAAVYRRYPFTIILKKQVDGVAKPMSLKIDPGSKITGLAIVYGNQVVWSAEIEHRGSKIKSALDSRRAVRRSRRNRKCRYRKPRFNNRKRPEGWLAPSLQHRVATTMTWVLKLMKLTPIGGISQELVRFDTQKLQNPEISGIEYQQGELMGYEVREYLYQKWGRQCVYCGANSVKLEVEHIVPKSKGGTNRVNNLTLACHGCNQAKGNLDARDFLSGKPDVLKRILGKAKQPLLDAAAVNSTRWQLYQSLKETGLSVAVGTGGRTQYNRIKLGLPKGHWVDAACVGEVATLKIVTRQPLLIKAMGHGCRQVIQMDKYGFPRKGYKPKHPVKGWKTGDIVNVVAGKNAGLKGVRIKSVRAKGNFDLIGSFNGASNKVLSASQNYIQCVHRHDGYSYSFAE

SEQ ID NO: 10414 - protein, 457 aa, unidentified; identical to SEQ ID NO: 4299
  REGION 1..457: note = Human gut metagenome

SEQ ID NO: 10415 - protein, 420 aa, unidentified
  REGION 1..420: note = Human gut metagenome
MQYAYVLNKRGEPLMPCSPGKARILLKQQKACVVKRTPFTIKLLHGSAGYKQPITLGVDAGSKHVGLSASTEKRELYSEKFTPRNDVVELLSTRRQNRRSRRNRKTRYRAPRFNNRVHSKHKGWLAPSVEVKIQEHITVIKRICRILPITLVRVETAEFDTQRLKAMLAGKPLPVGTDYQLGEMYDEYNVRQYVLKRDNYTCQCCGAHTTAKKTVKLHVHHLESRKVGGNAPSNLITLCTTCHNNLHKGKITLDGKKRGKTLRDAAFMGIMRNTLLTRLRNELNIPVQNTYGYITKLLREQNDIKKSHVNDARCISKHPLAKPCSVCYRTKAIRHHNRQIHKAKILKGGIRKANQAPYIVKGFRLWDKVLYNEQECFISGRRSSGYLALRKFDGTTITNSISFKKLRLLEPATNYLIERK

SEQ ID NO: 10416 - protein, 435 aa, Ktedonobacter sp.
MAVFVLDKRGTPLMPCSEKRARVLLARGRARVHRLVPFTIRIVDRLLADSAWQPLCVKIDPGSKTTGIALVRETAQTTTVLGLFALSHRGRQISAALRQRANSRRRRRSTNLRYRAPRFRNRTKPAGWLPPSLLHRVETTMTWVHRLQRLAPIAALSVELVRFDMQLLEHPDIAGVAYQHGTLAGYELREYLLEKWKRQCAYCDKQDVPLQIDHIVPTSASGSNRVSNLTLACRPCNQNKGSRDIRDFVKDATRLQRILAHAKAPLRDAAAVNTTRWALCHVLQATGLPVETGTGGRTKWNRARCGIPKTHALDAVCVGVVEAVRDWHRPTLTIKATGRGSYQRTRLTPYGFPRGYLPRKKQVHGFQTGDLVKAVVPSGKKVGIYLGRVAVRASGSFNIQCADGVVQGISCKHCRVLQRNDGYEYAQCPKIAATQ

SEQ ID NO: 10417 - protein, 515 aa, Actinoplanes sp.; identical to SEQ ID NO: 2700

SEQ ID NO: 10418 - protein, 491 aa, unidentified
  REGION 1..491: note = Human gut metagenome
MSTCVCVLSNSGERLMPTFRLGKVRRLLKDGKAKIVKHHPFTIQLLYDSKANTQPIEICEDVGYNYIGISVKSQSHEYVSAQYDTLQDEKACHDSCRKLRRTRRNRLRYRKPRFDNRKRSEGWLAPSLEHKKELNVNVIKMYCEVMPITHAIVEVGSFDTMLVKAIEEGKATPESADYQKGPRYKLATLREAVFYRDNYTCQVCGRKANEGAILHVHHMFYWKVRHGNSLSELITVCEKCHTPANHQKGGKLFGFGEDKEFANLSGAAFMNTVRWQIVNVLYAAFGKPFVTFTYGAMTKEKRIALHLEKSHNNDAYAMGSFHPINRCAFEHYEKVKRNNRILEKFYDSQYIDTRTGELTNGKSLFNGRISRSHKKDSENLHKYRGKRICKGHRALRRKKVALNPGDLVSLNGEILVVHGTHTKKNGSVNVEFKTPSREGKKSASLKKLKIVKTSNLMHSASCILRGLKYLKKLKKGDTGYLDLLSVPQMYS

SEQ ID NO: 10419 - protein, 424 aa, unidentified
  REGION 1..424: note = Human gut metagenome
MRVFVFNMRGRPLMPCSQRKARLLLRENKAMIYKYHPFTIQLTYTTGETKQDCHIGIDTGSKYIGAAVRSEDKVFWKGEIELRQDIRSNLDTKRIYRRSRRNRKTRYRKPRFLNRKRRDEWLPPSLQSRINHTFHWIDTLSSLVPNPILHIEVGKFDVAKMINPEIHGVDYQHGQTYGFFDERYFVFARDNYTCQCCGKSKNKILNTHHIIYRSNGGTNRVDNLITVCTDCHTSQNHRKGGIFYQWQEQHKKVKQYKEPPFMNTLRKRIFVAYPDAEITYGSETTPKRKAMKLDKTHYNDAIVISGINEIKENPEEWLLIKQFRKKKRSLHEATARKGRKKPNRNQTRHSKNTPYYKGFYLNDKVSVFGKSGYITGFTSNAAYIKDENNDYITLPNKTYKQVSINKMKLECHNNNWQYIIKNAV

SEQ ID NO: 10420 - protein, 317 aa, unidentified
  REGION 1..317: note = Human gut metagenome
VKKIQKFLPISDVVLEVNKFAFMRLDNPNIQKWQYQQGPLYKKESLESAVSEIQEHHCLFCKKPIDHYHHVVPQHKNGSNTIGNIVGLCAKHHDLVHKDSAWEKKLAKKSTGLYKKYGALGVLNQIIPTLTNELSSLFPKHSFVTNGKSTYDYRAAHGVSKDHWLDAYCIACSVLPSNVCDSNINNHMPYELKQFRRHDRRVLNNENMNRVYTLNNKAVAINRHKAKDQKTVSLEEFRKEHPDDVCKLKVKEHHPTYRNMNRNFPGSVFLVGKQIHVMQGIASSKDGKATKYNDTSATAIAAGKCKFVAKNTGILFV

SEQ ID NO: 10421 - protein, 413 aa, unidentified; identical to SEQ ID NO: 2636
  REGION 1..413: note = Human gut metagenome

SEQ ID NO: 10422 - protein, 441 aa, Lactobacillus sp.
MKNERSKTMPNRVFVINKHGQALMPCKPRKARILLRDGKAKVIKKEPFTIQLLYGSTGYKQNVNIGVDSGQRHIGLAVTSQAKVLFQAEVELRQDVKSLLDTRRTYRRSRRNRKTRYRKARFLNRIANKKANWLPPSVASKVNHNINWIKRLLAVLPKPELHIEVGKFDMQKMMNPNIKSEGYQQGDLYGYQTVKQFILARDNYTCQVCKQTGGKLKIHHIIYRALGGTNTVDNLITVCANCHTAKNHQTGILAKWCQAKKKVNKTYKGATFMNILRRRLFTAFPQAEFQYGAWTTLQRADLDLAKSHYNDAVAISGIKQIKEKPTRIVMFKQFRKKKRSLHEATARKGRKTPNVMSKRNAKNTKYAKGLWLNDYVKIKDSRSKGYISGFSKTTCYIKDIFGNYLTVSPKYKQVALSKLVRITHNNNWSRQEINEKNYQMH

SEQ ID NO: 10423 - protein, 424 aa, Enterococcus sp.; identical to SEQ ID NO: 8879

SEQ ID NO: 10424 - protein, 439 aa, unidentified; identical to SEQ ID NO: 3280
  REGION 1..439: note = Wastewater metagenome

SEQ ID NO: 10425 - protein, 482 aa, unidentified
  REGION 1..482: note = Human gut metagenome
LVWNVQAPWDVYPSPTLCGLCLKVLRGRNGDADKKPIPTLTKDENRPSGRTTGLRAEQAEPAGIRKGDTLKVFVLNMRGKPLMPCSPAKARHMLKAGKAVVVRRTPFTIKLTIATGETKQDVTLGVDAGARHVGISATTEKEEVFASEVALRQDITGLLADRLAFRRARRNRKTRYRAPRFNNRVRSKHKGWLAPSVENRIQAHISRIEAVCRLLPVTKIVIETASFDIQKIRNPEVEGTGYQQGDQLGFWNVREYVLFRDGHICQHCRGRSKDPILNVHHLESRKTGGDAPNNLITLCETCHKAYHAGKIKLKVKRGQSFRAEAFMGIMRWTLLDRVRKTHPKLPVENTYGYLTKHKRIALGLPKTHCADAFCIAGNLKALRRGDFLFQQQTRKHNRQIHKCSILKSGVRKINQAPFLVKGFRLFDKVRIGGQIGFVFGRRVRGTFNIRRLDKTVIGTDINCKKLSLLETRKTFLTELRKE

SEQ ID NO: 10426 - protein, 457 aa, unidentified
  REGION 1..457: note = Human gut metagenome
MDAVAVISASGKPLMPTTPVRARKLIKKGKAVIYKYRPLFTIRLTERTDGDIQTIEYCCDTGYQHIGLSIKSRKHEYVNEQRDLLPNETERHNDSRKYRRARRRRKLRHRACRRDNRHDNQICKDGYAPSIRNKRDQHISLYKSYTEILPVGRALFEMGQFDTQVLKAIEKGEPLPQGKDYQHGERYGYATLREAVFARDDYTCICCGKNAFKDKRILCVHHLGFRIGDRTNRLANLATVCTKCHTPKNHQPKGKLYNLKPELKDFKGATFMTMVRWDMLDKLKAVSKGIQVDVTYGAATKEARRDLKIKKSHANDAYCMGSFYPSHRTDLKRYEKCRRNNRVLSKFYDATYIDIRDGKKKKANALGCNRTKRRESRRSEKNERIYRGEKISKGRIVLRTRRAVIRPGDIVYVGKKKYIVASSKNLGAQLKLADGSLLTTSKVTKIIHCGGWKRVTL

SEQ ID NO: 10427 - protein, 466 aa, Moorena sp.
MSVAVLSSTGRKLMPTSNYRARKLLKSHRAAIECYRPIFTIRLTDRKGGNTQPIEYACDTGYQHVGVSIKSEKHEFVHAQYDMLSDETERHNDCRKYRRTRRNRLRYRKPRFDNRSKKNKEMPPSLRHRKENQISLFESFCKVMPITSATFEMGKFDTQLLQAIANGKPLPEGKDYQQGSKYLYQTEREAVFGRDHYTCQVCGKSVKDGVILNTHHIGYWKGYRSNRISNLLTVCEHCHTAKNHRPGGKLWGLEPKSTNLAPAAYMSTVRWAMYRDLVLMHPEIDIHIQYGAKTSVTRKSLHLAKTHANDAYCIGSLRPKHRAAELVYQKKRRNNRILSRFYDAKYIDIRDGKKKSGSALSCGRTNRRESRRSDKNQRIYRGKKCSSGRTSIRKRRYAYQPGDAILFRSQRFAVNGAHCNGTRVILNTGKSVKTADLTCIKKEGGWRFLPANSAQKQQIRFSNQKA

SEQ ID NO: 10428 - protein, 489 aa, unidentified
  REGION 1..489: note = Human gut metagenome
MAMVYVQNKDGKPLMPTTRYCYVRLLLKEKKARVVCTTPFTIQLNYDTPDITQDLILGIDPGRTNIGVAVVKEDGQCVFSAHLETRNKDIPLLMKKRAGFRRQHRTLDRRRKRQRRARAAGTTIADGSVERLLPGYEKPVVCHYIRNKAARFNNRSRPAGWLTPTANHLLQTHINLIAKVAKFLPITKVVVELNRFAFMAMDNPNIHRWEYQQGPLYGLGSVEDAVYAQQDGHCLFCKKPIDHYHHVIPRHKGGSETLANRCGLCAKHHDLVHKDKAWADKLVTRKEGMNKKYHALSVLNQIIPFLMEYLGSETLYDVYAIDGRSIKGFRIAKNVPKEHYTDAYCIACSILDTDNKVSAPVEPFELKQFRRHDRQACIRQMVDRKYLLHGKVVAANRHKAFEQKSDSLQEFREAYSDVAVSQLTVKPHPPQYKDMSRIMPGAVMDFDGIVGVMQSSIVGQFYKSTKGHKATPKRCVLLSQNAGMVFIPT

SEQ ID NO: 10429 - protein, 436 aa, Pseudomonas sp.; identical to SEQ ID NO: 3629

SEQ ID NO: 10430 - protein, 374 aa, Moorena sp.
LYDSPEYTQPITLGVDAGSKVVGLSATTEKKELFVSEITLRDDIPELLSTRRQNRRARRNHLRYRMARFLNRTASKKEGWLAPSVKHKVDSHLKVIGNVHRILPISKIVIETASFDIQKIRNPEISGREYQQGEQLGFWNTREYVLWRDNHECLHCHGKSKDRVLNVHHKESRKTGGDSPGNLVTLCETCHKSHHAGRIKLKLTPNKSYRHSSFMGIMRWYVYNSLQELYSEVSMTYGYITKNNRINNNIEKTHSADAYCISGNLNAKRIDEIYNQAFKRKHNRQIHKANFLKGGKKKLNQSAYEVKGFRLFDHVRYRDEECFIFGRRTSGYFDLRKLDGSVVHRSASFKEIKLLKRQNTILIERKGCNGVLLS

SEQ ID NO: 10431 - protein, 419 aa, Geobacillus sp.; identical to SEQ ID NO: 3993

SEQ ID NO: 10432 - protein, 442 aa, unidentified; identical to SEQ ID NO: 2903
  REGION 1..442: note = Human gut metagenome

SEQ ID NO: 10433 - protein, 426 aa, Oscillochloris sp.
MSFVFVLSSDGQPLDPCHPARARQLLDHGKAAVWRRYPFTIRLKERRAAASVTHPHRVKLDPGSKTTGIAVVAETTGRVVWAGELTHRGQAIRDALLSRRAIRRSRRQRKTRYRQPRFLNRRRPEGWLAPSLAHRVDTTRTWVNRLRRFVPVTAISMELVRFDTQLLEHAEISGVEYQQGTLAGYEVRQYLLEKWGRRCAYCGTTGVPLQVEHITPRARGGSDRISNLALACEPCNTRKGTQTAEAFGHPEIQAQARRPLKDAAAVNQTRWALYGRLIATGLPVEVGTGGRTTFNRTRLGLPKAHWHDAACVGASTPEVLDTRGVRPLFIQAMGHGTRQMCRMNAFGFPRTGPKGARVVKGFKTGDMVRATVTTGTKQGMYVGRVAVRTSGSFNITTAAGTIQGLHHRFFRAVQRADGYSYTYEVA

SEQ ID NO: 10434 - protein, 434 aa, Mitsuokella sp.; identical to SEQ ID NO: 2893

SEQ ID NO: 10435 - protein, 493 aa, unidentified; identical to SEQ ID NO: 3154
  REGION 1..493: note = Human gut metagenome

SEQ ID NO: 10436 - protein, 427 aa, Moorena sp.
LRVFVKNIRGEALMPCSQRKARFLLKEDKARIIGYKPFAIQLIVPAGESTQEIHLGVDTGAKYIGIAATSENKVLAKGEIELRDDIHKNMQTRSELRRTRRNRNLRYRQLRFLNRKRKYGWLPPTVQSKLDATFRWIDKFCDLLPNPVLHIEVGKFDIQKIMNPDIANEEYQNGQCAGYYDVRYFVFARDNYTCQVCKKQNKILNTHHLVYKSKGGSDRADNLITVCTDCHSSENHKEGGILYNWMIKHKKVKQYKEASFMNIIRKRTFQKYSNAVITYGSKTSPYRKELGLDKTHYNDAIAISKIENIKENTQDYFYIKQFRKKKRSLHESIPTRGRRKGKNVNAERRNKNSPCRAGWFMNDMVSFQNIIGWIYGFSGGESGKECVLRDINGKIIKDSKRSKNNPNVKFSDLKFICHNNNWQYQIV

SEQ ID NO: 10437 - protein, 500 aa, Eubacterium sp.
MVYVLDQNGDSLMPTNRHGWVRRALKSGKAKAVRTMPFTIRLFYRTTDPVLQEITLGIDPGRENIGVAAVREDGTCLYAAHCETQNKKIKKRMQKRKAHRQASRRGERLRKKRRAAKKRTIHTKIVYFDTPMGKRPNIKIDGCFFRILPGCEEPSVFKDIINTEARFSNRHREEGWLTPTATQLLRTHINLVRNIQKILPVSRVALELNKFSFMELEAGRKLLWWEYQQGPMYGKKDQMEALRDIQNGKCLLCKKGVITRKHHIYPRHLGGTDRLSNLAGLCEKCHEELHHDKKMEDDLKKKTNARNNKYGAASTVNQIIPYLADHLGDIFRDQAYGVKGWETKQFRDEHHIKKTHENDAYCIACMALEHSAGIASPKGHYEIQQFRRHDRALIHRQTERRYYLDGTGVAANRRKRMDQKEAQKMRSRLKVKKSSRSYNDPDRTLPGAVFQFEGKTYIMKLQITNGQYYKALHGNTKNIPAARAKILCKNRGLVTVLFCN

SEQ ID NO: 10438 - protein, 413 aa, unidentified; identical to SEQ ID NO: 2636
  REGION 1..413: note = Human gut metagenome

SEQ ID NO: 10439 - protein, 417 aa, unidentified; identical to SEQ ID NO: 6274
  REGION 1..417: note = gut metagenome

SEQ ID NO: 10440 - protein, 451 aa, Blautia sp.
MSVAVISKTGERLMPTSEYRARKLLKSGKAIIHSYHPFTIQLTERETGDIQSIELCMDTGYIHIGISVKSKKHEYLAEQIDTLTDERGRHDTCRMYRRQRRSRKRYRQPRFNNRKRNDGWIAPSLEHKKSIHIQAILRICKVMPVTDITLEIGNFDTQVLKAREEGKPLPQGVDYQHGERYGITTLREAVFARDGYTCQCCMRTIKDGAILHVHHIVYRNQGGTNRMSNLITVCDKCHTPANHKQGGKLYNWKPKIASFKGATYMTTIRWKLYNEVKALFPDIDIHITYGAETKERRMALDIDKSHVNDAFVMGQFHPKHRSKPICYKKKRRNNRCLEKFYDAKYIDSRDGKKRSGQELFNGRISRNHKKDSENLHQYRLQKVTPGRRAIRRQHYPIQPHDIIVYNGNKIEVSGCQHKGTRVVFSKTKKSVQISKIKLFKYAGGYSKSVFN

SEQ ID NO: 10441 - protein, 494 aa, unidentified
  REGION 1..494: note = gut metagenome
MTMVYVQNKDGKPLMPTTRYCYVRLLLKEKKARVVCTTPFTIQLNYDTPDITQDLILGIDPGRTNIGVAVVKEDGQCVFSAHLETRNKEVPLLMQKRASFRRQHRTQGRRRKRQRRAIATGTTVESNTIERLLPGYKKPIVCHYIRNKEARFNNRSRPAGWLTPTANHLLQTHINLIAKIAKLLPVTKVVVELNRFAFMAVDNPNIHRWEYQQGPLYGLGSVEDAVYAQQDGHCLFCKKPIDHYHHVVPRHKGGSETLANRCGLCEKHHALVHKDKAWAEKLVTRKGGMNKKYHALSVLNQIIPHLMEYLGRETPYDVYATDGKSTKGFRIAKNVPKEHYTDAYCIACSILDADTKVSAPVEPFELKQFRRHDRQSCIRQMVDRKYLLDGKVVAANRHKAIEQKSDSLEEFREAYGDAAVSQLTVRPHSPQYKDMARIMPGAVMDFDGIVGVFKGSSGRNNGTPNYYNSTKGTRVLTKRCALLAKNTGMVFIPA

SEQ ID NO: 10442 - protein, 424 aa, unidentified
  REGION 1..424: note = Human gut metagenome
MASMQYVYVLNKHGEPLMPCSPGKARLLLKQQKACVVKRTPFTIKLLYGSAGYKQPVALGIDAGSKHVGLSASTEKRELYREEFTPRNDVVELLSTRRQNRRSRRNRKTRYRAPRFDNRVHSKHKGWLAPSVEVKIQEHITVIKRICRILPITLVRVETAEFDTQRLKAMLEGKPLPVGTDYQLGEMYDEYNVRQYVLKRDNYTCQCCGAHPTEKKPIRLHVHHIESRHVGGNAPNNLITLCVACHKALHEGKITLDKGKKRGKPLRDAAFMGIMRNTLLARLKDELNIPVKQTYGYITKLLREKNKIPKSHVNDARCIAKAPNAKPCDTMLYTRALRHHNRQIHKAKILKGGIRKKNQAPYLVKGFRLWDKVRYNGEECFITGRRSSGYFALKKYDGTVISNSASYKKLMLLEAATNYITERS

SEQ ID NO: 10443 - protein, 414 aa, unidentified
  REGION 1..414: note = Human gut metagenome
MPCSPAKARLLLKEKKAIVKRRTPFTIQLTIATGETKQPVSLGVDAGYKHVGLSASTEKAELYASEVELRQDITDLLSARRALRQSRRNCKTRYRAPRFDNRIRTKRKGWLAPSVENRINAHLSRIEAVLRLLPVTKITVETASFDLQLLKNPDISGKEYQEGEQLGFWNIREYVLCRDGHVCQHCYGRSKDPVLNVHHLESRRTGGDSPGNLITLCETCHKALHRGEITLKAKRGQSFRAEAFMGIMRWEVLNRLKASHPELEVNNTYGYRTKHARIANDIAKSHCADAFCIAGNLGAERLGEFFFQKQTRRNNRQIHKLSILKGGIRKRNQAPFEVKGFRLFDKVACQGEEGFIFGRRSSGFFDVRKVDGSRISAGISYKKLHLLEKRRTYLTEIRKEEALPPLPEGRGLRA

SEQ ID NO: 10444 - protein, 421 aa, unidentified; identical to SEQ ID NO: 8171
  REGION 1..421: note = Human gut metagenome

SEQ ID NO: 10445 - protein, 513 aa, Acrocarpospora sp.
MATFRTGPKTDRAVLPQQPALESESADNPGIRDETGLGRHARVAPGAGHGREETTRRAPALGGVTPEPPSGAGERPRERHPFVFVLDKRGTPLQPTTPARARRLLKAGRAVVARHTPFVIRLKDRTVEQSQVDGVEVGVDPGSKHTGIAVFTAQAGERRGRYAVQLDHRGARIRQKLEQRAAYRRGRRSRNLRYRAPRFLNRTRPDGWLAPSLRHRVDTTVSWVDRFTRWAPVTAVHVERVAFDTHAISAGRPLEGAEYCRGTLHGTEVREYLLAKFGRACLYCGTTGVPLNIDHVHPRSKGGSDRVSNLVLACIPCNQAKSDRPVEEFAPKRAAEILKRAKAPLRDAAAVQSTRWALWRALDSRLPTHVASGGRTKWNRARAGLPKTHTLDALAVGKLDTVTETVSWVLVAGCAGRGVHARTRTDKHGFPRLRLPRQKQFHGYVTGDLVRAVVPQGAKAGTHTGRVAVRATGSFNITTALGTVQGIHHRHLHLLQRADGYAYTTRGETDVSR

SEQ ID NO: 10446 - protein, 412 aa, Moorena sp.
MVYVLSKTGQPLMPTENHAKVRILLKQGKAKVVNRCPFTIQLLYSSTNYTQKVTLGVDSGSKHIGLSATTKDKGLFESDVELRNDIVDLLSTRRELRRSRRNRKLRHRKPRFNNRRRNDGWLAPSVKQKVDSHITMIAKVHKILPISNIVVEVASFDIQKIKDPTISGMDYQQGEQLGFWNVREYVLFRDGHKCQCCKGKSKDKILNVHHIESRKTGGDAPNNLITLCETCHTGYHKGTVKLPKTIHRGMSFKDATFMGIMRWALFEKLKAIYSDVKLTYGYITKNTRIKNGLPKDHYIDARCISGNPNAVSNGNVYYYKKVRCHNRQIHKTNFIKGGYRKRNQAPYEVKGFRLYDQVLWKGQKCFIFGRRATGRMDLRLLDGTHVNASVGYKNLKLLKMRSSYLVEQRKVG

SEQ ID NO: 10447 - protein, 410 aa, Bacillus sp.
MTYCFVLDEQGNKLSPTRENRAWYLIRKQKATLKSKFPMIIQLKRKIPESKIDSSSIRLGIDDGSKLVGIAIVQECETKNKPVFKGTIELRTDVKEKIAIRRGYRQYRRQHKKYRPARFDNRSSSKREGRIPPSIKQKKDSILRVVNQLHKWIRIDRIFLEDVFIDIRALEKGYKPYKWEYQQSNRLDENIRKAVVLRDHNTCQDCGMTNTRIEVHHITPRRLNGSDSIHNLITLCTTCHGKVTGDELNDRERFYQKVNGRKISYSDAMYVMQGKTYLQNKLKKISPLSLTTGGDTANKRIDWGIKKTHANDAIVICHSTVWPKQCEMKNWVIKPMRKHSNKKIESLNGFHHRDFVKYTKRNGESYLAYITALYPEKNQCNMTTIEGGILKRYGLSRLTLLWRFNKIYWL

SEQ ID NO: 10448 - protein, 420 aa, unidentified
  REGION 1..420: note = Human gut metagenome
MQYVYVLSKHGEPMMPCSPGKARLLLKQQKACVVRRTPFTIKLLYGSAGYKQPITLGVDAGSKHVGLSASTEKRELYREEFAPRNDVVELLSTRRQNRRSRRNRKTRYRAPRFDNRVHSKHKGWLAPSVEVKIQEHITIIKRICKILPISLVRVETAEFDTQRLKAMLAGKPLPVGTDYQLGEMYDEYNVRQYVLKRDNYTCQCCGAHTTAKKLVKLHVHHLESRKTGGNAPSNLITLCTTCHKNLHKGKVTLDGKERGKPLRDAAFMGIMRKTLMARLKKELPIPVQGTYGYITKMRREQNDIKKSHTNDARCISKHPLAEPCSVCYRTKAIRHHNRQTHKANFSKKGIRKRSQMPYLVEGYRLWDKVLYKEQECFVSGRRSSGSFTLKKLDGTSVSKGVTFKKQRLLEPATNYLIERM

SEQ ID NO: 10449 - protein, 413 aa, unidentified
  REGION 1..413: note = Human gut metagenome
MTSYSFVLDANGKQLAPTKEQKAWFLIRKKRAALVSKYPMVIQLMKEIPENEICQDEIRCGIDDGGLHVGIALVQKCKTKNKVVFKGTMEQRKDVKHLMEVRRGYRRYHRYHKRYRQARFDNRKSSKREGRIAPSILQKRQATIRVIHWLNKWINITNYWLEDVSVDIRALTDGYQSYRWQYQKSNRLDENIRKAAILRDGGKCIECGKSNCRLEVHHIKPRRRNGSDTLDNLITLCESCHQKTEGQEELYMDRYFSLLKSSDNKNLNYAQHVMIGKMWLRKQLSGLGVLYLTSGGDTANKRIDWNIEKSHANDAVCITDLQPDTCDMKEWTMNPMRRQSKAKTDHVLGIHHRDLVEYTFKNGETHRGYVTALYPEQKAINFQSPTKHCKKVNARKCKLLWKYSKIYWFENAS

SEQ ID NO: 10450 - protein, 468 aa, Moorena sp.; identical to SEQ ID NO: 4678

SEQ ID NO: 10451 - protein, 420 aa, unidentified
  REGION 1..420: note = Human gut metagenome
MQYVYVLNKHGEPLMPCSPRKARLLLKQKKAYVIKRTPFTVKLLYGSAGYKQPVTLGVDAGSKHIGISATTEKHELYREEATPRNDVVDLLSARRAFRRSRRNRKTRYRAPRFNNRVHSKHKGWLAPSVEVKIQEHITLIKHACCILPVTLVRVETAEFDTQRLKAMLEGKPLPVGTDYQLGEMYDEYNVRQYVLKRDNYTCQCCGAHSTKTKGVKLHVHHIETRRTGGNAPNNLITLCKACHKALHAEKVTLDGKKRGKPLKDAAFMGIMRKTLMERLRKELKIPVQGTYGYITKYLREKNGIPKSHTNDARCISKNPLAIPCDTCYYTKAVRHHNRQLHKATILKGGIRKANQAPYIVKGYRLWDKVAYNGTECFITGRRTSGYFALKKLDGTVASNSISYKKLRLLEAATNYIIERK

SEQ ID NO: 10452 - protein, 414 aa, Selenomonas sp.
MPIIKKYAFVLDAEGKRLDPTIEQNAWRLVRQHKARLVSKFPMVIQLNKVVDNPNNDEIRCGIDDGANHVGLALVQKCLTKNKVVFKGTIEQRKVVKHLLTVRRGYRRYHRYHKQYRPARFFNRASSRRSGRLMPSIIQRKQATLRVIDRLRQWIRIDGYWLEEVKIDIRALTDGYKPYRWQYQRSNRLDNNLRLAAIYRDGCKCMECGKVKTRFEVHHITPREAGGADTISNLITLCPNCHARTFSRESQFADRYYALIGSAGHVEGLDDAQRVMQGKHWFKKQLQLRGSLVLTTGGDTANKREDWNISKTHTNDAVCITDLKPENIGVGEWSIKPMRRKSKAGVDEVCGFRHRDYVTYTYRNGETHTGYVTAMYPDKNQLNFQSPTKHCKRVNALKTRLLWRFNKIYWLKCA

SEQ ID NO: 10453 - protein, 408 aa, unidentified
  REGION 1..408: note = Human gut metagenome
MVYVQDIDGKPMMPTTRHGKVRQLLKDNKAVVVNTCPFTIKLTYKTSDYKQEIVLGVDAGTKHVGLSATTKSKELYSSEVILRSDIVDLLSTRRELRRTRRNRLRYRKPRFDNRIKSKRTGWVSPSVRHRIDAHIRVIDNVCSILPISRIIVEVAQFDTQKIKNPNISGNEYQEGNQLGFWNVREYVLTRDGHKCQHCKGKSKDPILNVHHIESRKTGGDSPSNLITLCETCHKEYHKGKIDLRVKRGKSLRDAAVMGIMKWKLYEELKSRYDNVSMTFGYITKYNRIKYGIEKSHISDAFVISKNFNALRLGYHYKVRLVRRHNRQIHKQKVLKGGVKKPNQSSFEVFGFRLFDRVMFEGNCYFIFGRRKSGSFNIRDIDGGNQRDITYKKLKLLRCKRFMIQKETN

SEQ ID NO: 10454 - protein, 442 aa, unidentified
  REGION 1..442: note = Human gut metagenome
MVTVQQSTHHLPFGRVFIRRNLFMVYVISQDGKPLMPCSDPIARLLLKQGKAKVKKRDPFTIKLTYETTNYTQGLTLGVDTGSGTIGTAVSKDNGDIVYMSEVVVRNDITDKMTQRAKYRRNRRNRKTRYRKARWLNRASSIKKDRFSPTMQSKLHSHVREIEYIQSILPITEMVFETGQFDMHLMKNPSLANPKVRPWGYQKGANYGFENTKAMVLNRDNYTCQCCKGKHKDSKLEVHHIVFRSQGGSDEESNLLTLCHTCHKDLHSGKINPKLSGKVKGNLKYATQMNSIRKQLFRCYPNAIETFGYVTKANRLHLGVDKEHYYDACTIATQGNAFNVKSNLYKKKCVSDGDFQKTKGIRSEEPIVTDKICGFRKFDKVRYFGNDYFIKGRMSTGYAILMDIDGNKIDFSTMPRGYKTPKLSNCKRITARSTVMTQVKVV

SEQ ID NO: 10455 - protein, 507 aa, unidentified
  REGION 1..507: note = Human gut metagenome
MSEYIYVIGMDGDPQMPTKRKRHVEQLLQTGRARVFRQVPFTIQLTYKNEPVLQPVTIAEDPGRSNIGMAVVSLSGELLSAAVVQTRNKEIVKLMDKRKQHRRASRNGERKARQRLAKKCHTMVKAGSLMRKLPMYGKDKRVRCNVIKNTEARFCNRKREDGWLTPSAEHLVRTQINLIHKMQKFLPITDVAIEINRFAFLSLEDPSISGVDFQNGPLKGYDDLNAAVEDLQDGHCLMCNSPIEHRHHIVPRSMQGSNSIGNIAGLCCKCHERVHKDSAFEDSLKKKKAGLNKRYAAVSVLNQAIPFICKRLEQEFRKEHVHYCSGRDTSMVRRSLGYHKTKEEQLHEVDAWCIAVLSLQQIPEKAPSFDHVHEILQFRRQDRSRIKAQTSRAYYHERKKIAKNRKKAEGQREDSLQEWRKRQVERYGEEQTRKMISQLKVKKSIRRYNRLDRLMPGAVFYYQGVRYVMRGQHCEGTYLQAVGMGSKDFPAKKCKIVAHNEGLVFVS

SEQ ID NO: 10456 - protein, 410 aa, unidentified
  REGION 1..410: note = Human gut metagenome
MPCTQRKARLLLKEGKAKIHKYNPFTIQLTIPTGENKQDCHVGIDTGAKHIGLAITSENKVLFKGEVELRQDVKTNLDARRIYRYNRRSRKTRYRKSRYLNRKTENNWLPPSLQNRINHTYRWIDEMCNLVPIPMLHIEVGKFDAAKMINPEIQGIDYQHGQTYGFYDVRYFVFARDNYTCQCCGKSKDKILYTHHILYKSQGGTDRADNLITVCSDCHTTENHKPGGILYDWMIKRKKAKQYKEPPFMNILRKRIFDRYPNAIISYGSETVMRRKKLGLSKTHYNDAIAISGISNIKENPNEWLLIKQFRKKKRSLHEATIRKGIKEPNKTQKRHRKNTKCFKSWYLNDEVIVFSKKGYISGFGGSTVYIKDLFDNYMKDGNKKNTQISAKKLKLVSHNNNWKYIHRKY

SEQ ID NO: 10457 - protein, 386 aa, Anabaena sp.
MSKVFVLDTNFTPLNPIHSAQARQLLRSKKAAIYRQFPFTIILKESRSDLLISLLRLKIDPGAKFTGMVLVNDSTGEVVFAAELKHRGFAIRDALTSRSQLRRSRRARKTRYRQPRFLNRTRPERWLAPSLQSRIENIKTWVERLRKLAPIEAISQELVRFNMQLMTNPDIQGKEYQRGSNSITNLTLSCEKCNTKKGTKDIKYFLKKDPLKLEKILKQAKRPLADAAAVNTTRTALLEVLKATGLPVETGSGGLTKFNRSEQNLEKTHWIDAACVGKSTPILNIKGVKPLLITANGHGSRQSCRTDKYGFPSRHVPREKIHFGFQTGDIAKAVVTTGKKIGTYVGKVAIRSTGSFNIYTKNGLIQGISHKFCKRIHAKDGYSYAQ

SEQ ID NO: 10458 - protein, 412 aa, unidentified
  REGION 1..412: note = Ga0307928_10048042
MQKTYIQNKDGEPLMPTERSGKVRRLLRDNKAIVVNLCPFTIRLNYDCENNTQEVIVGLDTGAVNVGCSAVSNNKCLYASETKLRTDIHKKMQRRAMYRRTRRSRNTRYREARFDNRTSNRQLPPSLQSKLDSTVKVVKQLSKILPINKVIVEIAKFDTQKLQNPDIKGKQYQKGVTEGYDNVRAYVFERDNYTCQICKKREGILQTHHIKQRKDGGTDRPDNMITVHLKCHQDFHKGLIKHKFRKPKEYKMATQVTILKDFIIKELRKDFDVSITFGHITKRNRMRLNLPKSHCFDAVAIANPKNIERINKIFKKVCVTQRRYQMTKGVRSEKKLPSGQIFGYNQWDKVKINNQIGFVKGRRSSGFFDVCDIDKNNISHSVKYTKIQRLCSNNIMEVEAIPPTAKAVGILA

SEQ ID NO: 10459 - protein, 418 aa, Moorena sp.
MQNYVFVIDTNKQPLNPISPKKARRLLNKGKAAVFRMYPFTIILKTAVDNPTILPCQLKIDPGSKVTGFALVQNNQVIWGMELEHRGGLIKKKLESRKAVRRGRRNRNTRYRKPRFLNRRRPEGWLAPSLEHRVLTIETWVKRLIKFCPINEVWVEIVKFDTQKMQNPEISGVEYQQGELAGYEVREYLLEKWGRECTYCGKQSVPLQIEHIQPKSKGGSDRVSNLCLACEKCNQRKGNKPIEEFLKKKPSLLQKIKTKAKQPLPDAAAVNATRNKLVKVLRGIKPVVTGTGSQTKYNRTKLRFPKQHWIDAACVGDIETLILRTTQPLLVICKGQGGRQKAALNKYGYPIRHNPLKPIKGWVTGDIAKHQKLGIGKVTPRSKGSFGFTPLGTKGYKSCKPQDISAIHRKDGYIYSFC

SEQ ID NO: 10460 - protein, 594 aa, Streptomyces sp.; identical to SEQ ID NO: 9399

SEQ ID NO: 10461 - protein, 442 aa, unidentified; identical to SEQ ID NO: 4418
  REGION 1..442: note = Human gut metagenome

SEQ ID NO: 10462 - protein, 442 aa, unidentified; identical to SEQ ID NO: 3218
  REGION 1..442: note = Human gut metagenome

SEQ ID NO: 10463 - protein, 431 aa, unidentified
  REGION 1..431: note = Human gut metagenome
MPNRVYVLNKHGRPLMPCSPAKARHLLDAGKAKVKKRTPFTIQLVYGSSGYTQEVILGVDAGSKTIGMSASTTKEELLSAEVKPRNDVGDLLSARREFRRARRNRKIRYRKPRFDNRVRSKHKGWLAPSVEVKIQEHITSIKRVCRILPVSKVVVETAEFDLQLLKAIADGKPVPQGEDYQKGEIYGHYNVRQYVLWRDNYTCQCCGAHATKKKEVRLHVHHLESRKVGGNAPDNQVTLCESCHEKLHKGLITEKDFKKRKRRSTRDATFMGIMRKTLMQRLCSELPIPVVETRGYITKATREKLLVLPKSHTNDALAIAQGLQGFRVGYLPGIVQIDKIYTIRPVRHHNRQLHKAAILKGGIRKSNQAEKYVFGYRLFDKVQFNGQDCFIWGRRTSGYFAVKTIDGKVIHNSASFKKLNLVERASNYLIA

SEQ ID NO: 10464 - protein, 411 aa, unidentified; identical to SEQ ID NO: 9890
  REGION 1..411: note = Human gut metagenome

SEQ ID NO: 10465 - protein, 450 aa, unidentified
  REGION 1..450: note = Wastewater metagenome
VAVFVLERTGKALMPCSEKRARLLLARGRACVHRLVPFVIRLTDRQLDTCTLQPLRIKLDPGSKTTGLALVRDTEHLNTDTGEIQRGVAVLSLIELVHRGRQISEALTARRQMRRRRRGCLRYRAPRFLNRGNKARGWLAPSLQHRINTTMAWVARIRRWSPVTALSAELVRFDMQRLQNPEISGVEYQQGTLAGYEVREYLLAKWSRKCAYCGVENVPLQIDHVHPKAKGGTNRVSNLTLACGPCNARKSAQSVDAFLAKDPKRLTALLAQAKRPLKDAAAVNATRWALVGALKATGLPVETASGGCTKFNRSRLAIPKTHALDAVCVGAVSVVTNWQKPSLTIKCTGRGSYQRTRLDKYGFPRGYLMREKSVKGFKTGDLVRAIVPTGKKAGRHTGRVAIRKSGSFNIQTLAGVVQGIGYRHCRLLQRADGYGYFFNKAACDTAQKRE

SEQ ID NO: 10466 - protein, 427 aa, Parasutterella sp.; identical to SEQ ID NO: 6030

SEQ ID NO: 10467 - protein, 413 aa, unidentified
  REGION 1..413: note = Human gut metagenome
MTSYSFVLDANGKQLAPTKEPKAWFLIRKKRAALVSKYPMVIQLKKKIQENEICKDEIRCGIDDGGLHVGIALVQKCKSKNKVVFKGTIEQRNDVKHLMEVRRNYRRYHRYHKRYRQARFDNRKSSKRKGRIAPSILQKRQATIRVINRLNKWINITNYWLEDVSIDIRVLTDGYKSYSWQYQKSNRLDENIRKATILRDGGKCMECGKSNCRLEVHHIKPRRRNGSNTLDNLITLCESCHQKTEGQEELYMDRYFSLLKSSDNKNLNYAQHVMIGKRWLRKQLSGLGVLYLTSGGDTANKRIDWNIEKSHTNDAVCITDLQPDTCDIKEWAIKPMRRQSKAKTDHVLGIHHRDLVEYTFKNGETHRGYVTALYPDQKAINFQSQTKHCKKVNARKCKLLWNYSKIYWFENAS

SEQ ID NO: 10468 - protein, 415 aa, Bacillus sp.; identical to SEQ ID NO: 2431

SEQ ID NO: 10469 - protein, 189 aa, unidentified
  REGION 1..189: note = Human gut metagenome
MVYVLANDGQPLMPTERHGKVCRMLKSGIAKVVKKCPFTIQLQYESERNVQPVALGIDAGSKHVGVSATTKAKVLYESDVELRDDIVKLLATRRQLRRRRRSRKTRYRPARFDNRRRKEGWLAPSIRQKIESHLTVVANVCKILPVSQIIVETASFDIQKIKNPDIQGIEYQQGEQMDFWNIREYVLFR

SEQ ID NO: 10470 - protein, 431 aa, unidentified
  REGION 1..431: note = Human gut metagenome
MPNKVYVINKHGRPLMPCSPAKARHLLDEGKAKVKKRTPFTIQLVYGSSGYTQEVILGVDAGSKTIGMSASTTKEELLSAEVKPRNDVVDLLSTRREFRRARRNRKTRYRKPRFDNRVRSKHKGWLAPSVEVKIQEHITSIKRVCRILPVSKVVVETAEFDLQLLKAIADGKPVPQGEDYQKGEMYGHYNVRQYVLWRDNYTCQCCGAHATKKKEVRLHVHHLESRKVGGDAPDNQVTLCESCHEKLHKGLITEKDFKKRKRRSTRDATFMGIMRKTLMQRLCSELPIPVVETRGYITKATREKLRVLPKSHINDALAIAQGKQGFNVGYLPGILQIDKIYTIRPVRHHNRQLHKAAILKGGIRKSNQAGKYVFGYRLFDKVQFNGQDCFIWGRRTTGIFTIKTINGKMIKDGISFKKLKLVEKSTSYLIA

SEQ ID NO: 10471 - protein, 450 aa, Clostridium sp.
MVYVIDINENPLMPTNEAKARKLLKNKKAIVKELKPFTIQLNYETSNYTQRITLGIDSGYLNIGFSAITDKKELIVGEVKLLQGIKDRIQEKAMYRRQRRSRLRYRKARWNNRMKSKHKGWLSPSLQHKLDSHIKFVDSLYNILPIQKTIIEIANFDIQKIKNPNISGEEYQQGEMMGFWNLREYVLHRDNHKCQNPNCKNKSKQQVLEVHHIKYRSEGGSDAPNNLITLCSKCHTSPNHKKGKFLYDWCMNGKKVRGFKDATFMSMIRWYLTNILKEKHNNVSITYGYITKNHRITHKIKKTHYNDAFAIAKGINQIRNNDIFTVSQVRRNNRSLERFYDCKIIDVRNGNKVLGGDLNCGRRTRNKNHSTENLRIYRGEKVSKGQRRIRKQKYFYQPNDLVRYNGKVYTVKGSQNGGRYVALKDIKKVPKVDLLTPYKFEKGFVYGVCK

SEQ ID NO: 10472 - protein, 456 aa, unidentified
  REGION 1..456: note = Human gut metagenome
MSTCVCVLSNSGERLMPTIRLGKVRRLLKDGKAKIVKHHPFTIQLLYDSKTNTQPIEICEDVGYNYIGISVKSESHEYVSAQYDTLQDEKEHHDDCRKYRRTRRNRLRYRKPRFDNRKRSEGWLAPSLEHKKQLNIRLIERYVSVIPITRATVEVGSFDTMLLQAIQKGESKPEGVDYQKGPRYNLATLREAVFYRDNYTCQVCGRKIADGAILHMHHMFYWKGRHGYQLDELVTACEKCHTPANHQKGGKLFGFGENKEFANLSGAAFMNAVRWQIVNALYATYGKEFVTITYGAMTKEKRIILGIEKTHNNDAYAMGDYHPAHRCVFRHYQKRRRNNRVLEKFYDATYIDARTGNKAKGKELFNGRINRNHKKDSENFHKYRSKKVSKGRRSIRRQRYAIQPYDTVRLESKTYITSGCHNKGTRLLIPANGKSKSVAISKVQVVCHAGAWIQII

SEQ ID NO: 10473 - protein, 453 aa, unidentified
  REGION 1..453: note = Human gut metagenome
MLMAVAVVSRTGVPLMPTSPYRARKLLASGKAEKYGYDPFTIRLTERETGDTQPVELCMDIGYIHIGVSVKSEKHEYLALQIDTLTDEKKKHEKCREKRRNRRSRKRYRKPRFDNRKRDKGWLAPSLEHKKEIHVQAAERICRVIPVTDITMEMGNFDTQVLKAKEEGRPLPQGTDYQQGERYGTATLREAVFSRDNYTCLCCGRTMKDGAYFHVHHIRYRSQGGTDRMANLATVCEKCHTPANHQPGGKLYNWKPEIKSFKGATFMTAVRWQMYHEIKEKIPDVSVHLTYGAATKERRSALDIEKSHVNDAFVMGRFHPGHRARPELYIKKRRNNRVLESFYDARYIDSRDGKRKPGKELFNGRISRNHKKDSENLHKYRLRKVSKGKRCIRKKHYPIQPHDILVYCGRKYETAGCHNLGTGAILLPEGRSIAVSKLKIYRYSGGYYKAAFN

SEQ ID NO: 10474 - protein, 418 aa, Anoxybacillus sp.
MVEENMTCFMQRKGENPMVFVLDTNKCPLAPCHEAVARKLLKQGKAAIYKRYPFTIILKEIVDNFRPKTPYRLKIDHGSKHTGLAILRGQEVVWLGQLDHRTDIKERIDKRRAFRRARRNRKTRYRKPRFLNRKRKEGWLPPSLESRVQNIQTWVSRLKKLCPIGHISYENAKFDTQLMRNPEINGVEYQQGTLQGYEVREYLLEKFGRKCCYCGKENVPLEVEHIIPKSRGGTDRVDNLCLACHDCNQRKGSKTAEEFGYPHIQKQVKESLKDASAINSTRWKAYEVLKQTGLDVECGTGARTKMNRIRLDLPKTHYFDACCVGESTTNHLYFKTKEVLFIKAKGRGSRSRTNLDRPPCRKKFGTIGRMKTNIVEISPCSWGHEVDVSMVRKSPKDRRTPVAWCTTECRSRVGKHAG

SEQ ID NO: 10475 - protein, 413 aa, unidentified; identical to SEQ ID NO: 2636
  REGION 1..413: note = Human gut metagenome

SEQ ID NO: 10476 - protein, 426 aa, unidentified
  REGION 1..426: note = Human gut metagenome
MRIFVMNMRGDPLMPCTQKKARILLKEGKAVIYKYDPFTIQLTYATGETKQDCHIGIDTGSKHIGMAITSENKVLFKGEIELRQDVKSNIDTKHIYRRSRRNRKTRYRQPRFLNRKRSDKWLPPSLQNRVDHTFHWIDTFCSLVSDPILHIEVGKFDTAKMINPEINGVDYQHGQTYGFFEERYFVFARDNYTCQCCGKSKDKILQTHHIIYRSNGGTDRVDNLITVCTDCHTSKNHQKGGILYKWQEQHKKVKQYKEPPFMNAIRKRIFARYPNAHTTYGFETTPHRKELGLEKTHYNDAITISGITNIKEDPKEWLLIKQFRKKKRSLHEATARKGRKEPNCFQKRNSKNTPFYRGFYLNDKVKVFGHGQIGYITGFTSGGAYVKNVDGEYITIPNKSYKQVSIKYLKLLSHNNNWQYVVKSAV

SEQ ID NO: 10477 - protein, 512 aa, unidentified; identical to SEQ ID NO: 5811
  REGION 1..512: note = Human gut metagenome

SEQ ID NO: 10478 - protein, 420 aa, unidentified
  REGION 1..420: note = Human gut metagenome
MQYVYVLNRHGEPMMPCSPGKARLLLKQQKACVVKRTPFTIKLLYGSAGYKQPITLGVDAGSRHVGLSASTEKRELYREEFSPRNDVVKLLSTRKQNRCSRRYRKTRYRPPRFDNRVHSKHKGWLAPSVEVKIQEHITVIKHICKILPISLVRVETAEFDTQRLKAMLAGKPLPVGTDYQLGEMYDEYNVRQYVLKRDHYTCQCCGAHNTAKKVVKLHVHHLESRKTGGNAPGNLITLCATCHENLHKGKVTLDGKERGKPLRDAAFMGVMRKTLMARLKEELPIPVQGTYGYITKMRREKNDIKKSHTNDARCISKHPLAEPCSVCYRTKAIRHHNRQTHKVNFSKGGYRKRSQTPYLVEGYRLWDKVLYKGQECFVSGRRSSGSFALKKLDGTTISEGVTFKKLRLLEPATNYLIERM

SEQ ID NO: 10479 - protein, 369 aa, Lactobacillus sp.
VVSQEKVLCQSEVELRQDVHANLYTRKIYRRGRRSRKTRYRQARFLNRVHGKRDGLWLPPSVKGKVNHNIAWIKRYLAVLPNPDLHVEVGKFDMAKMLNPKISGKQYQEGSLRGWKNYEYYVLARDKYTCQLCRKHGKGVKLAVHHIIYRSQGGTDRVSNLITLCTDCHTTKNHQPGGKLYKWMKAKKKVTTHLKGATFMNILRKRIMAAFPEASFQYGSQTYVDRKNLNLPKGHFMDAIAISGIKSVGQMPETVTMISQFRKKKRSLHEATARKGRKQPNTTAKRNAKNTKCARGIWLNDYVRVIGNNAKGYVQGFKSNGYFVYLTDGLGNYVLNNGKNYINGKQCRLIMHNGNWQKAEQKLSLYEFK

SEQ ID NO: 10480 - protein, 515 aa, unidentified
  REGION 1..515: note = Human gut metagenome
MTALEERLSKTEYIYVLGFDGKPQMPTRRKRHVLKLLKTGRARIAEDIPFTIRLTYRNAPVLQPVTLAEDPGRTNIGAAVLSPLGDLLFAAVIETRNKEIKKLMTDRQKSRQASRRGERKARQRLAKRYGSMVKSGMVMRKLPMYAADRFVTCKFIRNTQARFCNRKRCPDWITPTVQHLVQTHLNIIRKISRYLPVTDIAFEVNRFAFMHMENPEAIGVDFQNGPLKGYGDVKEAIRTQQHGKCLMCKKPIAHFHHIVPRSRGGSDTIQNLAGLCPECHTKVHKDTAFRKDFDEKKSGQLKKYGALSALNQAVPFICKKLLEEYGEEHVHFCRGLDTSLIRTALGFEKTKKDQMHEVDAYCVGLAALEVNEVETPAFDHTFQIRQFRRQDRSIIHHQTGRSYYQGKEKIAQNRKPGFEQKTTALSQWYEEQVRIHGEKEAEKLRSQLRVEKSCRHYNDMDRFLPGAVFLYEGKRYVLSGRITNGKYLRACGQGMKNFPAAECTFIRHNAGLVFI

SEQ ID NO: 10481 - protein, 425 aa, unidentified; identical to SEQ ID NO: 8847
  REGION 1..425: note = Human gut metagenome

SEQ ID NO: 10482 - protein, 431 aa, unidentified
  REGION 1..431: note = Human gut metagenome
MPNKVYVINKHGRPLMPCSPAKARHLLDAGKAKVKKRTPFTIQLLFGSTGYTQEVILGVDAGSKTIGLSASAETKELFSAEVKPRNDVVDLLSTRREFRRARRNRKTRYRKPRFDNRVRSKHKGWLAPSVEVKIQEHITAIRRVCGILPVSKVVVETAEFDLQLLKAIADGKPVPQGEDYQKGEMYGHYNVRQYVLWRDDYTCQCCGAHATKKKEVRLHVHHLESRKVGGDAPDNQVTLCESCHEKLHKGLIAEKDFKKRKRRSTRDATFMGIMRKTLMQRLCSELPIPVIETRGYITKATREKLLVLPKSHTNDALAIAQGKRGFNVGYLPEIAQIDKIYTIRPVRHHNRQLHKATILKGGIRKSNQTEKYVFGYRLFDKVQFNGQDCFIWGRRTTGIFTIKTINGKMIKDGISFKKLKPVEKSTSYLIA

SEQ ID NO: 10483 - protein, 557 aa, unidentified
  REGION 1..557: note = Human gut metagenome
MIYNLVSIRERSFMKQKKQKVMVYILNKKGKPLMPTTRCGHVRKLLDSKKAVVVSSNPFTIRLKYDTPNGVQDVFAGIDSGRENIGSGASNEDGDCLYLGELKTSNKSIKMKITERAGFRKERRRRDRQNKQRKARKDHTEIQNGNADICRTTISCKSVQISYPAAEKSVTHKIIRGKEGKFANRHRDEGWITPSARQLVQMHMNDLKSMCKILPISHVTLERVAFDFQKLENENIKAWEYGKGKLYGYDSPEEYIHDVQGGKCLICGKPHIDYLHHIIPRSKGGSNKVSNLAGLCYDCHYGPMGVHNCQDTQDRLPELKNEANKQYKVSLLNSVMPVLIEEMDKFCKANSIIFSICEGHDTAKVRDIYDLQKDHCVDGFAISLVGRNVKSVDVMPDRIHQKQRYKKKSKNIIKKRNCREYYDGKKLVAVNRHKGTDQKADSLEEYMNTYAETHTADECKKHFESLTVKPARRTYTFHKEGRICPFHIGDKVRYEKKNKIKGNTKVETFICEGIRFPKDENKAKVEHNKTKSKKMKFCRVLEPGCTPYIDYRKLVLI

SEQ ID NO: 10484 - protein, 462 aa, Burkholderia sp.
MSVFVLDRSGKPLMPCTEKRAKMMLTRGRARVHRVVPFVIRLTDRLADSSSFQPLRIKIDPGSKITGIALVRESAEGIAVLNLFELAHRGRQISEALTARRAFRRRRRGANLRYRAPRFLNRTKPNGWLAPSLQHRVDTTAAWIQRIRRWAPVAALSSELVRFDMQAMANPEISGVEYQQGTLAGYEVREYLLEKWGRCCVYCDGKDRLLQIEHLTSKANGGTDRIGNLALACAPCNQDKGALDVRAYVKDPKRLARILATASRPLKDAAAVNATRWALANSLRETDLPLELASGGRTKFNRIAHNIPKTHALDAVCVGHVASISDWQCPTLSIKATGRGSYQRTRLTASGFARGYLMRRKQVNGFQTGDRVRAVVPSGKKAGVHVGRVAVRASGSFNIQIPDGVVQGISHRYCRVIQRGDGYGYHFNPKDSFLEGDAESGRASHAALSLPALKDRVSRAFG

SEQ ID NO: 10485 - protein, 412 aa, unidentified; identical to SEQ ID NO: 5514
  REGION 1..412: note = gut metagenome

SEQ ID NO: 10486 - protein, 933 aa, Streptomyces sp.
MADISRACTSSASALRTAHPANPCRPTASAAVQPRIRSASRFQCVTTPSASKAHSAASMPSSSAASRSEPPVSSGPSGPPGPSWLCGPSRSGSSGPSSSVVPLRREALTWTPWRLRRRICGARFAHWPSFNWNVTQPTSCSRRLTESMPGTGLRLQPQIDPLVGLPVQHVPVDLHEPAPLGEPQPVRVHGQHACLDRPRTQHTRAGEPALVQRRAETTPPELGQHARDDRRDALLPGRRPHRGTPHEHVTQIRVLQPVPLTAHPGVLQGHRGGRHDDVVDVAPLFELGVAVHGFDSKIGHTVSQPAVPAPGQLHKRTPAGRASTTVTAYAFGKSDRFANPSDVRLIISAARSPFTSVSRNSERRSPAPQPQRCHVTSPSHHDQRIREVTPMTTFPAGEQTHQAVLPQQPALESVRADTPGSRDETAHGHPATARGTGREHGRGETDGHGTRTRRRHAKRAAQAAQAEENGSGDAPTGASRVFVLSKDGHPLMPCHPARARELLSKGRAAVARQVPFTIRLKDRTLADSEVDGVQLRIDPGSKGTGLVLTDEKKETTEDGTTVTVRRGLISVELHHRGAQIQSCMRQRAGYRNRRRSANCRYRTPRSQNRVRPEGWLPPSLRHRVDTTFSLANRLCRYAPVTDIHLERTAFDTHSMSAGKPLYGAEYAQGLLAGTTTRSYLHARWGGACAYCGATGVPLNIEHVRPRSRQGSSRISNLVLSCIPCNKAKGSRSIESFLAHRPDLLARILEQTKAPLRDAAAMNAIQWQLTEALETLERPVHAWPGLLTKTNRDAMGLAKTHTLDALSVGHIDHESGDAIARFPDRVLIVKATGRGSYARTTPDRYGFPRLRRARKKQHFGYVTGDLVRAVMPSGKWAGTWTGRISVRARGQHSLTTSIGRINLSHWNLRLLQRGDGYGYSFRPEAVPSASPKNS

SEQ ID NO: 10487 - protein, 411 aa, unidentified; identical to SEQ ID NO: 4865
  REGION 1..411: note = Human gut metagenome

SEQ ID NO: 10488 - protein, 413 aa, unidentified; identical to SEQ ID NO: 2636
  REGION 1..413: note = Human gut metagenome

SEQ ID NO: 10489 - protein, 493 aa, unidentified
  REGION 1..493: note = Human gut metagenome
MAVVYVISASGKPLMPTTRCGHVRGLLNEGKARVVEREPFTIQLKYETPDVTQPLYLGIDPGRTNVGAAVVCEDGECVFTAQLTTRNKDVPKLMKARKQFRMAHRRLKRHCKRQRRAKAAGTLSQKGEFQRLLPGYEKPILCKGIRNKEARFNNRQRPVGWLTPTANHLLLTHLNMVKKLQKLLPITDVVLEVNRFAFMAMENPSIRRWQYQRGPLYGKDCVEDAVYAQQDGHCLFCGRPIAHYHHVVPQHKNGSDTLENRVGLCNEHHDLVHKDRAWEAKMKETKAGLNKKYHALSVLNQIIPALTEQLTELFPQHAFVTTGKDTADFREDHGIAKEHYLDAYCIACSVLTEPDRVSAPTAKPYRLMQFRRHDRQVCHKENIKRVYLLDGKAVATNRHKPIEHKDDSLEEFRRTHTQQEVSSLTVKDHQPIYKDMQRFMPGGVFLCNGKVHTLLGSQGRYKGMPYYYIGTDGSRNNATRCIFLQQNCGLRWV

SEQ ID NO: 10490 - protein, 493 aa, unidentified
  REGION 1..493: note = Human gut metagenome
MAAVYVISASGKPLMPTTRCGHIRGLLNAGKARVVEREPFTIQLKYETPDVTQPLYLGIDPGRTNVGSAVVREDGECVFTAQLTTRNKDVPKLMKARKQFRMAHRRLKRRCKRQRRGKAAETLSQKGEFQRLLPGYEEPILCKGIRNKEARFNNRQRPAGWLTPTANHLLLTHLNMVKKLQKLLPITDVVLEVNRFAFMAMENPSIRRWQYQQGPLYGKGSVEDAVYAQQDGHCLFCGKPIAHYHHVVPQHKNGSETLENRVGLCNEHHDLVHKDRAWDAKMKETKAGLNKKYHALSVLNQIIPALTEQLTAMFPQHAFVTTGKDTADFREDYGIAKEHHLDAYCIACSVLAEPTKVAAPTGKPHRLMQFRRHDRQVCHKENIKRVYLSEGKAVATNRHKAIEQKDDSLEEFRKTHTQQEVSALTVKDHQPVYKDMRRFMPGGVFLFNGKVHTLQRSHGRYKGMPFYYIDTDGSKNHAKGCIFLQQNCGLRWV

SEQ ID NO: 10491 - protein, 573 aa, Streptosporangium sp.; identical to SEQ ID NO: 7666

SEQ ID NO: 10492 - protein, 442 aa, Lactobacillus sp.; identical to SEQ ID NO: 5571

SEQ ID NO: 10493 - protein, 421 aa, unidentified
  REGION 1..421: note = Human gut metagenome
MRGQPLMPCSPAKARHLLMDKKAVVKRRTPFTLQLTIATGETKQDVTLGVDAGAKHIGLSASTEKEEVFASEVELRQDITGLLAARLAFRRARRHRKTRYRAPRFLNRVHSKHRGWLAPSVENRIQAHMSRIDAICGLLPVTKIVIETASFDIQKIKNPDVEGTDYQQGDQLGFWNVREYVLFRDGHVCQHCRGRSKDKVLNVHHLESRQTGGDAPNNLITLCETCHKAYHAGKIKLKVKRGQSFREEAFMGIMRWTMLDRVRKAHPDLPVENTYGYLTKNTRITLGLPKTHCIDAYCIAGNLNARRRGVYLYQRQMRKHNRQIHKCKVLSKTLKDGTKVGYRKLNQTPYLVKNFRLFDKVRCFGQTGFIFGRRTSGHFDVRTLNRTRLSDCVNSKKLTLLEKRRTFLTELRKEDGASSPV

SEQ ID NO: 10494 - protein, 456 aa, unidentified
  REGION 1..456: note = Human gut metagenome
MSTCVCVLSNSGERLMPTFRLGKVRRLLKDGKAKIVKHHPFTIQLLYDSKTNTQPIEICEDVGYNYIGISVKSQSHEYVSAQYDTLQDEKACHDSCRKYRRTRRNRLRYRKPRFDNRKRSEGWLAPSLRHKKELNVNVVKMYCAVMPITHATVEVGSFDTMLVKAIQEGKAIPEGADYQKGPRYNLATLREAVFYRDNYVCKVCGRKATEGAILHVHHMFYWKGRHGNSLSELITVCEKCHTPANHQKGGKLYGFGENVKFADLSGAAFMNTVRWQIVNELYAAFGKDFVTVTYGAMTKEKRIALHLEKSHNNDAYAMGNCHPAHRCEFGHYQKRCRNNRVLEKFYDATYIDTRTGDKAKGKELFNGRISRNHKKDSEDLHKYRSKKVSKGRRSIRRQRYAIQPYDTVRLESKSYITSGCHNKGTRLLIPANGKSKSVAISKVQVVCHAGAWIQII

SEQ ID NO: 10495 - protein, 460 aa, unidentified; identical to SEQ ID NO: 7734
  REGION 1..460: note = Mouse gut metagenome

SEQ ID NO: 10496 - protein, 512 aa, unidentified; identical to SEQ ID NO: 4049
  REGION 1..512: note = Human gut metagenome

SEQ ID NO: 10497 - protein, 428 aa, unidentified
  REGION 1..428: note = Human gut metagenome
LKVFVLNMRGRPLMPCSPAKARHLLKAGKAVVRRRTPFTIQLRIATGETKQSVTLGVDAGAKHVGLSAATEKEEVFASEVELRQDITGLLAARLSLRRERRQRKTRYRAPRFLNRVRSKHNGWLPPSVENRIQAHLSRIDAICGLLPVTKIVIETASFDIQKIKHPDVEGTDYQQGDQLGFWNVREYVLFRDGHVCQHCHGHAKDKILNVHHLESRQTGGDAPNNLITLCERCHKACHAGKIKLKVKRGQSFREEAFMGIMRWTLLDRVRKAHPGLPVENTYGYLTKNTRITQGLPKAHCVDAYCIAGNLKAVRRGVHLYQRQVRKHNRQIHKCTVLSKTLKDGTKIGYRKLNQTPHLVKNFRLFDKVRCLGQTGFIFGRRSSGYFDVRRLDGVKLSPSISWRKLTLLEKRSTYLTELRKEDGASSPV

SEQ ID NO: 10498 - protein, 1304 aa, Nocardiopsis sp.; identical to SEQ ID NO: 3641

SEQ ID NO: 10499 - protein, 488 aa, Streptomyces sp.; identical to SEQ ID NO: 7205

SEQ ID NO: 10500 - protein, 507 aa, unidentified
  REGION 1..507: note = Human gut metagenome
MSEYIYVIGVDGDPQMPTKRKRHVEQLLQTGRARIFRQVPFTIQLTYENKPVLQPVTIAEDPGRSNIGMAVVSLSGELLSAAVVQTRNKEIVKLMEKRKQHRRTSRNGERKARQRLAKKCHTMVKAGSLMRKLPMYGKDKRVRCNMIKNTEARFCNRKQEDGWLTPSAEHLVRTHINLIHKMQKFLPITDVAIEINRFAFLSLEDPSISGVDFQNGPLKGYDDLNAAVEDLQDGHCLMCNSPIGHRHHIVPRSMQGSNTIGNIAGLCCKCHERVHKNSAFEDSLKKKKAGLNKRYAAVSALNQAIPFICKRLEQEFGKEHVHYCSGRDTSMVRRSLGYHKTKEEQLHEVDAWCIAVLSLQQIPEKAPSFDHVHEILQFRRQDRSRIKAQTSRAYYHERKKIAKNRKKAEGQREDSLQEWRKRQVERYGEEQTRKMISQLKVKKSIRRYNRLDRLMPGAVFYYQGVRYVMRGQHCEGTYLQAVGMGSKDFPAKKCKIVAQNEGLVFVS

SEQ ID NO: 10501 - protein, 415 aa, unidentified; identical to SEQ ID NO: 5395
  REGION 1..415: note = Human gut metagenome

SEQ ID NO: 10502 - protein, 413 aa, unidentified; identical to SEQ ID NO: 7541
  REGION 1..413: note = metagenome

SEQ ID NO: 10503 - protein, 424 aa, unidentified
  REGION 1..424: note = Human gut metagenome
MRVFVFNMRGRPLMPCSQRKARLLLRENKAMIYKYHPFTIQLTYTTGETKQDCHIGIDTGSKYIGAAVRSEDKVFWKGEIELRQDIRSNLDTKRIYRRSRQNRKTRYRKPRFLNRKRRDEWLPPSLQSRINHTFHWIDTLSSLVPNPILHIEVGKFDVAKMINPEIHGVDYQHGQTYGFFDERYFVFARDNYTCQCCGKSKNKILNTHHIIYRSNGGTNRVDNLITVCTDCHTLQNHRKGGIFYQWQEQHKKVKQYKEPPFMNTLRKRIFVAYPDAEITYGSETTPKRKAMKLDKTHYNDAIVISGINEIKENPEEWLLIKQFRKKKRSLHEATARKGRKKPNRNQTRNSKNTPYYKGFYLNDKVSVFGKSGYITGFTSNAAYIKDENNDYITLPNKTYKQVSINKMELECHNNNWQYIIKNAV

SEQ ID NO: 10504 - protein, 412 aa, unidentified; identical to SEQ ID NO: 5514
  REGION 1..412: note = gut metagenome

SEQ ID NO: 10505 - protein, 442 aa, Anaerostipes sp.; identical to SEQ ID NO: 3218

SEQ ID NO: 10506 - protein, 442 aa, unidentified; identical to SEQ ID NO: 2834
  REGION 1..442: note = Human gut metagenome

SEQ ID NO: 10507 - protein, 490 aa, unidentified; identical to SEQ ID NO: 6170
  REGION 1..490: note = Human gut metagenome

SEQ ID NO: 10508 - protein, 434 aa, unidentified; identical to SEQ ID NO: 5659
  REGION 1..434: note = Clostridiaceae bacterium

SEQ ID NO: 10509 - protein, 431 aa, unidentified
  REGION 1..431: note = Human gut metagenome
MPGKVYVISRLGHPLMPCSPAKARHLLDDGKAKVVKRTPFTIKLLYGSTEYTQPVILGVDAGSKTIGLSASTTKEELFAAEVMPRNDVVENLSTRREFRRARRNRTTRYRKPRFNNRVHSKNNGWLAPSVEVKIQEHITSIKRVCAILPISKIVVETAEFDLQLLKAVQDGKPVPEGEDYQKGEMYGSYDVRQYVLWRDNYTCTCCGVKGTDKKPIKLHVHHFESRKHGGNAPDNYGTLCEDCHKKHHLGIITDISLKTRKRPSTRDAAFMGIMRKTLMQRLITGLSIPVAETKGYITKAAREEILKLPKTHTNDALAIAQGRHGFGIREPAYVKPTNRIYTVRPVRHHNRQLHKATILKGGIRKLNQASKYIFGFRLYDKVLYRGGECFVWGRRTSGSFLLRTIDGTKVKDGVGHRNLTLLERSTNYLIA

SEQ ID NO: 10510 - protein, 423 aa, unidentified; identical to SEQ ID NO: 3951
  REGION 1..423: note = Human gut metagenome

SEQ ID NO: 10511 - protein, 535 aa, unidentified; identical to SEQ ID NO: 6116
  REGION 1..535: note = Human gut metagenome

SEQ ID NO: 10512 - protein, 439 aa, unidentified; identical to SEQ ID NO: 9904
  REGION 1..439: note = Human metagenome

SEQ ID NO: 10513 - protein, 415 aa, unidentified
  REGION 1..415: note = metagenome
MVYVLDKNGQPLMPTDRHRKVRLMLQSGQAKVIKRCPFTIQLNYDSGHQTQEISLGIDAGSKHIGVSTTTKIKVLYEVDVELRNDIVDLLSSRRELRRGRRNRKTRYRQAKFNNRRRGNGWLAPSIRQKIGTHLTVVENICKMLPISRIMVETASFDIQKIKNPDIQGAEYQQGDQLEFWNVREYVLFRDGHTCQCCKGKSKDKILNVHHIESRKTGGNAPNNLITLCETCHTGYHKGTVQLPKAIKRGMRFKDAAFMGIMRWAFYEALKQQYEPVALVHNTYGYITKHTRIEHNLPKEHYVDARCISGNPDAFPSGEYYYQKKVRCHNRQIHKLTILKGGIRKQNQATYLVKGYRLFDKVSYQGKGYFVFGRRQSGFFDIRTLSGEKVNKGSLSCKKLKFIATRTYYLTERRAV

SEQ ID NO: 10514 - protein, 518 aa, unidentified
  REGION 1..518: note = Human gut metagenome
VKEVAYMSTVYVLNKDGKPLMPTTRGGRVRHLLKEQKARVVRTKPFTIKLLYETNDVVQPLYLGIDPGRTNIGVAVVKTDGTAVFTAHLETRNKEIPKLMKKRKDSRRARRTNGRRCRRQRRAKANGTISKKCVKQATAQNGSVSKRAKEIGVIKRHLPGCEKDVLCIGIKNKEAKFNNRTRPEGWLTPTANQLLQTHINLVKKIQKFLPISNVVLEINKFAFMQLDNPNIQKRQYQQGPLYQKGSLESAVSEMQEHHCLFCKNAIDHYHHVVPQSENGSNTISNIVGLCTKHHDLIHKETAWQEKLAKKKTGLNKKYGALSVLNQIIPALTKELSSLFPKHFFATNGKSTYDYRAAHAVSKDHWLDAYCIACSILPNDVCDSDINNRVPYELKQFRRHDRRALHKENMSRVYTLNGKKVATNRHKAVEQTTDSLEEFRQRQPNDVCKLKVKEHHPEYRNPKRNFPGCVFLIGKRTHVMQGTSGSHNGKADGYYDTNGNSYSSGECKFVAKNEGIVFT

SEQ ID NO: 10515 - protein, 464 aa, unidentified
  REGION 1..464: note = Human gut metagenome
MYVFVIGLDGTRLMPCKPRKARKLIEAHKAEIYKKQPFTIRLLYKTGCATQPVTIGIDTGSQHIGIAVTSGNKVLYQAEIELRSTMDKRSLMETRRSYRRSRRYRKTRYRSPKFRFHTKRTYSETLVKRKTTGVMTHWVKHTNSMSTNRPDGWLAPSMQSKADYHIRWINRFLDVLPPDTKLRLEIARFDIARMKNPEVHSELYQYGPQYDYENLKAYVFDRDHYKCVVCKRKLGSKQPDGHSLKGMMHHITFRSKGATDNPDQLVTVCEYCHTPQAHKKGGVLWNLKEKHRPVQRGLRDATQMNIIRTRLVKAFPDAELTYGNITAADRKKMHLPKSHAGDAVAIAMKGKTVNICEPTVYIKQVRKKKRSLHEATPRKGRKNPNTQAVRNPKNTKSIDIYHIYDTVRFQNKTGFISGFTGMSAYVQDFDGNYITMPGKSYKQINLSNLELVRHNNNWIQKTGN

SEQ ID NO: 10516 - protein, 455 aa, unidentified; identical to SEQ ID NO: 7753
  REGION 1..455: note = Sediment metagenome

SEQ ID NO: 10517 - protein, 450 aa, unidentified
  REGION 1..450: note = Human gut metagenome
MVYVINFEGKPLMPTTNAKARKLLNQKKATVKRVNPFIIQLLYKTDTEYIQTITLGIDSGYLNIGFSAITDSKELIVGEVKLLQGMKDRLLEKSQYRRIRRQRLRYRKPRWNNRKIKQGWLAPSLQHKLDTHVKFIDYLNTILPIRNIVLEVANFDIQKIKNPDISGVEYQQGKQMGFWNVREYVLHRDGHKCQNPNCKNKSKEQILEIHHIKYKSEGGSDAPSNLITLCNKCHTSPNHKKGKFLYDWCENGKKVRGFKDATFMSMIRWYLLEQLKEKYTNIKATYGYLTKNHRIEHGIEKSHFNDAFAIAKGVNQVRNLEIFKVEQSRLNNRSLEKFYDAKYIYSRTGEKVSASELNCGRRTRNKNLNSENLRVFRGQKISKGQRRIRKKKSLYQPNDLIKYESKVYTVKGSQNEGKYIALKEIKKVPNVKLIKPYIFKKGLNWSSGLC

SEQ ID NO: 10518 - protein, 416 aa, unidentified
  REGION 1..416: note = Human gut metagenome
MVYVLDKNGQPLMPTDRHRKVRLMLQSGQAKVIKRCPFTIQLNYDSGHQTQEISLGIDAGSKHIGVSATTKIKVLYEADVELRNDIVDLLSSRRELRRGRRNRKTRYRQAKFNNRRRGNGWLAPSIRQKIGTHLTVVENICKILPISRIMVETASFDIQKIKNTDIQGAEYQQGDQLGFWNIREYVLFRDNHTCQCCKGKSKDKILNVHHIESRKTGGNAPNNLITLCEICHTGYHKGAVQLPKTVKRGMRFKDAAFMGIMRWAFYEALKQQYEPVGTPVHNTYGYITKHTRIEHNLPKEHYVDARCISGNPDAFPNGEYYYQKKVRCHNRQMHKLTILKGGIRKQNQATYLVKGYRLFDKVSYQRKEYFVFGRRKSGFFDIRTLSGKQVNKGSLSCKKLKFIATRMYYLIERRAV

SEQ ID NO: 10519 - protein, 447 aa, unidentified
  REGION 1..447: note = Human gut metagenome
VPAYRFKHITKKEVPYMVYVLDIDGQPLMPTSRHGKVRRLLNSHLAKVVKRCPFTIQLLYQSTKETQPVSLGVDAGSRHIGLAATTEQKVVYQEKLVPRNDVVKLLSARRALRSSRRNRKTRYRRVRFNNRVHSKHKGWLAPSVEVKIQEHITATKRICQILPIFDIHVETAEFDLQRLKAMEEGRLLPAGTDYQLGEQYDFYNTRQYVLHRDEYTCQCCGTHDNNVKLHVHHVESRQTGGEAPNNLITLCEHCHKSIHAGKMMLPKGKKRGKSYRDAAFMGIMRNTLLERLRKEVNVPVTMTYGYITKYWREKAGLEKSHINDAICISKHPYARPLETYYLTKAVRHHNRQIHKTKFSKGGIRKRNQAPYLVKGFRLFDKVLYQGESYFIFGRRITGYFDIRTLDGTKVNKGSTSYKKLRIQDTAEAYLKEARAIPHMNKFTCVLA

SEQ ID NO: 10520 - protein, 423 aa, Tolypothrix sp.
  SITE 408: note = misc_feature - Xaa can be any naturally occurring amino acid
MSNYVFLIDQNKTPLNPVHPAQARKLLDCGKAAVFRHYPFTLILKRIIENPNVYPLTLKIDPGSKFTGIVLVTNQGNVIWGMELQHRGQQIKDALLHRRAIRRGRRNRNTRYRKARFLNRKRPDGWLAPSLRHRILTTETWVKRIQKFASIGSIVQELVKFDTQVIQNAEISGTEYQQGTLHGYECREYLLEKWNRQCAYCGAKNVPLEIEHIQPKSKGGSDRISNLCLACNKCNQRKGNKDIFDFLKDKPHVLSRVLRQAKAPLKDAASVNSTRWALFNTLNSFGLPVSTGTGGQTKFNRIRLELPKAHWIDAACIGVVETIKFATTKILQVKATGFGGRQRCQTNKFGYPQKHRPLRPILGFCTGDIVRADVPKGKYKGTFTARVCPMSHGYGEFVIDKKRRSIKXNYLTPVHRKDGYDYA

SEQ ID NO: 10521 - protein, 418 aa, unidentified; identical to SEQ ID NO: 2710
  REGION 1..418: note = Human gut metagenome

SEQ ID NO: 10522 - protein, 456 aa, unidentified
  REGION 1..456: note = Human gut metagenome
MNTCVCVLSNNGERLMPTIRLGRVRHLLKDGKAKIIKHHPFTIQLLYDSKTNTQPIEICEDVGYNYIGISVKSQSHEYVSAQYDTLQDEKACHDSCRKLRRTRRNRLRYRKPRFDNRKRGEGWLAPSLKHKKELNVNVVKMYCTVMPITHATVEVGSFDTMLVKAIQEGKVIPEGADYQKGPRYNLATLREAVFYRDNYVCKICGRKATEGAILHMHHMFYWKGRHGNSLNELLTVCEKCHTPANHQKSGKLYGFGEKIKFADLSGAAFMNTVRWQIVNELYVAFGKPFVTITYGAMTKEKRIALQLEKSHNNDAYAMGDFHPVHRCGFRHYQKRRRNNRVLEKFYDATYIDARTGNKAKGKELFNGRISRNHKKDSENLHKYRSEKVSKGRRSIRKRRYAIQPYDTVRLKGKTYITSGCHNKGTRLLIPVNGKSKSVTISKVQVVCHAGPWIQII

SEQ ID NO: 10523 - protein, 408 aa, unidentified; identical to SEQ ID NO: 4810
  REGION 1..408: note = Human gut metagenome

SEQ ID NO: 10524 - protein, 416 aa, Moorena sp.; identical to SEQ ID NO: 5729

SEQ ID NO: 10525 - protein, 431 aa, unidentified
  REGION 1..431: note = Human gut metagenome
MPNKVYVINKHGRPLMPCSPAKARHLLDAGKAKVKKRTPFTIQLVYGSSGYTQEVILGVDAGSKTIGMSASTTKEELLSAEVKPRNDVVDLLSTRREFRRVRRNRKTRYRKPRFDNRVRGKNKEWLAPSVEVKIQEHITAIKRVCYILPVSKVVVETAEFDLQLLKAIEEGKPVLQGEDYQQGEMYGHYNVRQYVLWKDNYICQCCGAHATKEKEVRLHVHHLESRKTGGDAPGNLITLCDSCHEKFHKELITEKDLMKRKRKSTRDATFMGIMRKTLMQRLCSELPIPVVETRGYITKATREKLLVLPKSHTNDALAIAQGKRGFNVGYLPGIIQTDKIYTIRPVRHHNRQLHKAAILKGGIRKSNQAGKYVFGYRLFDKVQFNGQDCFIWGRRTTGIFTIKTINGKMIKDGISFKKLKLVEKSTSYLIA

SEQ ID NO: 10526 - protein, 475 aa, unidentified
  REGION 1..475: note = Human gut metagenome
HYYLTKGVSCMSTCVCVLSNNGERLMPTIRLGRVRHLLKDGKAKIIKHHPFTIQLLYDSKTNTQPIEICEDVGYNYIGISVKSQSHEYVSAQYDTLQDEKACHDSCRKLRRTRRNRLRYRKSRFDNRKRGEGWLAPSLRHKKELNVNVVKMYCAVMPITHVTIEVGSFDTMLLKAVQEGKAIPEGADYQKGPRYNLATLREAVFYRDNYVCKVCGRKATEGAILHMHHMFYWKGRHGNSLSELITVCEKCHTPANHQKSGKLYGFGENVKFADLSGAAFMNTVRWQIVNELYAAFGKDFVTITYGAMTKEKRIALRLEKSHNNDAYAMGEFHPNHRCTFEHYEKVRRNNRTLEKFYDSRYIDIRTGEIATGKELFNGRINRNHKKDSENLHRYRGKRTYAGHRALLRKKVKLNPGDLVSLNGEVLIVHGTHTNKKGAVNVEFKVPAKNGQKSASLKKLKIVKTTDSMHSAWEKIS

SEQ ID NO: 10527 - protein, 427 aa, Enterococcus sp.; identical to SEQ ID NO: 2410

SEQ ID NO: 10528 - protein, 421 aa, unidentified
  REGION 1..421: note = Human gut metagenome
MIYVRSKDGKALMPSERGGRIGYLLRHGKAHVVSRVPFVVQLDYESTIYTQEVSLGIDAGSKHIGVSASSEKKELLAAQVELRSDVVNLLSTRKELRRTRRNRKTRYRKVRFDNRKKKDGWLAPSVEQKVESHLKVISLVRKLLPITKTTIEVAPFDAQKIKNPDIKGDEYQQGEQMGFWNVREYVLARDGHKCVHCKGKSRDPILNVHHLESRKTGGNSPSNLVTLCETCHKAYHRGEFDLKIKRGTTLRDAAVMNIMRWSVYERAKAEFGNVYLTYGYITKHTRIENDIEKTHAADAFCIAKNVHARRSRTFFMCRCVPRHTRALHVANPKKGGIRRSCIASHKIGKSRFQRFDMVWWKGKECFIFGSTHGRPILRDVEGKQIAGQPSVNIKTIKFLKRLRNNILVEERTSESWIENES

SEQ ID NO: 10529 - protein, 416 aa, unidentified
  REGION 1..416: note = Human gut metagenome
MVYILNKHNEPLMPCSERKARLLLKDGMAIVYRRDIFTIKLINGSYGYKQHITLGVDCGSKHIGVSATTDKQELFSANAELRNDVVKLLSDRRMLRRSRRFRKTRYRKPRFNNRIVKNGWIAPSIKQKIQSHFNLVGFLHKLLPISNIVIETASFDIQKINNPSISGSEYQQGEQLDFFNVREYVLFRDNHICQHCKGKSKDKVLNVHHIESRKTGGDSPKNLITLCETCHKAYHRGEFELNVKRGKSFRDAAFMGIMRWKLYDELKLRYDNVSMTFGYITKYKRIKLGLDKEHYNDAYCICGNLAAKMLSTHHFIRFIPRHSRVLHMQKFSKGGVRRSASASYWLNGGKPSKYGIRFTRFDKVNFNGITCFISGSSKGFAVLRDINWNKVNCCKTTVTVNKLALISRVHGCMLFG

SEQ ID NO: 10530 - protein, 749 aa, unidentified
  REGION 1..749: note = Human gut metagenome
LKVFVLNMRGQPLMPCSPAKARHLLKAGKAVVKRRTPFTIQLRIATGETKQNVTLGVDAGAKHVGLSATTEKEEVFASEVELRQDITGLLAARLSLRRERRQRKTRYRAPRFLNRVRSKHKGWLAPSVENRIQAHMSRIDAVCRLLPVTKIVIETASFDIQKIKDPSVEGTDYQQGDQLGFWNVREYVLFRDGHVCQHCHGHAKDKILNVHHLESRQTGGDAPNNLITLCERCHKACHAGKIKLKVKRGQSFREEAFIGIMRWTLLDRVRKAHPGLPVENTCGYLTKNTRITLGLPKAHCVDAYCIAGNLKAVRRGVHLYQRQVRKHNRQIHKCTVLSKTLKDGTKIGYRKLNQTPHLVKNFRLFDKVRCLGQTGFIFGRRSSGCFDVRRLDGVKLSSDISYRKLTLLEKRGTHLTELIKEDGASSSVRRQRFLRRVSMNKPCTYLLSALMASAVLAPVAASAADKSELEVRMEAAQKVLADRSYYERWSPEAALKTVEDAKAANEAGSARQKEIDGALDVMKDWCHTRFLVNACIKDARDLHHEREKEIRSVRLKADEMIRLDRVEQRRARQESQKQNVKQPMKLGGSTESPESRSESRAEEVKTKQSRAEERRALEEANVRAYEEKQARAARKAEERHDPIRVKSRVKAPSSPIEGHLGRTAADVEAGRAEAAERMAQEDANIAAFNAKQAEAKKRLEEAEATAAERKASREARQANFNKTLEERRAAQKRYEESRENKDSGLKKYF

SEQ ID NO: 10531 - protein, 416 aa, unidentified
  REGION 1..416: note = Human gut metagenome
MPCSPAKARHLLDDGKAKVKKRTPFTIQLVYGSSGYTQEVILGVDAGSKTIGMSASTNKEELFAANVIPRNDVVDLLSTRREFRRSRRNRTTRYRQPRFNNRVGSKHKGWLAPSVEVKIQEHITAIKRVCNILPVSKVVVETAEFDLQLLKAIEQGNPIPQGEDYQRGEMYGHYNVRQYVLWRDGYTCQCCGAHSTNKKEVRLHVHHLESRKTGGDAPSNQITLCESCHKRFHKGLLTDKNLKKRKRRSTRDATFMGLMRPTLMQRLRAELAIPVVETRGYITKATREKLLILPKSHTNDALAIAQGKHGFKVGYLPGIKQVDKIYTVRPVRHHNRQLHKATILKGGGRKSNQAEKYVFGYRLFDKVLYQGVECFVFGRRSNGYFLLKKINGEKVKDGVSYKHLKLLERSQSYLVA

SEQ ID NO: 10532 - protein, 414 aa, unidentified
  REGION 1..414: note = Human gut metagenome
MPCSPAKARLLLKEKKAIVKRRTPFTIQLTIATGESKQPVSLGVDAGYKHVGFSASTEKAELYASEVELRQDVSDLLSARRALRQSRRNRKTRYRAPRFDNRIRTKRKSWLAPSVENRINAHLSRIEAVLRLLPVTKITVETASFDMQLLKNPDISGKEYQEGEQLGFWNVREYVLFRDGHVCQHCHGRSKDPVLNVHHLESRRTGGDSPGNLITLCETCHKALHRSEITLKTKRGQSFRAEAYMGLMRWEVLNRLKTSHPGLEVHNTYGYRTKYTRIVNGIDKSHCADAFCIAGNLGAERLGEFFFQKQTRRNNRQIHKLSILKGGIRKRNQAPFEVNGFRLFDKVACKGEEGFIFGRRSSGYFDVRKLDGTCISAGISYKKLHLLEKRRTYLTEIRKEEALPPLPEGRGLRA

SEQ ID NO: 10533 - protein, 470 aa, Anaerostipes sp.; identical to SEQ ID NO: 2825

SEQ ID NO: 10534 - protein, 412 aa, unidentified
  REGION 1..412: note = Human metagenome
MENNIEYCFVIDKDNQPLAPTKVNKGWYLIRKSRAKLKSMYPMVIQLNKKVESNENDKSYMACGIDDGFVHVGLAIVQKCPTKNKVVFKGTIEQRQDVKHLMDTRRGYRQYHRYHKRHRPARFNNRSSSKRIGRLVPSIKQKKDAILRVLYQLNKWIYIKEYYLEDVCIDIRSMTDNYKPYKWQYQKSNRLDENLRKAAIIRDNYKCQECGKSNCKLEVHHIRARKYHGADTIGNLITLCSKCHEKTEGKEKDFEDKYFKIISSKPKRFDYVMHVMQGKNYLRNKISNLGLLHLTNGGATANKRIEWNIEKSHSNDAICITDSIPDFCNIKEWTIKPMRRKSKAKTDNVLGIKHRDLVSYTYKNGETHIGYVTALYPEQLALNFQSKTKHCKKVNAQKCRLLWKFNKIYWLK

SEQ ID NO: 10535 - protein, 415 aa, unidentified
  REGION 1..415: note = Human gut metagenome
VLGQDGHPLMPTCRHGKVRRMLKSGMAKVVKRCPFTIQLQYESTIHTQEINLGIDAGSKTIGVSATTEKKVLYESEVILRNDIVGLLSGRRALRSSRRNRKTRYRKPRFDNRKKPDGWLAPSIRQKIETHVTVVGNVIKILPVTKIIVETASFDIQKIKNPEIEGEGYQHGEQLNFWNVREYVLFRDGHTCQCCKGKSKDSILNVHHIESRKTGGNAPNNLITLCETCHKAYHKGIITLPKEIYRGMRFRDAAFMGVMRWAFYDRLKELYNPLGVEVINTYGYITKNTRIEYGLPKEHYVDARCISGNPAAKHLGHYYFQKKVRCHNRQIHKNTILKGGTRKRNQAAYLVKGFRLFDKVKYQDQEYFIFGRRTRGSFDIRTLDGTKVNKGSISCKKLQLVEKSKHYLTEQRKVTA

SEQ ID NO: 10536 - protein, 520 aa, Parasutterella sp.
  REGION 51..97: note = misc_feature - Xaa can be any naturally occurring amino acid
MPCSPAKARLLLKEKKAIVVRRTPFTIQLTIATGESKQPVSLDVDAGYKHXXXXXXXXXXXXXXXXXXXXXXXXXXXXXXXXXXXXXXXXXXXXXXXNKRGKPLMPCSPAKARLLLKEKKAIVVRRTPFTIQLTIATGESKQPVSLDVDAGYKHVGLSASTEKAELYASEVELRQDITDLLSARRALRESRRNRKTRYRAPRFDNRIRTKRKGWLAPSVENRINAHLSRIESVLRLLPVTKITVETASFDTQLLKNPDISGKEYQEGEQLGFWNIREYVLCRDRHVCQHCYGRSKDPVLNVHHLESRRTGGDSPGNLITLCETCHKALHRGEITLKAKRGQSFRAEAFMGIMRSEVPNRLKASHPELEVNNTYGYRTKHARIANDIAKSHCADAFCIAGNLGAERLCEFFFQKQTRRNNRQIHKLSILKGGIRKRNQAPFEVKGFRLFDKVACQGEEGFIFGRRSSGFFDVRKLDGTRISAGISCKKLHLLEKRRTYLTEIRKEEALPPLPEGRGLRAKM

SEQ ID NO: 10537 - protein, 442 aa, unidentified; identical to SEQ ID NO: 3161
  REGION 1..442: note = metagenome

SEQ ID NO: 10538 - protein, 436 aa, unidentified
  REGION 1..436: note = Human gut metagenome
VSSFFLAAFYRKEHGIMQYVYVLSKHGEPMMPCSPGKARLLLKQQKACVVRRTPFTIKLLYGSAGYKQPITLGVDAGSKHVGLSASTEKRELYREEFTPRNDVVELLSTRRQNRRSRRNRKTRYRAPRFDNRVHSKHKGWLAPSVEVKIQEHITIIKRICKILPISLVRVETAEFDTQRLKAMLAGKPLPVGTDYQLGEMYDEYNVRQYVLKRDNYTCQCCGAHTTAKKLVKLHVHHLESRKTGGNAPSNLVTLCTTCHKNLHKGKVTLDGKERGKPLRDAAFMGIMRKTLMARLKKELPIPVQGTYGYITKMRREQNDIKKSHTNDARCISKHPLAEPCSVCYRTKAIRHHNRQTHKANFSKKGIRKRSQMPYLVEGYRLWDKVLYKEQECFVSGRRSSGSFTLKKLDGTSVSKGVTFKKLRLLEPATNYLIERM

SEQ ID NO: 10539 - protein, 420 aa, unidentified; identical to SEQ ID NO: 8844
  REGION 1..420: note = Human gut metagenome

SEQ ID NO: 10540 - protein, 469 aa, unidentified
  REGION 1..469: note = Human gut metagenome
MSVFVVGLNGCRLMPTSEREARLLLKHGKASVYRKVPFTIKLNYKTGSTTQPGYLGIDTGSQHIGVSVVRKDGTVLHKEEISLRDSMTKRKLLEAKASLRRGRRYRKTRYRHPKWRPKTKRVYCEVPDKKGRHWQKQKNTFTSKRPEGWLPPSLQSKTDHHIRWIKKLQNFLPEGYRLSIELGRFDPARMKDPEIHGELYQKGPQYDYENVRAYVLDRDRYTCQVCKKKGGKLHVHHILYRSQGASDNPQYMVTVCSDCHTTENHLPGGILYQWMQEQKKFTRGLRDATFMNLLRKRLMKTFTDAVFTYGNITKVDREKLKLSKNRGNDATAIALVRTGVTSVKDEEPVLYIQQVRRKRSLHEETPRKGRKEPNRTAARNSKNTKAVTVTKRRGGKKVSVTACLFDRVELNGKKGWITGFTGKACRIVDTEGNYVAATDKYTQVNISSIRILHHTGNWVTGLKRNVGKR

SEQ ID NO: 10541 - protein, 431 aa, unidentified
  REGION 1..431: note = Human gut metagenome
MPNKVYVINKHGRPLMPCSPAKARHLLDAGKAKVKKRTPFTIQLVYGSSGYTQEVILGVDAGSKTIGMSASTTKEELLSAEVKPRNDVVDLLSTRREFRRARRNRKTRYRKPRFDNRVRSKHKGWLAPSVEVKIQEHITAIRRVCGILPVSKVVVETAEFDLHLLKAIADGKPVPQGEDYQKGEMYGHYNVRQYVLWRDNYTCQCCGTHPSKKKEVRLHVHHLESRKVGGDAPDNQVTLCESCHEKLHKGLIAEKDFKKRKRKSTRDATFMGIMRKTLMQRLCSELPIPVVKTRGYITKATREKLLVLPKSHTNDALAIAQGKRGFNVGYLPEIAQIDKIYTIRPVRHHNRQLHKATILKGGIRKSNQTEKYVFGYRLFDKVQFNGQDCFIWGRRTTGIFTIKTINGKMIKDGISFKKLKLAEKSTSYLIA

SEQ ID NO: 10542 - protein, 415 aa, Bacillus sp.; identical to SEQ ID NO: 4797

SEQ ID NO: 10543 - protein, 415 aa, Clostridium sp.
MENKIEYCFVVDKNNRPLAPTKVNKGWYLIRKGRAKLKSKYPMVIQLEKEVEPDDEDESHMVCGIDDGSSHVGIAIVQKCPSKNKVVFKGTIEQRQDVKHLMDVRRGYRQYRRYHKRYRKPRFNNRASSKKTNRLAPSIKQKKDSILRVLYQLNKWINIKEYYLEDVAIDIRAMTDGYKPYNWQYQKNNRLDENLRKATILRDSCKCQECGKTNTVLEVHHIRAKRFGGANTIGNLITLCSSCHQKTEGKEREFEERYFTKIKSKPKRFDYAMHVMQGKNYLRENIKQLGILHLTTGGDTANKRIEWNIEKSHSNDAICITNCFPDTCNIKEWMIKPMRRKSKAKTDNVLGIKHRDLVEYTYRNGETHKGYVTALYPHLNALNFQSPTKHCKKVNVRKCRLLWKYNKIYWLDSVI

SEQ ID NO: 10544 - protein, 345 aa, unidentified
  REGION 1..345: note = Human gut metagenome
VYMSEVVGRNDITDKMTQRAKYRRNRRNRKTRYRKARWLNRASSIKKDRFSPTMQSKLHSHVREIEYIQSILPVTEMVFETGQFDMQLMKNPSLANPKVRPWGYQKGANYGFENTKAMVLNRDNYTCQCCKGKHKDSKLEVHHIVFRSQGGSDEESNLLTLCHTCHKDLHSGKINPKLSGKVKGNLKYATQMNSIRKQLFRFYPNAIETFGYVTKANRLHLGVDKEHYYDACTIATQGNAFNVKSNLYKKKCVSDGDFQKTKGIRSEQPIVTDKICGFRKFDKVRYFGNDYFIKGRMSTGYAILMDIDGNKIDFSTMPRGYKTPKLSNCKRITARSTVMTQVKVV

SEQ ID NO: 10545 - protein, 426 aa, unidentified
  REGION 1..426: note = Ga0373628_0000021
MQQLQLKLNNIPTNASLVCSSISFDLNKDVSLSDQDKVLDCNNLEVNQRLHTSGLKDIVYVLNVNAQPLMPCSCAKARKLLKKRRANVVKNYPFTIRLTFNCENVVQDVMLGIDSGFKYIGYSAITKTKELISGTLTLDCQTISRLANRRMYRRNRRDRLWYRKSRFNNRKSSKKGWLSPSIKRKYNTHVNLINKLKKLLPIKEVIIEVAKFNSNIKSSKLIDNSKCQLCHKNFSNTNHVNEHHIITRLYGTNRKANIAYVHESCHKKIHKNKMLDMFEKDKIYRQSAFMNIISKRFLEDGYKTIFGFDTFNKRQVYNLEKTHTDDAFIIAGGDNQERAINKNVVQKHRNNRILQLNRKGFKRSIRRQRFKIQPKDLIWINNKKYISKGCFGKRKRVTYNDENGKSCQQYIDRIDKYYNFGSLIFL

SEQ ID NO: 10546 - protein, 493 aa, unidentified
  REGION 1..493: note = Human gut metagenome
MAAVYVISASGKPLMPTTRCGHIRGLLNAGKARVVEREPFTIQLKYETPDVTQPLYLGIDPGRTNVGSAVVREDGECVFTAQLTTRNKDVPKLMKARKQFRMAHRRLKRRCKRQRRAKAAETLSQKGEFQRLLPGYEEPILCKGIRNKEARFNNRQRPAGWLTPTANHLLLTHLNMVKKLQKLLPITDVVLEVNRFAFMAMENPSIRRWQYQQGPLYGKGSVEDAVYAQQDGHCLFCGKPIAHYHHVVPQHKNGSETLENRVGLCNEHHDLVHKDRAWDAKMKETKAGLNKKYHALSVLNQIIPALTEQLTAMFPQHAFVTTGKDTANFREDYGIAKEHHLDAYCIACSVLAEPTKVAAPTGKPHRLMQFRRHDRQVCHKENIKRVYLSEGKAVATNRHKAIEQKDDSLEEFRKTHTQQEVSALTVKDHQPVYKDMRRFMPGGVFLFNGKVHTLQRSHGRYKGMPFYYIDTDGSKNHAKGCIFLQQNCGLRWV

SEQ ID NO: 10547 - protein, 413 aa, unidentified; identical to SEQ ID NO: 2636
  REGION 1..413: note = Human gut metagenome

SEQ ID NO: 10548 - protein, 420 aa, unidentified; identical to SEQ ID NO: 7011
  REGION 1..420: note = Human gut metagenome

SEQ ID NO: 10549 - protein, 431 aa, unidentified
  REGION 1..431: note = Human gut metagenome
MVYVLDINGQPLMPTTRHGKVRRLLNSHLAKVVKRCPFTIQLLYQSTKEIQPVSLGVDAGSKHIGMAATTEKKVVYQEELSPRNDVVKLLSLRRASRSSRRSRKTRYRKPRFNNRVHSKHKGWLAPSVEVKIQEHITAIKRICQILPISEIHVETAEFDLQRLKAVEEGRTLPVGTDYQLGEQYDFYNTRQYVLHRDGYTCQCCGTHDNNIKLHVHHIESRQTGGDAPSNLITLCEHCHKALHKGKLELPKGKKRGKTYRDATFMGIMRKTLLERLRKEVDVPASGTYGYITKYWRERAGLEKSHINDAICISKYPYAKPLDTYYLTKAVRNHNRQIHKSNFSKGGIRKRNQAPYLVKGFRLFDKVLYQGKEYFIFGRRATGYFDIRTLDGTKVNKGSISYKKLRIQDTAKAYLKEARAIPHMNKFTCVLA

SEQ ID NO: 10550 - protein, 518 aa, Moorena sp.; identical to SEQ ID NO: 7410

SEQ ID NO: 10551 - protein, 430 aa, unidentified; identical to SEQ ID NO: 4504
  REGION 1..430: note = Human gut metagenome

SEQ ID NO: 10552 - protein, 350 aa, unidentified
  REGION 1..350: note = Human gut metagenome
LRYRKPRFDNRKRGEGWLAPSLEHKKQLNIRLIERYVSVIPITHATVEVGSFDTMLLQAIQKGKSKPEGVDYQKGPRYNLATLREAVFYRDNYTCQVCGRKIADGAILHMHHMFYWKGRHGYQLDELVTACEKCHTPANHQKGGKLFGFGEDKEFANLSGAAFMNAVRWQIVDALHATYGKEFVTITYGAMTKEKRIILGIEKTHNNDAYAMGDYHPVHRCVFRHYQKRRRNNRVLEKFYDATYIDTRTGNKAKGKELFNGRISRNHKKNSEDLHKYRSKKVSKGRRSIRRQRYAIQPYDTVRLESKTYITSGCHNKGTRLLIPANGKSKSVAISKVQVVCHAGAWIQII

SEQ ID NO: 10553 - protein, 430 aa, Moorena sp.; identical to SEQ ID NO: 4002

SEQ ID NO: 10554 - protein, 416 aa, unidentified
  REGION 1..416: note = Human gut metagenome
VSEITSYAFVLDVNGKPLAPTKEQKAWFLIRKKRAALVSKYPMVIQLKKEIPENKICKDEIRCGIDDGGLHVGIALVQKCKTKNKVVFKGTIEQRNDVKHLMEVRRGYRRYHRYYKRYRQARFDNRKSSKRKERIAPSILQKRQATMRVIHRLNKWINITNYWLEDVSVDIRALTDGYKPYRWQYQKSNRLDENIRKAAILRDGSKCMECGRANCRLEVHHIKPRRRNGSNTLDNLITLCESCHQKTEGQEELYMDRYFSLLKSSDHKNLNYAQHVMIGKKWLRKQLSNLGVLYLTNGGDTANKRIDWNVEKSHANDAVCITDLQPDTYDMKEWAIKPMRRKSKAKTDNVLGIRHRDLVEYTFKNGETHRGYVTALYPEQKAINFQSPTKHCKKVNARKCKLLWNYSKIYWFENAS

SEQ ID NO: 10555 - protein, 428 aa, unidentified
  REGION 1..428: note = Human gut metagenome
LKVFVLNMRGQPLMPCSPAKARHLLKAGKAVVKRRTPFTIQLRIATGETKQNVTLGVDAGAKHVGLSATTEKEEVFASEVELRQDITGLLAARLSLRRDRRHRKTRYRAPRFLNRVRSKHKGWLAPSVENRIQAHMSRIDAICGLLPVTKIVIETASFDIQKIKHPDVEGTDYQQGDQLGFWNVREYVLFRDGHVCQHCHGRSKDKILNVHHLESRQTGGDAPNNLITLCETCHKAYHAGKIKLKVKRGQSFRAEAFMGIMRWTLLDRVRKAHPGLPVENTCGYLTKNTRITPGLPKAHCVDACCIAGNLKAVRRGVCLHQRQMRKHNRQIHKCTILLQTLEDGTKIGYRKLNQTPHMVKNFRLFDKVRCLGQTGFIFGRRSSGYFDVRRLDGVKISSCISYRKLTLLEKRSTCLTELRKEDGASSPV

SEQ ID NO: 10556 - protein, 416 aa, unidentified
  REGION 1..416: note = Human gut metagenome
MVYVLDKNGQPLMPTDRHRKVRLMLQSGQAKVIKRCPFTIQLNYDSGHQTQEISLGIDAGSKHIGVSTTTKIKVLYEVDVELRNDIVDLLSSRRELRRGRRNRKTRYRQAKFNNRRRGNGWLAPSIRQKIGTHLTVVENICKMLPISRIMVETASFDIQKIKNPDIQGAEYQQGDQLEFWNVREYVLFRDGHTCQCCKGKSKDKILNVHHIESRKTGGNAPNNLITLCETCHTGYHKGTVQLPKAIKRGMRFKDAAFMGIMRWAFYKALKQQYEPVGTPVHNTYGYITKHTRIAYNLPKEHYVDARCISGNPEASSNGEYYYQKKVRCHNRQIHKLTVLKGGIRKQNQATYLVKGYRLFDKVSYQGKGYFVFGRRQSGFFDIRTLSGEKVNKGSLSCKKLKFIATRTYYLTERRAV

SEQ ID NO: 10557 - protein, 485 aa, Moorena sp.
MRHKARKGNSFTGAAVAVFVLDRRGRPLMPCTEKRARLLLARGRARVHRVMPFVIRLTDRKADACSFQPLRVKLDPGSRVTGIALVREADDGIAVLNLFELVHRGRQISEALTARRAFRRRRRGTNLRYRAPRFLNRSKPEGWLAPSLMHRVHTTMAWVNRIRRLAPVAALSSELIRFDMQALENPEVSGVGYQQGTLAGYEVREYLLEKWNRTCIYCDATDRPLQVEHLTARARNGSNRIGNLGLACGGCNQEKGSLNVREYVKDPKRLARILAAASRPLKDAAAVNATRRALADALRATGLPLELASGGRTKFNRVTHGIPKTHALDAVCAGCVNAVRDWQRPSLTIAATGRGSYQRTRLTRYGFPRGYLMRQKQVQGFQTGDHVRADVPHGKRAGVHTGRVAVRATGSFNIQTATAVVQGISHRHCTLIQRGDGYAYLQPKDSFRQEDAGDGRASHAALSLPGMNPGFLAQSDDFEIDFQGI

SEQ ID NO: 10558 - protein, 415 aa, unidentified
  REGION 1..415: note = Human gut metagenome
MVYVVANDGQPLMPTERHGKVCRMLKSGMAKVVKKCPFTIQLQYESERNVQPVSLGVDAGSKHIGISATTKTKVLYESDVELRDDIVKLLATRRQLRRSRRSRKTRYRPARFDNRKRKEGWLAPSIRQKIGSHLTVVANACKILPINQIIVETASFDIQKIKDPEIQGIEYQQGEQMDFWNIREYVLFRDGHICQCCKGRSKDKILNVHHIESRKTGGNAPNNLITLCETCHKGYHNGTVILPKNIKHGMQFKDAAFMGIMRWTFYNTLKEQYEPDIPVSMTYGYLTKNTRIEHGLPKEHYIDARCISGNPDAVSDGTYYYQKKVRCHNRQIHKQTILKGGIRKSNQAEYLVKGYRLFDKVRYQGREYFIFGRRKSGFFDIRTLSGEKVNKGSISVKKLTFADTRKNYLIERRTV

SEQ ID NO: 10559 - protein, 480 aa, unidentified
  REGION 1..480: note = Human gut metagenome
LYTKPLDNIGEGSLPPSGEINLKGMTFMVYVKSIDGKALMPTSNAKARKLLKQKKAKVVSLRPFVVKLTYKTKTEYTQKLNLGVDSGYSNIGFSVIDAKQEYIAGEVKLLEGMKKRLLEKASYRRIRRSRLRYRKARWNNRVKSKKKGWLAPSLKHKLDTHIKFIDYLKDILPIGKITIEVANFDIQKMKYDLISGIDYQNGDMFGFWNMREFVLHRDGHKCQNPNCKHKDKKEQILKVHHIRYRSEGGSDRPENLITLCSKCHTPVNHRKGKFLYDWCVNGKKVRGFKEATFMSMIRWYLVNELKSKHNNVYITYGYITKNHRIQNGIEKSHLNDAFAIAKGTNQARTKDRFLVIQDRLKNRSLEKFYDSKIIDIRIGKKVSGGDLNCGRSTRNKNLNTENLRKYRGAKISKGQRRIRKQKYFYKPNDLVKYDGKVYTVKGTQNEGKYIALKEIKKVPKVELLIPYVFKKGLNWSYGLC

SEQ ID NO: 10560 - protein, 512 aa, unidentified
  REGION 1..512: note = Human gut metagenome
MSTVYVLNKDGKPLMPTTRGGHVRHLLKEQKARVVRAKPFTIQLLYETNDVVQPLYLGIDPGRTNIGVAVVKANGTAVFTAHLETRNKEIPKLMQDRKKARRARRTNGRRCRRQRRAKANGTISKKCVKQTTAQNGSVSKRAKDIGVIKRRLPGCEKDVLCIGIKNKETKFTNRTRPEGWLTPTANQLLQTHINLVKKIQKFLPISDVVLEVNKFAFMRLNNPNIQKWQYQQGPLYKKESLESAVSEIQEHHCLFCKKPIDHYHHVVPQHKNGSNTIGNIVGLCAKHHDLVHKDSAWEKKLAKKSTGLYKKYGALGVLNQIIPTLTNELSSLFPKHSFVTNGKSTYDYRAAHGVSKDHWLDAYCIACSVLPSNVCDSNINNHMPYVLKQFRRHDRRVLNNENMNRVYTLNNKAVAINRHKAKDQKTVSLEEFRKEHPDDVCKLKVKEHHPTYRNMNRNFPGSVFLVGKQIHVMQGIASSKDGKATKYNDTSATAIAAGKCKFVAKNTGILFV

SEQ ID NO: 10561 - protein, 431 aa, Escherichia sp.; identical to SEQ ID NO: 3801

SEQ ID NO: 10562 - protein, 450 aa, unidentified
  REGION 1..450: note = Human gut metagenome
VTTILKTCFAAFNLAKVVVLMDAWDIIVVLNKRGKPLMPCSPAKARLLLKEKKAVVVRRTPFTLQLTIATGEAKQAVSLGVDAGYKHVGLSASTKKAELYASEVELRQDITDLLSARLALRRSRRNRKTRYLAPRFDNRIRTKRKGWLAPSVENRINAHLSRIEAVLRLLPVTKITVETASFDMQLLKNPDIAGKEYQEGEQLGFWNVREYVLFRDGHVCQHCHGRSKDPVLNVHHLESRRTGGDSPGNLITLCETCHKALHRGGITLKAKRGQSFRAEAFMGIMRWEVLNRLKASHPELEVNNTYGYWTKHARIANGIAKSHCADAFCIAGNLGAERLGEFLFQKQTRRNNRQIHKLSILKGGRRKRNQASFEVKGFRLFDKVACKGEEIFIFSRRSSGYFDVRKLDGTRISAGISYKKLRLLEKRRTYLTEIRKEAFSPLPEGRSLRA

SEQ ID NO: 10563 - protein, 423 aa, Turicibacter sp.
  SITE 423: note = misc_feature - Xaa can be any naturally occurring amino acid
LRVFVLNKRGKPLMPCSPAKARLLLKEKKAIVVRRTPFTIQLTIATGESKQPVSLDVDAGYKHVGLSASTEKAELYASEVELRQDVSDLLSARRTLRRARRNRKTRYRAPRFDNRIRTKRKGWLAPSVENRINAHLSRIETVLRLLPVTKITVETPSFDMQLLKNSDISGKKYQEGEQLGFWNVREYVLFRDGHVCQHCHGRSKDPVLNVHHLESRRTGGDSPGNLITLCETCHKALHRGEITLKAKRGQSFRAETFMGIMRWEVLDRLKASHSKLEVQNTYGYRTKHARISNGIAKSHCADAFCIAGNLGAERLGEFFFQKQTRRNNRQIHKLSILKGGIRKRNQAPYEIKGFRLFDKVACQGEEGFIFGRRSSGYFDVRKLNGTHISAGISCKKLRLLEKRQTYLTEIRKEEALPPLPEGX

SEQ ID NO: 10564 - protein, 414 aa, unidentified; identical to SEQ ID NO: 2588
  REGION 1..414: note = Human gut metagenome

SEQ ID NO: 10565 - protein, 416 aa, unidentified
  REGION 1..416: note = Human gut metagenome
MVYVLDKNGQPLMPTDRHRKVRLMLQSGQAKVIKRCPFTIQLNYDSGHQTQEISLGIDAGSKHIGVSATTKIKVLYEADVELRNDIVNLLSSRREFRRGRRNRKTRYRQAKFNNRRRGNGWLAPSIRQKIGTHLTVVENICKMLPISRIMVETASFDIQKIKNPDIQGAEYQQGDQLEFWNVREYVLFRDGHTCQCCKGKSKDKILNVHHIESRKTGGNAPNNLITLCETCHTGYHKGTVQLPKAIKRGMRFKDAAFMGIMRWAFYEALKQQYEPVGTPVHNTYGYITKHTRIAYNLPKEHYVDARCISGNPEASSNGEYYYQKKVRCHNRQIHKLTVLKGGIRKQNQATYLVKGYRLFDKVSYQGKGYFVFGRRQSGFFDIRTLSGEKVNKGSLSCKKLKFIATRTYYLTERRAV

SEQ ID NO: 10566 - protein, 419 aa, unidentified; identical to SEQ ID NO: 3628
  REGION 1..419: note = Human gut metagenome

SEQ ID NO: 10567 - protein, 414 aa, unidentified; identical to SEQ ID NO: 2588
  REGION 1..414: note = Human gut metagenome

SEQ ID NO: 10568 - protein, 416 aa, unidentified
  REGION 1..416: note = Human gut metagenome
LRVFVLNKRGKPLMPCSPAKARLLLKEKKAIVVRRTPFTIQLTIATGETKQPVSLGVDAGYKHVGLSASTEKAELYASEVELRQDITDLLSARRALRQSRRSRNTRYRAPRFDNRIRTKRKGWLAPTVENRINVHLSRIETVLRLLPVTKITVETASFDTQLLKNPDIAGKEYQEGEQLGFWNVREYVLFRDGHVCQHCHGRSKDPVLNVHHLESRRTGGDSPGNLITLCETCHKALHRGEIKLKAKRGRSFRAETFMGIMRWGVLNRLKASHPKLEVHNTYGYRTKHARIANGIAKSHCADAFCIAGNFGAKRLGEFFFQKQTRRNNRQIHKLSILKGGIRKRNQAPFEVKGFRLFDKVACQGEEGFIFGRRSTGYFDVRKLDGTCISAGISYKKLHLLEKRRTYLTEIRKEEAL

SEQ ID NO: 10569 - protein, 420 aa, unidentified; identical to SEQ ID NO: 10478
  REGION 1..420: note = Human gut metagenome

SEQ ID NO: 10570 - protein, 418 aa, unidentified
  REGION 1..418: note = Human gut metagenome
MVYVLGQDGHPLMPTCRHGKVKRMLKSGMAKVVKKCPFTIQLQYESTTHTQKINLGIDAGSKTIGVSATTETKVLYESEVALRNDIVELISGRRALRSSRRNRKTRYRKPRFDNRKRPDGWLAPSVRQKIETHITVVENVMKILPVTKIIVETASFDIQKIKNPEIEGVGYQHGEQLDFWNVREYVLFRDGHTCQCCKGKSKDNILNVHHIESRKTGGNAPNNLITLCETCHKAYHKGIITLPKEIHRGMRFRDAAFMGIMRWAFYDRLKELYTPFGVTVVNTYGYITKNTRIEYGLPKEHYVDARCISGNPAAKDLGHYYFQKKVRCHNRQIHKNTILKGGIRKRNQAAYLVKGYRLFDKVKYQNQEYFIFGRRSSGFFDIRTLDGTKVNKGSISCKKLQLVEKSKHYLTEQRKVTT

SEQ ID NO: 10571 - protein, 424 aa, unidentified
  REGION 1..424: note = Human gut metagenome
MVYVLSKEGTPLMPTNRRGRVRHLLDAGEAKAVKRCPFTIQLLYQSTTYTQEITLGVDAGSKTIGLSASTEKKELYASETRLRMDITDLLSVRRQFRRTRRNRKTRYRKARFNNRVHAKHKGWLAPGIEAKIGTHFRAVRDVCRILPVTEIIVETASFNLQKIKALEKGEPVPEGTDYQKGDQLGFWNVREYVLWRDGYKCRCCNGKSKDQVLNVHHIESRKTGGDAPNNLATLCGYCHKQYHKGTILLPKSVRRGNSFRDAAFMGIMRRTFYNRLKEQYPRVAMTYGYITKNTRIRNSLPKTHYADARCIAGHPQAEPLEVYYFQKKVRCHNRQIHKSNILKGGKKKRNQAEYLVKGYRLYDRVRYQNREYYVFGRRASGFFDIRTLGGNKGNKGSVSCKKLRFLEPRKTMLIERRMQEREAV

SEQ ID NO: 10572 - protein, 414 aa, unidentified
  REGION 1..414: note = Human gut metagenome
MVYVINKQGQALMPTERFGKVRRLLKNSLAHVVCRIPFTIQLDYDTTDYTQPVSLGVDAGSKHIGISATTSEKELYAADVELRNDIVDKLSTRREQRRTRRSRLRYRKARFNNRVSSKRKGWLAPSVENKIQTHLTVVEKIHKFLPITNIVVEIASFDIQKINNPIISGSEYQQGEQLDFFNVREYVLFRDNHICQHCKGKSKDKVLNVHHIESRKAGGDSPNNLITLCETCHKAYHRGEFELNVKRGKSFRDAAFMGIMRWSFYDRLKNIYPNVSMTFGYITKNTRITNNLPKDHYVDARCISGNPTAKPLGYYFYQKKVRCQNRQIHKANFLKGGRKKLNQAPFLVKGFRLFDLVEYQKELYYIFGRRSSGSFDIRKLDGTKVNKGSINCKYLRLIATRKSILTEKRMQVNL

SEQ ID NO: 10573 - protein, 465 aa, Moorena sp.
MNTNFVFVLDTDRRPLSPCRPARARELLRKGKAAVFRRYPFTIILKRAIPDATPTPCQVKLDPGSKTTGLALVQGEKVIWGGELHHRGHQIKERLASRAALRRGRRNRLRYRKPSYRTKAQINNAKATYARKRAAGWLPPSLQHRIETTMTWVNRLMRFAPVGELTQELVRFDMQRMENPEVSGVEYQQGELAGYELKEYLLQKWGRKCAYCGKENVPLEVEHIHCRSKGGTDRVSNLTLSCVPCNQKKGNRPIEEFLKNKPDVLKRVLAQAKRPLKDAAAVNATRWALFHRLNATDLPVTVGTGGQTKFNRKRFGIDKAHWKDAACVGDMAAITFATDTALDITCKGQGGRQKAVVDRYGYPKQHRPLKPIHGWRSGDIARCNGQVGRISPRARGSFELRPFSGGKPFSRPMRQFERLHVTSIRLDEVYAEKRRYFAAVTNRFSQQQFNNRRGCVCQKNIPLWQ

SEQ ID NO: 10574 - protein, 413 aa, unidentified; identical to SEQ ID NO: 3616
  REGION 1..413: note = Human gut metagenome

SEQ ID NO: 10575 - protein, 470 aa, unidentified; identical to SEQ ID NO: 2825
  REGION 1..470: note = Human gut metagenome

SEQ ID NO: 10576 - protein, 320 aa, unidentified
  REGION 1..320: note = Human gut metagenome
RAPRFDNRIRTKRKGWLAPSVENRINAHLSRIEAVLRLLPVTKITVETASFDLQLLKNPDISGKEYQEGEQLGFWNIREYVLCRDGHVCQHCYGRSKDPVLNVHHLESRRTGGDSPGNLITLCETCHKALHRGEITLKAKRGQSFRAEAFMGIMRWEVHNRLRALHPGIEVSNTYGYRTKHARIANGIAKSHCADAFCIAGNLGAERLCEFFFQKQTRRNNRQIHKLSILKGGIRKRNQAPFKVKGFRLFDKVASQGEEGFIFGRRSSGFFDVRKLDGTRISAGISCKKLHLLEKRRTYLTEIRKEEALPPLPEGRGLRA

SEQ ID NO: 10577 - protein, 414 aa, Parasutterella sp.; identical to SEQ ID NO: 8883

SEQ ID NO: 10578 - protein, 413 aa, unidentified; identical to SEQ ID NO: 3587
  REGION 1..413: note = metagenome

SEQ ID NO: 10579 - protein, 413 aa, unidentified; identical to SEQ ID NO: 2636
  REGION 1..413: note = Human gut metagenome

SEQ ID NO: 10580 - protein, 430 aa, Moorena sp.; identical to SEQ ID NO: 9911

SEQ ID NO: 10581 - protein, 416 aa, unidentified
  REGION 1..416: note = Human gut metagenome
MVYVLSQNGQPLMPTENHAKVRVFLKQGKAKVVQRCPFTIQLLYESTTHTQKINLGIDAGSKTIGISATTDSKVLYEAEVVLRNDIVELLSGRRALRRSRRNRKTRHRKPRFDNRKKPDGWLAPSIRQKIETHVTVVENITKILPMTKIIVETASFDIQKIKNPEIEGAEYQHGEQLDFWNVREYVLFRDGHTCQCCKGKSKDNILNVHHIESRKTGGNAPNNLITLCETCHKAYHKGIITLPKEIHRGMRFRDAAFMGVMRWAFYDRLKELYNLLGVEVINTYGYITKNTRITYDLPKEHYVDARCISGNPAAKPMDYYYLQKKVRCHNRQIHKCKINKGGTRKRNQAAYEVKGFRLYDQVLWKGQKCFIFARRSTGRMDLRLLDGTHVNASVGYKNLKLLSMRKNYLIEQRKAG

SEQ ID NO: 10582 - protein, 456 aa, unidentified
  REGION 1..456: note = Human gut metagenome
MNTCVCVLSNSGERLMPTFRLGKVRHLLKDGKAKIVKHHPFTIQLLYDSKTNTQPIEICEDVGYNYIGISAKSKSHEYVSAQYDTLQDEKEHHDDCRKMRRTRRNRLRYRKPRFDNRKRSEGWLAPSLKHKKELNVNVVKMYCAVMPITHATVEVGSFDTMLVKAIQEGKAIPEGADYQKGPRYNLATLREAVFYRDNYTCQVCGRKITDGAILHMHHMFYWKGRHGYKLDELVTACEKCHTPANHQKGGKLFGFGDDKEFADLSGAAFMNAVRWQIVNALHTTYSKEFVTITYGAMTKEKRIALQLEKSHNNDAYAMGDFHPVHRCGFRHYQKRRRNNRVLEKFYDATYIDTRTGNKAKGKELFNGRISRNHKKDSENLHKYRSKKVSKGRRSIRRRRYAIQPYDTVRLEGKTYITSGCHNKGTRLLIPVNGKSKSVAISKVQVVCHAGPWIQII

SEQ ID NO: 10583 - protein, 413 aa, unidentified; identical to SEQ ID NO: 2636
  REGION 1..413: note = Human gut metagenome

SEQ ID NO: 10584 - protein, 470 aa, unidentified
  REGION 1..470: note = Human gut metagenome
MSVFVVGLNGCRLMPVSERKARLLLKGGKASVYRKVPFTIKLNYKTGSTVQPGYLGIDTGSQHIGVSVVRQDGTVLHKEEIGLRDSMSKRKLLESRASLRRGRRYRKTRYRHPKWKPKTKRIYSEKADRKGRHWKKQKNMFTSKRQAGWLPPSLQSKTDHHIQWIRKLLHLLPEGYRLSIELGRFDPARMKNPGIHGELYQKGPQYDYENVRAYVLARDGYTCRVCKKKGGKLHVHHILYRSRGASDDPKYMAAVCSNCHTTENHLPGGILYQWMQDQKKFTRGLRDATFMNILKKRLRRAFPDAVFTYGNITKADREKLGLPKSHGNDATAIALVKTGVTSVRDEEPVIHIQQVRRKKRSLHEETPRKGRKEPNRTASRNDKNTRSVTVSKGSGKKKVSMTACLFDRVELDGKKGWITGFTGTSCYVKDKEDNYICTSPKYKQVSISKLRILHHCGNWVIGAEKPLGKG

SEQ ID NO: 10585 - protein, 512 aa, unidentified; identical to SEQ ID NO: 4350
  REGION 1..512: note = Human gut metagenome

SEQ ID NO: 10586 - protein, 397 aa, unidentified
  REGION 1..397: note = Human gut metagenome
MDTGYIHIGASVKSEKHEYLGEQIDTLTDERQKHDACRMYRRQRRNRKRHRQPMFNNRKRDDGWIAPSLEHKKNIHIQTVSRICKVMPVTNITLEMGNFDTQVLKAREEGRPLPHGLDYQHGERYSVATLREAVFLRDGYTCQCCGRTIKDSAILHVHHVVYRSQGGTNRMSNLITVCDKCHTPANHKPGGKLYGWKPKVASFKGATYMTTIRWKLYNEVKALFPDIDIHITYGAETKERRRIFDITKSHVNDAFAMGQFHPKHRLKPVCYKKKRRNNRCLEKFYDAKYIDSRDDKKRTGHELFNGRISRNHKKDSENLRQYRRQKISAGRRTIRKQHYAIQPHDIVIFDGEKFETSGCHNNGTRAILLPQKKSVAIKKLNIYRYAGGYFKSAFNKK

SEQ ID NO: 10587 - protein, 431 aa, Klebsiella sp.; identical to SEQ ID NO: 2435

SEQ ID NO: 10588 - protein, 413 aa, unidentified; identical to SEQ ID NO: 2636
  REGION 1..413: note = Human gut metagenome

SEQ ID NO: 10589 - protein, 515 aa, unidentified
  REGION 1..515: note = Human gut metagenome
MTALEEKLSKTEYIYVLGFDGKPQMPTRRKRHVLKLLKTGRARIAEDIPFTIRLTYRNAPVLQPVTLAEDPGRTNIGAAVLSPLGDLLFAAVIETRNKEIKKLMADRQKSRQASRRGERKARQRLAKRYGSMVKSGMVMRKLPMYAADKFVICKFIRNTQARFCNRKRCPDWITPTVQHLVQTHLNIIRKISRYLPVTDIAFEVNRFAFMHMENPEAMGVDFQNGPLKGYGDVKEAIRTQQHGKCLMCKKPITHFHHIVPRSRGGSDTIQNLAGLCTECHTKVHTDTAFRKDFDEKKSGQLKKYGALSALNQAVPFICKKLLEEYGEEHVHFCRGLDTSLIRTAFGFEKTKKNQMHEVDAYCIGLAALEVNEVETPAFDHTFQIRQFRRQDRSIIHHQTGRSYYQGKEKVAQNRKPGLEQKTTALSQWYKEQIRIHGEKEAEKLRSQLRVEKSCRHYNDMDRFLPGAVFLYEGKRYVLSGRITNGKYLRACGQGMKNFPAAECTFIRHNAGLVFI

SEQ ID NO: 10590 - protein, 433 aa, Scytonema sp.; identical to SEQ ID NO: 8889

SEQ ID NO: 10591 - protein, 413 aa, unidentified
  REGION 1..413: note = Human gut metagenome
MTNYAFVLDANDKKLAPTKEQKAWFLIRKKQATLVSKYPMVIQLKKKIPDNEICKNEIRCGIDDGGLHVGVALVQKCQTRNKVIFKGTIEQRNDVKHLMDARRGFRRYHRYHKRYRPARFDNRKSSKRKERIAPSILQKRQATIRVIHQLNKWINITNYWLEDVTINIRALTDGYKPYRWQYQKSNRLDENIRKAVILRDGCKCMECGKSNCRLEVHHIKPRRLKGSNTLGNLITLCTKCHQKTEGVEELYMDRYFALLNSSDNKNLNYAQHVMIGKKWLREQLSNLGMLYLTNGGDTANKRIDWNITKSHSNDAICITDLRPDTCEIKEWVIKPMRRQSKAKTDNVLGIKHRDLIEYTFRNGETHRGYVTALYPEQNALNFQSSTKHCKKVNARKCKVLWKYSKIYWLDNVS

SEQ ID NO: 10592 - protein, 493 aa, unidentified; identical to SEQ ID NO: 2644
  REGION 1..493: note = Human gut metagenome

SEQ ID NO: 10593 - protein, 418 aa, unidentified; identical to SEQ ID NO: 4934
  REGION 1..418: note = Human gut metagenome

SEQ ID NO: 10594 - protein, 384 aa, Moorena sp.; identical to SEQ ID NO: 4952
  SITE 384: note = misc_feature - Xaa can be any naturally occurring amino acid

SEQ ID NO: 10595 - protein, 448 aa, unidentified; identical to SEQ ID NO: 9395
  REGION 1..448: note = Human gut metagenome

SEQ ID NO: 10596 - protein, 443 aa, Anoxybacillus sp.
MVEENMTCAMQRKGENPVVFVLDTNKRPLAPCHEAVARKLLKQGKAAIYKRFPFTIILKKAVDASETKTEYRLKVDYGSRHTGLAIVRGKEVLWLAQLDHRTDIKERLDKRRAFRRSRRNRKMRYRKARFLNRKRKEGWLPSSLASRVQNIQTWVNRLKKVCPIEHVSYESAKFDTQLMRNPEISGVEYQQGTLQGYEVREYLLEKFGRKCCYCGKEHVPLEVEHIIPKSRGGTDRVDNLCLACHDCNQKKGNQTAEEFGYPHIQKQVKEPLKDVAIVNTTRWKVYEVLKQSGLVVECGTGARTKMNRIRLGLPKTYYFDACCVGESTPNHLHFKTKEVLFIKAKGRGSRSRTNLDKYGFPRGYLARQKFFFGFQTGDMVKAAVPKGKYKGVWFGEVACRKSGSFDIKGRDGKRIAQGINYKYIRLIQRLDGYTYRKEGMKLA

SEQ ID NO: 10597 - protein, 412 aa, unidentified
  REGION 1..412: note = Ga0315279_10001675
MVYVLSKEGKPLMPTNRHGKVRHLLKDGKVKVTKRTPFTIQLLYNSEEYTQPITLGIDSGYQNIGLSAVTESQEVFSAEVKLRTDIVKLNSERRQYRRSRRNRKTWYREPRFLNRKKDNGWLAPSIQHKIDSHIKLIDTVKKILPITKINIEVANFDIQKIKNQDIEGIGYQNGDQSGFWNIREYVLYRDGHICQHCKGKCGDKILEVHHINTRQTGGDRPDNLITLCGLCHEKVSQNKLQLKIKVSKGYKSESFMSMVRWRLVNIIREMGDIVSHTYGYITKGNRIALGISKSHANDAFVIAGGAKGISQTRLNSYLIQQVRKCNRKLYKGIRSHIKNTASRFVNGFQRFDKILFESIECFIFGRRATGRFDIRLLDGTVVSSSVSYKQLTLLECSSTLLIERGSGNSSNS

SEQ ID NO: 10598 - protein, 512 aa, unidentified; identical to SEQ ID NO: 4031
  REGION 1..512: note = Human gut metagenome

SEQ ID NO: 10599 - protein, 451 aa, Blautia sp.
MPVAVISKTGERLMPTSEHRARKLLKSGKAIKYSYHPFTIQLTKRESGDVQPIELCVDTGYTHIGISVKSEKHEYLAEQIDTLTNEKARHDACRMYRRQRRSRKRYRQPRFNNRKRNDRWIAPSLEHKKSIHIQAILRICKVMPVTDITLEMGNFDTQVLKAREEGKPLPQGVDYQHGERYGITTLREAVFARDGYTCQCCGRAIKDGAILHVHHIVYRSQGGTNRMSNLITVCDKCHTPANHKQGGKLYNWKPKIASFKGATYMTTIRWKLYNEVKALFPDIDIDITYGAETKERRRALDIDKSHVNDAFVMGQFHPKHRSKPICYKKKRRNNRCLEKFYDAKYIDSRDGKKRSGQELFNGRISRNHKKDSENLHQYRLQKVTPGRRAIRRQHYPIQPHDIIVYNGNKIEVSGCQHKGTRVVFSKTKKSVQVSKIKLFKYAGGYSKSVFN

SEQ ID NO: 10600 - protein, 419 aa, unidentified; identical to SEQ ID NO: 6355
  REGION 1..419: note = Human gut metagenome

SEQ ID NO: 10601 - protein, 396 aa, unidentified; identical to SEQ ID NO: 7299
  REGION 1..396: note = Human gut metagenome

SEQ ID NO: 10602 - protein, 424 aa, unidentified; identical to SEQ ID NO: 3434
  REGION 1..424: note = Human gut metagenome

SEQ ID NO: 10603 - protein, 552 aa, unidentified
  REGION 1..552: note = Human gut metagenome
MTSCTCTVFPAYNYAKASSSQGKHNPLLRQGRLIVKEVAYMSTVYVLNKDGKPLMPTTRGGHVRHLLKEQKARVVRTKPFTIQLLYETDDVVQPLYLGIDPGRTNIGVAVVKTDGTAVFTAHLETRNKEIPKLMQGRKKARRTRRTNGRRCRRQRRAKANGTISKKCVKQTTAQNGSVSKCAKEIGVIKRHLPGCEKDVLCVGIKNKEAKFSNRTRQEGWLTPTANQLLQTHINLIKKIRKFLPISNVVLEINKFAFMRLDNPNIQKWQYRQGPLYQKASLEEAVSEMQEHHCLFCKKPIAHYHHVVPQSENGSNTIGNIVGLCTKHHDLVHKDTTWQKKLAKKKTGLNKKYGALSVLNQIIPALTKELSSLFPKHFFATNGKSTYDYRAAHSVSKDHWLDAYCIACSVLANDVCDSNINSRVPYELKQFRRHDRRALNNENMSRVYTLNGKVVATNRHKATKQTTDSLEEFRQNHSDDVCKLKVKEHHPTYRNMNRNYPGSVFLIGKQVHVMQGIAGSKNGEATTYKDTNANSIAAGKCKFVAKNSGILFV

SEQ ID NO: 10604 - protein, 423 aa, unidentified; identical to SEQ ID NO: 8727
  REGION 1..423: note = Human gut metagenome

SEQ ID NO: 10605 - protein, 406 aa, unidentified; identical to SEQ ID NO: 7944
  REGION 1..406: note = Human gut metagenome

SEQ ID NO: 10606 - protein, 493 aa, unidentified
  REGION 1..493: note = Human gut metagenome
MAVVYVISTSGKPLMPTTRCGHVRGLLNEGKARVVEREPFTIQLNYETPDVTQPLYLGIDPGRTNVGAAVVREDGECVFTAQLTTRNKDVPKLMKARKQFRMAHRRLKRRCKRQRRAKTAGTISQKGDFQRLLPGYEKPILCKGIRNKEARFNNRQRPAGWLTPTANHLLLTHLNMVKKLQRFLPITDVVLEVNRFAFMAMENPHIQRWQYQRGPLYGKGSVEDAVYAQQDGHCLFCGKPIAHYHHVVPQHKNGSETLENRVGLCNEHHDLVHKDRAWEAKMKEAKAGMNKKYHALSVLNQIIPELTEQLAQLFPQHAFVTTGKDTADFREDHGIAKEHHLDAYCIACSVLTEPSRVSAPAATPHHLMQFRRHDRQVCHKENIKRVYLLDGKTVATNRHKAIEQKDDSLEEFRKTHTQQEISSLTVKGHQTIYKDMQRSMPGGVFLCNGKLHTLQGSTGRYKGIPKYYIGIDGGKSHAKRCIFLQQNCGLRWV

SEQ ID NO: 10607 - protein, 465 aa, unidentified
  REGION 1..465: note = Human gut metagenome
MSTCVCVLSNSGERLMPTFRLGKVRHLLKDGKAKIVKHHPFTIQLLYDSKTNTQPIEICEDVGYNYIGISVKSQSHEYVSAQYDTLQDEKACHDSCRKLRRTRRNRLRYRKPRFDNRKRGEGWLAPSLRHKKELNVNVVKMYCAVMPITHATVEVGSFDTMLVKAIQEGKAIPEGADYQKGPRYNLATLREAVFYRDNYTCQVCGRKVADGAILHMHHMFYWKGRHGDSLNELLTVCEKCHTPANHQKGGKLYGFGENVKFADLSGAAFMNTVRWQIVNELYAAFGKDFVTVTYGAMTKEKRIALRLEKSHNNDAYAMGEFHPNCRCTFEHYEKVRRNNRILEKFYDSRYIDIRTGEIATGKELFNGRINRNHKKDSENLHRYRGKRTYAGHRALLRKKVNLNPGDLVSLNGEVLVVHSTHTNKKGAINVEFKTPGKSGQKSASLKKLKIVKAADSMHSAWEKIS

SEQ ID NO: 10608 - protein, 406 aa, unidentified; identical to SEQ ID NO: 7944
  REGION 1..406: note = Human gut metagenome

SEQ ID NO: 10609 - protein, 451 aa, unidentified
  REGION 1..451: note = Human gut metagenome
MSVAVISKTGERLMPSSEYRARKLLKSGKAVKYSYHPFTIQLTKRKTGYAQPIELCMDTGYIHIGISVKSEKHEYLAEQIDTLTDEKTKHGACRMYRTLRRGRKRYRQPRFNNRKRDKDWIAPSLEHKKDIHVQAISRINKVMPLTDITMEMGNFDTQVLKAKEEGKPLPQGADYQHGERYGIATLREAVFSRDGYKCQCCGRTISDGAILHVHHIKYRSQGGTNSMTNLATVCDKCHTPKNHKPGGKLYNWKPKLPDFKGATFMTTIRWQLYNEVKSLFPDINVHITYGAATKEQRRELNIDKSHVNDAFAMGKFHPKHRTNAALYKKKRRNNRCLEKFYDAKYIDSRDGSKRTGQELFNGRINRNHKKDSENLHRYRLQKITAGKRTVRKRHYNIQPHDIVMYENRKRETSGCQSNGTRVILLSDKKSVAVKKVKIYKYAGGYFKSAFN

SEQ ID NO: 10610 - protein, 462 aa, unidentified
  REGION 1..462: note = Human gut metagenome
MSVLVIGRNGRALMPTNPRKARLLLKKKTASVVCRHPFTIQLLYKTGCATQEGCIGIDTGSQHIGVGITCGDRVILKDEHALRSSMEKRSLLATRAAMRRGRRYRKVRYRKPKWRHHTKRMYFEKANRRGQHWRKVKTTTQSPRPKGWLPPSLQSKCDHHFRIIDRYLKYLPDPITRNLVIETGRFDMARMNDPTIHGEMYQRGPMYDAENRRAYIFARDNYQCACCKAKAGTTRKADGTTVKLVAHHILFRSRGATDNPKYIISVCDHCHTTKAHQPGGILYSWMENNKKVTRGLRDATFMNILRKRLFARYPQAAFTYGNITAADRKQYHLPKSHVNDAVAVSLFGKEVPTVRDTCQTTYYKQVRKSKRSLHEAIPRKGRKRPNTKAVRNKKNTTQVNGFKLWDSVLANGKKLFICSFTGTSAYLIDKNGCYISQPGKAYKQWPLSKLKRLHPNGNWLMA

SEQ ID NO: 10611 - protein, 470 aa, unidentified; identical to SEQ ID NO: 5320
  REGION 1..470: note = Human gut metagenome

SEQ ID NO: 10612 - protein, 374 aa, unidentified
  REGION 1..374: note = Human gut metagenome
VVRRTPFTIQLTIATGEAKQPVSLGVDAGYKHVGLSASTEKAELYASEIELRQDITDLLSARRELRRARRNRKTRYRAPRFDNRIHTKRKGWLAPSVENRINAHLSRIEAVLRLLPVTKITVETASFDMQLLKNPDISGKEYQEGEQLGFWNVREYVLFRDGHVCQHCHGRSKDPVLNVHHLESRRTGGDSPGNLITLCETCHKALHRGEITLKAKRGQSFRAEAFMGIMRWEVLNRLKASHPELEVNNTYGYRTKHARISNGIAKSHCADAFCIAGYLGAKRLGKFFFQKQTRRNNRQIHKLSILKHGLRKRNQAPFEIKGFRLFDKVASKGEEGFIFGRRSSGYFDVRKLDGTRISAGISYKKLHLLEKRRT

SEQ ID NO: 10613 - protein, 420 aa, unidentified; identical to SEQ ID NO: 6212
  REGION 1..420: note = Human gut metagenome

SEQ ID NO: 10614 - protein, 465 aa, Calothrix sp.; identical to SEQ ID NO: 3024

SEQ ID NO: 10615 - protein, 396 aa, unidentified; identical to SEQ ID NO: 5072
  REGION 1..396: note = Human gut metagenome

SEQ ID NO: 10616 - protein, 480 aa, unidentified; identical to SEQ ID NO: 2726
  REGION 1..480: note = Human gut metagenome

SEQ ID NO: 10617 - protein, 382 aa, Moorena sp.
  SITE 382: note = misc_feature - Xaa can be any naturally occurring amino acid
LGKVFLVDTNKQPLDPVHPGWARKLLNTGQAAVFRRYPFTLILKKQVAEEVARPLRLKLDPGSKTTGFALVDDQNGEVVFAAELTHRGQQIKNALHARRAVRRSRRQRKTRYRAPQFDNRRRPKGWLAPSLESRMATTLTWTRRLMRVCPITEISMELVKFDMQLMDHPEIAGIEYQQGELAGYEVREYLLEKWGRRCAYCDAKDVPLQIEHLVCRARGGTDRVSNVCLACEPCNRKKGTQDISVFLKRDPVRLARLLAQAKAPLRDAAAVNTTRWVLYDRLKTFGLPIECGSGGLTKYNRVKLGFPKAHWTDAACVGKSTPQELCVKGVTPLLITAMGHGSRQMCRMNKRGFPRTGPKAARRVKGFQTGDIVRAVVPTGKX

SEQ ID NO: 10618 - protein, 490 aa, unidentified; identical to SEQ ID NO: 3566
  REGION 1..490: note = Human gut metagenome

SEQ ID NO: 10619 - protein, 424 aa, unidentified; identical to SEQ ID NO: 6934
  REGION 1..424: note = Microcoleaceae bacterium UBA10368

SEQ ID NO: 10620 - protein, 536 aa, unidentified; identical to SEQ ID NO: 2718
  REGION 1..536: note = Human gut metagenome

SEQ ID NO: 10621 - protein, 521 aa, Nonomuraea sp.
MATFHVGQQTHRQVLPQPAALESVSADNPGRDETGHRRPRDGVSGVEHGRGETRRTVPGGGRYPEASHDVEGGCGIPAALGAYQPRVFVLDRHGIPLQPARPAMARKLLASGRAVIHRRTPLVVRLKDRGAGSSAVPGVEVGLDPGSKHTGIAVFTNDKGTRTGLVAVQLDHRGGRIRDSMAARAGYRRRRRSANLRHRAPRFRNRTRPRGWLAPSLRHRVDTTMSWVDRLTRWAPVRAVHVERVAFDTHAMSAGRPLAGAEYQQGTLAGYEVREFLLAKWGRACAYCAASGVPLNIDHIHPRSRGGPDRVSNLVVACISCNQAKSSMPVEVFLAGRPKVLARVLAQAKAPLRDAAAVNATRWALWRALAATGLPVHTASGGRTKWNRSRTGATKSHTLDALHVGVLDQVTGRPATVLVAAATGRGSYCRTRTNAFGFPRLRLPRVKQIRGFATGDLVRAIVPAGKKTGTWTGRVAVRTSGSFNITTAAGTVQGIGHRHVRRLQRGDGYAYTTRGEPDALI

SEQ ID NO: 10622 - protein, 406 aa, unidentified; identical to SEQ ID NO: 2874
  REGION 1..406: note = Human gut metagenome

SEQ ID NO: 10623 - protein, 465 aa, unidentified
  REGION 1..465: note = Human gut metagenome
MSTCACVLSKNGERLMPTIRLGKVRHLLKDGKAKIIKHHPFTIQLLYDSETNIQPIEICEDVGYNYIGISVKSQSHEYVSAQYDTLQDEKSCHDACRRMRRTRRNRLRYRQKRFDNRKRDKGWLAPSLKHKKELNVNVIKMYCEVVPITHATVEVGSFDTMLVKAIEEGKATPEGADYQKGPRYNLATLREAVFYRDNYTCQVCGREASEGAILHVHHMFYWKGRHDNSLSELITVCEKCHTPANHQKGGKLYGFGEDIKFANLSGAAFMNTVRWQIVNELYAAFGKPFVTFTYGAMTKEKRIALHLEKSHNNDAYAMGEFHPNCRCTFEHYEKVRRNNRILEKFYDSRYIDIRTGEIATGKELFNGRINRSHKMDSENLHKYRGKRIRKGYRALRRKKVALNPGDLVSLNGEILTVHGTHTKKNGSVNVEFKTPSKSGKKSTSLKKLKIIKTISPMRSAWDKVS

SEQ ID NO: 10624 - protein, 519 aa, unidentified
  REGION 1..519: note = Human gut metagenome
MLWNSTWNESSTNYIKIKKERFMYYVYVLDSSGIPLMPTARYGKVRRMLKSGKAVAVSTNPFMIRLQYEPKTKITQSVTLGNDPGRTNIGVAAVDDLGRCLYSAKCETRNKQIPKLMAERAAHRRTSRRGERLARKRLAKKLGTTTIFLNGRMLPGCDKPIMLKDIINTEAKFHNRKRKEGWLTPTATQLLRTHLNLIELVKKILPVSRIAVELNRFAFMAMDNPSIQKWQYQKGPLCGYKNIREALEDIQNGSCLLCGRHNIEHDHHIVSRSRGGGNTLTNMAGLCENCHTKVHTDGNAAEKLLKIKDGQNKKYHALSVLNQIIPSLFTELDARFPGQVFITTGMDTKAYRDRNDVIKDHNADAYCIACSTLKSQSVIDIPSYSFRIKQYRRHNRQLIHSQKERTYCLDGKIVAKNRRKRMDQKEPSLHEWYIKTKRQYGQKETRRLQSQMTVIKSTRCYNDPKRTLPGAVFLSKGKRFVMSGQLSRGTYLRAEGCGTKNFPISKVRIQSQNRGLVYI

SEQ ID NO: 10625 - protein, 464 aa, unidentified
  REGION 1..464: note = Ga0307928_10037786
MQKLSEELKNAPASTSLAYSSASQPLNKEATLSVASKVLSDNHSEENQRQHTDGPKVLVYVLNKNGKPLMPCKPTKARHLLEQNRAKAVSRKPFTIQLLWTCEHKTQPVKLGMDPGYQKVGVSAASNKKELLSAEIQLRTDMPKKLQEKAMYRRNRRNILWHRQPRFKNRSKPKEWLAPSIQHKLDSHLRIIEKIQMLLPVTEIMVEVAAFDIQKIKNPGIDGEEYQQGEQLGFWNIREYVLHRDNHTCQHCHGKKKDKILQIHHINEKAEGATDRPEELLTVCKTCHDEHHAGIDIIPKKKIKNFKPETFMTMVRWKIVNALGCRHTYGYITKHNRIKQGLMKSHVNDAFVIAGGTNQERCKTIISKQVRRNNRKLQINRKGFKPAIRRQRYKLQPNDLVRYGGKECRVKGVHSYGKYVILITKLMEKIDVSVKRIELICYGKGLFTPIHPTTKVVGILGGIL

SEQ ID NO: 10626 - protein, 404 aa, unidentified
  REGION 1..404: note = Human gut metagenome
TQPIEYCCDTGYQHIGISIKSAKHEYVGVQIDTLKNEKKHHQDAITYRRTRRNRKTRYRAARFDNRKATKSKGWLAPSIRHKKDIHLAQVQKYAKVFPITSIVFEMGEFDTQKLKAIEEGRPAPVGIEYQQGEQYGFDDVRNAVFTRDGYRCVCCGRGIENGAILHAHHLKYRSLGGTNRMGNLVTVCDRCHTPVNHQKGGLLWKLMDKYKVKNFKGATFMTAVRWQMYDELKSMFPDTEIHLTYGSRTKEARRLLSVRKSHINDAYCMGDFHPKHRSKRWLYIKKRRNNRVLAKFYDAKYIDSRDGKKKSGQELFSGRTKRNRELNAENQHRYRQLKVSKGRVSIRRQHYSIQPGDTVIYEGKKHITKGVQNLGTYLKIGEKVVPVKKIHIYRYVGGYIRQMM

SEQ ID NO: 10627 - protein, 509 aa, unidentified
  REGION 1..509: note = Human gut metagenome
VYVLNKDGKPLMPTTRCGHVRYLLKEKKARVVKTKPFTIQLLYETNDVVQPLYLGIDPGRTNIGVAVVKADGTAVFTAHLETRNKEIPKLMKKRKDSRRARRTNGRRYRRQRRAKANDTLSTKRVKQTTAQNGSVSKRAKEIGVIKRHLPGCEKEVLCIGIKNKEAKFNNRTKPEGWLTPTANQLLQTHINLVKKIQKFLPISDVVLEVNKFAFMQLDNPNIQKWQYQQGPLYQKANLKEAVYEMQEHHCLFCKKPIEHYHHVVPQHKNGSNTISNVVGLCAKHHDLVHKDTAWQEKLAKKKNGLNKKYGALSVLNQIIPALTKELSSLFPKHSFITTGKSTYDYRAAHGVCKDHWLDAYCIACSVLPNDVCDSNINSHVPYELKQFRRHDRRALHKENMNRVYTLNGKKVATNRHKAIEQTTDSLKEFRQNHPDDVCKLKVKEHHPEYRNPKRNFPGCVFLVDKQAHVMQGTNGSHNGRADGYYDTNGNSYPFGKCKFVAKNGGIVFT

SEQ ID NO: 10628 - protein, 413 aa, unidentified; identical to SEQ ID NO: 2636
  REGION 1..413: note = Human gut metagenome

SEQ ID NO: 10629 - protein, 442 aa, Moorena sp.; identical to SEQ ID NO: 2637

SEQ ID NO: 10630 - protein, 420 aa, unidentified
  REGION 1..420: note = Human gut metagenome
MQYVYVLNKHGEPLMPCFPGKARLLLKQQKACVVKRTPFTIKLLYGSAGYKQPITLGVDAGSKHVGLSASTEKRELYREEFTPRSDVAELLSTRKQNRRSRRNRKTRYRAPRFDNRVHSKHKGWLAPSVEVKIQEHITVIKHICRILPISLVRVETAEFDTQRLKAMLAGKPLPVGTDYQLGEMYDEYNVRQYVLKRDHYTCQCCGAHTTAKKAVKLHVHHLESRKVGGNAPSNLITLCTTCHNNLHKGKITLDGKKRGKTLRDAAFMGIMRNTLLTRLRNELHIPVQNTYGYITKLLREQNDIKKSHVNDARCISKHPLAEPCSICYRTKAIRHHNRQIHKAKILKYGIRKANQAPYIVKGFRLWDKVLYNGQECFISGRRTSGYFALRKLDGTTITNSISFKKLQLLEPATNYLIERM

SEQ ID NO: 10631 - protein, 451 aa, unidentified; identical to SEQ ID NO: 3061
  REGION 1..451: note = Human gut metagenome

SEQ ID NO: 10632 - protein, 424 aa, unidentified; identical to SEQ ID NO: 3434
  REGION 1..424: note = Human gut metagenome

SEQ ID NO: 10633 - protein, 427 aa, Moorena sp.; identical to SEQ ID NO: 5713

SEQ ID NO: 10634 - protein, 374 aa, unidentified
  REGION 1..374: note = Human gut metagenome
MVIQLKKEIPENEICKDEIRCGIDDGGLHVGIALVQKCKTKNKVVFKGTIEQRNDVKHLMEVRRSYRHYHRYHKRYRPARFDNRKSSKRKKRIAPSILQKRQAIIRVIHWLNKWINITNYWLEDVSIDTRALTDGYKPYRWQYQKSNRLDENIRKAAILRDGGKCMECGKLNCRLEVHHIKPRRRNGSDTLDNLITLCKSCHQKTEGQEELYMDRYFSLLKSSDHKNLNYAQHVMIGKEWLRKQLSSLGVLYLTNGGDTANKRIDWNIEKSHANDAVCITNLQPDTYDMKEWTVKPMRRQSKAKTDNVLGIKHRDLVEYTLKNGETHRGYVTALYPEQKAINFQSPTKHCKKVNARKCKLLWKYSKIYWFEYAS

SEQ ID NO: 10635 - protein, 441 aa, unidentified
  REGION 1..441: note = metagenome
MSVSVFVQDRKHRPLMPCRPARARRLLKSGRARVVRLFPFTIRLVDRLLEDSSVQPVLVKIDPGSRHSGFVVVRADEQGHHHGLFFIDIVHRGESIRDALTARRNCRRRRRGNLRHRAPRFLNRTKPQGWLPPSLRHRVDTATAWVAKLVKLAPVTGIVEELVKFDAQKLQNPEISGTEYQQGTLFEYEVREYLLEKFGRKCVYCGAENVPLNIDHVVPKARGGSNRISNLVLSCVNCNQKKDSQPVDVFLKNRPEVLDRIKRRLKTSLAHAATVNATRWSLFNALKAFGLPVETGSGALTKFNRHTFGVPKEHRLDALCAGRVNGVHYPEGMGILQVRCTGRGNYQRTRVDKYGFPRGYLTRQKRVHGFATGDMVEVVVPSGKKAGTYRGRVAVRKSGYFNIQTPEGVIQGIGWRHCRLLSFNDGYGYAWLRPAPHSSPV

SEQ ID NO: 10636 - protein, 351 aa, unidentified
  REGION 1..351: note = Human gut metagenome
STEKRELYSEEFTPRSDVVKLLSTRKQNRRSRRYRKTRYRAPRFDNRVHSKHKGWLAPSVEVKIQEHITVIKRICKILPISLVRVETAEFDTQRLKAMLAGKPLPVGTDYQLGEMYDEYNVRQYVLKRDHYTCQCCGAHNTAKKVVKLHVHHLESRKTGGNAPSNLVTLCTTCHKNLHKGKVTLDGKERGKPLRDAAFMGIMRKTLMARLKEELPIPVQGTYGYITKMRREQNDIKKSHTNDARCISKHPLAEPCSVCYRTKAIRHHNRQTHKANFSKKGIRKRSQMPYLVEGFRLWDKVLYKGQECFVSGRRSSGSFALKKLDGTSISKGVTFKKLRLLEPATNYLIERM

SEQ ID NO: 10637 - protein, 424 aa, unidentified
  REGION 1..424: note = Human gut metagenome
MRVFVFNMRGRPLMPCSQRKARLLLRENKAKIYKYHPFTIQLTYTTGETKQDCHIGIDTGSKYIGAAVRSEDKVFWKGEIELRQDIRSNLDTKRIYRRSRRNRKTRYRKPRFLNRKRRDEWLPPSLQSRISHTCHLIDTLSSLVPNPILHIEVGKFDVAKMINPEIHGVDYQHGQTYGFFDERYFVFARDNYTCQCCGKSKNKILNTHHIIYRSNGGTNRVDNLITVCTDCHTSQNHRKGGIFYQWQEQHKKVKQYKEPPFMNTLRKRIFVAYPDAEITYGSETTPKRKAMKLDKTHYNDAIVISGINEIKENPEEWLLIKQFRKKKRSLHEATARKGRKKPNRNQTRNSKNTPYYKGFYLNDKVSVFGKSGYITGFTSNAAYIKDENNDYITLPNKTYKQVSINKMKLECHNNNWQYIIKNAV

SEQ ID NO: 10638 - protein, 427 aa, Parasutterella sp.; identical to SEQ ID NO: 6030

SEQ ID NO: 10639 - protein, 341 aa, unidentified
  REGION 1..341: note = Human gut metagenome
LLSTRRESRRARRNRKTRYRKPRFDNRVRSKHKGWLAPSVEVKIQEHITAIRRVCGILPVSKVVVETAEFDLQLLKAIEEGKPVPQGEDYQQGEMYGHYNVRQYVLWRDNYTCQCCGAHATKKKEVRLHVHHLESRKTGGDAPGNLVTLCDSCHEKLHKGLIAEKDFKKRKRRSTRDATFMGIMRKTLMQRLCSELPIPVVETRGYITKATREKLLVLPKSHTNDALAIAQGKRGFNVGYLPGIIQTDKIYTIRPVRHHNRQLHKAAILKGGIRKSNQAGKYVFGYRLFDKVQFNEQDCFIWGRRTTGIFTIKTINGKMIKDGISFKKLKLVEKSTSYLIA

SEQ ID NO: 10640 - protein, 420 aa, unidentified
  REGION 1..420: note = Human gut metagenome
MQYVYVLNKHGEPLMPCSPGKARLLLKQQKACVVKRTPFTIKLLYGSAGYKQPITLGVDAGSKHVGLSASTEKRELYREEFSPRNDVVKLLSTRKQNRRSRRYRKTRYRPPRFDNRVHSKHKGRLAPSVEVKIQEHITVIKHICKNLPITLVRVETAEFDTQRLKAMLAGKPLPVGTDYQLGEMYDEYNVRQYVLKRDHYTCQCCGAHNTAEKVVKLHVHHLESRKTGGNAPSNLVTLCTTCHKNLHKGKVTLDGKERGKPLRDAAFMGIMRKTLMARLKEELPIPVEGTYGYITKMRREQNDIKKSHTNDARCISKHPLAEPCSVCYRTKAIRHHNRQTHKANFSKKGIRKRSQMPYLVEGFRLWDKVLYKGQECFVSGRRSSGSFALKKLDGTSISKGVTFKKLRLLEPATNYLIERM

SEQ ID NO: 10641 - protein, 427 aa, Parasutterella sp.; identical to SEQ ID NO: 4733

SEQ ID NO: 10642 - protein, 431 aa, Klebsiella sp.; identical to SEQ ID NO: 2435

SEQ ID NO: 10643 - protein, 428 aa, unidentified
  REGION 1..428: note = Human gut metagenome
LKVFVLNMRGQPLMPCSPAKARHLLKAGKAVVRRRTPFTIQLRIATGETKQSVTLGVDAGAKHVGLSAATEKEEVFASEVELRQDITGLLAARLSLRRERRQRKTRYRAPRFLNRVRSKHKGWLAPSVENRIQAHMSRIDAICGLLPVTKIVIETASFDIQKIKHPDVEGTDYQQGDQLGFWNVREYVLFRDGHVCQHCHGHAKDKILNVHHLESRQTGGDAPNNLITLCETCHKAYHAGKIKLKVKRGQSFRAEAFMGIMRWTLLDRVRKAHPGLPVENTYGYLTKNTRITLGLPKAHCVDAYCIAGNLKAVRRGVYLHQRQVRKHNRQIHKCTVLSKTLKDGTKIGYRKLNQTPHLVKNFRLFDKVRCLGQTGFIFGRRSSGYFDVRRLDGVKISSCISYRKLTLLEKRSTCLTELRKEDGASSPV

SEQ ID NO: 10644 - protein, 419 aa, Moorena sp.
MPKYVFVIDTNKQPLNPIPPKKARRLLDKGKAAVFRMYPFTIILKTAIDNPIVSPCKIKIDPGSQTTGFALVQNNQIIWGMELEHRGGLINKKLESRKAVRHRRRNRHTRYRKPRFFNRKRSEAWLPPSLEHRVSTIETWVKRLTKFCPVNEIWVERVKFDTQKMPNPEINGIQYQQGELAGYEVREYLLDKWGRECTYCGKQSVPLQIEHIHPKSFGGSNRVSNLCLACEKCNKRKGNKPIEEFLKKKPSLLQKIKTKAKQPLLDAAAVNATRNKLVKVLQNIKFVVTGTGAQTKYNRTRLGLPKEHWIDAACVGDIETLVLKTSQPLLVTGKGQGGRQKAALNKYGYPVRHNPLKPIKGWVTGDIAKHQRLGIGKVTPRSKGSFGFTPLGMKGYKSCNPQDISAIHRKDGYTYSFCK

SEQ ID NO: 10645 - protein, 442 aa, unidentified; identical to SEQ ID NO: 2903
  REGION 1..442: note = Human gut metagenome

SEQ ID NO: 10646 - protein, 416 aa, unidentified; identical to SEQ ID NO: 7823
  REGION 1..416: note = Human gut metagenome

SEQ ID NO: 10647 - protein, 456 aa, unidentified
  REGION 1..456: note = Human gut metagenome
MSTCVCVLSNSGERLMPTFRLGKVRRLLKDGKAKIVKHHPFTIQLLYDSKTNTQPIEICEDVGYNYIGISVKSESHEYVSAQYDTLQDEKKHHDDCRKYRRTRRNRLRYRKPRFDNRKRSEGWLAPSLEHKKQLNIRLIERYVSVIPITRATVEVGSFDTMLLQAIQKGESKPEGTDYQKGPRYNLATLREAVFYRDNYTCQVCGRKIADGAILHMHHMFYWKGRHGYQLDELVTACEKCHTPANHQKGGKLFGFGEDKEFANLSGAAFMNTVRWQIVDALHATYGKEFVTITYGAMTKEKRIILGIEKTHNNDAYAMGDYHPACRCKFRHYQKRCRNNRVLEKFYDATYIDTRTGDKAKGKELFNGRISRNHKKDSEDLHKYRSKKVSKGRRSIRRQRYAIQPYDTVRLENKTYITSGCHNKGTRLLIPANGKSKSVAISKVQVVCHAGAWIQII

SEQ ID NO: 10648 - protein, 465 aa, Variovorax sp.
MPCSEKRASKLLAAGRARVHRVQPFVIRLVDRTHDECTLQPLRLKLDPGSKTTGIAVVRDIEAIDAGTGEVDRGAAVVNLTEIIHRGRQISEALTARSQMRRRRRGNLRYRTPRFLNRGGDKAGWLAPSLRHRIDTTMAWVARLQRLAPITAISSELVRFDIQALQNPEVSGTEYQQGTLFGYELREYLLEKWGRQCAYCDIKDVPLQIEHIVARMRGGSNRASNLTLACAFCNQKKGARSIEEFLAKDSKRLARILVQAKRPLKDAAAVNATRWALSTALKTFCLPVELSSGGRTKFNRSMLGIPKTHALDAACVGQVDAISDWVRPTLVVKCTGRGSYQRTRLDQFGFPRGYLMRSKRVHGFGTGDMVVADVPKGLKAGKHAGRVAVRATGSFNIKTLRDGVSSVVQGINHKHCRVVQRNDGYGYFFNRAEFTGREHARHKASDASHPALDLPALKGEVSRAF

SEQ ID NO: 10649 - protein, 473 aa, unidentified; identical to SEQ ID NO: 3562
  REGION 1..473: note = uncultured beta proteobacterium

SEQ ID NO: 10650 - protein, 419 aa, unidentified; identical to SEQ ID NO: 3670
  REGION 1..419: note = Human gut metagenome

SEQ ID NO: 10651 - protein, 434 aa, Anoxybacillus sp.
MVFVLDTNKCPLAPCHEAVARKLLKQGKAAIYKRFPFTIILKKSVDESEIKTTYRLKIDYGSRHTGLAILRGQEVIWLGQLDHRTDIKERIDKRRAFRRARRNRKTRYRKPRFLNRKRKEGWLPPSLESRVQNIQTWVSRLKKLCPIGHISYENAKFDTQLMRNPEISGIEYQQGTLQGYEVREYLLEKFGRKCCYCGKENVPLEVEHIIPKSRGGADRIDNLCLACRDCNQRKGNQTAEEFGCPHIQKQVKESLKDTSIINATRWKVYEVLKQARLDVECGTGARTKMNRIRLGLPKAHYFDACCVGESTPSHLYFKTKEVLFIKAKGRGSRSRTNLDRYGFPRGYLARQKFFFGFQTGDMVKAIVPRGKYKGVWFGEVACRKTGNFDIKGKDGKRIAQGISYKYIQVIQRFDGYTYRKEEAELAQGAIPPRA

SEQ ID NO: 10652 - protein, 417 aa, unidentified
  REGION 1..417: note = activated sludge metagenome
VQRVFVVDKNRDPLMPCHPARARELLKNGRAKVFRRYPFTIILLDREGGDVQPVTLKIDPGSKTTGLALVADSKRGKRVVWAGELNHRGEQIKAALLSRKQLRRGRRSRKTRYRQPRFDNRRRAEGWIPPSLRSRVDNVLTWVERLRRFTPICAISMELVKFDTQVMQNPEISGVEYQQGELMGYEVREYLLEKWGRKCAYCGATNMPLEIEHIIPKSRGGSNRASNLTLACNACNQCKGNQTAEEFGYPAIQGKAKQPLKDVAAVNTTRWTLYRRLRQCGLPLEVGTGARTKYNRTKQNYPKEHWIDAACVGVSGEKVYIASGTTPLVVKATGRQSRIMCRPDKYGFPRTKAKQGRVHYGFQTGDIVLATIPEGKYTGVHIGRVAVRNRPSFRLNDFDVHPKYLKVLHHSDGYSYL

SEQ ID NO: 10653 - protein, 427 aa, Sharpea sp.; identical to SEQ ID NO: 8854

SEQ ID NO: 10654 - protein, 442 aa, unidentified; identical to SEQ ID NO: 4522
  REGION 1..442: note = Human gut metagenome

SEQ ID NO: 10655 - protein, 413 aa, unidentified
  REGION 1..413: note = Human gut metagenome
MTNYAFVLDADGKQLAPTKEQKAWFLIRKKRAILVSKYPMVIQLKKEIPDKEICKNEIRCGIDDGGLHIGVALVQKCQIRNKVIFKGVIEQRNDVKHLMDVRRGYRRYHRYHKRYRPARFNNRKSSKREGRIAPSILQKRQATIRIINQLNKWINITNYWLEDVAIDIRALTNGYKPYRWQYQKSNRLDENIRKAVILRDGCKCMECGKSNCRLEVHHIKPRRLKGSSTLDNLITLCTKCHQKTEGIEELYMDRYFGLLNSSDNKNLNYAQHVMIGKKWLREQLSNLGMLHLTNGGDTANKRIDWDIAKSHSNDAICIADLRPDTCEIKEWTIKPMRRQSKAKTDNVLGIKHRDLVEYTFRNGETHRGYVTALYPEQNALNFQSPTKHCKKVNASKCRLLWKYSKIYWLDNVS

SEQ ID NO: 10656 - protein, 426 aa, Moorena sp.
MPNYVFVIDTNKQPLNPISPKKARRLLDKGKAAVFRMYPFTIILKTAIRQSRRCANANPTISPCQIKIDPGSKTTGFALVQNDQVIWAMELEHKGSLIKKKLESRSAVRRGRRNRNTRYRKPRFLNRRRPEGWIAPSLEHRVLTTETWVKRLIKFCPVNEIGIERVKFDTQKMQNPEVNGVEYQQGDLAGYEVREYLLEKWGRECAYCSKQNTPLQIEHIHPKSKGGSDRVSNLCLACEKCNQKKGNKPIEEFLKKKPDLLRKILAIAKQPLTDAAAVNTTRNKIVKVLKAIKPVVTGTGAQTKYNRTRLGLPKQHWIDAACVGDIKDLVLKTSQPLLVTCKGQGGRQKAALNKYGYPIRHNPLRPIKGWSTGDIARHQKLGIGKVTPRSKGSFGFTPLGAKGYKSCKPQDIFAVHRKDGYIYSFC

SEQ ID NO: 10657 - protein, 335 aa, unidentified; identical to SEQ ID NO: 9848
  REGION 1..335: note = Human gut metagenome

SEQ ID NO: 10658 - protein, 415 aa, Bacillus sp.; identical to SEQ ID NO: 2431

SEQ ID NO: 10659 - protein, 470 aa, unidentified
  REGION 1..470: note = Human gut metagenome
MSVFVVGLNGCRLMPVSERKARLLLKGGKASVYRKVPFTIKLNYKTGSTVQPGYLGIDTGSQHIGVSVVRQDGTVLHKEEIGLRDSMSKRKLLESRASLRRGRRYRKTRYRHPKWKPKTKRIYSEKADRKGRHWKKQKNMFTSKRQAGWLPPSLQSKTDHHIQWIRKLLHLLPEGYRLSIELGRFDPARMKDPEIHGELYQKGPQYDYENVRAYVLARDGYTCRVCKKKGGKLHVHHILYRSRGASDNPKYMAAVCSKCHTTENHLPGGILYQWMQDQKKFTRGLRDATFMNILKKRLRKAFPDAVFTYGNITKADREKLELPKSHGNDATAIALVKTEVKSVKDEEPVIHIQQVRRKKRSLHEETPRKGRKEPNRTASRNDKNTRSVTVSKGSGKKKVSMTACLFDRVELDGKKGWITGFTGTSCYVKDKEDNYICTSPKYKQVSISKLRILHHCGNWVIGAEKPLGKG

SEQ ID NO: 10660 - protein, 416 aa, unidentified
  REGION 1..416: note = Human gut metagenome
MVYVLDKNGQPLMPTDRHRKVRLMLQSGQAKVIKRCPFTIQLNYDSGHQTQEISLGIDAGSKHIGVSATTKIKVLYEADVELRNDIVNLLSSRRELRRGRRNRKTRYRQAKFNNRRRGNGWLAPSIRQKIGTHLTVVENICKMLPISRIMVETASFDIQKIKNPDIQGAEYQQGDQLGFWNVREYVLFRDGHTCQCCKGKSKDKILNVHHIESRKTGGNAPNNLITLCETCHTGYHKGTVQLPKAIKRGMRFKDAAFMGIMRWAFYEALKQQYEPVGTPVHNTYGYITKHTRIAYNLPKEHYVDARCISGNPEASSNGEYYYQKKVRCHNRQIHKLTVLKGGIRKQNQATYLVKGYRLFDKVSYQGKGYFVFGRRQSGFFDIRTLSGEKVNKGSLSCKKLKFIATRTYYLTERRAV

SEQ ID NO: 10661 - protein, 446 aa, Pseudomonas sp.
MAVFVLDKAGKSLMPCSEKRARLLLERGRARVHRLTPFVIRLVDRQRADSALQPLTLKTDPGSRYTGLALVRQQVGRVSVLSLMELVHRGAAIRKALEQRAGFRRRRRSKNLRHRKPRFNNRTRRKGWLAPSLQHRIDTTLSWVRRIRRWAPITELAVERVKFDMQAMQNPEISGVEYQQGELAGYEVREYLLEKWGRCCAYCGTENIPLEIEHIQARSNGGSDRVSNLTLACRPCNQRKGNQPVEVFLKGKPELLARIKAKAKAPLRDAAAVNATRNALFVALLETGLPVATGTGAQTKYNRRSLNIPKTHALDAVCVGEVEAVSSWQRPTLTIKATGRGDYQRTRLTVQGFPRGYLTRQKRHFGFQTGDQVIATVPSGKKAGFHRGRVAVRKTGSFNIQTQGAVVQGIHHRHCQIIQRADGYAYAQTPTEDSQPQKEAARTGAR

SEQ ID NO: 10662 - protein, 420 aa, Shewanella sp.
MHVYVINQHNKPLMPCQPVIARLLIKQGKAKVKTRTPFTIKLLMETDEYTQPVIAGMDTGSKIIGCAVTANGKVIYQSEVQLRNDVSKKMQQRAMYRRTRRNRKTRYRPARWLNRSSMRKVGRLAPSIKSKVDSHLREKRQVEAILPVTTWKVEIASFDIHKITNPDVTGVKYQQGVQKDYYNVKAFVLSRDSHQCQSKRKGKHSDKLHVHHIVFRSQGGTDTPSNLITLCEKCHNDLHAGKFELKTGKSKTKHATEIGIIKSQLSKRWDFEATHGYETKFKREQVLALPKTHYYDAVAICLEDGELVSLNDMVLHKRHVSKGDYQLTKGKRSEKRIPVGKLFGFKKHDFIKTSQGIGFIKGKRSTGYFALETITGDKVHASANIKNQTVRLSARTTTLKQFMEAAIPPCALAQGGIAEY

SEQ ID NO: 10663 - protein, 441 aa, Moorena sp.
VVSPTSHYNIVKEHITNSEALTMQNYVFVIDTNFQPLNPIPPKKARRLLDKGKAAVFRMYPFTIILKTSVMNPTISPCQLKIDPGSKVTGFALVQNNQVIWGMELEHRGGLIKKKLESRRAVRHRRRNRHTRYRKPRFLNRKRPEGWLPPSLEHRILTIQTWVRRLIKFCPLNEVWVERVKFDTQKMQNPEINGVEYQQGKLAGYEVREYLLEKWGRECTYCGKQSVPLQIEHIHPKSKGGSERVSNLCLACEKCNQRKRNKPIEDFLKKKPSLLQKIKSKAKQPLKDAAAVNTTRNKLVKVLREMKPVVTGTGAQTKYNRTKLGFPKEHWIDAACVGNIETLVLKTSQPLLVTCKGQGGRQKAALDKYGYPTRHNPLKPIKGWCSGDIAKNLLTGKFGRVNPRSKSNSFNYTVPGEKAISLHLKNLAKVHRKDGYAYGFC

SEQ ID NO: 10664 - protein, 398 aa, unidentified
  REGION 1..398: note = Human gut metagenome
MSVFVVGLNGCRLMPTSERKARLLLKQGKAFVEQKVPFTIRLNYKTGSTTQLGYLGIDTGSQHIGVSVVREDGTVLHKEEIGLRDSMSKRKLLEAKASLRRGRRYRKTRYRHPKWRPKTKRVYCEVPDRKGRHWQKKKITFTSKRPKGWLPPSLQSKTDHHIRWIKKLQDLLPEGYRLSIELGRFDPARMKNPEIHGDLYQKGPQYDYENVRAYVLDRDRYTCQICKKKGGKLHVHHILYRSHGATDDPQYMVTVCSDCHSAQNHLPGGILYQWMQEQKRFSRGLRDATFMNILRKRLIRAFPEAVFTYGNVTKVDREKLKLPKSHGNDATAIALVKTGITAVKDKESVICIQQVRRKKRSLHEETPRKGRKDPKLHAIIRTQRRSLLPKDRIRKRYQ

SEQ ID NO: 10665 - protein, 415 aa, Bacillus sp.; identical to SEQ ID NO: 5533

SEQ ID NO: 10666 - protein, 393 aa, Moorena sp.; identical to SEQ ID NO: 5287

SEQ ID NO: 10667 - protein, 386 aa, Moorena sp.; identical to SEQ ID NO: 9453

SEQ ID NO: 10668 - protein, 456 aa, unidentified; identical to SEQ ID NO: 7423
  REGION 1..456: note = Human gut metagenome

SEQ ID NO: 10669 - protein, 501 aa, unidentified; identical to SEQ ID NO: 10016
  REGION 1..501: note = Human gut metagenome

SEQ ID NO: 10670 - protein, 462 aa, unidentified
  REGION 1..462: note = Human gut metagenome
MSVLVIGSNGRALMPTNPRKARLLLKKKTASVVCRHPFTIQLLYKTGCATQEGSIGIDTGSQYIGVGVTCGDRVILKEEHELRSSMEKRSLLVARAAMRRGRRYRKVRYRKPKWRHHTKRMYFEKPNRRGQHWRKVKTTTQSPRPKGWLPPSLQSKCDHHFRIIDRYLKYLPDSITRNLVIEVGRFDMARMNDPMIHGEMYQRGPMYDAENLRAYIFARDNYQCACCKAKAGTTRKADGTTVKLVAHHILFRSRGATDNPRYIISVCDHCHTTKAHQPGGVLYSWMENNKKVTRGLRDATFMNILRKRLFARYPQSAFTYGNITAADRKQLRLPKSHANDAVAISLLGKEASTVKNICQTMHYKQIRKSKRSLHEAIPRKGRKNPNTKAVRNKKNTTQVNGFKLWDSVLANGKKLFICSFTGTSAYLIDKNGCYISQPGKTYKQWPLSKLKRLHPNGNWLMA

SEQ ID NO: 10671 - protein, 430 aa, unidentified
  REGION 1..430: note = Human oral metagenome
MLVYVLKQNGQPFMPTARFGKVRRLLKAKKAKVVRREPFTIKLLYEPETNVVQECYCGVDTGSRHIGVAVVSNDKVLYQSQTELRSDIKQKMDARRQARSFRRFRKTRYREPRFLNRGNSTKSDRLPPSVKHKVQAHIDEIEFCKKILPLSDSNLIIEVSQFDTALIKDPRLINEKIKHWGYQQGFNYGYSSRREAILHRDNYTCQCCGKKNCRLEVHHVKFKSNGGTDDEENLLTLCEECHKGVHAGTVVLDKKPKKSKNLKYATHMSVIRSRLLKKYPDAIETFGFVTAENRNHLNLPKDHYIDACVIASGGLEFKELEVIFYKNRVSKGDYQLTKGIRGEQKLPTGKICGFRKFDRVEYLGNKYFIKGRMSSGFATLMDIFGNKIDFSDMPRGTKTPKLSKCKRISARSSCLCISQIRKERAIHTLS

SEQ ID NO: 10672 - protein, 442 aa, unidentified; identical to SEQ ID NO: 3161
  REGION 1..442: note = metagenome

SEQ ID NO: 10673 - protein, 442 aa, unidentified
  REGION 1..442: note = Human gut metagenome
MVTVQQSTHHLPFGRVFIRRNLFMVYVISQDGKPLMPCSDPIARLLLKQGKAKVKKREPFTIKLTYETTNYTQGLTLGVDTGSGTIGTAVSKDNGDIVYMSEVVVRNDITDKMTQRAKYRRNRRNRKTRYRKARWLNRASSIKKDRFSPTMQSKLHSHVREIEYIQSILPVTEMVFETGQFDMHLMKNPSLANPKVRPWGYQKGANYGFENTKAMVLNRDNYTCQCCKGKHKDSKLEVHHIVFRSQGGSDEESNLLTLCHTCHKDLHSGKINPKLSGKVKGNLKYATQMNSIRKQLFRFYPNAIETFGYVTKVNRLHLGVAKEHYYDACTIATQGNAFNVKSNLYKKKCVSDGDFQKTKGICSEQPIVTDKICGFRKFDKVRYFGNDYFIKGRMSTGYAILMDIDGNKIDFSTMPRGYKTPKLSNCKRITARSTVMTQVKVV

SEQ ID NO: 10674 - protein, 426 aa, unidentified; identical to SEQ ID NO: 3614
  REGION 1..426: note = Human gut metagenome

SEQ ID NO: 10675 - protein, 431 aa, unidentified; identical to SEQ ID NO: 6234
  REGION 1..431: note = Human gut metagenome

SEQ ID NO: 10676 - protein, 512 aa, unidentified; identical to SEQ ID NO: 4031
  REGION 1..512: note = Human gut metagenome

SEQ ID NO: 10677 - protein, 520 aa, Parasutterella sp.; identical to SEQ ID NO: 10536
  REGION 51..97: note = misc_feature - Xaa can be any naturally occurring amino acid

SEQ ID NO: 10678 - protein, 420 aa, unidentified
  REGION 1..420: note = Human gut metagenome
MQYVYVLNKHGEPLMPCSPGKARLLLKQQKAHVIKRTPFTIKLLYGSTGYKQPITLGVDAGSKHVGLSASTEKRELYREEFTPRNDVVDLLSTRKQNRRSRRNRKTRYRAPRFDNRVHSKHKGWLAPSVEVKIQEHITVIKRICRILPITLVRVETAEFDTQRLKAMLEGKPLPVGTDYQLGEMYDEYNVRQYVLKRDNYTCQCCGAHTTAKKAVKLHVHHLESRKMGGNAPGNLITLCITCHDALHKGKVSLDNKKRGKPMRDAAFMGIMRRTLMSRLREELPITVQGTYGYITKMQREQNDIKKSHVNDARCISKHPLAEPCSVCYRTKAIRHHNRQTHKANFSKGGIRKRSQMPYVVEGYRLWDKVLYKGQECFVSGRRTSGSFTLKKLDGTRISKGVTFKKLRLLEPATNYLIERM

SEQ ID NO: 10679 - protein, 414 aa, unidentified; identical to SEQ ID NO: 2588
  REGION 1..414: note = Human gut metagenome

SEQ ID NO: 10680 - protein, 431 aa, unidentified
  REGION 1..431: note = Human gut metagenome
MPNKVYVINKHGRPLMPCSPAKARHLLDAGKAKVKKRTPFTIQLVYGSSGYTQEVILGVDAGSKTIGMSASTTKEELLSAEVKPRNDVVDLLSTRREFRRARRNRKTRYRKPRFDNRVRSKRKGWLAPSVEVKIQEHITSIKMVCRILPVSKVVIETAEFDLQLLKAIADGKPVPQGEDYQKGEMYGHYNVRQYVLWRDDYTCQCCGAHATKKKEVRLHVHHLESRKVGGDAPDNQVTLCESCHEKLHKGLITEDDFKKRKRRSTRDATFMGIMRKTLMQRLCSELPIPVVKTRDYITKATREKLLVLPKSHTNDALAIAQGKQGFNVGYLPEILQIDKIYTIRPVRHHNRQLHKAAILKGGIRKSNQAGKYVFGYRLFDKVQFNGQDCFIWGRRTTGIFTIKTINGKMIKDGISFKKLKLVEKSTGYLIA

SEQ ID NO: 10681 - protein, 413 aa, unidentified; identical to SEQ ID NO: 2636
  REGION 1..413: note = Human gut metagenome

SEQ ID NO: 10682 - protein, 413 aa, unidentified; identical to SEQ ID NO: 3290
  REGION 1..413: note = Human gut metagenome

SEQ ID NO: 10683 - protein, 293 aa, unidentified
  REGION 1..293: note = Human gut metagenome
MSVAVISKTGIVLMPTSEYRARKLLDSGKAIIYGYRPFTIQLTERETGDVQPVELCVDTGYIHIGVSVKSEKHEYLGLQVDTLTDEKAKHDDRRMYRRQRRNRKRYRKSRFDNRKRKSGWLAPSLEHKKEINLQIITAICGVYPIADITLEMGNFDTQVLKAKEEGKQIPQGTDYQHGERYGIATLREAVFTRDGYKCQCCDRGIKDGAILHAHHIQYRSQGGTNRMSNLITVCEKCHTPANHKPGGKLYGWKPKIASFKDATYMTAVRWQLYRKVKEMFPGIHVKITYGAET

SEQ ID NO: 10684 - protein, 423 aa, Moorena sp.; identical to SEQ ID NO: 3576

SEQ ID NO: 10685 - protein, 419 aa, Moorena sp.; identical to SEQ ID NO: 4209

SEQ ID NO: 10686 - protein, 412 aa, unidentified; identical to SEQ ID NO: 4932
  REGION 1..412: note = Human gut metagenome

SEQ ID NO: 10687 - protein, 518 aa, unidentified; identical to SEQ ID NO: 3878
  REGION 1..518: note = Human gut metagenome

SEQ ID NO: 10688 - protein, 470 aa, unidentified; identical to SEQ ID NO: 9228
  REGION 1..470: note = Human gut metagenome

SEQ ID NO: 10689 - protein, 480 aa, unidentified
  REGION 1..480: note = Human gut metagenome
LYTKPLDNIGEGSLPSSGEINLKGMTFMVYVKSIDGKALMPTSNAKARKLLKQKKAKVVSLRPFVVKLTYKTKTEYTQKLNLGVDSGYSNIGFSVIDAKQEYIAGEVKLLEGMKKRLLEKASYRRIRRSRLRYRKARWNNRVKSKKKGWLAPSLKHKLDTHIKFIDYLKNILPIGKITIEVANFDIPKMKDDLISGVDYQNGDMFGFWNVREFVLHRDGHKCQNPNCIHKDKKEQILKVHHIRYRSEGGSDRPENLITLCSKCHTPANHKKGKFLYDWCVNGKKVRGFKDATFMSMIRWYLVNELKSKHNNVSITYGYITKNHRIQNGIEKSHLNDAFAIAKGTNQARTKDRFLVIQDRLKNRSLEKFYDSKIIDIRTEKKVSGGDLNCGRSTKNKNLNTENLRKYRGAKISKGQRRIRKQKYFYQPNDLVKYDGKVYTVKGTQNEGKYIALKEIKKVPKVELLIPYVFKKGLNWSYGLC

SEQ ID NO: 10690 - protein, 475 aa, unidentified; identical to SEQ ID NO: 4985
  REGION 1..475: note = Human gut metagenome

SEQ ID NO: 10691 - protein, 415 aa, unidentified; identical to SEQ ID NO: 6534
  REGION 1..415: note = Human gut metagenome

SEQ ID NO: 10692 - protein, 428 aa, unidentified
  REGION 1..428: note = Human gut metagenome
LKVFVLNMRGQPLMPCSPAKARHLLKAGKAVVKRRTPFTIQLRIATGETKQNVTLGVDAGAKYVGLSATTEKEEVFASEVELRQDITGLLAARLSLRRDRRHRKTRYRAPRFLNRVRSKHKGWLAPSVENRIQAHMSRIDAVCRLLPVTKIVIETASFDIQKIKDPSVEGTDYQQGDQLGFWNVREYVLFRDGHVCQHCHGRSKDKILNVHHLESRQTGGDAPNNLITLCETCHKAYHAGKIKLKVKRGQSFRAEAFMGIMRWTLLDRVRKAHPGLPVENTYGYLTKHTRITHGLPKTHCVDAYCIAGNLKAVRRGVYLHQRQMRKHNRQIHKFTVLSKRLEDGTKIGYRKLNQSPYLVHGFRLFDKVRCLGQIGFIFGRRSSGYFDVRRLDGVKLSPSISWRKLTLLEKRSTYLTELRKQDGASSPV

SEQ ID NO: 10693 - protein, 518 aa, unidentified
  REGION 1..518: note = Human gut metagenome
MANLKLIDELLEKTEYIYVLGIDGKPQMPTNRKVRVRSLFKYGLAKIVDTVPFTIRLLYENDAVLQPITIAEDPGRTNIGAAVLTQLGDLVFSAVVETRNKSIKKLMSDRKAHRQTSRRGERKARQRLAKRHGNMIKAGMIMRKLPQYAADKFVTCKIIKNTEARFCNRKRMPGWLTPTVNHLVQTHINLIKKIERHLPITDVAIEVNRFAFMQMENPNISGVDFQNGPLKGFDDVKAAIREQQHGKCLMCKKDIEHFHHIIPRSKGGSDTIQNQAGLCEKCHTKVHTDAEFLAKFKDKKDGLIKKYGALSALNQAVPFICKELLKIYGVEHVHFCTGKDTSLIRSSLGYEKTKDNQMHEVDAYCIGLAAIGADKAKRPDFNNVFKIKQFRRQDRSIINYQRERTYYLEGKKIATNRKPRFEQKGDALSDWYSEKVKLKGKEYADKLTGHITVKKSTRGYNSKNRVMPGTIFYYGGKRLVLSGQTTRGKYYKAYGDPKTNYPAAKCQIYKHNEGLVFI

SEQ ID NO: 10694 - protein, 434 aa, unidentified
  REGION 1..434: note = Marine metagenome
MSNYVFVLDTNKQPLEPCSPTIAKKLLSAGKAAVFRQYPFTIILKKAVLKDTASHIQPKEVKQCQLKLDPGSKTTGIAILQDSKLIWAAELTHRGQRIKDDLESRRSLRRGRRGRKTRYRQPRFLNRKREKGWLAPSLEHRVLTTMTWVKRLIKLCPIKSIAQELVRFDTQKLDNPEISGTEYQQGTLYQYEVREYLLEKFNRTCVYCGAKDTPLEVEHIKPRSKGGSNRVSNLTIACVPCNQAKSNLDIQDFLANKQPSILKRVLATAKAPLKDAAAVNSTRQKLFDSLKETGLPVITGTGGQTKFNRTQQGLSKTHYLDAAMVGNTPQLEILTDQPLLIKSTGHGNRQMCGTNKYGFPVRHRTNQKNHKGFQTGDIIKAIVTKGKKIGTYTGRVLCRASGSFDISTQAARVAGISYKYCSHIHKKDGYQYSF

SEQ ID NO: 10695 - protein, 405 aa, unidentified
  REGION 1..405: note = Human gut metagenome
GRRHRRQRRAKANGTISKKCVKQDTAQSKNPSKRAKEIGIIKRRLPGYKKDVLCIGIKNKEAKYTNRTRPEGWLTPTANQLLQTHINLVRKMQKFLPISDVVLEVNKFAFMRLDNPDIQKWQYQQGPLYQKGSLENAVSEMQEHHCLFCDKPIDHYHHVVPQSENGSNTIANIVGLCAEHHNLVHKDAAWQKKLAEEKVGLNKKYGALSVLNQIIPALTNKLSVLFPKHFFVTAGKSTHDYRAAHGVSKDHWLDAYCIACSVLPSNVCDSNINNHMPYELKQFRRHDRRVLNNENMNRVYTLDNKAVAINRHKATEQEAASLEEFRKEHPNDVCKLKVKEHHPTYRNMNRNYPGSIFLVGKHVHIMQGIAGSKDGKATTYKDSNANSITASKCKFVAKNSGILFV

SEQ ID NO: 10696 - protein, 415 aa, Bacillus sp.; identical to SEQ ID NO: 7676

SEQ ID NO: 10697 - protein, 429 aa, unidentified
  REGION 1..429: note = Human oral metagenome
MLVYVLKQNGQPFMPTARFGKVRRLLKTKKAKVVRREPFTIKLLYEPETNVVQECYCGVDTGSKHIGVAVVGNDRVLYQSQTELRSDIKKKMDSRRQARRSRRSRKTRYRKCRFLNRRNSIKKDRLPPSVRHKVQAHIDEIEFCKKILPVSDLILEVSQFDTALMKNPSLMNEKVKHWGYQKGFNYGYSSRRSAILHRDNYTCQCCGKKNCRLEVHHIKFKSNGGTDDEENLITLCEDCHKGVHAGTVELNKKPKKSKELKHTTHMSIIRSWLLRKYPNAIETFGFVTSENRNHLQLEKDHYIDACVIASGGIEFKELDVIYRKRHVSKQDRVLTKGIRGEQKLPTSKVFGFKKFDKVKYLGETCFIKGRRSSGAFVLMDIDNNSIDFRDRGGKQNPSYMSIKRITTRKSVLCISKRTKREARLIPILS

SEQ ID NO: 10698 - protein, 389 aa, unidentified
  REGION 1..389: note = Human gut metagenome
MPNKVYVINKHGRPLMPCSPAKARHLLDAGKAKVKKRTPFTIQLVYGSSGYTQEVILGVDAGSKTIGMSASTTKEELLSAEVKPRNDVVDLLSTRREFRRVRRNRKTRYRKPRFDNRVRSKHKEWLAPSVEVKIQEHITSIKRVCRILPVSKVVIETAEFDLQLLKAIADGKSVPQGEDYQKGEMYGHYNVRQYVLWRDNYTCQCCGAHATKKKEVRLHVHHLESRKVGGDAPSNLITLCDSCHEKFHKGIITAANLKKRKRRSMRDATFMGIMRKTLIQRLRAELTIPVAETRGYITKTTRKKLLVLPKSHTNDALAIALGKHGFNVGYLPEIAQIDKIYTIRPVRHHNRQLHKVTILKGGIRKSNQAEKYVFGYRLFDKVQFNGQDC

SEQ ID NO: 10699 - protein, 406 aa, unidentified
  REGION 1..406: note = Human gut metagenome
MVYVQDIDGKPLMPTTRHGKVRRLLKSNKAVVVNLCPFTIRLTYISDSYKQEIVLGVDAGTKHVGLSATTKSKELYSSEVILRNDIVDLLSTRRELRKARRNRLRYRKPRFDNRVKSKRPGWIAPSVKYKVDAHICVINNVCSILPISRIVIEVAQFDTQKIKNPEISGKEYQEGDQLEFWNTREYVLARDGHKCQYCKGKSKDSILNVHHIESRKTGGDSPSNLITLCETCHKEYHKGNIDLKIRRGKSLRDAAVMGIMKWRLYEELKSRYDRVFMTFGYITKHNRIKYGIEKSHTSDAFVISKNINAKRIERQYLKRLIRRHNRQIHKMKILKGGKKKNNQAPFEVFGFRLFDRVLYNNKIFFVYGRRKSGSFNIRDFNGENSKDVSRKKFKLIRGKRHPIILK

SEQ ID NO: 10700 - protein, 441 aa, Moorena sp.
MSVSVFVQDRKHRPLMPCRPARARRLLKSGRARVVRLFPFTIRLTDRLIEDSKLQPVLVKIDPGSRRSGFAVVRVDEKGDHHALFFIELVHRGEYIRDALTGRSAHRRWRRGNLRHRAPRFLNRTRPQGWLPPSLQHRVDTATAWVAKLIKLAPVTEIVEELVKFDTQKLQNPEISGIEYQQGTLFEYEVREYLLEKFGRKCVYCGAENVPLNIDHVVPKARGGSNRISNLVLSCVDCNQKKDAQPVDVFLKNRPEVLDRIKRQLRTSLADAAAVNATRWSLFNALKAFGLPVKTGSGALTKFNRHTFGVPKEHWLDALCAGRVNGVHYPKGMGILQVRCTGRGSYQRTRVDKYGFPRGYLTRQKRVHGFATGDMVKAAVPSGKKAGAYLGRVSVRKSGSFNIQTPEGVIQGIGWRHCRLLSFNDGYGYAWLCPAPHSFPV

SEQ ID NO: 10701 - protein, 502 aa, unidentified; identical to SEQ ID NO: 6049
  REGION 1..502: note = Human gut metagenome

SEQ ID NO: 10702 - protein, 512 aa, unidentified; identical to SEQ ID NO: 3776
  REGION 1..512: note = Human gut metagenome

SEQ ID NO: 10703 - protein, 431 aa, Anabaena sp.
MSKVFVLDTNFTPLNPIHSAQARQLLRTKKAAIFRQFPFTIILKKSRPDSPVSSLRLKIDPGAKFTGMALVNDSTGEVVFAAELKHRGFAIRDALTSRRQLRHSRRARKTRYRQPRFLNRTRPEGWLAPSLQSRVDNIKTWVERLRKLAPIEAISQELVRFDMQLMANPDIQGKEYQQGTLAGYETREYLLEKWGRQCAYCGVKDVPFQVEHIHPRAKGGSNSITNLTLSCEKCNTKKGTKDIKYFLKKDPSKLEKILKQAKRPLADAAAVNTTRFALLEVLKATGLPVETGSGGLTKFNRNQQKLEKTHWIDAACVGQSTPILNIKGVKPLLITANGHGSRQSCRTDKYGFPSRYVPRFKFVNGFQTGDIVKAVVTKGKKIGAYIGRVAVRTSGSFNISTVFGLIQSISYKYCKSIHKKDGYEYGKSKIC

SEQ ID NO: 10704 - protein, 417 aa, unidentified
  REGION 1..417: note = Human gut metagenome
MPCSPAKARLLLEEKKAIVKRRTPFTIQLTIATGEAKQPVALGVDSGYKHIGLSATTEKAELYASEVELRQDITDLLSARLALRRSRRSRKTRYRAPRFDNRVANKREGRLAPSVENRIAAHMSRVEAVMQVLPVTAITVETAAFDTQLLKNPDITGAAYQQGEQLGFWNVREYVLFRDGHVCQHCRGKSKDPILNVHHIESRRTGGDAPNNLITLCETCHKAFHRGEIKLKVRRGKSFKAETFMGIMRRTLFERLKKAHPELNVRNTYGYLTKHKRISYGIAKSHCADAYCIADNLGAKRLEGFFFQKQTRKHNRQIHKLLILKGGLKKKNQAPYEVKGFRLFDKVICKGEEAFIFGRRTSGSFDVRRLDGTRISAGINYKKLRLLEPRTTYLTEFRKEAALPPLHECRGFRAEFL

SEQ ID NO: 10705 - protein, 470 aa, unidentified; identical to SEQ ID NO: 2825
  REGION 1..470: note = Human gut metagenome

SEQ ID NO: 10706 - protein, 441 aa, unidentified; identical to SEQ ID NO: 6900
  REGION 1..441: note = Human gut metagenome

SEQ ID NO: 10707 - protein, 473 aa, Actinoplanes sp.
VRHGRGETTAPIPGQWRHPDGQPSGDRGRKAPPTHHPVVFVLDKHGRPLQPCTPARARKLLTAGRAVVHRHTPFVVRLKDRTVQDSEIQGVEVGVDPGSKATGVAAFTTQTGARTGLLAIEVRHRGGQIRDKLTARAALRRGRRSRNLRYRAPRFRNRARPKGWLAPSLQHRVDTTMSWIERLRRWAPVIQLHVERVAFDTQLLQNPTIQGAEYQAGELAGYEVREYLLEKWKRRCAYCGASGVPLNIDHIHPKARGGSDRIANLTLACVPCNQAKGSTPVEVFLTGRPVVLARILRQVKTPLRDAAAASSTRWALWRALTGTGLQVAVATGGRTKWNRARTGAPKTHTLDALHVGVLDTVTRWPGTTLVATSTGRGSYARTRSDRYGFPRLRLPRIKQVWGFATGDLVHAVVPSGVKRGTHTGRVAVRSTGSFNIRTKTGLVQGIHHRHIRLLQRADGWAYTHQPEGQPTDA

SEQ ID NO: 10708 - protein, 412 aa, unidentified; identical to SEQ ID NO: 6105
  REGION 1..412: note = Microcoleaceae bacterium UBA9251

SEQ ID NO: 10709 - protein, 450 aa, unidentified
  REGION 1..450: note = Anaerobic digester metagenome
VKSDSLYGNSIEIRITYRKVKYLSGRTDYVVYVINCDGKPLMPCQPVIARLLLKQGKAKVIKRTPFTIRLLYQTTSYTQPLTLGIDTGSSKIGSAVVNDKNEVVYLSQVEVRNDIADKMKQRAKYRRNRRYRKTRYRKARWLNRKNSIKKDRFSPTMTSKINSHLKEIKFVKSILPITKTILETATFDPHALKNPEVLKNKWLYQKGINYGFANTKAYVLNRDNYTCQYCKGKTKDSRLHVHHIIFRSNGGSDEHENLITLCKTCHDRLHNGEIKLKLNGKKKGQLKHATQMNSIRQQLLKLLPEAEETFGFITKEHRQLMDLPKEHYYDAVAIACLHNIQNDGLVSVDFKTRNILFKKCIADGDYQQTKGVRSEQRIPTGKIQGFKKFDKVRYLGEEYFIKGRMSTGYAILMDIEGNKINLKPIPKLNKMERISARKSWIMTYAFISHL

SEQ ID NO: 10710 - protein, 418 aa, unidentified; identical to SEQ ID NO: 5294
  REGION 1..418: note = Human gut metagenome

SEQ ID NO: 10711 - protein, 455 aa, unidentified
  REGION 1..455: note = Mouse gut metagenome
MSVFVISKNGKRLMPTTRFGHVRHMLKDGRAVIYCRKPFTIQLTYVSSKYIEPLELCIDTGAQHIGISLKSSKKEFISEQRDLLKDEKEKHDDQRMYRRTRRNRLRYRKPRFNNRISNKKEGWFAPSLKNKADQHIMLIQRLATVAPIKDIYLEVGSFDTQLLDAIAKGLPIQEGTDYQQGALYGEETLRKAVFQRDNYTCQVCGRTIKDGAKLHTHHFLYWKGRHGNRLDELCTVCEKCHTSANHQKGGKLYGWGADKKFKSYVSAAFMNTVRWYIVNQVKDLVSDTEVHTTYGAATKLARKDFQFEKSHVNDAYAMGKLHPNIRCKTEYYKKVRRNNRCLEKFYDAKYIDIRDGKKKSGKELGCQRTNRREPRMSENNLRIYHGQKVSKGRRSIRKQRYSIRPGDVVLFNGQKYISKGCGSYGTQVLLDTGKSVSIKKVQIIRHTGGWINLNI

SEQ ID NO: 10712 - protein, 480 aa, unidentified; identical to SEQ ID NO: 2726
  REGION 1..480: note = Human gut metagenome

SEQ ID NO: 10713 - protein, 413 aa, unidentified
  REGION 1..413: note = Human gut metagenome
LKVFVLNMRGQPLMPCSPAKARHLLKAGKAVVKRRTPFTIQLRIATGETKQNVTLGVDAGAKHVGLSATTEKEEVFASEVELRQDITGLLAARLSLRRDRRHRKTRYRAPRFLNRVRSKHKGWLAPSVENRIQAHMSRIDAVCRLLPVTKIVIETASFDVQKIKNPTIEGTDYQQGDQLGFWNVREYVLFRDGHICQHCRGRSKDPILNVHHLESRKTGGDAPNNLITLCETCHKAYHAGKIKLKVKRGQSFRAEAFMGIMRWTLLDRVRKTHPKLPVENTYGYLTKHKRIALGLPKTHCADAFCIAGNLKALRRGDFLFQQQTRKHNRQIHKCSILKGGVRTLNQAPFLVKGFRLFDKVRIGGQIGFVFGRRVRGTFNIRRLDKTVIGTDINCKKLSLLETRKTFLTELRKE

SEQ ID NO: 10714 - protein, 425 aa, unidentified
  REGION 1..425: note = Human oral metagenome
MFVYVLDMNGQPLMPTSRFGKVRRMLRDKKAKVVKSCPFTIRLLYEPETKIVHDIVLGVDTGSKYVGVSCVGNNKVLYQAQVELRDDIKKKMDSRRVYRRSRRNRKTRYRKPRFLNRRNSIKKDRLPPSVKHKVQAHIDEIEFCKKILPISDENIILEVSQFDTALMKTPNLIHEKIRHWGYQQGFNYGHSSRRKAVLHRDNYTCQCCGKKNCQLQTHHIIFRSCGGSDDENNMITLCKECHKGVHDGTIVLNKKPKAKRLKHTTHMSIIRSRLLKEYPNAIETFGFVTSENRNHLKLEKDHYIDACVIASGGLEFELSDVLYRKRCVPVQNRVLTRGIRSERKIPTGKVHGFKRYDKVEYLGKVCFVKARRTKGDFVLMDIGNNSIDFRVIGGCQNPSHKKIKRLNTRRGVICIIQKVQNREER

SEQ ID NO: 10715 - protein, 461 aa, unidentified
  REGION 1..461: note = Human gut metagenome
GKYKHKGGQLMSVAVISKTGERLMPTSEYRARKLLKSGKAIKYSYHPFTIQLTERKTGNIQPIELCMDTGYIHIGISVKSEKHEYLTEQIDTLTDERSRHNARRMYRSQRRNRKRYRQPRFNNRKKDKGWIAPSLEHKKNIHVQAISRINNVMPLTDITMEMGNFDTQVLKAKEEGRPLPQGVDYQHGERYSIATLREAVFARDGYKCQCCGRTIKDGAILHVHHIKYRSQGGTNSISNLATVCDKCHTPKNHKPGGKLYGWKPKLPSFKGATFMTTIRWQLYNEAKALFPDIDIHITYGAATKERRRELNIDKSHINDAFVMGQFHPRHRIKAVLYKKKRRNNRCLEKFYDAKYIDSRDGKKRSGQELFNGRINRNHKKDSENLHQYRLQKVTAGKRTVRKQHYSVQPHDIIIYESRKRETTGCHCNGARVMLLPDKKSVSIKKIKIYRYAGGYFKSTFN

SEQ ID NO: 10716 - protein, 371 aa, unidentified
  REGION 1..371: note = Human gut metagenome
VDAGYKHVGLSASTEKAELYASEVELRQDITDLLSARRALRQSRRNRKTRYRAPRFNNRLCTKRKGWLAPSVENRINAHLSRIEAVLRLLPVTKITVETASFDLQLLKNPDISGKEYQEGEQLGFWNIREYVLCRDGHVCQHCYGRSKDPVLNVHHLESRRTGGDSPGNLITLCETCHKALHRGEITLKAKRGQSFRAEAFMGIMRSEVLNRLKASHPELEVNNTYGYRTKHARIANDIAKSHCADAFCIAGNLGAERLGEFFFQKQTRRNNRQIHKLSILKGGIRKRNQAPFEVNGFRLFDKVACKGEEGFIFGRRSSGFFDVRKLDGTCISAGISYKKLHLLEKRRTYLTEIRKEEALPPLPEGRGLRA

SEQ ID NO: 10717 - protein, 414 aa, unidentified
  REGION 1..414: note = Human gut metagenome
MPCSPAKARLLLKEKKAIVKRRTPFTIQLTIATGETKQPVSLGVDAGYKHVGLSASTEKAELYASEVELRQDITDLLSARRALRQSRRNRKTRYRAPRFDNRIRTKRKGWLAPSVENRINAHLSRIEAVLRLLPVTKITVETASFDLQLLKNPDISGKEYQEGEQLGFWNIREYVLCRDGHVCQHCYGRSKDPVLNVHHLESRGTGGDSPGNLITLCETCHKALHRGEITLKAKRGQSFRAEAFMGIMRSEVLNRLKASHPELEVNNTYGYRTKHARIANDIAKSHCADAFCIAGNLGAERLGEFFFQKQTRRNNRQIHKLSILKGGIRKRNQAPFEVNGFRLFDKVACQGEEGFIFGRRSSGFFDVRKLDGTRISAGISYKKLRLLEKRQTYLTEIRKEEALPPLPEGRGLRA

SEQ ID NO: 10718 - protein, 432 aa, Lactobacillus sp.; identical to SEQ ID NO: 6011

SEQ ID NO: 10719 - protein, 440 aa, Lactobacillus sp.; identical to SEQ ID NO: 5150

SEQ ID NO: 10720 - protein, 442 aa, unidentified
  REGION 1..442: note = Human gut metagenome
MSTSVFVLDKKHRPLMPCRPARARRLLRAGRARVVKRFPFVIRLVDRTVEQSEVQPVLIKLDPGSRETGAAVVRDDGKKRHHALAFFVIEHRGGAIRDALKARSAFRRRRRSQNFRCRSPRFLNRVKPKGWLPPSLRHRVETTLSFVRRMCRYLPVSGIATELVKFDSQKLQNPEVSGVKYQQGTLFEYEVREYLLEKFGRKCVYCGAEGVPLNIDHVVPRAKGGSNRVSNLVLACVSCNQKKGARSLEDFLKGKPEVLARVRRELKTPLRDAAAVNATRWVLFNELKATGLPVETGSGALTKLNRHAFGVEKEHWLDALCVGRLNGVVTRKGLNVLEIRCMGRGSRQRTRLTKYGFPRGYLMRQKCVHGFATGDMVEANVPKGKKAGLWRGRVAVRVSGSFNIQTPKGVIQGVGWKHCRLISHNDGYGYAWLGHAPHSSPA

SEQ ID NO: 10721 - protein, 427 aa, Nostoc sp.; identical to SEQ ID NO: 2670

SEQ ID NO: 10722 - protein, 442 aa, unidentified
  REGION 1..442: note = Human gut metagenome
MVTVQQSTHHLPFGRVFIRRNLFMVYVISQDGKPLMPCSDPIARLLLKQGKAKVKKRDPFTIKLTYETTNYTQGLTLGVDTGSGTIGTAVSKDNGDIVYMSEVVVRNDITDKMTQRAKYRRNRRNCKTRYRKARWLNRASSIKKDRFSPTMQSKLHSHVREIEYIQSILPITEMVFETGQFDMQLMKNPSLANPKVRPWGYQKGANYGFENTKAMVLNRDNYTCQCCKGKHKDSKLEVHHIVFRSQGGSDEESNLLTLCHTCHKDLHSGKINPKLSGKVKGNLKYATQMNSIRKQLFRFYPNAIETFGYVTKANRLHLGVDKEHYYDACTIATQGNTFNVKSNLYKKKCVSDGDFQKTKGIRSEQPIVTDKICGFRKFDKVRYFGNDYFIKGRMSTGYAILMDIDGNKIDFSTMPRGYKTPKLSNCKRITARSTVMTQVKVV

SEQ ID NO: 10723 - protein, 442 aa, unidentified
  REGION 1..442: note = Human gut metagenome
LMPTFRLGKVRHLLKDGKAKIVKHHPFTIQLLYDSKTNTQPIEICEDVGYNYIGISVKSQSHEYVSAQYDTLQDEKACHDSCRKYRRTRRNRLRYRKPRFDNRKRSEGWLAPSLRHKKELNVNVVKMYCAVMPITHATVEVGSFDTMLVKAIQEGKAIPEGADYQKGPRYNLATLREAVFYRDNYVCKVCGRKATEGAILHVHHMFYWKGRHGNSLSELITVCEKCHTPANHQKGGKLYGFGENVKFADLSGAAFMNTVRWQIVNELYAAFGKDFVTVTYGAMTKEKRIALHLEKSHNNDAYAMGNCHPAHRCEFGHYQKRCRNNRVLEKFYDATYIDTRTGDKAKGKELFNGRISRNHKKDSEDLHKYRSKKVSKGRRSIRRQRYAIQPYDTVRLESKSYITSGCHNKGTRLLIPANGKSKSVAISKVQVVCHAGAWIQII

SEQ ID NO: 10724 - protein, 512 aa, unidentified
  REGION 1..512: note = Human gut metagenome
MSTVYVLNKDGKPLMPTTRGGHVRHLLKEQKARVVRTKPFTIQLLYETDDVVQLLYLGIDPGRTNIGVAVVKTDGTAVFTAHLETRNKEIPKLMKKRKNSRRARRTNGRRCRRQRRAKANGTISKKCVKQDTAQNGSVSKRAKKIGVIKRHLPGCEKEVLCIGIKNKEAKFSNRVRPEGWLTPTANQLLQTHINLVKKIQKFLPISDVVLEVNKFAFMQLDNPNIQKWQYQQGPLYQKANLEEAVSEMQEHHCLFCKKPIDHYHHVVPQHKNGSNTIGNIVGLCTKHHDLVHKEAAWQEKLAKKKTGLNKKYGALSVLNQIIPALTKELSSLFPKHFFATNGKSTYDYRAAHGVSKDHWLDAYCIACSVLADDVCDNNINSHVPYELKQFRRHDRRALHKENMSRVYTLNGKSVATNRHKATEQTTDSLEEFRQCQPDDVCKLKVKEHYPEYRNPKRNFPGCVFLVGKHTHVMQGTSGSHNGKADGYYDTNGNSYSSGECKFVAKNEGIVFA

SEQ ID NO: 10725 - protein, 461 aa, Parasutterella sp.; identical to SEQ ID NO: 3646

SEQ ID NO: 10726 - protein, 362 aa, unidentified; identical to SEQ ID NO: 4544
  REGION 1..362: note = Human gut metagenome

SEQ ID NO: 10727 - protein, 465 aa, unidentified
  REGION 1..465: note = Human gut metagenome
MNTCVCVLGNNGERLMPTFRLGKVRRLLKDGKAKIVKHHPFTIQLLYDSKTNTQPIEICEDVGYNYIGISVKSKSHEYVSAQYDTLQDEKEHHDDCRMHRRTRRNRLRYRKPRFDNRKRGEGWLAPSLMHKKELNVNVVKMYCAVMSITHATVEVGSFDTMLVKAIQEGKVIPEGADYQKGPRYNLATLREAVFYRDNYVCKICGRKATEGAILHMHHMFYWKGRHGNSLDELLTVCEKCHTPANHQKGGKLYGFGEDVKFADLSGAAFMNTVRWQIVNELYVAFGKPFVTITYGAMTKEKRIALQLEKSHNNDAYAMGEFHPNLRCMFEHYEKARRNNRILEKFYDSRYIDIRTGEIATGKELFNGRINRNHKKDSENLHKYRGKRTYAGHRALLRKKVNLNPGDLVSLNGENLIVHSTHTKKNGAVNVEFETPAKSGQKSASLKKLKIVKAANSIHPAWKKIS

SEQ ID NO: 10728 - protein, 431 aa, unidentified; identical to SEQ ID NO: 8350
  REGION 1..431: note = gut metagenome

SEQ ID NO: 10729 - protein, 434 aa, Mitsuokella sp.; identical to SEQ ID NO: 7534

SEQ ID NO: 10730 - protein, 424 aa, unidentified; identical to SEQ ID NO: 3434
  REGION 1..424: note = Human gut metagenome

SEQ ID NO: 10731 - protein, 413 aa, unidentified; identical to SEQ ID NO: 2636
  REGION 1..413: note = Human gut metagenome

SEQ ID NO: 10732 - protein, 349 aa, unidentified
  REGION 1..349: note = Human gut metagenome
VSYCKPLINIGEGVIYSSICTGLSLQTYQKRKEVPYMVYVLDIDGQPLMPTTRHGKVRRLLNSHLAKVVKRCPFTIQLLYQSTKETQPVSLGVDAGSKHIGMAATTEKKVVYQEELSPRNDVVKLLSARRTLRRTRRNRKTRYRKPRFNNRVHSKHKGWLAPSVEVKIQEHITAIKRICQILPISDIHVETAEFDLQRLKAMEEGRPLPVGTDYQLGEQYDFYNTRQYVLHRDEYTCQCCGTHDNNVKLHVHHIESRQTGGDAPNNLITLCEHCHKLLHAGKTILPKGKKRGKSYRDATFMGIMRKTLLERLRKEVDVPVSWTYGYITKYWREKTDLEKSHINDAICIS

SEQ ID NO: 10733 - protein, 442 aa, unidentified; identical to SEQ ID NO: 2903
  REGION 1..442: note = Human gut metagenome

SEQ ID NO: 10734 - protein, 456 aa, unidentified
  REGION 1..456: note = Human gut metagenome
MSTCVCVLSNNGERLMPTFRLGKVRRLLKDGRAKIVKHHPFTIQLLYDSKTNTQPIEICEDVGYNYIGISAKSKSHEYVSAQYDTLQDEKEHHDDCRKMRRTRRNRLRYRKPRFDNRKCDKGWLAPSLEHKKQLNISLIERYVSVIPITHATVEVGSFDTMLLQAIQKGKAKPESADYQKGPHYNLATLREAVFYRDNYTCQVCKRKIADGAILHMHHMFYWKGRHGYQLDELATVCEKCHTPANHQKGGKLFGFGEGKEFADLSGAAFMNAVRWQIVDALYTTYDKEFVTITYGAMTKEKRIALQLEKTHNNDAYAMGDYHPACRCKFRHYQKRRRNNRVLEKFYDATYIDARTGNKAKGKELFNGRINRNHKKDSENLHKYRSKKVSKGRRSIRRRRYAIQSYDTVRLEGKTYITSGCHNKGTRLLIPVNGKSKSVAISKVQVVCHAGAWIQIS

SEQ ID NO: 10735 - protein, 413 aa, Blautia sp.; identical to SEQ ID NO: 3119

SEQ ID NO: 10736 - protein, 457 aa, unidentified
  REGION 1..457: note = Human gut metagenome
MGDGYFTAERLSGLIFSRNLEKEEGIMQNKVYVINKHGRPLMPCSPAKARHLLDDGKAKVKKRTPFTIQLLFGSTGYTQEVILGVDAGSKTIGLSASTETEELFSAEVKPRNDVVDLLSTRREFRRARRNRKTRYRKPRFDNRVRSKHKGWLAPSVEVKIQEHMTAIRRICRILPVSKVVVETAEFDLQLIKAVEEGKPVPQGEDYQKGEMYGHYNVRQYVLWRDGYTCQCCGAHATQKKEVRLHVHHLESRKIGGDAPSNLIALCESCHEKFHKGIITTADFKKRKRKSTRDATFMGIMRKTLIQRLRAELTIPVIETRGYITKATREKLLVLPKSHTNDALAIAQGPQGFHTGYLPGIRQATHIYTIRSVRHHNRQLHRATILKGGVRKANQAEKYVYGFRLYDKVLYNGTECFVWGRRASGSFLLRKLDRAKVKDGVSYKHLKLLERSQNYLIA

SEQ ID NO: 10737 - protein, 512 aa, unidentified; identical to SEQ ID NO: 7352
  REGION 1..512: note = Human gut metagenome

SEQ ID NO: 10738 - protein, 415 aa, Bacillus sp.; identical to SEQ ID NO: 5517

SEQ ID NO: 10739 - protein, 413 aa, unidentified; identical to SEQ ID NO: 2636
  REGION 1..413: note = Human gut metagenome

SEQ ID NO: 10740 - protein, 507 aa, unidentified
  REGION 1..507: note = Human gut metagenome
MSEYIYVIGMDGDPQMPTKRKRHVEKLLQTGRARVFRQVPYTIQLTYKNQPVLQPVTIAEDPGRSNIGMAVVSLSGELLSAAVVQTRNKEIVKLMEKRKQHRRASRNGERKARQRLAKKCHTMIKTGFLMRKLPMYRKDKRVKCLVIRNTEARFCNRKREDGWLTPSAEHLVRTHINLIHKMQKFLPITDVAIEINRFAFLSLEDQSISGVDFQKGPLKGYDDLNAAVEDLQDGHCLMCDSPIEHRHHIVPRSMQGSNTIGNIAGLCCKCHERVHKDARFEDRLKKKKAGLDKRYAAVSVLNQAIPFICKRLEQEFGKEHVHYCSGRDTSMVRRSLGYHKTKEEQLHEVDAWCIAVLALQHVPEKAPKFDHVHEILQFRRQDRSRIKAQTSRAYYYEGKKIAKNRKKAEGQREDSLQEWRKRQVERYGKEQTRKMISQLEVKESIRRYNRLDRLMPGAVFYYQGVRYVMRGQHSNGQYLQAVGMGDKDFPAKKCKIVVHNQGLVFVS

SEQ ID NO: 10741 - protein, 545 aa, unidentified
  REGION 1..545: note = Human gut metagenome
MVYVQDINGKPLMPTTRHGKVRRLLKENKAVVVNLCPFTIRLTYVTSDYKQEIVLGVDAGTKHVGLSATTKSKELYSSEVILRNDIVDLLSTRRELRRARRNRLRYRKPRFNNRIKSKRPGWIAPSVKYKIDAHIRVVENVCSILPISRIVIEVAQFDTQKIKNPNISGKEYQEGDQLGFWNTREYVLARDGHKCQYCKGKSKDKILNVHHIESRKTGGDSPSNLITLCETCHKEYHKGNIDLKIKRGKSLRDAAVMGIMKWRLYEEIKSKYDRVSMTFGYVTKYNRINHGFEKSHVSDAFVISKNFNAIRSGYYYKVRLVRRHNRQIHKQKIQKGGIKRLNQSPFEVFGFRLFDRVMFENSYYFIFGRRKTGSFDIRYIDGKNQKNVTYKKLKLSRCKRFMIQMELNKKHGHVLKMKEILAETLRKSGAAVCDKIKAMFLNGECDHLTANDLETWMQLANPAKYYTGEEAVSYLNVTSKRFYEYRKAKLVPDPVKIKGFPKPLYTKVMLDEAIKTISGMSERDIYMRILNAKSRESRAKERRGA

SEQ ID NO: 10742 - protein, 442 aa, unidentified
  REGION 1..442: note = Human gut metagenome
MSTTVFVLDKKHRPLMPCRPARARRLLRAGRARVVKRFPFVIRLVDRTVEQSEVQPVLIKLDPGSRETGAAVVRDDGKKRHHALAFFVIEHRGGAIRDALKARSAFRRRRRSQNLRCRSPRFLNRVKPKGWLPPSLRHRVETTLSFVRRMCRYLPVSGIATELVKFDSQKLQNPEVSGVEYQQGTLFEYEVREYLLEKFGRKCVYCGAEGVPLNIDHVVPRAKGGSNRVSNLVLACVSCNQKKGARSLEDFLKGKPEVLARVRRELKTLLRDAAAVNATRWVLFNELKATCLPVETGSGALTKFNRHAFGVEKEHWLDALCVGRLNGVVTRKGLNVLEIRCMGRGSRQRTRLTKYGFPRGYLMRQKCVHGFATGDMVEANVPKGKKAGLWRGRVAVRVSGSFNIQTPKGVIQGVGWKHCRLISHNDGYGYAWLGHAPHSSPA

SEQ ID NO: 10743 - protein, 419 aa, unidentified; identical to SEQ ID NO: 8591
  REGION 1..419: note = Human gut metagenome

SEQ ID NO: 10744 - protein, 470 aa, unidentified; identical to SEQ ID NO: 2825
  REGION 1..470: note = Human gut metagenome

SEQ ID NO: 10745 - protein, 512 aa, unidentified; identical to SEQ ID NO: 5811
  REGION 1..512: note = Human gut metagenome

SEQ ID NO: 10746 - protein, 494 aa, unidentified
  REGION 1..494: note = Human gut metagenome
MDMVYVLNKDGKPLMATTRGGRVRYLLKEKKARVVSSTPFTIQLNYDTPDATQDLILGIDPGRTNIGVAVVKEDGSCVFSAHLETRNKDVPLLMKKRAAFRRNHRTLDRRRKRQRRAKAAGTTIAEGSVERLLPGYEKPIMCHHIRNKEARFNNRSRPAGWLTPTANHLLQTHINLIAKVAKFLPITKVVVELNRFAFMAMANPNIRRWEYQQGPLCGLGSVEDAVYAQQDGHCLFCKKPIDHYHHVIPRHKRGSETLANRCGLCAKHHDLVHTDKAWADKLVTRKEGMNKKYHALSVLNQIIPHLMEYIGSETLYDAYATDGRSTKGFRIAKNVPKEHYTDAYCIACSILDTDIEVSAPVEPFEMKQFRRHDRQACIRQMVDRKYILDGKVVATNRHKTIEQKSDSLEEFREAHGNAAVSQLTVKPHHPQCKDMARIMPGAVMVFDGAVGVFQGSSGRNNGTPNYYNSTKGERFLTRSCVLLAQNAGMVFIPA

SEQ ID NO: 10747 - protein, 409 aa, unidentified
  REGION 1..409: note = Human gut metagenome
EPLMPCSPGKARLLLKQQKACVVKRTPFTIKLLFGSAGYKQPITLGVDAGSKHVGLSASTEKRELYSEEFTPRSDVVELLSTRRQNRRSRRNRKTRYRVPRFDNRVHSKHKGWLAPSVEVKIQEHITVIKHICKILPISLVRVETAEFDTQRLKAMLAGKPLPVGTDYQLGEMYDEYNVRQYVLKRDHYTCQCCGTHNTAKKVVKLHVHHLESRKVGGNAPSNLITLCTTCHDALHKGKVSLDGKERGKPLRDAAFMGIMRKALMARLREELPIPVQGTYGYITKMRREQNDIKKSHVNDARCISKHPLAEPCSVCYRTKAIRHHNRQTHKVNFSKKGIRKRSQMPYLVEGFRLWDKVLYKGQECFVSGRRASGSFTLKKLDGTRISKGVTFKKLRLLEPATNYLIERM

SEQ ID NO: 10748 - protein, 327 aa, unidentified
  REGION 1..327: note = Marine metagenome
MAVFVLDKKKQPLMPCSEKRARLLLARGRAVVHKRYPFTIRLKNRVGGEAQPLRLGIDPGSKTTGLALIREPDSQQRHVLCLFELIHRGFQIKKALQQRAAFRRRRRSANLRYRAPRFNNRIKPKGWLAPSLQHRVDTVMAWVNRLSKSAPITGISQELVRFDTQKLESPEISGVEYQQGTLLGYEVREYLLEKWGRECAYCGTADTPLEIEHVVPRSRGGSNRVSNLTLSCHPCNQSKDALSLVDFFATDKGLKKRLKANGHTANARLERVQRQLKQPLRDASAVNATRWALFSALNATGLPVTVASGGRTKYNRQRLNIPKSHAL

SEQ ID NO: 10749 - protein, 413 aa, unidentified; identical to SEQ ID NO: 2636
  REGION 1..413: note = Human gut metagenome

SEQ ID NO: 10750 - protein, 406 aa, unidentified; identical to SEQ ID NO: 2874
  REGION 1..406: note = Human gut metagenome

SEQ ID NO: 10751 - protein, 395 aa, Moorena sp.
LVYVLNPFGQPLMPTDDHRKVRILLKEKKATVVRRSPFTIRLLHRTKQYVQPVTLGVDAGSKHVGVSACTPEKELFRAELMPRNDVVDLMSTRRELRRSRRNRTTRYRAPRFENRVHSKRKGWLAPSVEVKIHNHNQLIEFACKILPVSLIRIETAEFDLQRLKAMEEGKPLPEGEDYQHGEMYDQYNVRQYVLFRDNYSCQCCGAHPTDKKPVKLHVHHKESRKVGGDAPNNLITLCEDCHDLLHKGIVELPDDKKRRGKSTRDATFMGIMRKTLLQRLRDKMGIPIQNTYGYITKAIRESNGIEKTHTSDAQCIARCPKAKPAAEEYLIKPVRRHNRRLHKNAILKGGYRKANQAPTFVFGFKLFDMVDYNGEECFVYGRRSSGSFDVRHLDG

SEQ ID NO: 10752 - protein, 451 aa, unidentified; identical to SEQ ID NO: 7526
  REGION 1..451: note = Human gut metagenome

SEQ ID NO: 10753 - protein, 345 aa, Bacillus sp.
MVSYCFVLDICGKNLSPTNENKGWYLIRKKKAKLIHKFPMVIQLFKEVSEGEIDQTLIHFNIDDGSKYTGVALVQEGKTKNKPLFKGTIEHRTDVKEKMDVRRGYRRYKRSHKKYRPARFSNRSSSKGKRRIAPSIKQKKEATLRVLNQLKKWIRVDSIYLENVLIDIRKLEKGSQPYRFEYQQSNRLDENLRKATLMRDTFTCQDCGKRDGRLEAHHIIPRRVKGPDSIHNLITLCPSCHEQVTGKEMTHVERFLRKIDGKVIYFQDAMHVMQGKTYLQEELQKLAPVTLTSGGDTANRRIDWCIEKSHSNDAIVLSQLKVSPEQCQIKDWLIKPMRRRARFSP

SEQ ID NO: 10754 - protein, 452 aa, Pseudoalteromonas sp.; identical to SEQ ID NO: 5364

SEQ ID NO: 10755 - protein, 428 aa, unidentified
  REGION 1..428: note = Human gut metagenome
LKVFVLNMRGQPLMPCSPAKARHLLKAGKAVVKRRTPFTIQLRIATGETKQNVTLGVDAGAKHVGLSATTEKEEVFASEVELRQDITGLLAARLSLRRDRRHRKTRYRAPRFLNRVRSKHKGWLAPSVENRIQAHMSRIDAVCRLLPVTRIVIETASFDVQKIRNLEVEGTGYQQGDQLGFWNVREYVLFRDGHVCQHCHGYSKDKILNVHHLESRQTGGDAPNNLITLCETCHKACHAGKIKLKVKRGQSFRAEAFMGIMRWTLLDRVRKAHPGLPVENTYGYLTKHTRITHGLPKTHCVDAYCIAGNLKAVRRGVYLHQRQMRKHNRQIHKFTVLSKRLEDGTKIGYRKLNQSPYLVHGFRLFDKVRCLGQIGFIFGRRSSGYFDVRRLDGVKLSSGISYRKLTLLEKRSTYLTELRKQDGASSPV

SEQ ID NO: 10756 - protein, 459 aa, Ktedonobacter sp.
MHRHSGVAFQSRTLRRVVKQRDGVSIAVRLASKGNLRRSWTRKTLPGACRRPERARTEDSAMSYVFVIDQEKRPLDPVHPGRARKLLSSGKAAVYRRFPFVLILKHPVSEAHPQPLRLKIDPGSKTTGLAVLNDTSGQVLWAAELVHRGEEVHQALQKRAGVRRGRRSRHTRYRAARFSNRRRKRGWLAPSLCSRMQNVQTWTRRLMRWCPLGAISYEAVRFDTQAIQNPEIKGVAYQHGTLAGLEVKEYLLLKWRHKCVYCQKGDIPLEVEHIVPKRRGGSDRITNLTLACEACNQQKGSQTAQAFGFPHLQAQALQPLKDAAAVNSTRWALYERLKATGLPIEVSTGGQTKWNRKQRGIPKSHWLDAVCVGPSTPERVQWQHVIPLLITARGRQCRQLCNVDGWGFPRSRPKGPSKVFGFQTGDMVQAVVTRGKRMGTYVGRVAIKTDGYFKITGTH

SEQ ID NO: 10757 - protein, 494 aa, unidentified
  REGION 1..494: note = Human gut metagenome
MTMVYVQNKDGKPLMPTTRYCYVRLLLKEKKARVVCTTPFTIQLNYDTPDITQDLILGIDPGRTNIGVAVVKEDGQCVFSAHLETRNKEVPLLMKKRAAFRRQHRTQDRRRKRQRRAIAAGTTVESNTIERLLPGYEKPVVCHYIRNEEARFNNRSRPQGWLTPTANHLLQAHINLIAKIAKFLPITKVVVELNRFAFMAMDNPNIHRWEYQQGPLYGLGSVDDAVYAQQDGHCLFCKKPIDHYHHVVPRHKGGSETLANRCGLCEKHHALVHKDKAWAEKLVTRKGGMNKKYHALSVLNQIIPFLMEYLGRETPYDVYATDGKSTKGFRIAKNVPKEHYTDAYCIACSILDANTKVSTPAEPFELKQFRRHDRQACIRQMVDRKYLLDGKVVAANRHKAIEQRSDSLEEFREAYGDAAVSQLTVRLHSPQYKDMARIMPGAVMDFDGIVGVFQGSEGFHNGKPDYYKSTKGAKVLTKRCALLAQNAGMVFIPA

SEQ ID NO: 10758 - protein, 406 aa, unidentified; identical to SEQ ID NO: 4082
  REGION 1..406: note = Human gut metagenome

SEQ ID NO: 10759 - protein, 420 aa, unidentified
  REGION 1..420: note = Human gut metagenome
LYDSKTNTQPIEICEDVGYNYIGISVKSQSHEYVSAQYDTLQDEKACHDSCRKLRRTRRNRLRYRKSRFDNRKRGEGWLAPSLRHKKELNVNVVKMYCAVMPITHVTIEVGSFDTMLLKAVQEGKAIPEGADYQKGPRYNLATLREAVFYRDNYVCKVCGRKATEGAILHMHHMFYWKGRHGNSLSELITVCEKCHTPANHQKSGKLYGFGENVKFADLSGAAFMNTVRWQIVNELYAAFGKDFVTITYGAMTKEKRIALRLEKSHNNDAYAMGEFHPNHRCTFEHYEKVRRNNRTLEKFYDSRYIDIRTGEIATGKELFNGRINRNHKKDSENLHRYRGKRTYAGHRALLRKKVKLNPGDLVSLNGEVLIVHGTHTNKKGAVNVEFKVPAKNGQKSASLKKLKIVKTTDSMHSAWEKIS

SEQ ID NO: 10760 - protein, 475 aa, unidentified
  REGION 1..475: note = Human gut metagenome
DSLFTKGVPCMSTCVCVLSNNGERLMPTIRLGKVRHLLKDGKAKIIKHHPFTIQLLYDSETNIQPIEICEDVGYNYIGISVKSQSHEYVSAQYDTLQDEKDCHDSCRKMRRTRRNRLRYRKPRFDNRKHDKGWLAPSLEHKKELNVNVIKMYCEVMPITHATVEVGSFDTMLVKAIEEGKATPESTDYQKGPRYNLASLREAVFYRDNYTCQVCGRKANEGAILHVHHMFYWKGRHGNSLNELVTVCEKCHTPANHQKGGKLYGFGENIKFANLSGAAFMNTVRWQIVNELYAAFGKPFVTFTYGAMTKEKRIALHLDKSHSNDAYAMGNFHPVDRCAFEHYEKVKRNNRILEKFHDSRYIDIRTGKEAKGKELFNGRISRSHKKDSENLHKYRGKRIRKGYRALRRKKVALNSGDLVSLNGETLIVHGTHTNKKGNVRVEFKVAALNGKKSASLKKLKIVKTSTPMHSAWAKVS

SEQ ID NO: 10761 - protein, 459 aa, Burkholderia sp.
LAVFVLDKTGKALMPCTEKRARLLLARGRARVHRVMPFIIRLVDRGAAASNLQPLRIKLDPGSKTTGGALVRDTDVLAPSTGEMQRGAAVLNLFGLVHRGRQISAALTARRAMRRRRRGNLRYRAPRFLNRTRTEGWLPPSLQHRVDTIMAWVRRISRWAPVTALSSELVRFDMQALDNPDIEGAEYQQGTLADYEVREYLLEKWGRVCAYCDTTNVPLQTEHIVARARGGSNRVSNLTLGCAPCNQKKAALPVEVFLAKDLKRLSAILAKAKRPLKDAAAVNTTRWVLANALKTTGMPVELASGGQTKFNRTRFAIPKTHALDAVCVGAVAAVSGWRAPTLVVKCAGRGSYQRTRLDRYGFPRGHLTREKRVHGFQTGDLVRAKVPSGQKAGTHIGRVAVRATGYFNIQSAGEVVQGVAHRHCQLVQRSDGYGYSRQLYPKETQEKAVLRTARYPFPA

SEQ ID NO: 10762 - protein, 436 aa, unidentified
  REGION 1..436: note = Human oral metagenome
MTKTLTKQTTQACVLDQHGKPLMPTTRLGKVYRLLKTKKAHIVSYEPFTIQLDYEPDTHIIQPMTLGVDSGAIHSGYSIANKQREYYSAEVIARDDISKRLSDRRMYRQNRRSRKTRYRKPRFKNRKNKKKGWLPPSLEQKIAVQVNEINHLHRYFPIETIIIEVAEFDIQKIKNPDISGVEYQQGTLQGYNIRNYLLEKHGRKCFYCGKTVSKFEVEHMLPKSRGGSNRIDNLTLSCHECNQKKDTLTAEEFIRQTLPAKKAATKLKQLPNEKRLFKYMAHMNATRWALYNAIDKKYANVKMTYGYITKHDRIQAGLPKAHHIDAKCITGFTTVPAMNQTIVKVKMRRHNRLLHRATFSKGHIRKAASLPTITFGFQLYDLVLFDNHYYYIKGRRSSGYFDLVSIEGLEDTNRSYKKLTQLAHTNAYLINHYVNL

SEQ ID NO: 10763 - protein, 458 aa, Lactobacillus sp.; identical to SEQ ID NO: 8256

SEQ ID NO: 10764 - protein, 442 aa, unidentified
  REGION 1..442: note = Human gut metagenome
MVTVQQSTHHLPFGRVFIRRNLFMVYVISQDGKPLMPCSDPIARLLLKQGKAKVKKREPFTIKLTYETTNYTQGLTLGVDTGSGTIGTAVSKDNGDIVYMSEVVVRNDITDKMTQRAKYSRNRRNRKTRYRKARWLNRASSIKKDRFSPTMQSKLHSHVREIEYIQSILPVTEMVFETGQFDMHLMKNPSLANPKVRPWGYQKGANYGFENTKAMVLNRDNYTCQCCKGKHKDSKLEVHHIVFRSQGGSDEESNLLTLCHTCHKDLHSGKINPKLSGKVKGNLKYATQMNSIRKQLFRCYPNAIETFGYVTKVNRLHLGVAKEHYYDACTIATQGNAFNVKSNLYKKKCVSDGDFQKTKGIHSEQPIVTDKICGFRKFDKVRYFGNDYFIKGRMSTGYAILMDIDGNKIDFSTMPRGYKTPKLSNCKRITARSTVMTQVKVV

SEQ ID NO: 10765 - protein, 408 aa, unidentified; identical to SEQ ID NO: 4142
  REGION 1..408: note = Human gut metagenome

SEQ ID NO: 10766 - protein, 512 aa, unidentified
  REGION 1..512: note = Human gut metagenome
MSTVYVLNKDGKPLMPTTRGGHVRHLLKEQKARVVRTNPFTIQLLYETDNLVQPLYLGIDPGRTNIGVAVVKTDGTAVFTAHLETRNKEIPKLMQGRKKARRARRTNGRRCRRQRRAKANGTISKKCVKQATAQNGSVSKRANEIGVIKRHLPGCEKEVLCIGIKNKEAKFSNRTRPEGWLTPTANQLLQTHINLVKKIQKFLPISDVVLEINKFAFMRLDNPNVQKWQYQQGPLYQKASLEEAVSEMQEHHCLFCKNTIDHYHHVVPQHKNGSNTIGNVVGLCAKHHNLVHKDTSWQEKLAKKKTGLNKRYGALSVLNQIIPALTKELSSLFPKHFFATNGKSTYDYRAAHGVSKDHWLDAYCIAGSVLPNDACDNNINNRVPYELKQFRRHDRRALHKENMSRVYTLNGKSVATNRHKAIKQTTDSLEEFRQRQPNDVCKLKVIEHHPEYRNPKRNFPGCVFLVGKHTHVMQGTSGSHNGKADGYYDTNGNSYSSGKCKFVVKNEGIVFT

SEQ ID NO: 10767 - protein, 413 aa, unidentified; identical to SEQ ID NO: 2636
  REGION 1..413: note = Human gut metagenome

SEQ ID NO: 10768 - protein, 410 aa, Tissierella sp.; identical to SEQ ID NO: 4081

SEQ ID NO: 10769 - protein, 417 aa, unidentified
  REGION 1..417: note = Human gut metagenome
MPCSPAKARLLLKEKKAIVKRRTPFTIQLTIAMGEAKQPVTLGVDSGYKHIGLSATTEKAELYASQVELRQDITDLLSARLALRRSRRSRKTRYRAPRFNNRVASKHKGWLAPSVENRIAAHLSRVEAVMRVLPVTAITVETAAFDTQLLKDPDIAGGAYQQGEQLGFWNVREYVLFRDGHVCQHCRGKSKDPVLNVHHIESRRTGGDAPNNLITLCETCHKAFHRGEIELKVKRGKSFKAETFMGIMRWTLFERLKKAHPELSVRNTYGYLTKHKRISHGIAKSHCADAYCIADNLGAKRLEGFFFQKQTRKHNRQIHKLSILKGGLRKKNQAPYEVKGFRLFDKVICKSEEAFIFGRRTSGSFDVRRLDGTRISAGISYKKLRLLEPRTTYLTEFRKEAALPPLHKCRGFCAEFL

SEQ ID NO: 10770 - protein, 413 aa, unidentified; identical to SEQ ID NO: 7541
  REGION 1..413: note = Human gut metagenome

SEQ ID NO: 10771 - protein, 431 aa, unidentified; identical to SEQ ID NO: 2952
  REGION 1..431: note = Human gut metagenome

SEQ ID NO: 10772 - protein, 456 aa, unidentified; identical to SEQ ID NO: 4017
  REGION 1..456: note = Human gut metagenome

SEQ ID NO: 10773 - protein, 442 aa, unidentified; identical to SEQ ID NO: 4522
  REGION 1..442: note = Human gut metagenome

SEQ ID NO: 10774 - protein, 368 aa, Moorena sp.
LAKQTLQAIRKDATMSNQIFVLDTNHKPLTPCTAGMARSLLKAGRADVFRQFPFTIILKKEVTATPEPIEIKIDAGSKTTGLALVQKEEAIFGAELSHRGQAIKNNLESRRSLRRGRRNRKTRYRQARFLNRTRPKGWLAPTLEHRVLTIMTWVRKFIKLAPIGSIVSELVRFDLQQIENPEISGIEYQQGELQGYEVREYLLEKWDRKCAYCGAENVPLQVEHIHPKSKGGSNRISNLALACEPCNTKKGVQSITDFLAKKPEVLKKVVTQTKRSLKDAAAVNSTRWALLNALKTNGLPVGTGSEGFQTGDIVKAIVTTGKKIGEYVGRVAVRSTGSFNISASTLIQGISHKYCKTIHRKDGYSYGF

SEQ ID NO: 10775 - protein, 350 aa, unidentified; identical to SEQ ID NO: 10552
  REGION 1..350: note = Human gut metagenome

SEQ ID NO: 10776 - protein, 338 aa, unidentified
  REGION 1..338: note = Human gut metagenome
LVWNKRGKPLMPCSPAKARLLLKEKKAIVKRRTPFTIQLTIATGETKQPVSLGVDAGYEHVGLPASTEKAELYASEVELRQDITDLLSARRALRQSRRNRKTRYRAPRFDNRIRTKRKGWLAPSVENRINAHLSRIEAVLRLLPVTKITVETASFDLQLLKNPDISGKEYQEGEQLGFWNIREYVLCRDGHVCQHCYGRSKDPVLNVHHLESRRTGGDSPGNLITLCETCHKALHRGEITLKAKRGQSFRAEAFMGIMRWEVLDRLKASHPELEVQNTYGYRTKHVRIANGIAKSHCADAFCIGGNLGAERLGEFFFQKQTRRNNRQIHKLSILKGAL

SEQ ID NO: 10777 - protein, 421 aa, unidentified; identical to SEQ ID NO: 4757
  REGION 1..421: note = Human gut metagenome

SEQ ID NO: 10778 - protein, 413 aa, unidentified
  REGION 1..413: note = Human gut metagenome
MTSYSFVLDADGKQLAPTKEQKAWFLIRKKRATLVSKYPMVIQLNKGIPDDEICKDEIRCGIDDGSLHTGLALVQKCQTKSKVFLKAVIEQRNDVKHLMDVRRGYRRYHRYHKRYRQARFNNRTSLKREGRIAPSILQKRQAIIRVINQLNKWINITNYWLEDVAIDIRALTDGYKSYRWQYQKSNRLDENIRKAVILRDGCKCMECGKFNCRLEVHHIKPRRLKGSSTLGNLITLCTKCHQKTEGVEELYMGRHFALLNFPDNKDLNYAQHVMIGKKWLREQISNLGILHLTNGGDTANKRIDWNIEKSHSNDAICITDLQPDTCNIKEWTIKPMRRQSKAKNDNILGINHRDLVEYTFKNGETHRGYVTALYPKQNALNFQSPIKHCKKVNAKKCRLLWKFNKIYWLDNVL

SEQ ID NO: 10779 - protein, 319 aa, unidentified
  REGION 1..319: note = Human gut metagenome
APRFDNRIRTKRKGWLAPSVENRINAHLSRIEAVLRLLPITKITVETASFDMQRLKNPDISGKEYQEGEQLGFWNVREYVLFRDGHVCRHCHGRSKDPVLNVHHLESRRTGSDSPDNLITLCETCHKALHRGEITLKAKRGQSFRAQAFMGIMRREVLNRLKASYPELKVHETYGYLTKHARIANGIVKSHGADAFCIAGNLGAERLGEFFFQKQTRRNNRQIHKLSILKGGIRKRNQAPFEAKGFRLFDKVACQGKEGFIFGRRSSGSFDVRKLDGTRISAGISCKKLRLLEKRRTYLTEIRKEEALPPLPEGRGLRA

SEQ ID NO: 10780 - protein, 537 aa, unidentified; identical to SEQ ID NO: 9239
  REGION 1..537: note = Human gut metagenome

SEQ ID NO: 10781 - protein, 480 aa, unidentified
  REGION 1..480: note = Human gut metagenome
LYTKPLDNIGEGSLPPSGEINLKGMTFMVYVKSIDGKALMPTSNAKARKLLKQKKAKVVSLRPFVVKLTYKTKTEYIQKLNLGVDSGYSNIGFSVIDAKQEYIAGEVKLLEGMKKRLLEKASYRRIRRSRLRYRKARWNNRVKSKKKGWLAPSLKHKLDTHIKFIDYLKNILPIGKITIEVANFDIQKMKDDLISGIDYQNGDMFGFWNVREFVLHRDGHKCQNPNCKHKDKKEQILKVHHIRYRSEGGSDRPENLITLCSKCHTPANHKKGKFLYDWCVNGKKVRGFKDATFMSMIRWHLVNELKSKHNNVSITYGYITKNHRIQNGIEKSHLNDAFAIAKGTNQARTKDRFLVIQDRLKNRSLEKFYDSKIIDIRTEKKVSGGDLNCGRSTRNKNLNTENLRKYRGVKISKGQRRIRKQKYFYQPNDLVKYDRKVYTVKGTQNEGKYIALKEIKKVPKVELLIPYVFKKGINWSYGLC

SEQ ID NO: 10782 - protein, 552 aa, Streptomyces sp.
MTTFPAGEQTHPGVLPQRQALESVGADTLGSRDETAHGHPATARGTGREHGRGETDGRGTRPRRRHAETGASAAETAEDGSGDAPTHTQEYAGGIGASRVFVLSKDGQPLMPCHPARARELLAKGRAVVARQVPFTIRLKDRTLAESEVDGVQLRIDPGSKGTGLALTDEKKETGEDGATVTVRRGLVSVELQHRGDQIRMCMQQRAGYRRRRRSANCRYRAPRSDNRTRPEGWLPPSLRHRVDTTVSLARRMCRYAPITEIHVERVAFDTHSMSAGRSLTGVEYQQGTLAGTEARAYLHAKWNRACAYCDATGVPLNIDHLRPRSRGGSDRISNLVLACVPCNQAKGSTPVDVFLAQRPDRLAKILQQVKTPLHDAAAMNTTRWRLTEALETLGRPVHAWSGGRTKWNRTAMGLDKTHTLDAFSVGRLDHEDGDAIVRFPEQVLVVKATGRGSYARTTPDRFGFPRLRRARAKQHYGYVTGDLVRATVPSGKWAGTWTGRISVRARGQHSLMTPVGRFNVSYRNLRLVQRGDGYAYATRRELVRSTSRKTS

SEQ ID NO: 10783 - protein, 524 aa, unidentified
  REGION 1..524: note = Sponge metagenome
VLRQPTALQPKGDIRPKVKNPLRGMGEATGRNPDSHPGSSPYNQGLQPKTGVTTLARHISPHNQTSVPVLDKDGIPVAPTRPSRARRLLDQGRAAKTWKHGRFAIRLSDISKADCSVPDVTLGIDPGARTTGMAVTVTTPDGEKIVHGCQVRHRGHRISQAMLSRRSYRRNRRSRIRRRPARFNNRTRRQGWLPPSLESIRANIRTNVSHLTELFPVSVINVETCRFDPRLIADPDVYGDGYQTSERANMQVREYVLQRDRRTCQYCGKTGVRLEADHIVPRSRGGAYRIANLIAACHDCNQAKSNLPVEHFLKDRPETLRKLRQQMRSSLQSAAHMNALVPFVITDVESLGIPVRETDAVNTAFTRTQLGIEKSHVNDAACLGEPPALLNVPTSITVISATGHGKRQMLTQMSKHGTPRFQTGAAGKYHGYRAWSRLPRQRQGFTTMPGHKLRQRRSHGIASGDLIAYRHPTDGKVTGYAVLANRKTRARASGMKSVRVTETRLIARNNGYQYQKQTNSNQEN

SEQ ID NO: 10784 - protein, 512 aa, unidentified
  REGION 1..512: note = Human gut metagenome
MSTVYVLNKDGKPLMPTTRCGHVRHLLKEQKARVVTSKPFTIQLLYEADDVVQSLCLGIDPGRTNIGVAAVKADGTAVFTAHLETRNKEIPKLMKKRKESRRARRTNGRRCRRQRRAKANGTISKKCVKNDTAQNGSVSKRAKEIGVIKRHLPGCEKDVLCIGIKNKEAKFSNRTRPEGWLTPTANQLLQTHINLVKKIQKFLPISDVVLEINKFAFMRLDNPNVQKWQYQQGPLYQKANLEETVSEMQEHHCLFCKKKIDHYHHVVPQHKNGSNTIDNIIGLCTQHHDLVHKDATWQKRLAKKKTGLNKKYGALSVLNQIIPALTKELSSLFPKHFFVTNGKSTYDYRAAHGVSKDHWLDAYCIACSVLPNDTCDKTINSRVPYELKQFRRHDRRALNNENMSRVYTFNGKMVATNRHKATEQTTDSLEEFRQRQPNDVCNLKVKEHHPTYRNMNRNYPGSVFLVGNQVHVMQGIAGSKDGEATTYKDTNANSIAAGKCKFVAKNSGILFV

SEQ ID NO: 10785 - protein, 413 aa, unidentified
  REGION 1..413: note = Human gut metagenome
MTSYSFVLDANGKQLAPTKEPKAWFLIRKKRAALVSKYPMVIQLKKKIQENEICKDEIRCGIDDGGLHVGIALVQKCKSKNKVVFKGTIEQRNDVKHLMEVRRNYRRYHRYHKRYRQARFDNRKSSKRKGRIAPSILQKRQATIRVINRLNKWINITNYWLEDVSIDIRVLTDGYKSYSWQYQKSNRLDENIRKATILRDGGKCMECGKSNCRLEVHHIKPRRRNGSNTLDNLITLCESCHQKTEGQEELYMDRYFSLLKSSDNKNLNYAQHVMIGKMWLRKQLSGLGALYLTSGGDTANKRIDWNIEKSHTNDAVCITDLQPDTCDIKEWAIKPMRRQSKAKTDHVLGIHHRDLVEYTFKNGETHRGYVTALYPDQKAINFQSQTKHCKKVNARKCKLLWNYSKIYWFENAS

SEQ ID NO: 10786 - protein, 529 aa, unidentified
  REGION 1..529: note = Human gut metagenome
MSTVYVLNKDGKPLMPTTRGGHVRHLLKEQKARVVQSNPFTIQLLYETDDAVQPLYLGIDPGRTNIGVAVVKADGTAVFTAHLKSRNKEIPKLMQDRKRARRARRTNGRRHRRQRRAKANGTISKKCVKQTTTQNGSVSKRAKEIGIIKRHLPGCEKDVLCIGIKNKEAKYTNRERPEGWLTPTANQLLQTHVNLVKKVQKLLPISDVVLEVNKFAFMRLDNPDIQKWQYQQGPLYKKESLESAVSEMQEHHCLFCKKPIDHYHHVVPKSENGSNTIANIVGLCAEHHNLVHKDVAWQEKLAEEKTGLNKKYGALSVLNQIIPALTNKLSVLFPKHFFVTAGKSTHDYRAAHSVSKDHWLDAYCIACSVLPSNVCDSNINNHVPYELKQFRRHDRRVLHKANMSRVYTLNGKAVATNRHKAIKQTTDSLEEFRQNYPDDVYKLKVKEHHPAYRNLNRNYPGSVFLVGEQAHVMQGIASSKDGKTTKYNDTNATTIIAGKCKFVAKNSGILFVQCKFRKALSDGTTKKLQ

SEQ ID NO: 10787 - protein, 520 aa, unidentified
  REGION 1..520: note = Human gut metagenome
MNYLDFVLMVDKNKVPCIPIKESTAAYLLRHNKAKIINHDPTVIQRFDEYSADYEIRNIFELKIDSGYLNIGFSVSDSEHEYLAGQVNLLQGMSERLTVRASNRKFKRARLRYRKNKNVDYKIVHNPTYKNGNQDGWIAPSIQHKIDSHIRLIKKIAQWVPIDRIIIEVAKFDIQKMIADLDGRIISGKDYQNGEMKGYENVTAYVRDRDKHICQMCLSSGKVKNKNNDTIEVHHIIPRAAGGTNRPSNLICLCHHHHRLVHSNNNNNKYFRELQNKKMPDTYKDSTFMNIVRYKIYNALCADFKDVELAYGYETKINRKLIGLPKFHYTDAVCLKEWKNISLTKFIYIVDQKRCNDRKMESFFDAKYIDIRDGKTKSGTELCYTRLDNASSWRTTCKNEVDNLRQYREKKVEKGKQRRECHFYCLKAGDLIFIKSGNHKGNLAEVKTMQIHKGKYKIFFTYKNQKVDNPTISLSPEEYGQLKKNECSKVKIVRTRRGMIWRKYNRLEYENTYKDQYDKK

SEQ ID NO: 10788 - protein, 512 aa, unidentified
  REGION 1..512: note = Human gut metagenome
MSTVYVLNKDGKPLMPTTRCGHVRHLLKEQKARVVASKPFTIQLLYKTNDVVQPLYLGIDPGRTNIGVAVVKADGTAVFTAHLETRNKEIPKLMKKRKDSRRARRTNGRRCRRQRRAKANGTISKKCVKHDTAQNGSVSKRAKEIGIIKRHLPGCEKDVLCIGIKNKEAKFSNRTRPEGWLTPTANQLLQTHINLVKKIRKFLPISDAVLEINKFAFMQLDNPNIQKWQYQQGPLYQKANLEEAVSEMQEHHCLFCKKPIAHYHHVVPQSENGSDTIGNIVGLCTKHHDLVHKDTAWQKKLAKKKTGLNKKYGALSVLNQIIPALTKELSSLFPKHFFATNGKSTYDYRSAHGVSKDHWLDAYCIACSVLPNDVCDSGINNRVPYELKQFRRHDRRALNNENMSRVYTLNDNVVATNRHKATKQTTDSLEEFRQNHPDDVCKLKVKEHHPTYRNMNRNYPGSVFLIGKQVHVMQGIAGSKDGEATTYKDTNANSIAAGKCKFVAKNSGILFV

SEQ ID NO: 10789 - protein, 495 aa, Moorena sp.; identical to SEQ ID NO: 7170

SEQ ID NO: 10790 - protein, 442 aa, unidentified
  REGION 1..442: note = Human gut metagenome
MGEGLQPTERSRRQNLRVFVLNKRGQPLMPCSPAKARLLLKEKKAVVRHRTPFTIQLTQATGETVQPVTLGVDAGSKFIGLSASTEKAEHYASEAELRTEVVDLLFSRREMRRARRNRKTRYRAPRFDNRIHSKNKGWLTPSVENKINTHLSCVDNVRKCLPVTKIVVETAAFDIQKIKNPDIEGTDYQQGDQLGFWNVREYVLCRDGHQCCHCHGKSKDPILNVHHLESRKTGGNAPNNLITLCETCHKAYHDGKITLKQKRGQVFRDAAFMGIMRWTFFNRLKAQCPEIEVRNTYGYLTKNTRIRHGLEKSHHTDAFCIAGNLEAKRLGVYFFQKQTRKHNRQIHKMSILKGGVRKLQQAPYEVKGLRLFDKVRYDGREAFIFGRRSSGYFDIRLLTGEKVSAGVSYKKLVLLEKRKTFLTQLIKENAIPPATEVAGFLA

SEQ ID NO: 10791 - protein, 462 aa, unidentified
  REGION 1..462: note = Human gut metagenome
MSVLVIGRNGRALMPTNPRKARLLLKKKTASVVCRHPFTIQLLYKTGCATQEGCIGIDTGSQHIGVGITCGDRVILKDEHALRSSMEKRSLLATRAVMRRGRRYRKVRYRKPKWRHHTKRMYFEKANRRGQHWRKVKTTTQSPRLKGWLPPSLQSKCDHHFRIIDRYLKYLPDPITRNLVIEAGRFDMARMNDPTIHGEMYQRGPMYDAENLRAYIFARDNYQCACCKAKAGTTRKADGTTVKLVAHHILFRSRGATDNPKYIISVCDHCHTTKAHQPGGILYSWMENNKKVARGLRDATFMNILRKRLFARYPQAAFTYGNITAADRKQLRLPKSHANDAVAISLFGKEASTVKNICQTMHYKQIRKSKRSLHEAIPRKGRKNPNTKAVRNKKNTTQVNGFKLWDSVLADGKKLFICSFTGTSAYLIDKNGCYISQPGKTYKQWPLSKLKRLHPNGNWLMA

SEQ ID NO: 10792 - protein, 423 aa, unidentified
  REGION 1..423: note = Human gut metagenome
MPIMVYVLNINGQPLMPTNRHGKVKCLLKQGKAKVIRRCPFTIKLLYQSTAYTQNLTLGVDTGSGIIGTAVSKDNGNIVYMSETIVRNDITDKMTQRAKYRRNRRNRKTRYRKTRWLNRKNSIKTDRFSPTMQSKLHSHVKEIEYIKSILPVTTMVLETGQFDTHLMKNPSLANPNVKHWGYQKGANYGFENTKAMVLNRDNYTCQCCKGKHKDSKLEVHHIVFRSQGGSDEESNLITLCHTCHKDLHSGKINPKLKGKVKGTLKYATQMNSIRKQLFRVYPDAIETFGYVTKANRLALGIDKKHYYDACTIATQGNIFIVKSNLYKKKCVSDGDFQKTKGIRSEQSIVTDKICGFRKFDKVKYFGKEYFIKGRMSTGYAILMDIDGHKINFSTMPKGYKIPKLSNCKRVTARTSQMLQAVVI

SEQ ID NO: 10793 - protein, 418 aa, unidentified
  REGION 1..418: note = Prevotellaceae bacterium UBA4334
MVYVLNKNGEPLMPTERHGKVRRMLRDGKAHVVRLVPFTIQLNYSSEEVVQEVSLGVDAGSKHIGVSATMEGRELLAMQVEERDDIVELIATRRETRRTRRSRKFRYRASRFDNRRRKDGWMTPSTEYRISAHLCIIRLVCSILPITKTTIEVAQFDSQKIKNDKISGVEYQQGEQLGFWNVREYVLARDGHVCQHCKGKSKDKILNVHHIESRKTGGNAPNNLITLCETCHKAYHDGEITLKLRRGTSLRDAAAMSIMRWEVYNRAKQEFKNVNLTYGYVTKHTRIHNNIAKTHCADALCISGNVRAERLSWFYGVRLTRRHNRSLHLFKPKKGGIRQGNLAPHWIGKSRLQQYDYVEWNGQRAFVSGSSNGRPYLKNFDDKYIMTPKASVNPKTVKFIRRKRGSMIIDKINQTKIS

SEQ ID NO: 10794 - protein, 482 aa, unidentified
  REGION 1..482: note = Human gut metagenome
LYIKMTSCTCTVFPAYNYAKASSSQGKHNLLLRQGRLIVKEVAYMSTVYVLNKDGKPLMPTTRGGHVRHLLKEQKARVVRTKPFTIQLLYEADDVVQSLYLGIDPGRTNIGVAVVKTDGTAVFTAHLETRNKEITKLMKKRKNSRRARRTNGRRCRRQRRAKANGTISKKCVKQDTAQNGSVSKRAKEIGVIKRHLPGCEKEVLCIGIKNKEAKFSNRVRPEGWLTPTANQLLQTHINLVKKIRKFLPISDAVLEINKFAFMQLDNPNIQKWQYQQGPLYQKANLEEAVSEMQEHHCLFCKKPIAHYHHVVPQSENGSDTIGNIVGLCTKHHDLVHKDTAWQKKLAKKKTGLNKKYGALSVLNQIIPALTKELSSLFPKHFFATNGKSTYDYRSAHGVSKDHWLDAYCIACSVLPNDVCDSGINNRVPYELKQFRRHDRRALNNENMSRVYTLNDNVVATNRHKATKQTTDSLEEFRQNHPD

SEQ ID NO: 10795 - protein, 470 aa, Blautia sp.; identical to SEQ ID NO: 2925

SEQ ID NO: 10796 - protein, 419 aa, unidentified
  REGION 1..419: note = Human oral metagenome
MLVYVLKQNGQPFMPTSRFGKVRRLLKKKKAKVVRREPFTIKLLYEPETDVVQDCYCGVDTGSRHIGVAVVSNDKVLYQSQTELRDDISRKMERRRDFRQNRRSRKTRYRKCRFLNRRNSIREDRLPPSVKHKVQAHIDEIEFCKKILPMSDLILEVSQFDTALMKNPSLINEKVRHWGYRQGFDYGYSSRRSAILHRDNYTCQCCGKKNCRLEVHHINFRSNGGTDDEENLITLCKECHKGVHAGAVVLNKKPKKSKNLKHATHMSIIRTQLLKKYPEAIETFGFVTSENRNHLNLEKAHYIDACVIASGGLEFEPSATVYYKRRMSKGEYQLIRKCCGKEYVCKGKILGFKSFDKVEYFGVKCFIWKRRNNGYATLGDIFNNILDFSYLPRGYKTPKMALLKRISSRKTVNIICYTR

SEQ ID NO: 10797 - protein, 542 aa, Streptomyces sp.; identical to SEQ ID NO: 2629

SEQ ID NO: 10798 - protein, 442 aa, unidentified; identical to SEQ ID NO: 2903
  REGION 1..442: note = Human gut metagenome

SEQ ID NO: 10799 - protein, 366 aa, unidentified
  REGION 1..366: note = Human gut metagenome
MYVTSDYKQEIVLGVDAGTKHVGLSATTKSKELYSSEVILRNDIVDLLSTRRELRRSRRNRLRYRKPRFDNRIKSKRPGWVAPSVKYKVDAHIRVIDNVCSILPISRIVIEVAQFDTQKINNPNISGKEYQEGDQLGFWNVREYVLARDGHKCQHCKGKSKDPVLNVHHIESRKTGGDSPSNLITLCETCHKEYHKGNIDLKIKRGSSLRDAAVMGIMKWRLYEELRSKYNRVSMTFGYVTKYNRIKHGIEKSHVFDAFVISKNFDAIRLGYYYKVRLVRRHNRQIHKQKIPKGGIKRPNQSPFEVFGFRLFDRVMFENSYYFIFARRKTGSFNIRDIDGKNQRDITYKKLKLSRCKRFMVQKEMD

SEQ ID NO: 10800 - protein, 431 aa, Lyngbya sp.
MSNYVLVLDTNKNPLTPCKPSMARSLLKAGKAAVFRQYPFTIILKKKVADTPENCKLKIDPGSKVTGLALLLNDSVIWAAELTHRGQQIKDANWRRRQLRRGRRNRKTRYRQARFFNRKRRDSWLAPSLNHRVQTTMTWVNRLTRFCPINSIYQELIRFDTQKVQNPEVSSIEYQQGELHGYEIREYLLEKWGRKCAYCGAENTPLEVEHIQAKSKGGSNRISNLTLSCHSCNQAKSNLDIKDFLSGKPDLIKRIISQAKAPLKDAAAVNSTRWKLYNDLKTTGLEVCTSSGGMTKYNRCRLGLPKAHWIDAACVGKTESLKLETNQPLLIKSTGHGNRQMCGTNKYGFPTRHRSRQQVHQGFKTGDIVKAVVTKGKKIGTYKGRVLVRASGSFDISTAKVRVSGISHKYCVPIYKKDGYQYEFNSQFNGN

SEQ ID NO: 10801 - protein, 406 aa, unidentified; identical to SEQ ID NO: 2752
  REGION 1..406: note = Human gut metagenome

SEQ ID NO: 10802 - protein, 406 aa, unidentified
  REGION 1..406: note = Human gut metagenome
MVYVQDIDGRPLMPTTRHGKVRRLLKSKKATVVNLCPFTIRLLYDTTGYKQEITLGVDTGTKHVGLSATTKSKELYASEVILRSDVVDLLSTRRELRKIRRYRLRYRKPRFMNRIKSKKRGWIAPSIRQKIDSHIRIIGFVYSILPVSKLIIEVAQFDTQKIKNPEISGKEYQEGEQLGFWNVREYVLARDEHKCQHCKGKSKDPVLNVHHIESRKTGGDSPSNLITLCKTCHKEFHKGNIKLKVNRGESLRDAAVMGIMKWELYDELKSLYPNVKMTFGYITKYNRINHGIEKSHVSDAFVISRNFDSERLGYYYKRKLVRRHNRQIHKMKAPKGGNKRMNQSPFKVFGFRLFDKVMFQGKERFIYARRLRGIFNIRDINGENKKDISYKKLEYVSHGLISIVAG

SEQ ID NO: 10803 - protein, 465 aa, unidentified; identical to SEQ ID NO: 2709
  REGION 1..465: note = Human gut metagenome

SEQ ID NO: 10804 - protein, 513 aa, unidentified
  REGION 1..513: note = Human gut metagenome
LKKEAAGHQQGKDCRLVRYGPPYRAGMPDGRRKPERKHMVAVVTSTGKPLMPTSAYRARKLLKKGRAVIFKYRPYFTIQLVDRADGEVQEVEYKSDTGSVHVGISVCTEKKELLSEQRDLLENEPEHHNDRKKNRRTRRNRKRYRKPRFDNRKKKPQVGHEKWLPPTLLHKMEVQVRLYREFCRVVPVTSACFEMGKFDTQALKAVLKGDPVPEGEGYQKGERYGTDTLRAAVFLRDGHTCRFCGRSVKDGAVLHVHHVGYWKRDRTNRPANLASACEQCHTPANHGKNGLLYGKEPEFKTLKDASYMTSVRWIMLDEIKKAAPGVRVSVTYGVTTKKKRQELRLPKSHVNDAFSMASFHPKKRADTEYWKKIPRHDRVLQKFYDAVYLDTRDGSKKKGSELSNGRISRNHKKDSENLHQYRGHKVLKGHDSIRRGASSLKPGSIVMYKGEKMTVHGTHTRYVTDKDGKTVKKVNVQFTCPASDGRKSASMNKCTPVSRVYNTGWKRYWPDKK

SEQ ID NO: 10805 - protein, 450 aa, Moorena sp.; identical to SEQ ID NO: 4205

SEQ ID NO: 10806 - protein, 428 aa, unidentified; identical to SEQ ID NO: 8823
  REGION 1..428: note = Sediment metagenome

SEQ ID NO: 10807 - protein, 415 aa, unidentified
  REGION 1..415: note = Human gut metagenome
MIYVRSKDGKALMPSERGGRIGYLLRHGKAHVVSRVPFVVQLDYESTTYTQEVSLGIDAGSKHIGVSASSEKKELLAAQVELRNDVVNLLSTRRELRRTRRNRKTRYRKVRFDNRKKKDGWLAPSVKQKVESHLKVIRLVRKLLPITKTTIEVAQFDAQKIKRPDIQGEEYQQGEQMGFWNVREYVLARDGHRCVHCKGKSKDHILNVHHLESRKTGGNSPSNLVTLCETCHKAYHRGEFELKIKRGNSLRDAAVMNIMRWVVYERAKEEFENVHLTYGYVTKHTRIENGIAKTHAADAFCIAKNVHAMRLSSFFMCRCVPRHTRVLHVAKPKKGGIRRSTIASHKIGKSRFQRFDMVRWRGKECFIFGSTHGNVVLRKIDGVKVHETQAVSAKTIKFLKRIRNNILVEEIVSIS

SEQ ID NO: 10808 - protein, 442 aa, Blautia sp.; identical to SEQ ID NO: 8927

SEQ ID NO: 10809 - protein, 512 aa, unidentified
  REGION 1..512: note = Human gut metagenome
MSTVYVLNKDGKPLMPTTRCGHVRHLLKEQKARVVTSKPFTIQLLYETDDVVQPLYLGIDTGRTNIGVAVVKADGSAVFTAHLETRNNEIPKLMKKRKESRRARRTNGRRCRRQRRAKANGTISKKCVKQATAQNGGASKRAKEIGVIKRHLPGCEKEILCIGIKNKEAKFNNRTRPEGWLTPTANQLLQTHVNLVKKIQKFLPISDVVLEINKFAFMQLDNPNIQKWQYQQGPLYQKANLESAVSEMQEHHCLFCKKPIDHFHHVVPQHKNGSNTIDNIVGLCTKHHDFMHKDTAWQEKLAKKKTGLNKKYDALSVLNQIIPALTKELSFLFPKHFFATNGKSTYDYRAAHGVSKDHWLDAYCIAGSVLPNDVCDNNINSRVPYELKQFRRHDRRALHKENMSRVYTFNNKVVATNRHKAIKQTINSLEEFRQCQPNDVSKLKAKEHYPEYRNPKRNFPGSVFLVGKHTHVMQGTSGSHNGKADGYYDTNGDSYSTGKCKFIAQNEGIVFA

SEQ ID NO: 10810 - protein, 494 aa, unidentified; identical to SEQ ID NO: 7425
  REGION 1..494: note = Human gut metagenome

SEQ ID NO: 10811 - protein, 456 aa, unidentified; identical to SEQ ID NO: 4922
  REGION 1..456: note = Human gut metagenome

SEQ ID NO: 10812 - protein, 420 aa, unidentified
  REGION 1..420: note = Human gut metagenome
MQYVYVLNKHGEPLMPCSPGKARLLLKQQKAHVVKRTPFTIKLLYGSTGYKQPITLGVDAGNKHVGLSASTEKREFYCEEFTPRNDVVDLLSTRKQSRRSRRNRKTRYRAPRFDNRVHSKHKGWLAPSVEVKIQEHITVIKRICRILPVALIRVETAEFDTQRLKAMLEGKPLPVGTDYQLGEMYDEYNVRQYVLKRDHYTCQCCGAHTTTKKTVKLHVHHLESRKVGGNAPSNLITLCTTCHDALHKGKVSLDGKERGKPLRDAAFMGIMRKALMARLREELPIPVQGTYGYITKMRREQNDIKKSHVNDARCISKHPLAEPCSVCYRTKAIRHHNRQTHKANFSKGGIRKRSQMPYVVEGYRLWDKVLYKGQECFVSGRRASGSFTLKKLDGTRISKGVTFKKLRLLEPATNYLIERM

SEQ ID NO: 10813 - protein, 420 aa, unidentified; identical to SEQ ID NO: 6212
  REGION 1..420: note = Human gut metagenome

SEQ ID NO: 10814 - protein, 437 aa, Clostridium sp.
MVYVLNKEGKPLMPTNRYAKIRVLLKSKKAIVVSSKPFTIKLLYDTKNFTQSITLGIDSGYLNIGFSTITKEKELISGEVKLLKGMSERLREKAMYRRQRRSRLRYRKPRFDNRKRSKDWLAPSVQHKYDSHIRFIDKLKKLLPITNTIIEVANFDTHKLKDSSIEGAAYQNGEQKDFFNLREYILHRDGHKCQNPNCKNKSSESILQVHHIGFWKQDRSDRPGNLITLCNKCHTPKNHKKNGFLYGWQPKVKSFKEATFMSMIRWRLVNTLDCNHTYGYITKSNRIILKLDKTHYNDAFCIAGGSNQNRVKPLIFEQIKRNSRSLEKFYDAKVIDIRTNTKVSGVELFNGRRTRNKSLNSENLRKYRGAKISKGQRRIRTKRYFYQPGDLVKYEDKVYIVKGTQNKGKYIALKELKKVPKVELLTPYKFRKGLVCV

SEQ ID NO: 10815 - protein, 420 aa, unidentified
  REGION 1..420: note = Human oral metagenome
MVYVLSLDGQPLMPIRRHGKVRRLLNSKKAKVICKEPFTIQLLFDTEENVSHLTLKVDTGSKHVGAGVTDDNACVYYASEVEIRNDIHTKMERRAMYRRARRNRKLRYRKARWLNRHNSIKKDRFSPTMASKFNSHIREIEYVKSILPISKLVIETGTFDPNLLNYEDKAFNRHWGYQKGPNYRFKNSQEACFNRDNYKCQCCKTKKSALNAHHIIYRSNGGADMLDNLITLCEDCHKKLHRGELCEFESKLVGKKKGQLKHTTQMNSIRIQLLKYYTNAIETFGFITKANREWLALEKTHWMDAVSMGLTTQPIFLVDRVYKKKHVAKGRYQLYRGQNSDKKLPRGKVYGFLNRDIVKYRNQLYLIKGLMSTGYCKLSDINGIEQKFENPKTVKLSACKRVSARRTTRCISQKIIPNIA

SEQ ID NO: 10816 - protein, 443 aa, Anoxybacillus sp.; identical to SEQ ID NO: 2800

SEQ ID NO: 10817 - protein, 431 aa, unidentified
  REGION 1..431: note = Human gut metagenome
MDAWDIIVVLNKRGKPLMPCSPAKARHLLKEKKAIVVRRTPFTIKLTIATGESKQPVSLGVDAGYKHVGLSASTEKAELYASEVELRQDITDQLSARLALRRSRRNRKTRYRAPRFDNRIRTKRKGWLAPSVENRINAHLSRIEAVLRLLPVTKITVETASFDMLLLKNPDIAGKEYQEGEQLGFWNVREYVLFRDGHVCQHCYGRSKDPVLNVHHLESRRTGGDSPGNLITLCETCHEALHRGEIALKTKRGHSFRAEAFMGMMRWEVLNRLKASHSELEVNNTYGYRTKHARIVNGIDKSHCADAFCIAGNLGAERLCEFFFQKQTRRNNRQIHKLSILKGGIRKRNQAPFEIKGFRLFDKVACKGEESFIFGRRSSGYFDVRKLDGTRISAGISYKKLRLLEKRRTYLTEIRKEEALPPLPEGRGLRA

SEQ ID NO: 10818 - protein, 431 aa, Escherichia sp.
MNRVFVLGKTGQALMPCHPARARQLLQSKKARVKRLYPFTIQLTQRSDGYIQPVELKFDPGSKQTGVGLVLHGKNRLSAIYAAVLTHRGQEIKSNLDSRRMIRRARRNRKTRYRQERFLNRVRIKHKGWLAPSVHSRVDNIVEWSKRFMRLSHVDFITVESVKFDMQKMESAAVEGLEYQRGTLFDYEVKEYLLEKYHYSCVYCGIKNVPFEKEHVVPRSRGGSNRISNLVLSCRSCNEKKDNLPIEEFLKDNPALLKKIKAQLKSSLKDAAAVNITRKQIVKELSDLNVPVLTGIGAETKYNRVSQGYGKEHYIDALCAGTTGTKVYIPSKLKPLLIKKERRNNRQMCLVDKYGFPRGKAKGSKIVHGFKTGDIVKAVVLKGKKKGVYKGKVVVRSSGSFNINVKQGRIEGIGWKNCVMLHRFDGYSYTY

SEQ ID NO: 10819 - protein, 443 aa, Anoxybacillus sp.; identical to SEQ ID NO: 10273

SEQ ID NO: 10820 - protein, 453 aa, Anaerotruncus sp.; identical to SEQ ID NO: 7123

SEQ ID NO: 10821 - protein, 422 aa, unidentified
  REGION 1..422: note = gut metagenome
LNKRGKPLMPCSPAKARLLLKEKKAIVVRRTPFTIQLTIATGESKQPVSLGVDAGYKHVGLSASTEKAELYASEVELRKDITDLLSARRALRQSRRNRKTRYRAPRFDNRIRTKRKGWLAPSVENRINAHLSRIEAVLRLLPITKITVETASFDMQRLKNPDISGKEYQEGEQLGFWNVREYVLFRDGHVCRHCHGRSKDPVLNVHHLESRRTGSDSPDNLITLCVTCHKALHRGEITLKAKRGQSFRAQAFMGIMRREVLNRLKASYPELKVHETYGYLTKHARIANGIVKSHGADAFCIAGNLGAERLGEFFFQKQTRRNNRQIHKLSILKGGIRKRNQAPFEAKGFRLFDKVACQGEEGFIFGRRSSGSFDVRKLDGTRISVGISCKKLRLLEKRRTYLTEIRKEEALPPLPEGRGLRA

SEQ ID NO: 10822 - protein, 460 aa, unidentified; identical to SEQ ID NO: 7234
  REGION 1..460: note = gut metagenome

SEQ ID NO: 10823 - protein, 415 aa, unidentified
  REGION 1..415: note = Human gut metagenome
MVYVLANDGQPLMPTERHGKVCRMLKSGIAKVVKKCPFTIQLQYESERNVQPVALGIDAGSKHVGVSATTKAKVLYESDVELRDDIVKLLATRRQLRRRRRSRKTRYRPARFDNRRRKEGWLTPSIRQKIESHLTVVANVCKILPVSQIIVETASFDIQKIKNPDIQGIEYQQGEQMDFWNIREYVLFRDGHTCQCCKGKSKDKVLNVHHIESRKTGGNAPNNLITLCETCHKGYHNGTVTLPKNIKRGMKFKDAAFMGIMRWTFYNTLKEQYEPDIPVSMTYGYLTKNTRIEHGLPKEHYIDARCISGNPDAVSDGTYYYQKKVRCHNRQIHKQTILKGGIRKSNQAEYLVRGFRLFDKVRYQGREYFIFGRRKSGFFDIRTLSGEKVNKGSISVKKLTFADTRKNYLIERRTV

SEQ ID NO: 10824 - protein, 442 aa, unidentified; identical to SEQ ID NO: 3218
  REGION 1..442: note = Human gut metagenome

SEQ ID NO: 10825 - protein, 434 aa, Anoxybacillus sp.; identical to SEQ ID NO: 3421

SEQ ID NO: 10826 - protein, 424 aa, Anaerostipes sp.; identical to SEQ ID NO: 3434

SEQ ID NO: 10827 - protein, 456 aa, unidentified
  REGION 1..456: note = Human gut metagenome
MSTCVCVLSNNGERLMPTFRLGKVRRLLKDGKAKIVKHHPFTIQLLYDSKTNKQPIEICEDVGYNYIGISVKSESHEYVSAQYDTLQDEKEHHDDCRKMRRARRNRLRYRKPRFDNRKRSEGWLAPSLEHKKQLNISLVERYVSVIPITHATVEVGSFDTMLLQAIQKGETKPEGADYQEGPRYNLATLREAVFYRDNYTCQVCGRKITDGAILHMHHMFYWKGRHGYKLDELVTACEKCHTPANHQKGGKLFGFGEDKEFADLSGAAFMNAVRWQIVNALHTTYSKEFVTITYGAMTKEKRIALQLEKSHNNDAYAMGDFHPVHRCGFRHYQKRRRNNRVLEKFYDATYIDARTGNKAKGKELFNGRISRNHKKDSENLHKYRSEKVSKGRRSIRKRRYAIQPYDTVRLKGKTYITSGCHNKGTRLLIPVNGKSKSVTISKVQVVCHAGPWIQII

SEQ ID NO: 10828 - protein, 518 aa, Moorena sp.; identical to SEQ ID NO: 7410

SEQ ID NO: 10829 - protein, 411 aa, unidentified; identical to SEQ ID NO: 8372
  REGION 1..411: note = Human gut metagenome

SEQ ID NO: 10830 - protein, 323 aa, unidentified; identical to SEQ ID NO: 7431
  REGION 1..323: note = Cyanobacteria bacterium UBA11368

SEQ ID NO: 10831 - protein, 420 aa, unidentified
  REGION 1..420: note = Human gut metagenome
MQYVYVLNKHGEPLMPCSPGKARLLLKQQKAHVVKRTPFTIKLLYGGAGYKQPITLGVDAGSKHVGLSASTEKRELYREEFTPRNDVVDLLSTRKQNRRSRRNRKTRYRASRFDNRVNGKHKGWLAPSVEVKIQEHITVIKRTCRILPVALVRVETAEFDTQRLKAMLEGKPLPVGTDYQLGEMCDEYNVRQYVLNRDHYTCQCCGAHTTTKKTVKLHVHHLESRKVGGNAPSNLITLCTTCHDALHKGKVSLDNKKRGKPMRDAVFMGIMRKTLMARLREELPIPVQGTYGYITKMWREQNDIKKSHVNDARCISKHPLAEPCSVCYRTKAIRHHNRQTHKANFSKGGIRKRSQMPYVVGGYRLWDKVLYKGQECFVSGRRTSGSFTLKKLDGTRISKGVTFKKLRLLEPATNYLIERM

SEQ ID NO: 10832 - protein, 576 aa, Parasutterella excrementihominis
  REGION 11..118: note = misc_feature - Xaa can be any naturally occurring amino acid
  REGION 496..559: note = misc_feature - Xaa can be any naturally occurring amino acid
LFGDYVGREPXXXXXXXXXXXXXXXXXXXXXXXXXXXXXXXXXXXXXXXXXXXXXXXXXXXXXXXXXXXXXXXXXXXXXXXXXXXXXXXXXXXXXXXXXXXXXXXXXXXXXXXXXXXXTGRKTEETNLRVLVWNKRGKPLMPCSPAKARLLLKEKKAIVVRRTPFTIQLTIATGESKQPVSLGVDAGYKHVGLSASTEKAELYASEVELRQDITDLLSARRALRQSRRNRKTRYRAPRFDNRIRTKRKGWLAPSVENRINAHLSRIETVIRLLPVTKISVETTSFDMQLLKNSDIAGKEYQESEQLGFWNVREYVLFRDGHVCQHCHGRSKDPVLNVHHLESRRTGGDSPGNLITLCETCHKELHRGEITLKAKRGQSFRAETFMGIMRWEVLDRLKASHPKLEVQNTYGYRTKHARIVNGIAKSHCADAFCIAGNLGAERLGEFLFQKQTRRNNRQIHKLSILKGGIRKRNQVPFEVKGFRLFDKVACKGEEGFXXXXXXXXXXXXXXXXXXXXXXXXXXXXXXXXXXXXXXXXXXXXXXXXXXXXXXXXXXXXXXXXPVSAIKSCVCWKRDKPI

SEQ ID NO: 10833 - protein, 445 aa, unidentified
  REGION 1..445: note = Human gut metagenome
MSVFVVGLNGCRLMPVSERKARLLLKGGKASIYRKVPFTIKLNYKTGSTVQPGYLGIDTGSQHIGVSVVQKDGTVLHKEEIGLRDSMSKRKLLESRASSRRGRRYRKTRYRHPKWKPKTKRTYNEKADRKGRHWKKQKNTFTSKRQAGWLPPSLQSKTDHHIQWIRKLLDLLPEGYRLSIELGRFDPARMKDPEIHGELYQKGPQYDYENVRAYVLARDGYTCRVCKKKGGKLHVHHILYRSRGASDNPKYMAAVCSKCHTTENHLPGGILYQWMQDQKKFTRGLRDATFMNILKKRLRKAFPDAVFTYGNITKADREKLELPKSHGNDATAIALVKTEVKSVKDEEPVIHIQQVRRKKRSLHEETPRKGRKEPNRTASRSDKNTKSVTVTKGSGEKKASMTACLFDRVELDGKKGWITGFTGTSCYVKDKEDNYVNIRYFGIAN

SEQ ID NO: 10834 - protein, 320 aa, unidentified
  REGION 1..320: note = metagenome
VTTILKTCFAAFNLAKVVVLMDAWDIIVVLNKRGKPLMPCSPAKARLLLKEKKAIVVRRTPFTIQLTIATGETKQPVSLGVDAGYKHVGLSASTEKAELYASEVELRQDITDLLSARRALRQSRRNRKTRYRAPRFDNRIRTKRKGWLAPSVENRINAHLSRIEAVLRLLPVTKITVETASFDLQLLKNPDISGKEYQEGEQLGFWNIREYVLCRDGHVCQHCYGRSKDPVLNVHHLESRRTGGNSPGNLITLCETCHKALHRGEITLKAKRGQSFRAEAFMGIMRWEVLNRLKASHPELEVNNTYGYRTKHARISNGIA

SEQ ID NO: 10835 - protein, 421 aa, unidentified
  REGION 1..421: note = Human gut metagenome
MRGRPLMPCSPAKARHLLKAGKAAVRRRTPFTIQLRIATGETKQSVTLGVDAGAKHVGLSAATEKEEVFASEVELRQDITGLLAARLSLRRERRQRKTRYRAPRFLNRVRSKHKGWLAPSVENRIQAHLSRIDAICGLLPVTKIVIETASFDIQKIKHPDVEGTDYQQGDQLGFWNVREYVLFRDGHVCQHCHGHAKDKILNVHHLESRQTGGDAPNNLITLCETCHKACHAGKIKLKVKRGQSFRAEAFMGIMRWTLLDRVRKAHPGLPVENTYGYLTKNTRITLGLPKAHCVDAYCIAGNLKAVRRGVYLHQRQVRKHNRQIHKCTVLSKTLKDGTKIGYRKFNQTPHLVKSFRLFDKVRCLGQTGFIFGRRSSGYFDVRRLDGVKISSCISYRKLTLLEKRSTCLTELRKEDGASSPV

SEQ ID NO: 10836 - protein, 386 aa, unidentified
  REGION 1..386: note = Clostridiaceae bacterium UBA6085
KVVRRTPFTIQLLYDSPEYTQPITLGVDAGSKVVGLSATTEKKELFVSEITLRDDITELLSTRRQNRRARRNRLRYRMSRFLNRTSSKKEGWLAPSVKHKVDSHLKVIENVHRILPISRIVIETASFDIQKIRNPEISGEGYQQGVKLSFWNTREYVLWRDNHQCQHCHGKSKDRILNVHHKESRKTGGDSPDNLVTLCETCHKNHHAGRIQLKLTPNKSYRDASFMGIMRWYVYNSLQELYPDVSMTYGYITKNNRIKNNIEKNHSADAYCISGNMSAVRSNEIYVQTFKRKHNRQIHKANFLKGGKKKLNQSQYEVKGFRLFDHVRYREEDCFIFGRRASGYFDLRKLDGTVVHRSANYKELKLLKRQNVILIERKGCNGVLLS

SEQ ID NO: 10837 - protein, 447 aa, unidentified
  REGION 1..447: note = Human gut metagenome
LEVVDTEGVSHPGLPGKYKHKGGQLMSVAVISKTGERLMPTSEYRARKLLKSGKAIKHSYHPFTIQLTERETGDIQPIELCMDTGYIHIGISVKSEKHEYLAEQIDTLTDERGRHDACRMYRRQRRSRRRYRQARFNNRKRDQGWIAPSLEHKKKIHIQAISRINNVMPITDITLEMGNFDTQVLKAKEEGKPLPQGADYQHGERYSIATLREAVFSRDSYKCQYCGRTIKDGAILHIHHIKYRSQGGTNSMSNLATVCDKCHTPKNHKPGGKLYNWKPKLSFFKGATFMTVIRWQLYNEVKALFPDIDIHITYGAATKERRRELDIDKSHVNDAFVMGQFHPKHRIKAVLYKKKRRNNRCLEKFYDAKYIDSRDGKKRSGQELFNGRINRNHKKDSENLHQYRLQKVTAGKKKLLGNNITVSSLTISSYTKAESVKLQDVTVMEHG

SEQ ID NO: 10838 - protein, 418 aa, unidentified
  REGION 1..418: note = Human gut metagenome
MVYILNKHNEPLMPCSERKARLLLKDGMAIVYRKDIFTIKLINGSYGYKQHITLGIDCGSKHIGVSATTDKQELFSANAELRNDVVKLLSDRRMLRRNRRSRKTRYRKPRFNNRIVKNGWIAPSIKQKIQSHFNLVGFLHKLLPITNIVVETAAFDIQKINNPSISGSEYQQGEQLDFFNVREYVLFRDNHICQHCKGKSKDKVLNVHHIESRKTGGNSPNNLITLCETCHKAYHRGEFELNVKRGKSFRDSAFMGIMRWELYDELKLRYDNVSMTFGYITKYKRIKLGLDKEHYNDAYCICGNLAAKMLSAHHFIRFIPRHSRVLHIQKFSKGGVRRSASAPYWLNGGKPSKSGAMFTMFDKVKFNGIVCFISGSSNGYAALRDINWNKIDGCKTVVTVNKLLLISRKYGGFIVEKK

SEQ ID NO: 10839 - protein, 421 aa, Moorena sp.
MVYVLNMNGQPLMPCKEAKARKLLKNHCAKPVKKEPFTIQLLFDCENQVQNITLGIDAGSKHIGLSATTEQKELYAADVELRNNVVELLSTRKQYRRARRSKLRYRAPRFYNRVHSKNKGWLAPSIEQKISTHLRVVCDVYKILPVSKIIVETASFDIQRIENPDISGKEYQQGSQLSFWNVREYVLWKDNHECQCCHGKSKDNILNVHHIESRKTGGDSPNNLITLCRYCHDKYHKGKIEMDLKRRLSLRDAAFMGTMRWSFYHRLKEKFPDVSMTYGYITKNTRIQYGLPKTHYTDARCISGNLLAEPLGYYFFQKKVRCHNRQIHKINIQKGGKRKRNQAKYLVKGFRLFDKVRYKNQIGFVLGRRASGYFDIRTLNGEVIHRSALYKKLELIDTRKALLTERRQAVLLMALNVSIPA

SEQ ID NO: 10840 - protein, 426 aa, Nostoc sp.
MSKVFVLDTEKRPLNPIHPGQARQLLRNKKAAVFRRFPFTIILKESRSDSLISPLRLKIDPGAKHTGIALVNDATGEVVFAAELKHRGFAIRDALTSRRQLRRSRRDRKTRYRQPRFLNRTRPEGWLTPSLRSRVDHIKTWVERLRKLAPIQAISQELVRFDMQLMLHPDIQGKEYQQGTLAGYETREYLLEKWGRQCAYCGVKDVPLQIEHIHPRAKGGSNSITNLTLSCEKCNTKKGTRDIKEFLKKDPSRLERILKQAQRPLADAAAVNTTRFALLNTLKETGLPIETGSGGLTKYNRNNQNLPKTHWLDAACVGTSTPILNIKGIKPLFITANGHGTRQMAGTDKFGFPTRHRSNKQIHYGFSTGDIVKAVVTNGKKVGEYLGRVLCRATGSFDIATKMGRIAGISYKYCSVIHKKDGYSYS

SEQ ID NO: 10841 - protein, 465 aa, unidentified; identical to SEQ ID NO: 10382
  REGION 1..465: note = Human gut metagenome

SEQ ID NO: 10842 - protein, 430 aa, Oribacterium sp.
MEGVPHMVYVISKDGHPLMPTMRYGKVRRMLKSGLAKVISRCPFTIQLLYETTDITQDISLGVDAGSKDIGLSATTNLKVLFEAKVILRNDIVELISTRREHRHARRNRKTRHRKPRFDNRTRHEGWLAPSVRQKAESHITMVQKAHKILPVSHIKVETASFDIQKIKNPNISGTNYQNGEQTDFWNVREYVLWRDGHVCQCCKGKSKDKILNVHHIESRKTGGDSPNNLITLCEYCHKQYHLGKIKLPKTIHRGMSFRDAAFMGITRWAIYEKLKELYSDVNLTYGYITKNTRIENSLPKDHHIDARCISSNPKAESDGTVYFYKKVRCHNRQIHKSTINKGGIRKRNQAPYEVHGFRLYDKVTVNSVEAFVFGRRLDGRFAIRMLDGTKINEQLSYKKIKLLEMRKNYICERRTPLLIGASPDVPVAI

SEQ ID NO: 10843 - protein, 413 aa, unidentified; identical to SEQ ID NO: 3476
  REGION 1..413: note = Human gut metagenome

SEQ ID NO: 10844 - protein, 424 aa, unidentified; identical to SEQ ID NO: 3434
  REGION 1..424: note = Human gut metagenome

SEQ ID NO: 10845 - protein, 428 aa, Moorena sp.; identical to SEQ ID NO: 4442

SEQ ID NO: 10846 - protein, 440 aa, Clostridium sp.
VPLMVYVLNKEGKPLMPTNRYAKIRVLLKFKKAVVVNSKPFTIKLLYDTKNFTQSITLGIDSGYLNIGFSAITKEKELIAGEVKLLKGMSERLKEKAMYRRQRRSRLRYRKPRFDNRKRSKDWLAPSIQHKYDSHIKFIDKLKKLLPITNIIIEVANFDTHKLKDPSIEGAAYQNGEQKDFFNLREYILHRDGHKCQNPNCKNKNAESILQVHHIGFWKQDRSDRPGNLITLCNKCHTPKNHKKNGFLYGWQPKVKSFKEATFMSMIRWRLVNTLDCNHTYGYITKHNRISLNLQKTHYNDAFCIAGGSSQSRVKPLIFEQIKRNSRSLEKFYDAKIIDIRTNTKVSGVELFNGRRTRNKNLNSENLRKYRGVKVSKGQRRIRTKRYFYQPGDLVKYEDKVYTVKGTQNKGKYIALKELKKVPKVELLAPYKFRKGLVCV

SEQ ID NO: 10847 - protein, 397 aa, unidentified
  REGION 1..397: note = Human gut metagenome
MTNYAFVLDANNKQLAPTKEQKAWFLIRKKRATLVSKYPMVIQLKKKIPDKKICKDEVRCGIDDGGLHVGIALVQKCQTRNKVVFKGTIEQRNDVKHLMDIRRGYRHYHRYHKRYRPARFNNRNSSKREGRVAPSILQKRQATIRVINQLNKWINITNYWLEDVAIDIRALTDGYKPYWWQYQKSNRLDENIRKAVILRDGCKCMECGKSNCRLEVHHIKPRRLKGSSTLDNLITLCTKCHQKTEGVEKLYMDRYFALLNSSDNKNLNYAQHVMIGKKWLREQLSNLGMLYLTNGGDTANKRIDWDITKSHSNDAICITDLRPDTCGIKEWVIKPMRRQSKAKTNNVLGIKHRDLVEYTFRNGKTHRGYVTALYPEQNAINFQSPTKHCKKVNAKKM

SEQ ID NO: 10848 - protein, 423 aa, unidentified
  REGION 1..423: note = Microcoleaceae bacterium UBA10368
MSNFIFVLDTNKRPLTPCKPSMARKLLTAGKAAVYRRFPFTIILKKVVTATIKSIDLKLDPGSKTTGIALLEGEKVIFGAELTHRGQAIKASLDSRRALRRGRRNRHTRYRQARFLNRTRKKGWLAPSLQHRVETTLTWVNKLRKLAPINSIVQELVRFDLQQLENLEISGVEYQQGELQGYEVREYLLNKWNRKCAYCSVENIPLQIEHIQPKAQGGSNRISNLCLACEKCNQKKGTQDIQRFLAKKPDILKHILAQAKRPLKDAAAVNSTRWALFSRLKETGLPVATGSGGLTKFNRTRLQLPKTHWLDAACVGQLESLSVVTSKPLLIKATGHGTRQMCRTDKFGFPSRYVPRNKFVKGFQTGDIVKAVVTSGKKIGEYVGRVAVRSTGSFNISASELVQGISHKYCKIVHHKDGYSYSF

SEQ ID NO: 10849 - protein, 544 aa, Streptomyces sp.
MTTFLIGEQTHQAVLPQQPALESASADTPGSRDETAHGLPATMPGTGVEHGRGETGEVRTGTRRRHARSAASAAETAETRSGDAPRAAASRVFVLAKGGEPLMPCHPARARELLAGGRAVVARRAPFTIRLRQRTRADSAVEGVQLRLDPGSKATGIALTDEHHRIGPKGRVVVARRGLITLELRHRGQQIHGGMMRRAAHRRRRRSANLRYRAPRHDNRARPDGWLPPSLRHRIDSTMSVVARLCRYAPVVEIHVEHVAFDTTAFTGDIRSGTQETIEPTYGASEVRAFLRAKWMRSCAYCDATGVPLNIDHVRARSRGGTDRVSNLVLACVPCNQTKGTTPVQEFLADRPARLERVITQLRRPLQDVAATNTTRLQLVKALAAHNVPVHAWSGGRTHWNRFAMGLPKSHTLDALATGVIDHERGDTLVRVPSQILVVTSTGRGSYARTTPDRFGFPRLQRPRGKVHHGYSTGDLVAAVVPKGKWAGRWVGRVAVRTSGQHRITTLTSRFDVSHRNLRLLQRADGYSYGFADEIRLSGRHGPA

SEQ ID NO: 10850 - protein, 449 aa, unidentified; identical to SEQ ID NO: 5214
  REGION 1..449: note = Human metagenome

SEQ ID NO: 10851 - protein, 432 aa, unidentified
  REGION 1..432: note = Human gut metagenome
MSSTRPWHEEKFSERKVSEMTGYAFVLDVNGKQLAPTKEQKAWFLIRKKRVILVSKYPMVIQLNKEIPDEEICKDEIRCGIDDGGLHVGIALVQKCQTKNKVIFKGIIEQRNDVKHLMEVRRDYRNYHRYHKRYRQARFNNRSSSKREGRIAPSILQKRQAIIRVINRLNKWINITNYWLEDVSIDIRALTDGYKSYSWQYQRSNRLDENIRKAVILRDNCECKECGKGNCRLEVHHIKPRRLNGSNTMDNLITLCENCHQKTEGQEELYMSRYFDLLKSSDNKRLNYAQHVMIGKKWLREELSNLGILYLTNGGDTANKRIDWGIEKSHSNDAICITDLQPDICNIKEWTIRPMRRQSKAKTDNVLGIKHRDLVEYTFKNGETYKGYVTALYPEQKAINFQSPTKHCKKVNARKCKLLWKYSKIYWLENAG

SEQ ID NO: 10852 - protein, 465 aa, unidentified; identical to SEQ ID NO: 3856
  REGION 1..465: note = Human gut metagenome

SEQ ID NO: 10853 - protein, 493 aa, unidentified; identical to SEQ ID NO: 2644
  REGION 1..493: note = gut metagenome

SEQ ID NO: 10854 - protein, 512 aa, unidentified; identical to SEQ ID NO: 3720
  REGION 1..512: note = Human gut metagenome

SEQ ID NO: 10855 - protein, 431 aa, Escherichia sp.; identical to SEQ ID NO: 10818

SEQ ID NO: 10856 - protein, 440 aa, Moorena sp.; identical to SEQ ID NO: 5150

SEQ ID NO: 10857 - protein, 431 aa, unidentified
  REGION 1..431: note = Human gut metagenome
MPNKVYVINKHGRPLMPCSPAKARHLLDAGKAKVKKRTPFTIQLVYGSSGYTQEVILGVDAGSKTIGMSASTTKEELLSAEVKPRNDVVDLLSTRREFRRARRNRKTRYRKPRFDNRVRSKHKEWLAPSVEVKIQEHITSIKRVCRILPVSKVVIETAEFDLQLLKAIADGKPVPQGEDYQQGEMYGHYNVRQYVLWRDNYTCQCCGAHATKKKEVRLHVHHLESRKVGGDAPDNQVTLCESCHEKLHKGLIAEKDFKKRKRRSTRDATFMGIMRKTLMQRLCSELPIPVIETRGYITKATREKLLVLPKSHTNDALAIAQGKHGFNVGYLPEIAQIDKIYTIRPVRHHNRQLHKATILKGGIRKSNQTEKYVFGYRLFDKVQFNGQDCFIWGRRTTGIFTIKTINGKMIKDGISFKKLKLVEKSTSYLIA

SEQ ID NO: 10858 - protein, 308 aa, unidentified
  REGION 1..308: note = Human gut metagenome
LKVFVLNMRGQPLMPCSPAKARHLLKAGKAVVKRRTPFTIHLRIATGETKQNVTLGVDAGAKHVGLSATTEKEEVFASEVELRQDITGLLAARLSLRRDRRHRKTRYRAPRFLNRVRSKHKGWLAPSVENRIQAHMSRIDAVCRLLPVTKIVIETASFDIQKIKDPSVEGTDYQQGDQLGFWNVREYVLFRDGHVCQHCHGRSKDKILNVHHLESRQTGGDAPNNLITLCETCHKAYHAGKIKLKVKRGQSFRAEAFMGIMRWTLLDRVRKAHPGLPVENTYGYLTCKSSKDHSKPRNEVDTSLKSPV

SEQ ID NO: 10859 - protein, 406 aa, unidentified
  REGION 1..406: note = Human gut metagenome
MVYVQDINGKPMMPTTRHGKVRRLLKDKKAVVVNLCPFTIKLMYVTSDYKQEIVLGVDAGTKHVGLSATTKSKELYSSEVILRNDIVDLLSTRRELRRTRRNRLRYRKPRFDNRIKSRRPGWVAPSVKYKVDAHIRVVENVCSILPISRIVIEVAQFDTQKIKNPNISGKEYQEGDQLGFWNVREYVLARDGHKCQYCKGKSKDHVLNVHHIESRKTGGNSPSNLITLCETCHKEYHKGNIDLKIKRGSSLRDAAVMEIMKWRLYEELRSKYDRVSMTFGYVTKYNRINHDIEKSHVSDAFVISKNFNAIRLGYYYKVRLVRRHNRQIHKQKIPKGGIKRLNQSPFEVFGFRLFDRVMFENNCYFIFARRKTGSFNIRDINGKNKRDITYKKLKLSRCKRFMIEKS

SEQ ID NO: 10860 - protein, 442 aa, unidentified; identical to SEQ ID NO: 3234
  REGION 1..442: note = Human gut metagenome

SEQ ID NO: 10861 - protein, 434 aa, Lactobacillus sp.; identical to SEQ ID NO: 2383

SEQ ID NO: 10862 - protein, 450 aa, Moorena sp.; identical to SEQ ID NO: 4205

SEQ ID NO: 10863 - protein, 431 aa, unidentified
  REGION 1..431: note = Human gut metagenome
MPDKVYVISRLGHPLMPCSPAKARHLLDDKKAKVVKRMPFTIRLLYGSTKYIQPIILGVDAGSKTIGLSASTAKEEVFAAEVMPRNDVVENLSTRREFRRARRNRTTRYRKPRSDNRVRSNHERWLAPSVKVKIQEHITSIKRVCTILPISKVVIETAEFDLQLLKAIQEGKPIPEGEDYQKGEMYGSYNVCQYILWRDNYTCICCGVRGTPKNPVRLHVHHFESRKYGGNAPDNHGTLCDDCHKKFHLGIITDVKLKTRRRQSTRDAAFMGIMRKTLMWRLRTELFIPVAGTKGYITKATREKLLVLPKSHTRDALAIAQGRHGFGIKEYAYEEPANHIYTVRPVRHHNRQLHKASILKGGIRKRNQASKYVFGFRLYDKVLYQGKACFVWGRRTSGTFLLRTIDGIKVKDGVSYRNLTLLERSSNYLIA

SEQ ID NO: 10864 - protein, 451 aa, Ruminococcus sp.; identical to SEQ ID NO: 10328

SEQ ID NO: 10865 - protein, 428 aa, unidentified
  REGION 1..428: note = Human gut metagenome
LKVFVLNMRGQPLMPCSPAKARHLLRDKKAVVKRRTPFTIQLTIATGETKQDVTLGVDAGAKHIGLSATTEKEEVFASEVELRQDITGLLAGRLAFRRARRHRKTRYRAPRFLNRVHSKHKGWLAPSVENRIQAHMSRIDAICGLLPVTKIVIETASFDIQKIKNPDVKGTDYQQGDQLGFWNVREYVLLRDGHVCQHCRGRSKDKILNVHHIESRKTGGDAPNNLITLCETCHKAYHAGKIKLKVKRGQSFRAEAFMGIMRWTLLDRVRKAHPDLPVENTYGYLTKNTRITLGLSKTHCVDAYCIAGNLNARRRGVFRYQRQMRKHNRQIHKCKVLSKTLKDGTKVGYRKLNQTPYLVKNFRLFDKVRCFGQTGFIFGRRTSGHFDVRTLNRTRISDCVNSKKLTLLEKRRTYLTELRKEDGASSPV

SEQ ID NO: 10866 - protein, 397 aa, Moorena sp.
MKVFVQDRNGKPLDPTAPVRARILLKRGRAEVVQREPFTIRIVDREGGYTKNTVLGIDAGYSQIGFSAVTEKEELIAGVVKLRNDIPKKLEQRKSYRRCRRCRNTRYRKPRFNNRKRTKGWLAPSIRQKKDAHIRLIKKIREILPVTKTIVEVATFDTQKMQNPEISGMEYQQGTLQGYQVREYLLEKFGRKCVYCGAEDVPLQVEHIIPKARGGTSRVSNLTIACEKCNQKKGNKTAEEFGYPEVQKQGRESLKATAFMNQVRWKIVNKLNCDYTYGYITKKDRIELNLEKSHVNDAFVIANGDNQVRSKPFELSFRRRNNRAIQTNRKGYGRSIRRKRYHLQPGDLVRKEGILCQVKGMFNYGKWVRLANPFGDIVNSNVRKVELVKYGKGLSFT

SEQ ID NO: 10867 - protein, 529 aa, unidentified
  REGION 1..529: note = Human gut metagenome
MSTVYVLNKDGKPLMPTTRGGHVRHLLKEQKARVVQSNPFTIQLLYETNDVVQPLYLGIDPGRTNIGVAVVKADGTAVFAAHLETRNKKIPKLMQDRKKARRARRTNGRRCRRQRRAKANGTISKKCVKQDTAQSKNPSKRAKEIGVIKRHLPGCKKDVLCVGIKNKEAKYTNRARLEGWLTPTANQLLQTHINLVKKIQKFLPISDVVLEVNKFAFMQLDNPNIQKWQYQQGPLYKKESLERAVSEMQEHHCLFCDKPIDHYHHVVPQSENGSNTIANIVGLCAEHHNLVHKDAAWQKKLAEEKVGLNKKYGALSVLNQIIPALTKELSFLFPEHSFVTNGKSTYDYRATHGVSKDHWLDAYCIACSVLPSDVCDSNINNHMPYELKQFRRHDRRVLHKANTSRVYTLNGKKVATNRHKAAKQTADSLEEFRQSHPDDVCKLKVKEHHPAYRNLNRNYPGSVFFVGKQVHVMQGIASSKDGKATKYNDTSATTIAAGKCEFVAKNSGILFVQCKFRKVFSDETTKKLQ

SEQ ID NO: 10868 - protein, 420 aa, unidentified; identical to SEQ ID NO: 3685
  REGION 1..420: note = Human gut metagenome

SEQ ID NO: 10869 - protein, 394 aa, unidentified
  REGION 1..394: note = Human gut metagenome
MPDKVYVISRLGHPLMPCSPAKARHLLDDKKAKVVKRMPFTIRLLYGSTKYIQPIILGVDAGSKTIGLSASTAKEEVFAAEVMPRNDVVENLSTRREFHRARRNRTTRYRKPRSDNRVRSNHERWLAPSVKVKIQEHITSIKRVCTILPISKVVIETAEFDLQLLKAIQEGKPIPEGEDYQKGEMYGSYNVCQYVLWRDNYTCICCGVRGTPKNPVRLHVHHFESRKYGGNAPDNHGTLCDDCHKKFHLGIITDVKLKTRRRQSTRDAAFMGIMRKTLMWRLRTELFIPVAETKGYITKATREKLLVLPKSHTRDALAIAQGRHGFGIKEYAYVEPANHIYTVRPVRHHNRQLHKASILKGGIRKRNQASKYVFGFRLYDTRGQFNRFSMTSHE

SEQ ID NO: 10870 - protein, 489 aa, unidentified
  REGION 1..489: note = Human gut metagenome
MDMVYVLNKDGKPLMATTRGGRVRYLLKEKKARVVSSTPFTIQLNYDTPDITQDLILGIDPGRTNIGVAVVKEDGQCVFSAHLETRNKDIPLLMKKRAGFRRQHRTLDRRRKRQRRAKAAGTTIVDGSVERLLPGYEKPVMCHYIRNKKARFNSRKRPKGWLTPTANHLLQTHINLIAKVAKFLPITKVVVELNRFAFMAMDNPNIRRWEYQQGPLCGLGSVEDAVYAQQDGHCLFCKKPIDHYHHVVPRHKNGSETLANRCGLCAKHHDLVHKDKAWADKLVTRKEGMNKKYHALSVLNQIIPFLMEYLGSETLYDVYAIDGRSIKGFRIAKNVPKEHYTDAYCIACSILDTDNKASAPVEPFELKQFRRHDRQACIRQMVDRKYLLHGKVVAANRHKAFEQKSDSLQEFREAYSDVAVSQLTVKPHPPQYKDMSRIMPGAVMDFDGIVGVMQSSIVGQFYKSTKGHKATPKRCALLSQNAGMVFIPT

SEQ ID NO: 10871 - protein, 425 aa, Anaerostipes sp.
MLVYVVTKDKQPLMPCTPVIARLLLKQERVKVKRRKPFTIQLLYETTKYKQDLELAVDTGSGKLATAVRTEQDEIVYLSEVAVRNDITGKMTERRTKRRSRRHRKTRYRKPRFDNRRNLKRKNRFSPTMQSKIHSHVKEIEYIKSILPITRIILETGQFNPHRMKNPALANPNIRHWGYQKGPNYGYENTRAMVLDRDNHQCQYCHGKRKDRHLEVHHIVFRSQGGSDDAKNLITLCHTCHQALHKGKIRLDLEGMEKGTLKYATQMNSIRKQLLRRYPEAIETYGYITKANRLAMDLPKEHYIDACVIATEGRPFTINSLLYRKKCVSAGDFQQYHGKRSEIRQATGKIMGFRKYDKVRYFGKYYFIKGRMSTGYAVLMDINGDTVKFSDMPWGFKTPKLERMERIQARSTWMVMSEEVTPNIV

SEQ ID NO: 10872 - protein, 431 aa, unidentified
  REGION 1..431: note = Human gut metagenome
MPNKVYVINKHGRPLMPCSPAKARHLLDAGKAKVKKRTPFTIQLVYGSSGYTQEVILGVDAGSKTIGMSVSTTKEELLSAEVKPRNDVVDLQSTRREFRRARRNRKTRYRKPRFDNRVRSKHKGWLAPSVEVKIQEHITSIKRACRILPVSKVVVETAEFDLQLLKAIADGKPVPQGEDYQKGEMYGHYNVRQYVLWRDDYTCQCCGAHATKKKEVRLHVHHLESRKVGGDAPDNQVTLCESCHEKLHKGLITEKDFKKRKRRSTRDATFMGIMRKTLMQRLCSELPIPVIETRGYITKATREKLLVLPKSHTNDALAIAQGKQGFNVGYLPGILQIDKIYTIRPVRHHNRQLHKAAILKGGIRKSNQAGKYVFGYRLFDKVQFNEQDCFIWGRRTTGIFTIKTINGKMIKDGISFKKLKLVEKSTSYLIA

SEQ ID NO: 10873 - protein, 426 aa, Anoxybacillus sp.
MVFVLDTNKRPLAPCHEAVARKLLKQGKAAIYKRYPFTIILKEIVDNFRPKTPYRLKIDHGSKHTGLAILRGQEVVWLGQLDHRTDIKERMDKRRAFRRARRNRKTRYRKPRFLNRRRKDGWLPPSLESRVQNIQTWVNRLKKLCPIGYISYENAKFDTQLMRNPEINGVEYQQGTLQGYEVREYLLEKFGRKCCYCGKENVPLEVEHIIPKSRGGTDRVDNLCLACYDCNQRKGSKTAEEFGYPHIQKQVKESLKDASAVNSTRWKVYEVLKQSGCEVECGTGARTKMNRIRLDLPKTHYFDACCVGESTPNHLYFKTKEVLFIRAKGRGSRSRTNLDRYGFPRGYLARQKFFFGFQTGDMVKAVIPRGKYQGVWFGEVSCRKTGSFDIKGKDGKRIAQGINYRYVQVIQRFDGYTYRREGMNIA

SEQ ID NO: 10874 - protein, 421 aa, unidentified; identical to SEQ ID NO: 2846
  REGION 1..421: note = Human gut metagenome

SEQ ID NO: 10875 - protein, 443 aa, Anoxybacillus sp.
MVEENMTCFMQRKGEYPMVFVLDTNKCPLAPCHEAVARKLLKQGKAAIYKRYPFTIILKEIVDNFRPKTPYRLKIDHGSKHTGLAILRGQEVVWLGQLDHRTDIKERIDKRRAFRRARRNRKTRYRKPRFLNRRRKDGWLPPSLESRVQNIQTWVNRLKKLCPIGYISYENTKFDTQLMRNPEISGIEYQQGTLQGYEVREYLLEKFGRKCCYCGKENVPLEVEHIIPKSRGGTDRVDNLCLACRDCNQRKGSQTAEEFGYPHIQKMVKKTLKDASVVNATRWKVYEVLKQSGCEVECGTGARTKMNRIRLDLPKTHYFDACCVGESTPNHLYFKTKEVLFIRAKGRGSRSRTNLDRYGFPRGYLARQKFFFGFQTGDMVKAVIPRGKYQGVWFGEVSCRKTGSFDIKGKDGKRIAQGINYRYVQVIQRFDGYTYRREGMNIA

SEQ ID NO: 10876 - protein, 414 aa, unidentified
  REGION 1..414: note = Human gut metagenome
MPCSPAKARLLLKEKKAIVKRRTPFTIQLTIATGESKQPVTLGVDAGYKHVGLSASTEKAELYASEVELRQDVSDLLSARRALRQSRRSRNTRYRAPRFDNRIRTKRKGWLAPTVENRINVHLSRIETVLRLLPVTKITVETASFDTQLLKNPDIAGKEYQEGEQLGFWNVREYVLFRDGHVCQHCHGRSKDPVLNVHHLESRRTGGDSPGNLITLCETCHKALHRGEITLKAKRGQSFRAETFMGIMRWEVLDRLKASHPKLEVQNTYGYRTKHARISNGIAKSHCADAFCIAGNLGAERLGEFLFQKQTRRNNRQIHKLSIPKGGIRKRNQVPFEVKGFRLFDKVAYKGEEGFIFGRRSSGYFDVRKLDGTHISAGISYKKLRLLEKRQTYLTEIRKEEALPPLPEGRGLRA

SEQ ID NO: 10877 - protein, 424 aa, unidentified; identical to SEQ ID NO: 8456
  REGION 1..424: note = coral metagenome

SEQ ID NO: 10878 - protein, 433 aa, Moorena sp.; identical to SEQ ID NO: 8354

SEQ ID NO: 10879 - protein, 415 aa, unidentified; identical to SEQ ID NO: 10041
  REGION 1..415: note = Human gut metagenome

SEQ ID NO: 10880 - protein, 435 aa, Moorena sp.
MVFVIDTNKQSQPMVHPAEARKLLRDGKAAVFRRVPFTIILKEERPPAEKSYRIKIDYGSKHTGLALLDGNKAVWLGQIEHRTNIKSLLDKRRGYRRRRRSANLRHRKPRFDNRTRPRGWLPPSLESRVGNIETWVRRLCTLAPVGVISYENVKFDTQLVQDDTIDGVQYQQGTLQGYEVREYLLERRGRRCAYCGKEHVPLEIEHIVPRSRGGSSRISNLTLACHECNQAKGAMTAEEFGHPEIQKQAKKPLRDAAIVTATRWRVYDMLVGTGLPVECGTGGRTKYNRTRLGLPKEHYYDACCVGESTPDMLAIKTNEVLVITAKGRGSHCRTNVNASGFPRGYRARQKLFFGFSTGDYCKADIGSGKKAGTYVGRVLCRKTGSFDINTMQGRVQGLNHKWFTVLQRADGYEYHTEKRGATSSPCLKAGASVVQ

SEQ ID NO: 10881 - protein, 451 aa, unidentified
  REGION 1..451: note = Human gut metagenome
VTTILKTCFAASNLAKIVVLMDAWDIIVVLNKRGKPLMPCSPAKARHLLKEKKAAVVRRTPFTIQLTIATGESKQPVSLGVDAGYKHVGLSASTEKAELYASEVELRQDITDLLSARRALRQSRRNRKTRYRAPRFDNRIRTKRKGWLAPSVENRINAHLSRIETVIRLLPVTKISVETTSFDMQLLKNSDIAGKEYQEGEQLGFWNVREYVLFRDGHVCQHCHGRSKDPVLNVHHLESRRTGGDSPGNLITLCETCHKALHRGEITLKAKRGQSFRAETFMGIMRWEVLDRLKASHPKLEVQNTYGYRTKHARISNGIAKSHCADAFCIAGNLGAERLGEFLFQKQTRRNNRQIHKLSIPKGGIRKRNQVPFEVKGFRLFDKVAYKGEEGFIFGRRSSGYFDVRKLDGTHISAGISYKKLRLLEKRQTYLTEIRKEEALPPLPEGRGLRA

SEQ ID NO: 10882 - protein, 634 aa, Nocardiopsis sp.; identical to SEQ ID NO: 3185

SEQ ID NO: 10883 - protein, 465 aa, unidentified; identical to SEQ ID NO: 8068
  REGION 1..465: note = Human gut metagenome

SEQ ID NO: 10884 - protein, 442 aa, unidentified
  REGION 1..442: note = Human gut metagenome
MSTSVFVLDKKHRPLMPCRPARARRLLRAGRARVVKRFPFVIRLVDRTVEQSEVQPVLIKLDPGSRETGAAVVRDDGKKRHHALAFFVIEHRGGAIRDALKARSAFRRRRRSQNLRCRSPRFLNRVKPKGWLPPSLRHRVETTLSFVRRMCRYLPVSGIATELVKFDSQKLQNPEVSGVKYQQGTLFEYEVREYLLEKFGRKCVYCGAEGVPLNIDHVVPRAKGGSNRVSNLVLACVSCNQKKGARSLEDFLKGKPEVLARVRRELKTPLRDAAAVNATRWVLFNELKATGLPVETGSGALTKLNRHAFGVEKEHWLDALCVGRLNGVVTRKGLNVLEIRCMGRGSRQRTRLTKYGFPRGYLMRQKCVHGFATGDMVEANVPKGKKAGLWRGRVAVRVSGSFNIQTPKGVIQGVGWKHCRLISHNDGYGYAWLGHAPHSSPA

SEQ ID NO: 10885 - protein, 419 aa, Moorena sp.
MQNYVFVIDANKQPLNPIHPKKARRLLDKGKAAVFRIYPFTIILKTAYANPVILPCQIKIDPGSKTAGFALVRDGQVIWGMELEHRGGLIKKKLESRRAVRRGRRNRNTRYRKPRFLNRKRPEGWLPPSLEHRILTTETWVKRLIKFCPVSEIWIERVKFDTQKMQNPEISGVEYQQGELVGYEVREYLLEKWGRECTYCGKQNVPLQVEHIHPRSKGGSNRVSNLCLACEKCNQRKGNKPIEEFLKKKPSLLQKIKTKTKQPLTDAAAVNATRNKLVKVLKDSRVVVTGTGAQTKYNRTRLGLPKQHWIDAACVGNIESLALKTLQPLLVTCKGQGGRQKAALNKYGYPIRHNPLKPIKGWMTGDIAKHQKLGIGRVTPRSKGSFGFTPVGMKGYKSCKPQDISAIHRKDGYTYSFCK

SEQ ID NO: 10886 - protein, 414 aa, unidentified; identical to SEQ ID NO: 2588
  REGION 1..414: note = Human gut metagenome

SEQ ID NO: 10887 - protein, 512 aa, unidentified
  REGION 1..512: note = Human gut metagenome
MSTVYVLNKDGKPLMPTTRGGHVRHLLKEQKARVVRAKPFTIQLLYETNDVVQPLYLGIDPGRTNIGVAVVKANGTAVFTAHLETRNKEVPKLMQDRKKARRARRTNGRRCRRQRRAKANGTISKKCVKQDTAQSKNPSKRAKEIGIIKRRLPGYKKDVLCIGIKNKEAKYTNRTRPEGWLTPTANQLLQTHINLVRKIQKFLPISDVVLEVNKFAFMRLDNPDIQKWQYQQGPLYQKGSLENAVSEMQEHHCLFCDKPIDHYHHVVPQSENGSNTIANIVGLCAEHHNLVHKDAAWQKKLAEEKVGLNKKYGALSVLNQIIPALTNKLSVLFPKHFFVTAGKSTHDYRAAHGVSKDHWLDAYCIACSVLPSNVCDSNINNHMPYELKQFRRHDRRVLNNENVNRVYTLDNKAVAINRHKATEQEAASLEEFRKEHPNDVCKLKVKEHHPTYRNMNRNYPGSIFLVGKHVHIMQGIAGSKDGKATTYKDSNANSITASKCKFVAKNSGILFV

SEQ ID NO: 10888 - protein, 308 aa, unidentified
  REGION 1..308: note = Cyanobacteria bacterium UBA11371
MQNYVFVLDTNFQPLNPVSPKRARELLTKQKAAVFRMYPFTIILKHALPNPLPKSLTIKLDPGSRFSGIAVLDGKNVIWVAELEHRSWQIKDSLLTRRSLRRSRRNRKTRYRQARFNNRKRKQGWLAPSLMHRVLTIETWVKRLCRYAPIASIAMELVKFDAQKLQNPEIDGVEYQQGELAGYEVRQYLLEKWGRKCAYCDKERVPLQIEHIHPRAKGGSNRVSNLTLSCERCNTKKGTKSIDEFLKKDGSRLEKIKQQAKQPLKDAAAVNTTRWELFRTLKNILPTTTGTGGQTKYNRTKLELPKQH

SEQ ID NO: 10889 - protein, 213 aa, unidentified
  REGION 1..213: note = Human gut metagenome
MQYVYVLNKHGEPLMPCSPGKARLLLKQQKACVVKRTPFTIKLLFGSAGYKQPITLGVDAGSKHVGLSASTEKRELYSEEFTPRSDVVELLSTRRQNRRSRRNRKTRYRVPRFDNRVHSKHKGWLAPSVEVKIQEHITVIKHICKILPISLVRVETAEFDTQRLKAMLAGKPLPVGTDYQLGEMYDEYNVRQYVLKRDHYTCQYCGTHNTAKN

SEQ ID NO: 10890 - protein, 427 aa, Scytonema sp.; identical to SEQ ID NO: 3411

SEQ ID NO: 10891 - protein, 419 aa, unidentified; identical to SEQ ID NO: 4877
  REGION 1..419: note = Human gut metagenome

SEQ ID NO: 10892 - protein, 460 aa, Fischerella sp.; identical to SEQ ID NO: 9149

SEQ ID NO: 10893 - protein, 427 aa, unidentified
  REGION 1..427: note = Cyanobacteria bacterium UBA8553
MSKLPNYVFVLDTNRKPLTPCKPSIARKLLTACKAKVFRLYPFTIILNKEVTDNPEPLTLKIDPGSKVTGLALLFGSKLLWIAELTHRGQSIKAFLESRRSLRRSRRNRHTRYRQPRFLNRTRPKGWLAPSLQHRVETTLTWVNKLSRFAPINAVSQELVRFDLQRVENPEISGVQYQQGELAGYEVREYLLNKWERKCTYCGVENVPLQIEHIQPKAKGGSNRISNLCLACEKCNIKKGTKDIKVFLAKKPEILKRILAQAKRSLKDTAAVNSTRWALCNRLKETGLMVSTGSGGLTKFNRTRIGLPKTHFFDAACVGDTPEILILANQPLNIKATGHGSRQMCRTDKFGFPCRYVPQFKFIKGFQTGDVVKAIVTSGKKTGTYTGRVAVRSTGSFNISASLGLIQGISHKYCQQIHQKDGYNYGF

SEQ ID NO: 10894 - protein, 465 aa, unidentified
  REGION 1..465: note = Human gut metagenome
MSTCVCVLSNSGERLMPTIRLGKVRRLLKDGKAKIVKHHPFTIQLLYDSKTNTQPIEICEDVGYSYIGISVKSESHEYVSAQYDTLQDEKEHHDDCRMHRRTRRNRLRYRKPRFDNRKRGEGWLAPSLRHKKELNVNVVKMYCAVMPITHATVEVGSFDTMLVKAIQEGKAIPEGADYQKGPRYNLATLREAVFYRDNYTCQVCGRKVADGAILHMHHMFYWKGRHGDSLNELLTVCEKCHTPANHQKGGKLYGFGENVKFADLSGAAFMNTVRWQIVNKLYAAFGKDFVTVTYGAMTKEKRIALRLEKSHNNDAYAMGEFHPNCRYTFEHYEKVRRNNRILEKFYDSRYIDIRTGEIATGKELFNGRINRSHKKDSENLHKYRGKRIRKGYRALRRKKVALNPGDLVSLNGEILTVHGTHTKKNGSVNVEFKTPSKSGKKSTSLKKLKIIKTISPMRSAWDKVS

SEQ ID NO: 10895 - protein, 472 aa, unidentified
  REGION 1..472: note = Human gut metagenome
MSTCVCVFSNNGERLMPTFRLGKVRRLLKDGKAKIVKHHPFTIQLLYDSKTNTQPIEICEDVGYNYIGISAKSKSHEYVSAQYDTLQDEKEHHDDCRKMRRTRRNRLRYRKPRFDNRKRGEGWLAPSLRHKKELNVNVVKMYCAVMPITYATVEVGSFDTMLVKAIQEGKVIPEGADYQKGPRYNLATLREAVFYRDNYVCKVCGRKATEGAILHMHHMFYWKGRHGNSLNELLTVCEKCHTPANHQKSGKLYGFGEDVKFADLSGAAFMNTVRWQIVNELYAAFGKPFVTITYGAMTKEKRIALQLEKSHNNDAYAMGEFHPNHRCAFEHYEKVRRNNRILEKFYDSQYIDIRTGEIATGKELFNGRINRNHKKDSENLHKYRGKRTYAGHRALLRKKVNLNPGDLVSLNGEPLVVLGTHTRKNGAVNVEFETPSKSGRKSASLKKLKIVKAADSIHPAWEKVSQIIQRKE

SEQ ID NO: 10896 - protein, 413 aa, unidentified
  REGION 1..413: note = Human gut metagenome
MTSYSFVLDANGKQLAPTKEPKAWFLIRKKRAALVSKYPMVIQLKKKIQENEICKDEIRCGIDDGGLHVGIALVQKCKSKNKVVFKGTIEQRNDVKHLMEVRRNYRRYHRYHKRYRQARFDNRKSSKREGRIAPSILQKRQATIRVIHWLNKWINITNYWLEDVSVDIRALTDGYQSYRWQYQKSNRLDENIRKAAILRDDGKCMECGKSNCRLEVHHIKPRRRNGSNTLDNLITLCESCHQKTEGQEELYMDRYFSLLKSSDNKNLNDAQHVMIGKMWLRKQLSGLGVLYLTSGGDTANKRIDWNIEKSHTNDAVCITDLQPDTCDIKEWAIKPMRRQSKAKTDHVLGIHHRDLVEYTFKNGETHRGYVTALYPEQKAINFQSQTKHCKKVNARKCKLLWNYSKIYWFENAS

SEQ ID NO: 10897 - protein, 423 aa, Phormidium sp.; identical to SEQ ID NO: 9375

SEQ ID NO: 10898 - protein, 450 aa, Alkalispirillum sp.
MAVLVLDKRKRPLMPCSEKRARLLLDRGRAVVVRVHPFTIRLKDRVGGDTQPTRIKIDPGSRITGMALVREGADGTEHVLWLGEIAHRGHAIRDRLAQRRAFRRRRRSQLRHRAPRFDNRTRPAGWLAPSLQHRLGTTIAWVKRLRRWAPVTAVSQELVRFDTQKMENPGVSGVEYQQGTLQGFEVREYLLHRHQHQCAYCAGRSGDPVLEVEHVHPRRRGGSDRVGNLVIACRCCNQAKGNRTAGEWAEALGQRSMLDRTRKANAERIEAGKRPSLRDASAVNSTRWALFHALKATGLPVAAGTGGRTKWNRQRLGIPKGHALDAACVGTVESVVGWNCPVLAIKASGRGSYQRTRLDRYGFPRGHLMRAKQVRGFQTGDHVRAVVPTGRKVGTHTGRLAVRVSGSFNIQTPKGVVQGISHRHCVLTQRADGYGYTAKPKPMEERERAA

SEQ ID NO: 10899 - protein, 423 aa, Arthrospira sp.; identical to SEQ ID NO: 3469

SEQ ID NO: 10900 - protein, 420 aa, unidentified
  REGION 1..420: note = Human gut metagenome
MQYAYVLNKRGEPLMPCSPGKARILLKQQKACVVKRTPFTIKLLHGSAGYKQPITLGVDAGSKHVGLSASTEKRELYSEKFTPRNDVVELLSTRRQNRRSRRNRKTRYRAPRFNNRVHSKHKGWLAPSVEVKIQEHITVIKRICRILPITLVRVETAEFDTQRLKAMLAGKPLPVGTDYQLGEMYDEYNVRQYVLKRDNYTCQCCGAHTTAKKTVKLHVHHLESRKVGGNAPSNLITLCTTCHNNLHKGKITLDGKKRGKTLRDAAFMGIMRNTLLTRLRNELNIPVQNTYGYITKLLREQNDIKKSHVNDARCISKHPLAKPCSVCYRTKAIRHHNRQIHKAKILKGGIRKANQAPYIVKGFRLWDKVLYNEQECFISGRRSSGYFALRKFDGTTITNSISFKKLRLLEPATNYLIERK

SEQ ID NO: 10901 - protein, 510 aa, unidentified
  REGION 1..510: note = Human gut metagenome
TVYVLNKDGKPLMPTTRGGHVRHLLKEQKARVVRAKPFTIQLLYETKDAVQPLYLGIDPGRTNIGVAVVKTDGTAVFTAHLETRNKEIPKLMKKRKESRRARRTNGRRCRRQRRAKANGTISKKCVKQTTAQNRSVSKRAKEIGVIKRYLPGCEKEILCIGIKNKEAKFNNRTRPEGWLTPTANQLLQTHVNLVKKIQKFLPISDVVLEINKFAFMQLDNPNIQKWQYQQGPLYKKESLESAVSEMQEHHCLFCKKPIDHYHHVVPQHKNGSNTIGNIVGLCTKHHDLVHKEVAWQEKLAKKKIGLNKKYGALSVLNQIIPALTKEMGVLFPKHFFVTTGKSTYDYRVAHGVSKDHWLDAYCIACSVLPNDVCDKNINSRVPYELKQFRRHDRRALHKENMNRVYTLNGKKVAANRHKAVEQATDSLEEFRQNHPDDVCKLKVKEHHPEYRNPKRNFPGCVFLVGKRTHVMQGTSGSHNGKADGYYDTNGNSYPFGKCKFVAKNKGIVFA

SEQ ID NO: 10902 - protein, 422 aa, unidentified; identical to SEQ ID NO: 6264
  REGION 1..422: note = Human gut metagenome

SEQ ID NO: 10903 - protein, 442 aa, unidentified
  REGION 1..442: note = Human gut metagenome
MSTSVFVLDKKHRPLMPCRPARARRLLRAGRARVVKRFPFVIRLVDRTVEQSEVQPVLIKLDPGSRETGAAVVRDDGKKRHHALAFFVIEHRGGAIRDALKARSAFRRRRRSQNLRCRSPRFLNRVKPKGWLPPSLRHRVETTLSFVRRMCRYLPVSGIAAELVKFDSQKLQTPEVSGIEYQQGTLFEYEVREYLLEKFGRKCVYCGAEGVPLNIDHVVPRAKGGSNRVSNLVLACVSCNQKKGARSLEDFLKGKPEVLARVRRELKTPLRDAAAVNATRWVLFNELKATGLPVETGSGALTKLNRHAFGVEKEHWLDALCVGRLNGVVTRKGLNVLEIRCMGRGSRQRTRLTKYGFPRGYLMRQKCVHGFATGDMVEANVPKGKKAGLWRGRVAVRVSGSFNIQTPKGVIQGVGWKHCRLISHNDGYGYAWLGHAPHSSPA

SEQ ID NO: 10904 - protein, 415 aa, unidentified
  REGION 1..415: note = Human gut metagenome
MVYVVANDGQPLMPTERHGKVCRMLRSGMAKVIKKCPFTIQLQYESERNVQPVSLGVDAGSKHIGISATTKTKVLYESDVELRDDIVKLLATRRQLRRSRRSRKTRYRPARFDNRKRKEGWLAPSIQQKIGSHLTVVANVCKILPINQIIVETASFDIQKIKNPEIQGIEYQQGEQMDFWNVREYVFFRDGHTCQCCKGRSKDKILNVHHIESRKIGGNAPNNLITLCETCHKGYHNGTVILPKNIKRGMQFKDAAFMGIMRWAFYNALKEQYEPAIPVSMTYGYLTKNTRIEHGLLKEHYIDARCISGNPDAVSDGTYYYQKKVRCHNRQIHKQTILKGGIRKSNQAEYLVKGYRLFDKVRYHGREYFIFGRRKTGFFDIRTLSGEKVNKGSISVKKLTFADTRKNYLTERRTA

SEQ ID NO: 10905 - protein, 414 aa, unidentified
  REGION 1..414: note = Human gut metagenome
MVYVINKQGQALMPTERFGKVRRLLKNSLAHVVCRIPFTIQLDYDTTDYTQPVSLGVDAGSKHIGISATTSEKEMYAADVELRNDIVDKLSTRREQRRTRRSRLRYRKARFNNRVSSKRKGWLAPSVENKIQTHLTVVEKIHKFLPITNIVVEIASFDIQKINNPIISGSEYQQGEQLDFFNVREYVLFRDNHICQHCKGKSKDKVLNVHHIESRKAGGDSPNNLITLCETCHKAYHRGEFELNVKRGKSFRDAAFMGIMRWSFYDRLKNIYPDVSMTFGYITKNTRITNNLPKDHYVDARCISGNPVAKPLGYYFYQKKVRCQNRQIHKANFLKGGRKKLNQAPFLVKGFRLFDLVEYQKDLYYIFGRRDSGFFDIRKLDGTKVNKGSINCKYLRLVDKRKSILIEKRMQVNL

SEQ ID NO: 10906 - protein, 420 aa, unidentified; identical to SEQ ID NO: 6212
  REGION 1..420: note = Human gut metagenome

SEQ ID NO: 10907 - protein, 457 aa, Anaerostipes sp.; identical to SEQ ID NO: 5989

SEQ ID NO: 10908 - protein, 372 aa, unidentified
  REGION 1..372: note = Human gut metagenome
AVVRDDEKKRHHALAFFVIKHRGGAIRDALKARSAFRRRRRSQNFRCRSPRFLNRVKPKGWLPPSLRHRVETTLSFVRRMCRYLPVSGIATELVKFDSQKLQNPEVSGVKYQQGTLFEYEVREYLLEKFGRKCVYCGAEGVPLNIDHVVPRAKGGSNRVSNLVLACVSCNQKKGARSLEDFLKGKPEVLARVRRELKTPLRDAAAVNATRWVLFNELKATGLPVETGSGALTKLNRHAFGVEKEHWLDALCVGRLNGVVTRKGLNVLEIRCMGRGSRQRTRLTKYGFPRGYLMRQKCVHGFATGDMVEANVPKGKKAGLWRGRVAVRVSGSFNIQTPKGVIQGVGWKHCRLISHNDGYGYAWLGHAPHSSPA

SEQ ID NO: 10909 - protein, 509 aa, unidentified; identical to SEQ ID NO: 4834
  REGION 1..509: note = Human gut metagenome

SEQ ID NO: 10910 - protein, 422 aa, Petrotoga sp.; identical to SEQ ID NO: 6564

SEQ ID NO: 10911 - protein, 311 aa, unidentified
  REGION 1..311: note = Human gut metagenome
MFVDMVYVQDIDGKPMMPTTRHGKVRRLLKDKKAVVVNLCPFTIRLTYVTSDYKQEIVLGVDAGTKHVGLSATTKSKELYSSEVILRNDIVDLLSTRRELRRTRRNRLRYRKPRFDNRIKSKRPGWVAPSVKYKIDAHIRVIDNVCSILPISRIVIEVAQFDTQKIKNPEILGKEYQEGDQLGFWNTREYVLARDGHKCQYCKGKSKDKILNVHHLESRKTGGDSPSNLITLCETCHKEYHKGNIDLKIKRGSSLRDAAVMGIMKWKLYEELRSRYDRVSMTFGYITKHNRIKYGIEKIPYIRRVCHFYEH

SEQ ID NO: 10912 - protein, 345 aa, Bacillus sp.; identical to SEQ ID NO: 10753

SEQ ID NO: 10913 - protein, 512 aa, unidentified
  REGION 1..512: note = Human gut metagenome
MSTVYVLNKDGKPLMPTTRGGHVRHLLKEQKARVVRAKPFTIQLLYETNDVVQPLYLGIDPGRTNIGVAAVKANGTAVFTAHLETRNKEIPKLMQDRKKARRARRTNGRRCRRQRRAKANGTISKKCVKQTTAQNGSVSKRAKDIGVIKRRLPGCEKDVLCIGIKNKETKFTNRTRPEGWLTPTANQLLQTHINLVKKIQKFLPISDVVLEVNKFAFMRLDNPNIQKWQYQQGPLYKKESLESAVSEIQEHHCLFCKKPIDHYHHVVPQHKNGSNTIGNIVGLCAKHHDLVHKDSAWEKKLAKKSTGLYKKYGALGVLNQIIPTLTNELSSLFPKHSFVTNGKSTYDYRAAHGVSKDHWLDAYCIACSVLPSNVCDSNINNHMPYELKQFRRHDRRVLNNENMNRVYTLNNKAVAINRHKAKDQKTVSLEEFRKEHPDDVCKLKVKEHHPTYRNMNRNFPGSVFLVGKQIHVMQGIASSKDGKATKYNDTSATAIAAGKCKFVAKNTGILFV

SEQ ID NO: 10914 - protein, 424 aa, unidentified; identical to SEQ ID NO: 3351
  REGION 1..424: note = Human gut metagenome

SEQ ID NO: 10915 - protein, 462 aa, unidentified
  REGION 1..462: note = Human gut metagenome
MSVLVIGRNGRALMPTNPRKARLLLKKKTASVVCRHPFTIQLLYKTGCATQEGCIGIDTGSQHIGVGITCGDRMILKDEHALRSSMEKRSLLATRTVMRRGRRYRKVRYRKPKWRHHTKRMYFEKANRRGQHWRKVKTTTQSPRLKGWLPPSLQSKCDHHFRIIDRYLKYLPDPITRNLVIEAGRFDMARMNDPTIHGEMYQRGPMYDAENLRAYIFARDNYQCACCKAKAGTTRKADGTTVKLVAHHILFRSRGATDNPKYIISVCDHCHTTKAHQPGGILYSWMENNKKVARGLRDATFMNILRKRLFARYPQAAFTYGNITAADRKQLRLPKSHANDAVAISLFGKEASTVKNICQTMHYKQIRKSKRSLHEAIPRKGRKNPNTKAVRNKKNTTQVNGFKLWDSVLADGKKLFICSFTGTSAYLIDKNGCYISQPGKTYKQWPLSKLKRLHPNGNWLMA

SEQ ID NO: 10916 - protein, 418 aa, unidentified
  REGION 1..418: note = Human gut metagenome
MVYVLSKTGQPLMPTENHAKVRVLLKQQKAKIVHRCPFTIQLLYDSTDYTQPVSLGIDAGSRHIGVSATTETKVLYEADVTLRNDIVDLLSTRREARRTRRSRKTRYRKPRFNNRIRKDGWLAPSIQQKVDTHLTVVHKATEILPVNSITVETASFDIQKIKNPDISGTGYQQGEQLDFWNVREYVLFRDGHKCQCCKGKSKDPVLNVHHIESRKTGGNAPNNLITLCETCHKGYHNGTVSLPKNIRRGMKFNDAAFMGIMRWTFFNRVKETYEPLGIMVNMTYGYITKNTRIEHNLPKDHFINARCISGHPDAVSDGTVFYQKKVRCHNRQIHKQKILKGGIRKRNQAPYLVKGFRLFEKVKYHGKQYFIFGRRSSGFFDIRTLDGTKVNKGSVSCKKIRSLDMPRSYLTEERKAIV

SEQ ID NO: 10917 - protein, 430 aa, unidentified
  REGION 1..430: note = Human gut metagenome
MPKVYVLNRHGRPLMPCTPAKARHLLDAGKAKVRHRTPFTIQLLYGSTGYTQEVILGVDAGSKTIGLSAATETEELFSAEVKPRNDVVELMSARRQFRRARRNRTTRYRKPRFDNRVRSKHKGWLATSVEVKIQEHMTAIRRACAILPVSKVVVETAEFDLQLLKAVAEGKPVPQGEDYQKGEMYGHYNVRQYVLWRDSYTCRICGMHGSVRKGVPLHVHHLESRRVGGDAPDNLVTLCTACHDKLHKGIIMAADIKKRKRRSTRDATFMGIMRMTLLRRLREQLPVPVVETRGYITKATRENLLVLPKSHANDALAIAHGPQGFRAEHLPNIRQADRLYTIRPVRHHNRQLLKATILKGGVRKTNQAEKYICGFRLYDKVLYNGIECFVWGRRTSGSFLLRQLNGEKVKDGVSYKHLKLLERSQSYLVA

SEQ ID NO: 10918 - protein, 414 aa, unidentified
  REGION 1..414: note = Human gut metagenome
LRVFVLNKRGKPLMPCSPAKARLLLKEKKAIVKRRTPFTIQLTIATGETKQPVSLGVDAGYKHVGLSASTEKAELYASEVELRQDITDLLSARRALRQSRRNRKTRYRAPRFDNRIRTKRKGWLAPSVENRINAHLSRIEAVLRLLPVTKITVETASFDLQLLKNPNISGKEYQEGEQLGFWNIREYVLCRDGHVCQHCYGRSKDPVLNVHHLESRRTGGDSPGNLITLCETCHKALHRGEITLKAKRGQSFRAETFMGIMRSEVLNRLKASHPELEVNNTYGYRTKHARIANDIAKSHCADAFCIAGNLGAERLGEFFFQKQTRRNNRQIHKLSILKGGIRKRNQAPFEVKGFRLFDKVACQGEEGFIFGRRSSGFFDVRKLDGTRISAGISYKKLHLLEKRRTYLTEIRKEE

SEQ ID NO: 10919 - protein, 415 aa, unidentified
  REGION 1..415: note = Human gut metagenome
MVYVLANDGQPLMPTERHGKVCRMLKSGIAKVVKKCPFTIQLQYESERNVQPVALGIDAGSKHVGVSATTKAKVLYESDVELRDDIVKLLATRRQLRRRRRSRKTRYRPARFDNRRRKEGWLAPSIRQKIESHLTVVANVCKILPVSQIIVETASFDIQKIKNPDIQGIEYQQGEQMDFWNIREYVLFRDGHTCQCCKGKSKDKVLNVHHIESRKTGGNAPNNLITLCETCHKGYHNGTVTLPKNIKRGMKFKDAAFMGIMRWTFYNTLKEQYEPDIPVSMTYGYLTKNTRIEHGLPKEHYIDARCISGNPDAVSDGTYYYQKKVRCHNRQIHKQTILKGGIRKSNQAEYLVRGFRLFDKVRYQGREYFIFGRRKSGFFDIRTLSGEKVNKGSISVKKLTFADTRKNYLIERRTV

SEQ ID NO: 10920 - protein, 406 aa, unidentified
  REGION 1..406: note = Human gut metagenome
MVYVQDIDGKPMMPTTRHGKVRRLLKANKATVVNLCPFTIQLTYKSTDHKQPVTLGIDAGAKHIGFSATTEKEELFACETTLRTDIVDLLSMRLQNRRTRRSRLRYRKSRFNNRGSSKKKGWVAPSAKQRIDSHLNEVNEIHKILPITKIVIEVAQFDTQKMKNHDISGADYQNGEQLGFWNVREYVLFRDGHKCSHCKGKSKDPVLNVHHLESRKTGGDSPSNLITLCESCHKAFHKGEIELKKKRGKSLRDAAVMGIMKWKLYEELKSRYDNVSMTFGYITKHNRIKYGIEKNHTSDAFVISRNFNAKRIEYQYLKRLVRRHNRQIHKMKILKGGKKKNNQAPFEVFGFRLFDKVLYNNEIFFVYGRRKSGNFNIRDFNGENPKDVSHKKFKLIRGKRHPIILK

SEQ ID NO: 10921 - protein, 411 aa, unidentified; identical to SEQ ID NO: 8372
  REGION 1..411: note = Human gut metagenome

SEQ ID NO: 10922 - protein, 420 aa, unidentified
  REGION 1..420: note = Human gut metagenome
MQYVYVLNKHGEPLMPCSPRKARLLLKQKKACVVKRTPFTIKLLYGSTGYKQPITLGVDAGSKHIGISATTEKHELYREEATPRNDVVDLLSARLAFRRSRRNRKTRYRAPRFDNRVHSKHEGWLAPSVEVKIREHITLIKRVCRILPITLVRVETAKFDTQRLKAMLEGKPLPVDTDYQLGEMYDEYNVRQYVLKRDNYTCQCCGAHPTKTKAVKLHVHHIETRRTGGNAPNNLITLCTVCHKALHAGKVTLDGKKRGKPLKDAAFMGVMRKTLMERLRKELKIPVQGTYGYITKYIREKNGIPKSHTNDARCISKNPLAIPCDTCYYTKAVRHHNRQLHKATILKGGIRKANQAPYIVKGYRLWDKVSYNGTECFITGRRTSGYFALKKLDGTVVSNSISYKKLRLLEVATNYITERK

SEQ ID NO: 10923 - protein, 441 aa, Sulfobacillus sp.; identical to SEQ ID NO: 4231

SEQ ID NO: 10924 - protein, 442 aa, unidentified; identical to SEQ ID NO: 8051
  REGION 1..442: note = Human gut metagenome

SEQ ID NO: 10925 - protein, 325 aa, unidentified
  REGION 1..325: note = Human gut metagenome
RKTRYRAPRFDNRIRTKRKGWLAPSVENRINAHLSRIEAVLRLLPVTKITVETASFDMQLLKNPDISGKEYQEGEQLGFWNIREYVLCRDGHVCQHCYGRSKDPVLNVHHLESRRTGGDSPGNLITLCETCHKALHRGEITLKAKRGQSFRAEAFMGIMRSEVLNRLKASHPELEVNNTYGYRTKHARIANDIAKSHCADAFCIAGNLGAERLGEFFFQKQTRRNNRQIHKLSILKGGIRKRNQAPFEVNGFRLFDKVACKGEEGFIFGRRSSGFFDVRKLDGTRISAGISYKKLHLLEKRRTYLTEIRKEEVLPPLPEGRGLRA

SEQ ID NO: 10926 - protein, 515 aa, unidentified
  REGION 1..515: note = Human gut metagenome
MTTLEERLSKTEYIYVLGFDGKPQMPTRRKRHVLKLLKTGRARIAEDIPFTIRLTYRNAPVLQPVTLAEDPGRTNIGAAVLSPLGDLLFAAVIETRNKEIKKLMADRKKSRQASRRGERKARQRLAKRYGSMVKSGMIIRKLPMYAADKFVTCKFIRNTQARFCNRKRCPDWITPTVQHLVQTHLNIIRKISRYLPVTDIAFEVNRFAFMHMENPKAVGVDFQNGPLKGYDDVKEAIRTQQHGKCLMCKKPISHFHHIVPRSRGGSDTIQNMAGLCPECHTKVHTDTAFRKDFDEKKSGQLKKYGALSALNQAVPFICKKLLEEYGEEHVHFCRGMDTSLIRTALGFEKTKMNQMHEVDAYCIGLAALEVNEVAAPAFDHTFQIRQFRRQDRSIIHHQTGRSYYQGKEKVAQNRKPGFEQKTTALSQWYEEQVRIHGEKEAEKLRSQLRVEKSCRHYNDMDRFLPGAVFLYEGKRYVLSGRITNGKYLRACGQGMKNFPAAECTFIRHNAGLVFI

SEQ ID NO: 10927 - protein, 485 aa, unidentified; identical to SEQ ID NO: 6696
  REGION 1..485: note = Ga0373628_0060488

SEQ ID NO: 10928 - protein, 420 aa, unidentified; identical to SEQ ID NO: 9880
  REGION 1..420: note = Human gut metagenome

SEQ ID NO: 10929 - protein, 524 aa, unidentified
  REGION 1..524: note = Human gut metagenome
MTHQERRHLMPEYIYVLGMDGRPQMPTTRRRHVQKLLNIGKARIAEHVPFTIQLLYKNDPVLQSVMLAEDPGRTNIGLAVLSLEGDLLLSAVTETRNKEIAKLMLDRRKNRRASRNGERKARQRLAKKFGTVIKAGMLMRKLPKYAADKFVTCNLIRNTESRFCNRKRPEGWLNPTVNHLVETHIHLIHKMQKYLPVTDIAFEVNRFAFLLLEDPSVSGVDFQNGPLKGYDNLKDAVYDLQDGKCLMCGHEIEHYHHIVPRAKDGSNTLGNIAGLCKCCHDKVHKDAEFKKKLKDCKKGLDQKYGALSALNQAIPFICKRLEEEFGKEHIFYCTGRDTARVRNSLGYQKTKESQLHEVDAWCIGLLAVGKAPESLPDFSQTHRIRQFRRRDRSLIQAQVERTYKMNGKTVAKNRKKRMDQRTDSLEEWYQKQVRSVGKKEAERKRSQLTVVKSYRRYNELGRIMAGAILIYQGKRYVLQNRITNGQYYHVFGSEKNIPAKKCMIEKHNEGLVFLSKNMAAISPG

SEQ ID NO: 10930 - protein, 411 aa, unidentified; identical to SEQ ID NO: 4578
  REGION 1..411: note = Human gut metagenome

SEQ ID NO: 10931 - protein, 423 aa, unidentified; identical to SEQ ID NO: 3513
  REGION 1..423: note = coral metagenome

SEQ ID NO: 10932 - protein, 424 aa, unidentified
  REGION 1..424: note = Human oral metagenome
MVFVLDRSKKPLDMISHAQARILLKNRLAVVHKIYPFTIRLKDNSCVSKDKTYTVKIDPGSRTTGVAITDDKDSVVMLAEIEHRGHLIKKNLYDRKVLRRFRRNRKTRYRESRFLNRTRPKGWLAPSVKSRADNVVNFVKKYKKLININKVMIENVSFDTAQMTSDIKLWGSDYQQGPLYQKELRSFIFSCSNGKCVYCGAQAEEIDHIIPRSNGGTNSAYNLVASCRACNQMKSNLTLKAFGKLVGKDFSHLEHKKLPKDAAIVQLTRNYMIKEVTKLVSDTTLHDAWLTKYNRDSLGLPKQHYYDALSVGEIPSKLNFLTDKILQISAKGRGSRQMCSMDKYGFPRTKPKGSKLVKGFQTGDIVKAIVPKGLKQGIYLGRVIIKSSGAFKIAYNNCIVDGIRYKYCRFIQRGDGYSYNYKRD

SEQ ID NO: 10933 - protein, 420 aa, unidentified
  REGION 1..420: note = Human gut metagenome
MQYVYVLSKHGEPMMPCSPGKARLLLKQQKACVVRRTPFTIKLLYGSAGYKQPITLGVDAGSKHVGLSASTEKRELYREEFTPRNDVVELLSTRRQNRRSRRNRKTRYRAPRFDNRVHSKHKGWLAPSVEVKIQEHITIIKRICKILPISLVRVETAEFDTQRLKAMLAGKPLPVGTDYRLGEMYDEYNVRQYVLKRDNYTCQCCGAHTTAKKLVKLHVHHLESRKTGGNAPSNLVTLCTTCHKNLHKGKVTLDGKERGKPLRDAAFMGIMRKTLMARLKEELPIPVQGTYGYITKMRREQNDIKKGHTNDARCISKHPLAEPCSVCYRTKAIRHHNRQTHKANFSKKGIRKRSQMPYLVEGYRLWDKVLYKEQECFVSGRRSSGSFTLKKLDGTSVSKGVTFKKLRLLEPATNYLIERM

SEQ ID NO: 10934 - protein, 498 aa, Moorena sp.
MAVVYVLSAGGEPLMPTTRCGHVRILLKEKKARVVERNPFTIQLAYETEGVTQHLYLGIDPGRTNIGAAVVSEDGECMFTAQLTTRNKDVPKLMKARKQYRMAHRRLKRRCKRQRRAKAAGTISPQKEIQRLLPGCEEPIICKGIQNKEARFNNRTRPAGWLTPTANHLLQTHINLVKRLQKFLPITDVVLEANRFAFMAMENPRIQRWQYQRGPLFCKGSVEEAVYAAQDGHCLFCEKGIDHYHHIVPRRKNGSETLENRVGLCEEHHRLVHTEDAWTKRLAAKKAGMNKKYHALSVLNQIIPSLTERLAELFPQHAFVTTGQDTYYFREDHDIPKDHYLDAYCIACSVLSNAQKVSPPKREPYDIRQFRRHDRQACHKANITRKYYDADGKLVAANRHKAMEQKSDSLVEYRENHSEVEVSQLIVKDHFPQYKEMSRPMPGSLLVNNGGKLFALMRSDGKHNGKADYFVDTQGIKHLAKRCILLQNNQGIIFAGIG

SEQ ID NO: 10935 - protein, 453 aa, Lactobacillus sp.; identical to SEQ ID NO: 4050

SEQ ID NO: 10936 - protein, 418 aa, unidentified
  REGION 1..418: note = Human gut metagenome
MVYVLDAQGNPLMPTSRHGKVRRLLKEGKAKVIKRCPFVIQLLYNSTKYVQNISLGIDAGSKYIGASASTQTKVMYEAEIELRNDIVNLLSSRKECRRARRYRKTRYRKPRFNNRVSSKKKGWLAPSVKQKVQTHLTVIDNICHILPIKNIIVEVASFDTQKLKNPNISNTEYQHGEQEGFWNVREYVLFRDNHTCQCCKGKSKDQILNVHHIKSRKTGGNSPSNLVTLCKSCHRDYHKGLIKLPNTVCSGKSFRDATFMNVMKKTLILELKKKYSSVQETYGYITKRVRISHNLPKGHYIDARCISGNPNAQSLGYYYFQKKVRCHNRKIHKQKIYKGGLRKNNQAPYFVKGFRLFDKVKYKGEEYFVFGRRNSGYFDIRNLTGIKVNNGSINYKNLLFVSTKTSFLTERRKICGAL

SEQ ID NO: 10937 - protein, 326 aa, unidentified
  REGION 1..326: note = Human oral metagenome
MDRRRAFRKNRRQRKTRYRKPRFLNRANSTKKDRLPPSVRSKVQSHIDEIEFCKKILPISKIVLEVSQFDTHLMKNPELIDEKVKHWGYQEGFDYGYSSRREAVLHRDNYTCQCCGKKHTRLEVHHIIFRSLGGTDDERNLITLCEKCHKAIHDGILVLTKKPKKLNLKYATQMSIIRSQLLKIYPYAIETFGFVTKTNRENLNLSKQHFIDACVIASAGKEFKQSSWLFKKRRVARQNRQLCKGIRGEIKLPIGKIFGFKRFDKVKYLGEVCFIKSRRNGGFFTLMDVDNNTLDFRDRGGRGTPSYKLLERLNMQRSILCVGQII

SEQ ID NO: 10938 - protein, 477 aa, unidentified; identical to SEQ ID NO: 5307
  REGION 1..477: note = Human gut metagenome

SEQ ID NO: 10939 - protein, 481 aa, unidentified
  REGION 1..481: note = Human gut metagenome
MWTTVLRGEKPYGRSSALPVRECVSITKKRRHRMVAVLSKTGIRLMPTSSYRARKLLAKKKAVICGCRPFTIRLTERETGDVQPVELAVDTGYFHVGNSLKTAKHELAAVEIRTLMDEKQRYDDRRRHRRMRRSRLRYRAPRFDNRRRPEGWLAPSIQGRMEQNLAFLRRVLSVVPVTRIVMEMGQFDTQVLKAVEEGRPLPEGADYQQGERYGIATLREAVFTRDNYTCQCCEKTIHDGVILHVHHIVYRSQGGTNRMGNLITVCEKCHTPKNHKPGGKLYKWKPTVKSFKGATFMTAVRWIVYRSVTESFPDVDVRITYGAKTKLQRRTLDITKSHVNDAYVMGDFHPKHRARPVILQKKRRNNRILEKFYDAKYIDTRDGSKKTGQQLFNGRTNRNHNTDTENLRPYRGTKLSKGKRAIRTTRYKIQPHDILVYQGQEMEASGCHNKGTRVMTTAKKSLPIGKVRVRRYSGGYYAVAE

SEQ ID NO: 10940 - protein, 431 aa, unidentified; identical to SEQ ID NO: 6299
  REGION 1..431: note = Human gut metagenome

SEQ ID NO: 10941 - protein, 449 aa, Moorena sp.
MSVFVLDARKRPLMPCSEKRARLLLLRGRARVVRRYPFTIRLVDRRVENSVLQPVEIKLDPGSKTTGLAVVRAEGGNKPTAVLFLAELTHRGRKISEKLTARRAFRRRRRGNLRYRPARFDNRTRSEGWLAPSLRHRVETVSSWVARLRRLVPVTGLAMELVRFDMQAMENPDIEGAEYQRGTLAGYELRSYLLAKWDHACAYCGAVEVPLNLDHIVPRARGGSNRVSNLACACISCNEEKGARPVEEFLAGRPKILARVKAHAKRPLKDAAAVNATRWALFETLRATGLPVECGSGGRTKWNRARLGVPKTHVLDAACVGVVEALSDWAVPALTIKATGRGAYQRTRLDAYGFPRGYLTRSKRIRGFQTGDMVRATVATGKKAGVHIGRVAVRATGSFNIQTPTGVVQGINAKHCTILSRADGYSYTQQKGAISSPCLKAGVSMAQTR

SEQ ID NO: 10942 - protein, 512 aa, unidentified
  REGION 1..512: note = Human gut metagenome
MSTVYVLNKDGKPLMPTTRCGHVRRLLKEQKARAVASKPFTIQLLYETDDVVQPLYLGIDPGRTNIGVAVVKTDGTTVFTAHLETRNKEIPKLMKKRKDSRRARRTNGRRCRRQRRAKANGTISKKCVKQNTAQNGSVSKRAKDIGVIKRHLPGCEKEVLCIGIKNKEAKFSNCVKPEGWLTPTANQLLQTHINLVKKIRKFLPISDVVLEINKFAFMQLDNPNIQKWQYQQGPLYQKASLKEAVSEMQEHHCLFCKKPIAHYHHVVPQSENGSDTIGNIVGLCTKHHDLVHKDTSWQEKLAKKKTGFNKRYGALSVLNQIIPALTKELSSLFPKHFFATNGKSTYDYRAAHGVSKDHWLDAYCIAGSVLPNDAYDSNINNRVPYELKQFRRHDRRALHKENMSRVYTLNGKKVATNRHKAVEQTTDSLEEFCQNHPDDICKLKVKEHHPEYRNPKRNFPGCVFLVGKHTHVMQGTSGSHNGKADGYYDTNGNSYSSGKCKFVAKNEGIVFT

SEQ ID NO: 10943 - protein, 465 aa, unidentified
  REGION 1..465: note = Human gut metagenome
MSTCVCVLSNNGERLMPTIRLGKVRHLLKDGKAKIIKHHPFTIQLLYDSETNIQPIEICEDVGYNYIGISVKSQSHEYVSAQYDTLQDEKSCHDACRRMRRTRRNRLRYRQKRFDNRKRDKGWLAPSLKHKKELNVNVIKMYCEVVPITHATVEVGSFDTMLVKAIEEGRATPEGADYQKGPRYNLATLREAVFYRDNYTCQVCGREASEGAILHVHHMFYWKGRHDNSLSELITVCEKCHTPANHQKGGKLYGFGEDIKFANLSGAAFMNTVRWQIVNELYAAFGKPFVTFTYGAMTKEKRIALHLEKSHNNDAYAMGEFHPNCRCTFEHYEKVRRNNRILEKFYDSRYIDIRTGEIATGKELFNGRINRSHKKDSENLHKYRGKRIRKGYRALRRKKVALNPGDLASLNGEILTVHGTHTKKNGSVNVEFKTPSKSGKKSTSLKKLKIIKTISPMRSAWDKVS

SEQ ID NO: 10944 - protein, 431 aa, unidentified
  REGION 1..431: note = Human gut metagenome
MPNKVYVINKHGRPLMPCSPAKARHLLDAGKAKVKKRTPFTIQLVYGSSGYTQEVILGVDAGSKTIGMSASTTKEELFSAEVKPRNDVVDLLSTRREFRRERRNRKTRYRKPRFDNRVRSKHKGWLAPSVEVKIQEHITAIKRVCRILPVSKVVVETAEFDLQLLKAIEEGKPVPQGEDYQKGEMYGHYNVRQYVLWRDNYTCQCCGAHATKKKEVRLHVHHLESRKVGGDAPDNQVTLCESCHEKLHKGLIAEKDFKKRKRRSTRDATFMGIMRKTLMQRLCSELPIPVIETRGYITKATREKLLVLPKSHTNDALAIAQGKQGFNVGYLPGIAQIGKIYTIRPVRHHNRQLHKATILKGGIRKSNQAEKYVFGYRLFDKVQFNGQDCFIWGRRTTGIFTIKMINGKMIKDGISFKKLKLVEKSTNYLIV

SEQ ID NO: 10945 - protein, 418 aa, unidentified; identical to SEQ ID NO: 2710
  REGION 1..418: note = Human gut metagenome

SEQ ID NO: 10946 - protein, 393 aa, unidentified
  REGION 1..393: note = Human gut metagenome
MVYVQDIDGKPMMPTTRHGKVRRLLKDKKAVVVNLCPFTIRLTYVTSDYKQEIVLGVDAGTKHVGLSATTKSKELYSSEVILRNDIVDLLSTRRELRRARRNRLRYRKPRFNNRIKSKRPGWTAPSVKYKIDAHIRVIDNVCSILPISRIVIEVAQFDTQKIKNPEILGKEYQEGDQLGFWNTREYVLARDGHKCQYCKGKSKDKILNVHHLESRKTGGDSPSNLITLCETCHKEYHKGNIDLKIKRGSSLRDAAVMGIMKWKLYEELRSRYDRVSMTFGYITKHNRIKYGIEKSHTSDAFVISKNINAKRIGCQYLKRLIRRHNRQIHKMKILKGGKKKNNQAPFEVFGFRLFDKVLYNNKILFVYGRRKSGSFNIRDFNGENSKDVSRKKV

SEQ ID NO: 10947 - protein, 456 aa, Halomonas sp.
MAVFVLGKNKQPLMPCSEKRARLLLERGRAAVVNLTPFVIRLRDRCLSDCTLQPTLLAADPGSKETGLALMRLENHATEEKAPATRHVLCLFQLVHRGFQIRQALEQRAGFRRRRRSKNLRHRKPRFDNRTRKKGWLPPSLQHRVDTTMAWVDKLCRWAPVTHLSMELVRFDLQKMENPEISGVEYQQGTLLGYEVREYLLEKWGRECTYCGTGDTPLEIEHVIAKTRDGSSRVSNLTVACHDCNIAKDNQSLADFFATDKGLKRRLKANGLSAEMRLARVQRQLKLPLRDATAVNATRWALSGAMKSTGLPVAGGSGGRTKYNRQRLGIPKTHALDAACVGKFDTLKGWRVPTQVIKAMGRGSYKRTRLDKYGFPRGYLMRQKQVQGFQTGDRVRAIVPAGKKAGTHTGRVAIRKTGSFNIQTEQGAVQGISWPYCTLLQRGDGYGYHQIPTTQH

SEQ ID NO: 10948 - protein, 414 aa, unidentified; identical to SEQ ID NO: 2588
  REGION 1..414: note = Human gut metagenome

SEQ ID NO: 10949 - protein, 270 aa, unidentified
  REGION 1..270: note = Human gut metagenome
LQLLKAIADGKPVPQGEDYQQGEMYGHYNVRQYVLWRDGYTCQCCGAHATKKKEVRLHVHHLESRKVGGDAPDNQVTLCESCHEKLHKGLIAEKDFKKRKRKSTRDATFMGIMRKTLMQRLCSELPIPVIETRGYITKATREKLLVLPKSHTNDALAIAQGKQGFNVGYLPEIAQIDKIYTIRPVRHHNRQLYKATILKGGIRKSNQTKKYVFGYRLFDKVQFNEQDCFIWGRRTTGIFTIKTINGKMIKDGISFKKLKLAEKSTSYLIA

SEQ ID NO: 10950 - protein, 413 aa, unidentified
  REGION 1..413: note = metagenome
MTNYAFVLDANNKQLTPTKEQKAWFLIRKKRATLVSKYPMVIQLKKKIPDKKICKDEVRCGIDDGGLHVGIALVQKCQTRNKVVFKGAIEQRNDVKHLIDDRRGYRRYHRYHKRYRPARFNNRNSSKREGRITPSILQKRQATIRVVNQLNKWINITNYWLEDVAIDIRALTDGYKPYRWQYQKTNRLDENIRKAVILRDGCKCMECEKSNCRLEVHHIKPRRLKGSSTLDNLITLCTKCHQKTESVEELYMDRYFALLKSSDNKNLNYAQHVMIGKKWLREQLSNLGMLHLTNGGDTANKRIDWDITKSHSNDAICITDLRPDTCEIKEWVIKPMRKQSKAKTDNVLGIKHRDLVEYTFRNGETHRGYVTALYPEQNAINFQSPTKHCKKVNARKCKVLWKYSKIYWLDNVG

SEQ ID NO: 10951 - protein, 410 aa, Bacillus sp.
MTHCFVLDAQGNKLSPTKENRAWYLIRKQKATLKSKFPMVIQLEREIPESAIDSSCIQLGIDDGSKFVGIALVQECKTKNKPVFKGTIELRADVKEKIAIRRGYRRYRRQHKKYRPARFDNRSSSKRDGRIPPSIKQKKDSILRVVKQLQKWIRMDLIFLEDVLIDIRALEKGFKPYKWEYQKSNRLDENIRKAVVLRDHNTCQNCGLTNIRMEVHHITPRRMNGSDSIHNLISLCSTCHGKVTGNELNHCERFYQKVNGRKVSYRDAMHVMQGKTYLQDELKKIAPLSLTTGGDTANKRIDWGIEKTHANDAIVICHSNVWPEQCKIKNWAIKPMRKHSRKKIESVNGYHHRDFVKYTKRNGEKYLAYITALYPEKSQCNMTTIKGKILKRYGLFRLTLLWRFNKVYWL

SEQ ID NO: 10952 - protein, 416 aa, Parasutterella sp.; identical to SEQ ID NO: 10114

SEQ ID NO: 10953 - protein, 464 aa, unidentified
  REGION 1..464: note = Human gut metagenome
MRKQKKRRHHMVAVISSSGIPLMPTSNYKVRKLLRCGRAKIHRYQPFTIQLLDRENGETQPMELCMDTGYLHIGLSVKSEKHEYLAYQIDTLDDEKKNHQDQLMYRRTRRNRKRYRKPRFCNRLKSKDWIAPSLKHKLEIHEVWIKKICAVMPVTSITLEMGNFDTQVLKAMQEGRPLPEGKDYQQGERYGIATLREAVFFRDNYTCQCCKRTIKDHAILHVHHIVYRSQGGTNRMSNLATVCERCHTPANHQPGGRLWNWRPKLPAFQGAAYMNTVRWMFCENVKQIYPEMQVQNTYGACTKERRRDLSITKSHVNDAYVMGKFQPKHRSEPELFKKRHRNNRCLEKFYDAKYTDSRTGKKTAGKELSNGRISRNHKKDSENLHPYRQKKLSIGRRSIRKQHYKIQPGDIVIVDQKKQKSSGCHNKGSRVMVAGKSYSIKEITVFKYCGGYLHDPINRKEAAG

SEQ ID NO: 10954 - protein, 311 aa, unidentified
  REGION 1..311: note = Human gut metagenome
RTKRKGWLAPSVENRINAHLSRIGAILRLLPVTKITVETASFDTQLLKNPDISGKEYQEGEQLGFWNVREYVLFRDGHACQHCHGRSKDPVLNVHHLESRRTGGDSPGNLLTLCETCHKALHRREIKLKTKRGQSFRAEAFMGIMRWEVLNRLKASHPELEVHNTYGYRTKHTRIVNGIDKSHCADAFCIAGNLGAKRLGEFFFQKQTRRNNRQIHKLSILKHGLRKRNQAPFEVKGFRLFDKVVCQGEEGFIFGRRSSGSFDVRKLDGTRISAGISYKKLRLLEKRRTYLKEIRKEEALPPLPEGRSLRA

SEQ ID NO: 10955 - protein, 401 aa, Sharpea sp.; identical to SEQ ID NO: 3798

SEQ ID NO: 10956 - protein, 442 aa, Sutterella sp.; identical to SEQ ID NO: 3234

SEQ ID NO: 10957 - protein, 456 aa, unidentified
  REGION 1..456: note = Human gut metagenome
MSTCVCVLSNSGERLMPTFRLGKVRRLLKDGKAKIVKHHPFTIQLLYDSKTNTQPIEICEDVGYNYIGISVKSQSHEYVSAQYDTLQDEKACHDSCRKLRRTRRNRLRYRKPRFDNRKRGEGWLAPSLRHKKELNVNVVKMYCAVMPITHATVEVGSFDTMLVKAIQEGKAIPEGADYQKGPRYNLATLREAVFYRDNYVCKVCGRKATEGAILHVHHMFYWKGRHGNSLSELITVCEKCHTPANHQKGGKLYGFGKDKKFANLSGAAFMNAVRWQIVDALHATYGKEFVTITYGAMTKEKRIILGIEKTHNNDAYAMGDYHPVHRCVFRHYQKRCRNNRVLEKFYDATYIDTRTGNKAKGKELFNGRISRNHKKDSEDLHKYRSKKVSKGRRSIRRQRYAIQPYDTVRLEGKTYITSGCHNKGTRLLIPANGKSKSVAISKVQVVCHAGAWIQII

SEQ ID NO: 10958 - protein, 456 aa, unidentified
  REGION 1..456: note = Human gut metagenome
MSTCVCVLSNSGERLMPTFRLGKVRRLLKDGKAKIVKHHPFTIQLLYDSKTNTQPIEICEDVGYNYIGISVKSKSHEYVSAQYDTLQDEKACHDSCRKLRRTRRNRLRYRKPRFDNRKRSEGWLAPSLEHKKQLNIRLIERYVSVIPITRATVEVGSFDTMLLQAIQKGESKPEGVDYQKGPRYNLATLREAVFYRDNYSCQVCGRKIADGAILHMHHMFYWKGRHGYQLDELVTACEKCHTPANHQKGGKLFGFGEDKEFANLSGAAFMNAVRWQIVNALYATYGKEFVTITYGAMTKEKRIALQLEKTHSNDAYAMGDYYLAHRCVFRHYQKRRRNNRVLEKFYDATYIDARTGNKAKGKELFNGRINRNHKKDSENFHKYRSKKVSKGRRSIRRQRYAIQPYDTVRLEGKTYITSGCHNKGTRLLIPANGKSKSVAISKVQVVCHAGAWIQII

SEQ ID NO: 10959 - protein, 424 aa, Microcoleus sp.
MSNQILVLDTNRKPLTPCTPGMARSLLKVRKATVFRRYPFTIIITKEVQNTPQSLTLKLDPGSKVTGIALLKNDKLIWAAELTHRGSAIKHALLSRRQLRRARRNRKTRYRKARFLNRTRHEGWLAPSLQHRVDTIQTWVNRISRYAPVGSLVQELVRFDLQLMQNPEISGVEYQQGELQGYEVKEYLLNKFNRQCVYCGAKDTKLEVEHIHPRSKGGSDRVSNLALACHPCNQWKGNQDIKDFLYGKVDILKRVLAQSKVPLKDAAVVNATRWALFNALRTTGLPVSTGSGGKTKFNRTRLGLPKTHWLDAACVGDTPTLEVLTLQPLLIKSAGHGTRQMCGTNKFGFPIRHRTRVQIHKGFQTGDLVKATVTSGKKIGFYVGRVLCRATGSFDIATVTGRVTGISHKYCTPIHKKDGYNYSY

SEQ ID NO: 10960 - protein, 419 aa, unidentified
  REGION 1..419: note = Human gut metagenome
MIYIRSKDGKALMPSERGGRIGYLLRHAKAHVVSRVPFTVQLDYESTTYTQEVSLGVDAGSKHIGVSASSEKKELLVAQVELRNDVVNLLSTRRELRRTRRNRKTRYRKARFDNRKKKDDWLAPSVEQKVDSHLKVIRLVHGLLPITNTTIEVAQFDAQKIKRPDIKGEEYQQGEQMCFWNVREYVFARDGHRCVHCKGKSKDPILNVHHLESRKTGGNSPSNLVTLCETCHKAYHRGEFELKIKRGNSLRDAAVMNNMRWAVYKRANEEFGNVHLTYGYVTKHTRIENGIAKTHAADAFCIAKNINAMRLRTFYLCRCVPRHSRALHVANPKKGGIRRSTIASHKIGKSRFQRFDMVRWKGKESFIFGSTNGRPVLRDIEGYKMHENASVNIKTIKFLKRLRNNILVEEKDFRKLNML

SEQ ID NO: 10961 - protein, 294 aa, unidentified
  REGION 1..294: note = Human gut metagenome
AHLSRIEAVLRLLPVTKITVETASFDMQLLKNPDISGKEYQEGEQLGFWNIREYVLCRDGHVCQHCYGRSKDPVLNVHHLESRRTGGDSPGNLITLCETCHKALHRGEITLKAKRGQSFRAEAFMGIMRWEVLNRLKASHPELEVNNTYGYRTKHARIANDIAKSHCADAFCIAGNLGAERLGEFFFQKQTRRNNRQIHKLSILKGGIRKRNQAPFEVNGFRLFDKVACKGEEGFIFGRRSSGYFDVRKLDGTCISAGISYKKLHLLEKRRTYLTEIRKEEALPPPPEGRGLRA

SEQ ID NO: 10962 - protein, 424 aa, Tolypothrix sp.; identical to SEQ ID NO: 5891

SEQ ID NO: 10963 - protein, 411 aa, unidentified
  REGION 1..411: note = Anaerobic digester metagenome
LVYVISIDGKPLMPCKPVIARLLLKQHKAKVIKKCPFTIKLLYKTKTEYTQPLILGIDTGSSKIGSAVVDGNNNVLYLSQIEVRNDITDKMKQRAKYRRNRRNRKTRYRKPRWLNRKNSIKKDRFSPTMISKINSHLKEIKFVKSILPITNIILETATFDPHALKNPAVLYNKWLYQKGINYGFANTKAYVLNRDNYTCQYCKGKSKDSKLEVHHIIFRCYGGSDESENLITLCKTCHDKLHAEKINLKRNGKVKGQLKHATQMNSIRQQLLRLLPEAVETFGFITKEHRQLMELQKEHYYDAVAIACLKNIENTGLIDVNFKSDFQQTKGVRSEQRIITGKIRGFRKFDKVKYQGKEYFIKGRMSTGYAILMDIAGNKIDLKPIPKFDKMERIQARKSWIISQETIQNIY

SEQ ID NO: 10964 - protein, 442 aa, unidentified; identical to SEQ ID NO: 2637
  REGION 1..442: note = Human gut metagenome

SEQ ID NO: 10965 - protein, 429 aa, unidentified
  REGION 1..429: note = Human gut metagenome
RVFVLNKRGQPLMPCSPAKARLLLKEKKAIVKRRTPFTIQLTIATGEAKQPVSLGVDSGYKHIGLSATTEKAELYASQVELRQDITDLLSARLALRRSRRSRKTRYRAPRFNNRVANKREGWLAPSVENRIAAHVSRVETVIRLLPVTAITVETAAFDTQLLKNPDIAGVAYQQGDQIGFWNVREYVLFRDGHVCQHCRGKSKDPILNVHHIESRRTGGDAPNNLITLCETCHRAFHRGEIELKVKRGKSFKAETFMGIMRRTLLERLKKAHPELNVRNTYGYLTKHKRISHGIAKSHCADAYCIADNLGAKRLEGFFFQKQTRKHNRQIHKLSILKGGLRKKNQAPYEVKGFRLFDKVICKGEEAFIFGRRTSGSFDVRRLDGTRISAGINYKKLRLLEPRTTYLAEFRKEAAHPPLHECRGFRAEFL

SEQ ID NO: 10966 - protein, 427 aa, Moorena sp.; identical to SEQ ID NO: 3577

SEQ ID NO: 10967 - protein, 414 aa, unidentified
  REGION 1..414: note = Human gut metagenome
MVYVINKQGQALMPTERFGKVRRLLKNSLAHVVCRIPFTIQLDYDTTDYTQPVSLGVDAGSKHIGISVTTSEKELYAADVELRNDIVDKLSTRRELRRTRRSRLRYRKARFNNRVSSKRKGWLAPSVENKIQTHLTVVEKIHKFLPITNIVVETAAFDIQKINNPSISGSEYQQGEQLDFFNVREYVLFRDNHTCQHCKGKSKDEVLNVHHIESRKTGGNSPNNLITLCETCHKAYHRGEFKLNIKRGKSFRDSAFMGIMRWSFYDRLKNIYPDVSMTFGYITKNTRTTNNLPKEHYVDARCISGNPVAKPLGYYFYQKKVRCQNRQIHKANFLKGGRKKLNQAPFLVKGFRLFDLVEYQKDLYYIFGRRDSGFFDIRKLDGTKVNKGSINCKQIRLIDTRKSILIEKRTQVNL

SEQ ID NO: 10968 - protein, 450 aa, Moorena sp.; identical to SEQ ID NO: 2935

SEQ ID NO: 10969 - protein, 420 aa, Petrotoga sp.; identical to SEQ ID NO: 5114

SEQ ID NO: 10970 - protein, 532 aa, unidentified
  REGION 1..532: note = Human gut metagenome
MSTVYVLNKDGKPLMPTTRGGHVRHLLKEQKARVVQSNPFTIQLLYETNDAVQPLYLGIDPGRTNIGVAVVKANGTAVFTAHLKSRNKEIPKLMQDRKRARRARRTNGRRHRRQRRAKANGTISKKCVKQTTTQNGSVSKRAKEIGIIKRHLPGCEKDVLCIGIKNKEAKYTNRERPEGWLTPTANQLLQTHVNLVKKVQKLLPISDVVLEVNKFAFMRLDNPDIQKWQYQQGPLYKKESLESAVSEMQEHHCLFCKKPIDHYHHVVPKSENGSNTIANIVGLCAEHHNLVHKDVAWQEKLAEEKTGLNKKYGALSVLNQIIPALTNKLSVLFPRHFFVTAGKSTHDYRAAHGVSKDHWLDAYCIACSVLPSNVCDSNINNHVPYELKQFRRHDRRVLHKANMSRVYTLNGKAVATNRHKAIKQTTDSLEEFRQNYPDDVYKLKVKEHHPAYRNLNRNYPGSVFLVGKQAHVMQGIASSKDGKTTKYNDTNATTITAGKCKFVAKNSGILFVQCKFRKALSDGTTKKLQYPV

SEQ ID NO: 10971 - protein, 465 aa, unidentified; identical to SEQ ID NO: 3603
  REGION 1..465: note = Human gut metagenome

SEQ ID NO: 10972 - protein, 459 aa, Clostridium sp.
MVFVLDRKKKPLMPCTEKRARKLLAEGRAVVHRLVPFVIRLKDRATGQAILQPLKLKIDPGYEVTGISVVRVEEGKEVVIFFAEVHHRTDVSEKLLSRRAHRRSRRSRKTRYRAPRFDNRKRPGGWLPPSAETRVDQVLSVVRKLCRWMPITEVVVESAKFDTQKLQNPEISGVKYQHGELFGYELREYLLEKFGRRCAYCGKENVPLEIDHVVPKSRGGTDRVSNLTLACRECNRIKGNRLPQEWLEELKKSRKVVDRKRAENIPKVLAQLKEPLKGAAFMNAARYVLVERLKTLGLPIFTATTAQTKYNRAKFGLPKTHYFDACCVGEVPNRLEVATGYVQVTLAVRRGTRQMANSDRYGFPRGHRSRRKFYFGFMTGDLVVAEIPGGKYAGKHTGFVAVRQSGYFDLKDLSGRRVCQGISWRHFRLIQRFDGWRYEKLKIAALSSPCLKAGASSAA

SEQ ID NO: 10973 - protein, 414 aa, Parasutterella sp.; identical to SEQ ID NO: 3876

SEQ ID NO: 10974 - protein, 247 aa, unidentified
  REGION 1..247: note = Human gut metagenome
MPNKVYVINKHGRPLMPCSPAKARHLLDAGKAKVKKRTPFTIQLVYGSSGYTQEVILGVDAGSKTIGVSALTKKEELFAANVIPRNDVVDLLSTRREFRRVRRNRKTRYRKPRFDNRVRSKHKEWLAPSVEVKIQEHITSIKRVCRILPVSKVVIETAEFDLQLLKAIADGKSVPQGEDYQKGEMYGHYNVRQYVLWRDNYTCQCCGAHATKKKEVRLHVHHLESRKVLQVSHQLTADSFLTAKPRL

SEQ ID NO: 10975 - protein, 437 aa, unidentified
  REGION 1..437: note = Permafrost metagenome
MVYVIGLNGQALMPTTRYAKIRILLKQKKAKVIQVKPFTVQLLYSTSEYVQPIRLGIDSGYLNIGYSAITESKELLSGEVKLLKGMSEHIKEKAMYRKQKRSRLRYRKPRFDNRKRSDGWLAPSVQHKYDSHIRFIDKLKKILPISSIIIEVANFDTQLLKNALIEGAEYQTGEQLGFYNLREYIFHRDNHKCQNPKCKNKDKNPILQVHHIGFWKNDRSNRPGNLLTLCTKCHTPKEHKEKGFLYGWKPKVKSLKESTFMSMVRWRLVNTFGYEHTYGYETKSKRIALGLEKTHYNDAFCIAGGNRQSRITPLSYEQVKRNNRSLEKFYDAKVIDTRTQEKVSGAELFNGRRTRNKNLNSENLRKYRGEKVSKGKRTIRTKRYFYQPNDLVKYQNRVYTVKGTHNKGARVMLKENGKSIKVEDLKPYKFRKGIVTS

SEQ ID NO: 10976 - protein, 481 aa, unidentified
  REGION 1..481: note = Marine metagenome
MDIPEGRRGEAPRYKARKGTYFKEFFMAVWVIDKHKKSLMPSSEKRARLLLDRGRAVVHRRVPFTIRLKDRNSESCETQPVRIKIDPGSKTTGIALVRESTDCGGSQHVLSLIDVQHRGKAIRDALTQRRGFRRRRRTQNLRHRPVRFDNRTKPKGWLAPSLQHRVDTTMAWVDRIRRCVPVASVDQERVRFDTQAMEFPGISDIQYQQGTLMGTEVREYLLHRHSHTCAYCAGGTGDPVLEIEHVVPRSRGGSDRVANLVIACSTCNDEKGNQTAGEWTASIQGQSALANGIRRRAERIHAGQRPALSDAAAVNSTRWALYNRLRGTGLPVYASTGGRTKWNRQQLGVPKTHALDAACVGSVKTLEHWCAPTLSVKATGRGSYQRTRLTRYGFPRGYLMRRKQVRGFQTGDFVQAEVPAGKKAGVHQGRVAVRVSGSFNLQTPQGVVQGISYRHCRRLQRADGYGYSFTPKPEEKRAEAR

SEQ ID NO: 10977 - protein, 542 aa, unidentified
  REGION 1..542: note = Human gut metagenome
MSRLTPDAEVPFFCETALQQKTKEASELTALEELLSKTEYIYVIGTDGRPQMPTKRKRHVLKLLNTGKARIAEKVPFTIQLKYDNIPVLQPVILAADPGRTNIGVAALSPFGDLMFAAVIETRNKEIKKLMADRKAHRQASRRGERKARQRLAKKYGTMIKAGMIMRKLPQYAADKFVTCNVIRNTEARFCNRKRCSDWLTPTVNHLVQTHLNVIKKISRYLPVTDIAIEVNRFAFMQMENPNASGVDFQNGPLRGFDDVKAAIREQQNGKCLMCKNDIEHFHHMVPLSKGGSDTIQNQVGLCPKCHAKVHTDTSFRKKLEDKKSGLLKKYGALNALNQAIPFICKDLLAEYGKEHVHFCTGKETSLIRTSLGYEKTKDNQMHEVDAYCIGLASLELEDIKSQSFVNTYKIKQFRRQDRSIIHHQTERSYYLDEQKIATNRKPRFEQTGNALSDWYKKQVKACDKAKADKMLSTLKVKKSSRSYNSEGRLMPGAVFSYNGQRHVMSGQLTGGRYLRAYGDTKTNYPVSKCNILRSNEGLVFI

SEQ ID NO: 10978 - protein, 413 aa, Moorena sp.
MTKNQKDYSFVKDKKGRKLDPCLCNKAWILIRKKKARLLQKYPMAIQLNYEVRPDEETEIICGIDDGSKHVGIALVQKCKTYNKPIFKGTIELRQDVKSLMETRKGYRRYHRNHKRYRKVRFDNRSASKRKGRVAPSILQKKQSTIRIINQLLKFVNIKEFHLEDVVVDIRALSEGKKLYGRQYQESNRLDENIRKAVILRDNCECMECEKSNCMLEVHHIVPRRLKGSNAISNLITLCSGCHQKTEGKEELFIDKYYKTIDGKNIRFDYAQHVMQGKTYLRQELSKLGELLLTTGGDTANKRIDWNIYKTHSNDAICTTDLVVNMNECNIKDWIIKPMRRKSKANIAELNGFKHRDLIKYTKKNGEYYIGYITALYPNKNQCNITTMENKILKRYGIKSCKLLWRFNKIYWF

SEQ ID NO: 10979 - protein, 431 aa, Methylocaldum sp.
VVKTDESSVCFRHPQEAAHALHTVEGKAAVFRRQPFTIILNYDVAPSPVRVEFKADPGSRTTGLALVAEFAKRGRTVIFAANLHHRGQAIRANLESRRSRRRGRRGRKTRYRKARFLNRVRPAGWLPPSVQSRVDNVAVWYGRLNKLSPLSSAAVETVRFDMQALVNPEISGIEYQQGELAGYELREFLLEKWGRRCAYCGKENVPLEIEHIHPKSRGGSDRVSNLTLACRRCNEAKGNRPVEAFLADRPEVLKRILAQAKAPLKDAAAVNSTRFSIGNVLKAWGLPVTFWSGGRTKLNRTKQGYQKDHWIDAACVGETGAAVAIPEGMRPLQIKATGRGIRQVVRTDKHGFPRNKAGRCKRVNGFQTGDWVRLVQPKGKYTGEYFGRLAGVRTDGRFDIKPNGKPVTANWRNFSLIQRGDGYDYAFERAA

SEQ ID NO: 10980 - protein, 512 aa, unidentified
  REGION 1..512: note = Human gut metagenome
MSTVYVLNKDGKPLMPTTRGGHVRHLLKEQKARVVRTNPFTIQLLYETDNLVQPLYLGIDPGRTNIGVAVVKTDGTAVFTAHLETRNKEIPKLMQGRKKARRARRTNGRRCRRQRRAKANGTISKKCVKQATAQNGSVSKRANEIGIIKRHLPGCEKEVLCIGIKNKEAKFSNRTRPEGWLTPTANQLLQTHINLVKKIQKFLPISDVVLEINKFAFMRLDNPNVQKWQYQQGPLYQKASLEEAVSEMQEHHCLFCKNTIDHYHHVVPQHKNGSNTIGNIVGLCAKHHDLVHKDTSWQEKLAKKKTGLNKRYGALSVLNQIIPALTKELSSLFPKHFFATNGKSTYDYRAAHGVSKDHWLDAYCIAGSVLPNDACDNNINNRVPYELKQFRRHDRRALHKENMSRVYTLNGKKVATNRHKAVEQATDSLEEFCQNHPDDVCKLKVKEHHPEYRNPKRNFPGCVFLVGKHTHVMQGTSGSHNGKADGYYDTNGNSYSSGKCKFVVKNEGIVFT

SEQ ID NO: 10981 - protein, 441 aa, Sulfobacillus sp.; identical to SEQ ID NO: 4231

SEQ ID NO: 10982 - protein, 420 aa, unidentified; identical to SEQ ID NO: 6680
  REGION 1..420: note = Human gut metagenome

SEQ ID NO: 10983 - protein, 512 aa, unidentified; identical to SEQ ID NO: 6775
  REGION 1..512: note = Human gut metagenome

SEQ ID NO: 10984 - protein, 413 aa, unidentified; identical to SEQ ID NO: 6529
  REGION 1..413: note = Human gut metagenome

SEQ ID NO: 10985 - protein, 457 aa, Scytonema sp.; identical to SEQ ID NO: 2728

SEQ ID NO: 10986 - protein, 442 aa, unidentified
  REGION 1..442: note = Human gut metagenome
LMPTFRLGKVRRLLKDGKAKIVKHHPFTIQLLYDGKTNTQPIEICEDVGYNYIGISVKSESHEYVSAQYDTLQDEKEHHDDCRKYRRTRRNRLRYRKPRFDNRKRGEGWLAPSLRHKKELNVNVVKMYCAVMPITHATVEVGSFDTMLVKAIQEGKAIPEGADYQKGPRYNLATLREAVFYRDNYVCKVCGRKATEGAILHVHHMFYWKGRHGNSLSELITVCEKCHTPANHQKSGKLYGFGENVKFADLSGAAFVNTVRWQIVNELYAAFGKDFVTVTYGAMTKEKRIALQLEKTHSNDAYAMGNCHPAHRCEFGHYQKRCRNNRVLEKFYDATYIDARTGNKAKGKELFNGRISRNHKKDSEDLHKYRCKKVSKGRRSIRRQRYAIQPYDTVRLESKTYITSGCHNKGTRLLIPANGKSKSVAISKVQVVCHAGAWIQII

SEQ ID NO: 10987 - protein, 420 aa, unidentified
  REGION 1..420: note = Human gut metagenome
MQYVYVLNKHGEPLMPCSPRKARLLLKQKKAYVIKRTPFTVKLLYGSAGYKQPVTLGVDAGSKHIGISATTEKYELYREEATPRNDVVDLLSARRAFRRSRRNRKTRYRAPRFDNRVHSKHEGWLAPSVEVKIREHITLIKRVCRILPITLVRVETAEFDTQRLKAMLEGKPLPVGTDYQLGEMYDEYNVRQYVLKRDNYTCQCCGAHPTKTKAVKLHVHHIETRRTGGNAPNNLITLCTVCHKALHAEKVTLDGKKRGKPLKDAAFMGIMRKTLMERLRKELKIPVQGTYGYITKYLREKYGILKSHTNDARCISKNPLAIPCDTCYYTKAVRHHNRQLHKATILKGGIRKANQAPYIVKGYRLWDKVSCNGTECFITGRRTSGYFALKKLDGTVISNSISYKKLRLLEVATNYITERK

SEQ ID NO: 10988 - protein, 415 aa, Bacillus sp.
MRVFVKNLRGEPLMPCSNRKARLLLKQGKATIIGYTPFTIQLLYATGETMQPVTIGVDSGAKYIGIAITTENKVLAKGTIELRQDVKENLTLRATLRRGRRQRKTRYRKARFLNRKKKEGWLPPSIQSRVDNQIHWIETFKSLLPSPKVIVEVGKFDAQKLKNPDIQGIEYQQGDAFGFWNARYYVFARDNYTCQICKKKGGILHTHHIIERCNGGSDMADNLVTVHEECHQKFHQGKLKHSFKKPKQYKETAFMNILRLQILKRLDCEITYGSYTTPKRKELGLSKTHVNDATAITNLKQLQEYHQSGEFCIQQFRKKKRSLHEATARKGRKTKNTSAKRNNKNTPHVNGIYLGDKVKVFGKVGFVTGFTGKMVYVQDIHGQYIQNPSKSYKQVNISDIERIHHNNNWLFLQVS

SEQ ID NO: 10989 - protein, 524 aa, unidentified
  REGION 1..524: note = Human gut metagenome
MEILRIDWKDICPTGQSGLPQKESFMRPVYVLDMNGKPLMPTCRFGKVRRMLKSGEAKVVDTLPFTIQLDRPTKTHVVQSVTLGCDPGRTNIGLAAVRSDGTDLYRSHCETRNKEIVDLMDTRRAARRASRRGERLARKRLAAKHETATTFPDGRKLPGYEKPIMLKDIINTEARFNNRVRPAGWLTPTATQILRTHLNLIKRISRILPISDIALEINKFAFMQLDEPDKNKWNIDFQHGPLYGTGGLKAAVRQLQNDTCLLCQENVIEHFHHLVPRSKRGDNTINNIAGLCQKCHEAVHKSADTAEKLSTLKKGQTKRYGGTAVLNQIIPKLVEELGKTYHEHLHLTYGWQTKEFRTKHKLEKTHDTDAYCIAAGTMQTVKPNIRTDVYEIKQFRRHNRANIHHQTERTYKLNGQTVAKNRRKRTDQKTDSLAEWFENTVKQYGQQKAEHLRAGLKVRKSTRYYNSKDRMMPGAVFQYEGNRYVVTGQLSGGQYYRAYGKGNQNFPAQKIRIISLNRGLVYVA

SEQ ID NO: 10990 - protein, 456 aa, unidentified
  REGION 1..456: note = Human gut metagenome
MSTCVCVLSNNGERLMPTIRLGKVRHLLKDGKAKIIKHHPFTIQLLYDSKTNTQPIEICEDVGYNYIGISVKSESHEYVSAQYDTLQDEKEHHDDCRKYRRTRRNRLRYRKPRFDNRKRSEGWLAPSLEHKKQLNIRLIERYVSVIPITHATVEVGSFDIMLLQAIQKGKSKPEGVDYQKGPRYNLATLREAVFYRDNYTCQVCGRKIADGAILHMHHMFYWKGRHGYQLDELVTACEKCHTPANHQKGGKLFGFGEDKEFANLSGAAFMNAVRWQIVDALHATYGKEFVTITYGAMTKEKRIILGIEKTHNNDAYAMGDYHPVHRCVFRHYQKRRRNNRVLEKFYDATYIDTRTGNKAKGKELFNGRISRNHKKNSEDLHKYRSKKVSKGRRSIRRQRYAIQPYDTVRLESKTYITSGCHNKGTRLLIPANGKSKSVAISKVQVVCHAGAWIQII

SEQ ID NO: 10991 - protein, 472 aa, unidentified
  REGION 1..472: note = Human gut metagenome
MSTCVCVLSNNGERLMPTIRLGRVRHLLKDGKAKIIKHHPFTIQLLYDSKTNTQPIEICEDVGYNYIGISVKSQSHEYVSAQYDTLQDEKACHDSCRKLRRTRRNRLRYRKPRFDNRKRGEGWLAPSLKHKKELNVNVVKMYCTVMPITHATVEVGSFDTMLVKAIQEGKVIPEGADYQKGPRYNLATLREAVFYRDNYVCKICGRKATEGAILHMHHMFYWKGRHGNSLNELLTVCEKCHTPANHQKSGKLYGFGEDVKFADLSGAAFMNTVRWQIVNELYAAFGKPFVTITYGAMTKEKRIALQLEKSHNNDAYAMGEFHPNHRCAFEHYEKARRNNRILEKFYDSRYIDIRTGEIATGKELFNGRINRNHKKDSENLHKYRGKRTYAGHRALLRKKVNLNPGDLVSLNGEPLVVLGTHTRKNGAVNVEFETPSKSGRKSASLKKLKIVKAADSIHPAWEKVSQIIQRKE

SEQ ID NO: 10992 - protein, 518 aa, unidentified
  REGION 1..518: note = Human gut metagenome
MANLKLIDELLEKTEYIYVLGIDGKPQMPTNRKVRVRKLFKLGMAKIVDTVPFTMQLLYENKPVLQPITIAENPGRTNIGAAVLTQLGDLVFSAVVETRNKSIKKLMSDRKAHRQASRHGERKARQRLANRHGSMIKAGMIMRKLPQYAADKFVTCKIIKNTEARFCNRKRMPDWLTPTVNHLVQTHINLIKKVEKYLPITDVAIEVNRFAFMQMENPDVSGVDFQNGPLKGFDDVKAAIREQQHGKCLMCKNDIEHFHHIVPRSKGGSDTIQNQAGLCKKCHAKVHTDVEFLAKFKDKKEGLIKKYGALSALNQAVPFICKELLKIYSTEHVHLCTGKDTSLIRSSLGYEKTKDNPMHEVDAYCIGLAAIGADKAKRPGFNNVFKIKQFRRQDRSIINYQRERTYYLEGKKIATNRKPRFEQKGDALSDWYSEQVKLKGKKYADKLTGRITVKKSTRGYNSKDRVMPGTIFYYGGKRLVLSGQTTRGKYYKAYGDPKTNYPAAKCQIYKHNEGLVFI

SEQ ID NO: 10993 - protein, 512 aa, unidentified; identical to SEQ ID NO: 5174
  REGION 1..512: note = Human gut metagenome

SEQ ID NO: 10994 - protein, 431 aa, unidentified
  REGION 1..431: note = metagenome
MPNKVYVINKHGRPLMPCSPAKARHLLDEGKAKIKKRTPFTIQLVYGSSGYTQEVILGVDAGSKTIGLSASAETEELLSAEVKPRNDVVDLLSTRREFRRARRNRKTRYRKPRFDNRVRSKHKGWLAPSVEVKIQEHITSIKRVCRILPVSKVVIETAEFDLQLLKAIEEGKPVPQGEDYQQGEMYGHYNVRQYVLWRDGYTCQCCGAHATKKKEVRLHVHHLESRKVGGDAPDNQVTLCESCHEKLHKGLIAEKDFKKRKRRSTRDATFMGIMRKTLMQRLCSELPIPVVETRGYITKATREKLLVLPKSHTNDALAIAQGKRGFNVGYLPGIAQIDKIYTIRPVRHHNRQLHKATILKGGIRKSNQTGKYVFGYRLFDKVQFNGQDCFIFGRRTSGYFVVKTIDGKVIHNSASFKKLKLVERASNYLIA

SEQ ID NO: 10995 - protein, 434 aa, unidentified; identical to SEQ ID NO: 9304
  REGION 1..434: note = Human gut metagenome

SEQ ID NO: 10996 - protein, 406 aa, unidentified
  REGION 1..406: note = Human gut metagenome
MVYVQDINGKPLMPTTRHGKVRRLLKANKAVVVNICPFTIKLMYVTPDYKQEIVLGVDAGTKHVGLSATTKNKELYSSEVILRNDIVDLLSTRRELRRTRRYKLRYRKPRFSNRVKSNRPGWIAPSVRCKIDAHIRVIDNICFILPISRIVIEVAQFDTQKIKNSDISGKEYQEGDQLGFWNVREYVLARDNHVCQNCKGKSKNKILNVHHIESRKTGGNSPSNLITLCETCHKEYHKGNIKLKVRRGASLRDAAVMGIMKWKLLDKLKSLYPNVSMTFGYITKHNRIKHEIKKSHISDAFVISKNFEAKRPGYYFKEKLVRRHNRQIHKMKILKGGKRKMNQAPFKVFGFRLFDKVEFQGNEYFIYARRLSGYFNIRDINSENKKDVTYKKLTYIGHGLISVETG

SEQ ID NO: 10997 - protein, 425 aa, unidentified
  REGION 1..425: note = Human gut metagenome
LAKDLYRSIDREETNLRVYVLNKRGEPLMPCSAAKARILLKEKKAVVKRRTPFTIQLTIATGETKQPVSLGVDAGYKHIGLSASTEKAELYASEIELRQDVSELLAGRRALRHARRSRKTRYRAPRFDNRKREKGWLAPSVENRIGAHVSRVEAVLRILPVTKIVVETASFDVQRLKNPDIQGVEYQQGEQLGFWNVREYVLFRDGHECQHCHGKSKDKVLNVHHIESRRTGGDAPNNLITLCETCHKAFHRSEIELRVKRGRSFQAEAFMGVMRWTFFERLRASHPEIEVRNTFGYLTKNTRISHGIEKTHCADAFCIAGNLKAKRLGYYFFQKQTRRHNRQIHKLTIKGGVRKRHQTPYEIKGFRLYDKVLYRGKVAFIFGRRSSGYFDIRTLDGERISASVSYKKLRLLEKRRTYLIELRRN

SEQ ID NO: 10998 - protein, 427 aa, Moorena sp.; identical to SEQ ID NO: 5764

SEQ ID NO: 10999 - protein, 512 aa, unidentified
  REGION 1..512: note = Human gut metagenome
MSTVYVLNKDGKPLMPTTRCGHVRHLLKEQKARVVTSKPFTIQLLYETDDVVQPLYLGIDPGRTNIGVAVVRTDGTAVFTAHLETRNKEIPKLMQERKKARRARRTNGRRCRRQRRAKANGTISKKCVKQDTAQNGSVSKRAKKIGVIKRHLPGCEKEVLCIGIKNKEAKFSNRTRPEGWLTPTANQLLQTHINLVKKIQKFLPISDVVLEINKFAFMRLDNPNIQKWQYQQGPLYQKASLEEAVSEMQEHHCLFCKKPIAHYHHVVPQSENGSDTIDNIVGLCTKHHDLLHKDTAWQKKLAKKKTGLNKKYGALSVLNQIIPALTKELSSLFPKHFFATNGKSTNDYRAAHDVSKDHWLDAYCIACSILPNDTCDKNINGRVPYKLKQFRRHDRRALHKENMSRVYTLDGKKVATNRHKAIKQTTDSLEEFRQRQPNDVCKLKVKEHHPEYRNPERNFPGCVFLVGKHTHVMQGTSGSHNGKADGYYNTNGNSYPSGKCKFVAKNKGIVFA

SEQ ID NO: 11000 - protein, 413 aa, unidentified
  REGION 1..413: note = Human gut metagenome
MTSYSFVLDANGKQLAPTKEPKAWFLIRKKRAALVSKYPMVIQLKKKIQENEICKDEIRCGIDDGGLHVGIALGPKCKSKNKVVFKGTIEQRNDVKHLMEVRRNYRRYHRYHKRYRQARFDNRKSSKRKGRIAPSILQKRQATIRVINRLNKWINITNYWLEDVSIDIRVLTDGYKSYSWQYQKSNRLDENIRKATILRDGGKCMECGKSNCRLEVHHIKPRRRNGSNTLDNLITLCESCHQKTEGQEELYMDRYFSLLKSSDNKNLNYAQHVMIGKMWLRKQLSGLGVLYLTSGGDTANKRIDWNIEKSHTNDAVCITDLQPDTCDIKEWAIKPMRRQSKAKTDHVLGIHHRDLVEYTFKNGETHRGYVTALYPDQKAINFQSQTKHCKKVNARKCKLLWNYSKIYWFENAS

SEQ ID NO: 11001 - protein, 428 aa, unidentified; identical to SEQ ID NO: 7211
  REGION 1..428: note = Human gut metagenome

SEQ ID NO: 11002 - protein, 423 aa, unidentified; identical to SEQ ID NO: 3538
  REGION 1..423: note = Human gut metagenome

SEQ ID NO: 11003 - protein, 362 aa, unidentified
  REGION 1..362: note = Human gut metagenome
LKVFVLNKRGKPLMPCSPAKARLLLKEKKAIVVRRTPFTIQLTIATGESKQPVSLGVDAGYKHVGLSASTEKAELYASEVELRKDITDLLSARRALRQSRRNRKTRYRAPRFDNRIRTKRKGWLAPSVENRINAHLSRIEAVLRLLPVTKITVETASFDMQLLKNPDISGKEYQEGEQLGFWNVREYVLFRDGHVCQHCHGRSKDPVLNVHHLESRRTGSDSPDNLITLCETCHKALHRGEITLKAKRGQSFRAQAFMGIMRREVLNRLKASYPELKVHETYGYLTKHARIANGIVKSHGADAFCIAGNLGAERLGEFFFQKQTRRNNRQIHKLSILKGGIRKRNQAPFEAKGFRLFDKVGP

SEQ ID NO: 11004 - protein, 461 aa, unidentified; identical to SEQ ID NO: 4910
  REGION 1..461: note = Human gut metagenome

SEQ ID NO: 11005 - protein, 420 aa, unidentified; identical to SEQ ID NO: 3685
  REGION 1..420: note = Human gut metagenome

SEQ ID NO: 11006 - protein, 320 aa, unidentified
  REGION 1..320: note = Human metagenome
RAPRFDNRIRTKRKGWLAPSVENRINAHLSRIETVIRLLPVTKITVETTSFDMQLLKNSDIAGKKYQEGEQLGFWNVREYVLFRDGHVCQHCHGRSKDPVLNVHHLESRRTGGDSPGNLITLCETCHKALHRGEITLKAKRGQSFRAETFMGIMRWEVLDRLKASHPKLEVQNTYGYRTKHARISNGIAKSHCADAFCIAGNLGAERLGEFFFQKQTRRNNRQIHKLSILKGGIRKRNQAPYEIKGFRLFDKVACQGEEGFIFGRRSSGYFDVRKLNGTHISAGISCKKLRLLEKRQTYLTEIRKEKALPPLPEGRGLRA

SEQ ID NO: 11007 - protein, 421 aa, unidentified
  REGION 1..421: note = Human gut metagenome
MQYVYVLNMHGEPLMPCSPRKARLLLKEGKARVVKRTPFVIKLLHGSAGYKQPVALGVDAGSRHVGLSACTEGRELYKEELSPRNDVVELLSVRRQYRRSRRNRKTRYRAPRFNNRVHSKHKGWLAPSVEVKIQEHITVIKRICRILPVTLVRVETAEFDTQRLKAMLAGKPLPVGADYQLGEMYDEYNVRQYVLKRDNYTCQCCGAYPTEKKPVRLHVHHIESRHVGGNAPNNLITLCVACHKALHEGKITLGNSKKRGKPLRDAAFMGIMRNTLLARLKDELNIPVKQTYGYITKLLREENHVEKSHTNDARCIAKAPNAKPCDTMFRTRALRHHNRQIHKAKILKGGTRKKNQAPYLVKGFRLWDKVRYNGEECFITGRRTSGYFAIKKYDGTVISNSASYKKLTLLEAATNYITERS

SEQ ID NO: 11008 - protein, 416 aa, unidentified
  REGION 1..416: note = Human gut metagenome
MVYVLDKNGQPLMPTDRHRKVRLMLQSGQAKVIKRCPFTIQLNYDSGHQTQEISLGIDAGSKHIGVSATTKIKVLYEADVELRNDIVDLLSSRRELRRGRRNRKTRYRQAKFNNRRRGNGWLAPSIRQKIGTHLTVVENICKILPISRIMVETASFDIQKIKNPDIQGAEYQQGDQLGFWNVREYVLFRDGHTCQCCKGKSKDKILNVHHIESRKTGGNAPNNLITLCETCHTGYHKGTVQLPKAIKRGMRFKDAAFMGIMRWAFYEALKQQYEPVGTPVHNTYGYITKHTRIAYNLPKEHYVDARCISGNPEASSNGEYYYQKKVRCHNRQIHKLTVLKGGIRKQNQATYLVKGYRLFDKVSYQGKGYFVFGRRQSGFFDIRTLSGEKVNKGSLSCKKLKFIATRTYYLTERRAV

SEQ ID NO: 11009 - protein, 493 aa, unidentified; identical to SEQ ID NO: 3154
  REGION 1..493: note = Human gut metagenome

SEQ ID NO: 11010 - protein, 477 aa, unidentified
  REGION 1..477: note = Human gut metagenome
MWLNSSEGKEQCCIHGNLGITLGKDSYSLRRGQFCLSLTVTTTRKETTSMYVYVLSQHGEPLMPCSPRKARTMLRDHKATVVRRTPFTIRLLHGCSGYTQRITLGVDAGSKFIGLSACTESKELFAAEVKPRNDVVDLLSTRRELRRSRRNRKTRYRVARFDNRVHSKHKGWLAPSVEVKIQEHITAIKRTCAILPISMVIVETAEFDTQRLKAMLEGKPLPVGTDYQLGEMYDEYNVRQYVLKRDNYTCQCCGIQSTDKAPVKFAVHHKESRHVGGNAPNNLITLCEKCHRLLHAGVITLDEDKRKRGKSFRDAAFMGIMRKTLIQRLRSELSVPAKETYGYITKLLRETHSIQKSHVNDARCIARVPDAKPSDTLYRIRAVRHHNRQLHKTNPIKGGIRKRNQAPYEVFGFHLWDKVLFNGQECFITGRRASGYFALKDFDGKKIHASASYKVLSVVETATSYLIERKTAVSSRD

SEQ ID NO: 11011 - protein, 458 aa, unidentified
  REGION 1..458: note = Human gut metagenome
MSTSVFVLDKKHRPLMPCRPARARRLLRAGRARVVKRFPFVIRLVDRTVEQSEVQPVLIKLDPGSRETGAAVVRDDGKKRHHALAFFVIEHRGGAIRDALKARSAFRRRRRSQNLRCRSPRFLNRVKPKGWLPPSLRHRVETTLSFVRRMCRYLPVSGIAAELVKFDSQKLQTPEVSGIEYQQGTLFEYEVREYLLEKFGRKCVYCGAEGVPLNIDHVVPRAKGGSNRVSNLVLACVSCNQKKGARSLEDFLKGKPEVLARVRRELKTPLRDAAAVNATRWVLFNELKATGLPVETGSGALTKLNRHAFGVEKEHWLDALCVGRLNGVVTRKGLNVLEIRCMGRGSRQRTRLTKYGFPRGYLMRQKCVHGFATGDMVEANVPKGKKAGLWRGRVAVRVSGSFNIQTPKGRHSRRRLEALPTDFTQRRIWVRVARPRASFLPCLISGPPTRCQAVYRCF

SEQ ID NO: 11012 - protein, 279 aa, unidentified; identical to SEQ ID NO: 5082
  REGION 1..279: note = Human gut metagenome

SEQ ID NO: 11013 - protein, 430 aa, unidentified
  REGION 1..430: note = Human gut metagenome
LRVFVLNKRGKPLMPCSPAKARILLKEKKAVVTRRMPFTIRLTIATGETKQPVTLGVDAGYKHVGLSACTEKAELYASEVELRQDITELLSARLALRRARRNRQTRYRAPRFDNRVRSKHKGWLAPSVENRINAHLSRIDAVLRILPISKIVIETAAFDTQLLKDTNIEGATYQQGEQFGFWNVREYVLFRDGHICQHCHGKSKDPVLNVHHLESRRTGGDAPNNLITLCETCHKALHQGKLTLKVKRGFTYKAETFMGIMRWTVQDRLKTAYPDIEIRNTYGYLTKHSRISHGIAKSHCADAYCIAGHLKAKRLAGYYYQKQTRRHNRQIHKLTILKGGLRKRNQAAYEIKGFRLFDKVKVLGEEGFIFGRRASGYFDVRKLDGTRISAGISSKKLTLLEKRKTYLTEYRKEAALPPLNEFRGFLANVL

SEQ ID NO: 11014 - protein, 470 aa, unidentified; identical to SEQ ID NO: 2825
  REGION 1..470: note = Human gut metagenome

SEQ ID NO: 11015 - protein, 518 aa, unidentified
  REGION 1..518: note = Human gut metagenome
MTHYERRHLMPDTNYIYVLGADGKPQMPTKRKRHVKRLLNTGKARIACHVPYTIQLLYKNEPVLQPVMLAEDPGRTNIGLAVLSRKGELLLSAVVETRNREIVKLMADRKKARRASRNGERKARQRLAKRFGTMFEAGMLMRKLPMYAADKFVTCNYIKNTESRFCNRKRPDGWLTPTANQLLKTHINLIHKIQKYLPVMDVAIEVNRFAFMSLENPAISGVDFQNGPLKGFDSLHDAVNDLQHGKCLLCGGKIEHYHHIIPRSQRGSNTIGNIAGLCMECHGKVHKDIEYQKELKDLKKGLDKRYGALSALNQAMPFICKSLESEFGKAHVSYCTGRDTAKMRNSFGFQKTKKNQLHEVDAWCIGILAQNNAPDRLPDFEQTHYIRQFRRQDRSLIRCQTERTYKLDGKTVAKNRKKRTDQKDDSLEDWYNKQIALHGKREAECMLSRLTVKKSKRHYNDPIRILPGAVFIYNGKRYVLSGRLSNGKYFRAVGDSKTNYPVGKCRIVKQNEGLVFIY

SEQ ID NO: 11016 - protein, 477 aa, Ferroplasma sp.
MEKNMKERQKLDRRDTYTPTDAPQVRGNCDHALNREETLSVHGLKTPSNNPDVDILQPAGGHKVDMLVFILNDDGKPLMPCKPAKARHLLKEKKARVVSSNPFTLQLLWHCEEYTDPTILGIDAGYKHIGFSAVTEKKELISGEAVIRTNIPKLNQEKSMYRRNRRNRLWYRQPRFINRGNNSKGWFAPSIAHKLQTHIRLIEKLKKILPVSKVIIEVASFDQQKMKNPEISGIEYQQGELQGYDIREYLLEKFHRKCVYCRKTNVPMEIEHLTPRSRNGPDTVDNLAISCHECNQRKNDLTAEEFGYPEVRKRALKSLKDATFMNIVRWKLTQLTEAIHTFGYITKKNRISPGLDKSHANDAFVIAGGTTQARPTVFDVTQRRRNNRSLQINRKGFRPSIRRRRYPLQPGDVVEFGESRYGVVGVHSYGNYVIIMNGEKKMDVNIKKVKLVKYGKGLRFTTQFLPTLSHMDLFGGS

SEQ ID NO: 11017 - protein, 424 aa, Anaerostipes sp.; identical to SEQ ID NO: 3434

SEQ ID NO: 11018 - protein, 406 aa, unidentified; identical to SEQ ID NO: 7944
  REGION 1..406: note = Human gut metagenome

SEQ ID NO: 11019 - protein, 487 aa, unidentified
  REGION 1..487: note = Human gut metagenome
MYRHRSDVHPNPPLCDNASLEAEVKPKDAADSNRLRPWGRMHYSPSGERTACFGIAVIPKKGETAMQYVYVVGSNGKPLMPCSPAKARKLLKTKSAAVLQRTPFTIKLLHHAGGYKQPITLGVDAGSKHIGLSACTETKELYKEELTPRNDVVKLLSKRRECRRGRRHRKTRYRTPRFNNRVRSKHKGWLAPSVEVKIQEHITAIHHICRRLPVTKIVVETAEFDTQRLKAMLEGKPLPVGTDYQRGEMYDEYNVRQYILKRDNYTCQHCGKRGSAEKGVKLHVHHLETRQTGGNAPNNLITLCKDCHTALHDGEITLKQGKKKRGKPLRDTAFMGIMRKTLLSSLRKEVDIPVVETQGYITKLLREENHIPKSHTNDARCIAGYPNAQPCDTTYHTKAIRHHNRKIHKTNILKGGVRKLNQAPYKVFGFRIWDKVKYKGQECFITGRRSSGYFALKKLDGTTISNSAKYKEIQFLEPANHYIIERS

SEQ ID NO: 11020 - protein, 414 aa, unidentified; identical to SEQ ID NO: 3759
  REGION 1..414: note = metagenome

SEQ ID NO: 11021 - protein, 443 aa, unidentified
  REGION 1..443: note = Human gut metagenome
LTKDENRPSGRTTGLRAEQAEPAGIRKGDTLKVFVLNMRGKPLMPCSPAKARHMLKAGKAFVVRRTPFTIKLTIATGETKQDVTLGVDAGARHVGISATTEKEEVFASEVALRQDITGLLADRLAFRRARRNRKTRYRAPRFNNRVRSKHKGWLAPSVENRIQAHISRIEAVCRLLPVTKIVIETASFDIQKIRNPEVEGTGYQQGDQLGFWNVREYVLFRDGHICQHCRGRSKDPILNVHHLESRKTGGDAPNNLITLCETCHKAYHAGKIKLKVKRGQSFRAEAFMGIMRWTLLDRVRKTHPKLPVENTYGYLTKHKRIALGLPKTHCADAFCIAGNLKALRRGDFLFQQQTRKHNRQIHKCSILKGGVRTLNQAPFLVKGFRLFDKVRIGGQIGFVFGRRVRGTFNIRRLDKTVIGTDINCKKLSLLETRKTFLTELRKE

SEQ ID NO: 11022 - protein, 406 aa, unidentified; identical to SEQ ID NO: 2874
  REGION 1..406: note = Human gut metagenome

SEQ ID NO: 11023 - protein, 417 aa, unidentified
  REGION 1..417: note = metagenome
MPCSPAKARLLLKERKAIVKRRTPFTIQLTIATGEAKQPVTLGVDFGYKHIGLSATTEKVELYASQVELRQDITDLLSARLALRRSRRSRKTRYRVPRFDNRVASKRKGWLAPSVENRITAHMSRVEAVMRVLPVTAITVETAAFDTQLLKNPDITGAAYQQGEQLRFWNVREYVLFRDGHVCQHCRGKSKDPILNVHHIESRRTGGDAPNNLITLCETCHKAFHRGEIELKIKRGKSFKAETFMGIMRRTLFERLKKAHPELNVRNTYGYLTKHKRISYGIAKSHCADAYCIADNLGAKRLEGFFFQKQTRKHNRQIHKLLILKGGLKKKNQAPYEVKGFRLFDKVICKGEEAFIFGRRTSGSFDVRRLDGTRISAGINYKKLRLLEPRTTYLTEFRKEAALPPLHKCRGVCAEFL

SEQ ID NO: 11024 - protein, 436 aa, unidentified
  REGION 1..436: note = Human oral metagenome
MTKTLTTRTTQACVLDQQGKPLMPTTRLGKVYRLLKAKKAHIVSYEPFTIQLDYQPDTQVIQPMTLGVDSGAIHSGYSVANEHREYYSAEVIARNDISKNLSDRHMYRRNRRSRKTRYRKPRFNNRKNKKKGWLPPSLEQKVAVQVNEIDHIHRYFPIETIIIETAEFDIQKIKNPDISGIEYQQGTLQGYNIRNYLLEKHGRKCFYCGKAVSDFEVEHMLPKSKGGSSRIDNLTLSCHDCNEKKGTLTAEEFIQQTLPVKKAASKLKQLPNEKRLFKYMAYMNATRWALYDAIKERYPNVKMTYGYITKYNRIQAGLPKTHHIDAKCITGFAAVPSMSQTVVKVKMRRHNRQLHRATFSKGHVRKAACLPTVTFGFQLYDLVCFNNHRYYIKGRRSSGAFVLVSVEGLKNEERNYKKLTLLAHTNAYLTNRYVNA

SEQ ID NO: 11025 - protein, 437 aa, unidentified
  REGION 1..437: note = Human oral metagenome
MVLVIDRCKRPRNAISEAYARILLYSKQAVIHRRFPFTIRLKNDNAVFNDKAYTVKLDPGANTTGVAVVSNDEVVMLAEIEHRGKVIKSGLDSRRVSRHSRRNRKTRYREARFLNRTRPDGWLAPSVKSRADNIINFIRKYKKLLNVAKVEIERVSFDTAQMSSEVELCGVDYQQGALYRTKLRNFIFSRSKGKCSYCGEKAVEIDHIVPRSKGGTNSVNNLTASCGTCNEKKSNLSLKEFGKLVGKDFSKLEPKKLPKQASIVQSAREYTIKEIIKLVADTKSYDAWLTKYNREELGLPKQHYYDALSVGNVQDYKFLTDKVLIISAKGRGSRQMCRMDRFGFPRTSPKSGKSVKGFQAGDIVKAVIPSGLKVGEYLGRVSVRSSGYFNIETNGKVVQGIGYKYCRIIQRNDGYSYDYRERDFLSAMDNRVSVAES

SEQ ID NO: 11026 - protein, 451 aa, unidentified; identical to SEQ ID NO: 5203
  REGION 1..451: note = Human gut metagenome

SEQ ID NO: 11027 - protein, 318 aa, unidentified
  REGION 1..318: note = Human gut metagenome
PRFDNRIRTKRKGWLAPSVENRINAHLSRIGAILRLLPVTKITVETASFDTQLLKNPDISGKEYQEGEQLGFWNVREYVLFRDGHACQHCHGRSKDPVLNVHHLESRRTGGDSPGNLLTLCETCHKALHRREIKLKTKRGQSFRAEAFMGIMRWEVLNRLKASHPELEVHNTYGYRTKHTRIVNGIDKSHCADAFCIAGNLGAKRLGEFFFQKQTRRNNRQIHKLSILKHGLRKRNQAPFEVKGFRLFDKVVCQGEEGFIFGRRSSGSFDVRKLDGTRISAGISYKKLRLLEKRRTYLKEIRKEEALPPLPEGRSLRA

SEQ ID NO: 11028 - protein, 422 aa, unidentified; identical to SEQ ID NO: 5333
  REGION 1..422: note = Human gut metagenome

SEQ ID NO: 11029 - protein, 453 aa, unidentified
  REGION 1..453: note = Human gut metagenome
MSVAVVSKTGMLLMPTSEYRARKLLKSKKAIIHGYHPFTIQLTERETGYIQPVELCMDTGYIHIGTSVKSEKHEYLGEQIDTLTDERQKHDACRMYRRQRRNRKRYRQPRFNNRERDDGWIAPSLEHKKTIHIQAISRICKVMPVTDITLEMGNFDTQVLKAREEGKPLPQGLDYQHGERYSVTTLREAVFLRDGYTCQCCGRTIKDGAILHAHHVIYRSQGGTNRISNLITVCDKCHTPVNHKPGGKLYGWKPKVASFKGATYMTTIRWKLYNEVKALFLDIDIHITYGAETKERRRAFDITKSHVNDAFVMGQFHPKHRSKPVCYKKKRRNNRCLEKFYDAKYIDSRDGKKRTGQELFNGRISRNHKKDSENLHQYRQQKISTGKRTIRKQHYAIQPHDIVIFNGGKFETSGCHNNGTRAILLPQKKSVAIKKLNIYRYAGGYFKSAFNQK

SEQ ID NO: 11030 - protein, 451 aa, unidentified
  REGION 1..451: note = Human gut metagenome
MSVAVISKTGERLMPTSEYRARKLLKLGKAVKYSYHPFTIQLTEREDGDVQPIELCMDTGYIHIGISVKSEKHEYLAEQIDTLTDERARHDACRMYRRQRRGRKRYRQPRFNNRKRDKGWIAPSLEHKKDIHVQAISRINKVMPLTNITMEMGNFDTQVLKAKEEGKPLPHGADYQHGERYGIATLREAVFSRDGYKCQCCGKTISDGAILHVHHIKYRSRGGTNSMTNLATVCDKCHTPKNHKPGGKLYNWKPKLPNFKGATFMTTIRWQLYNEVKSLFLDINIHVTYGAATKEQRRKLNIGKSHVNDAFVMGKFYPKHRANAVLYKKKRRNNRCLEKFYDAKYIDSRDGSKKTGQELFNGRINRNHKKDSENLHQYRLQKIKAGKRTIRKQHYSIQPHDIVIYENRKRETLGCHNNGTRVMLLPDKKSVAIKKIKIYKYTGGYFKSAFN

SEQ ID NO: 11031 - protein, 426 aa, Parasutterella sp.; identical to SEQ ID NO: 3045

SEQ ID NO: 11032 - protein, 463 aa, Moorena sp.
MSKVFVIDSEKRPLDPIHSAQARQLLRNKKAAVYRRFPFTIILSNLPQKNEAGFNKDNSLGQSDKPETSPPHFSRSGSVKESRPDSPVSPLRLKLDPGAKTTGIALVSDYTGEVVFAGELKHRGFAIRDALTSRQQLRRSRRNRKTRYRAPRFNNRTRLSGWLAPSLQSRVDNIKTWVEKLRKFAPIEAISQELIRFDMQLMRNPDIQGKEYQQGTLAGYETREYLLEKWGRQCAYCGVKDVPLQIEHIHPRAKGGSNSITNLTLSCSKCNLKKGTKDIKEFLKKDPNKIQKILRQAKKPASDAAAVNTTRFTLLNTLKATGLPIETGSGGLTKFNRHNQNLEKTHWLDAACVGKSTPILIIKGIKPLLITANGHGSRQSCRTDKYGFPSRYVPRFKFVKGFQTGDIVKAVVTTGKKVGEYVGRVAVRATGSFNISTKNGLVQGINYKFCKTIHKKDGYAYGT

SEQ ID NO: 11033 - protein, 431 aa, unidentified; identical to SEQ ID NO: 2977
  REGION 1..431: note = Human gut metagenome

SEQ ID NO: 11034 - protein, 420 aa, unidentified
  REGION 1..420: note = Human gut metagenome
MQYVYVLNKHGEPLMPCSPRKARLLLKQKKACVIKRTPFTIKLLYGSTGYKQPVTLGVDAGSKHIGISATTEKYELYREEATPRNDVVDLLSARRAFRRSRRNRKTRYRAPRFDNRVHSKHEGWLAPSVEVKIREHITLIKRVCRILPITLVRVETAEFDTQRLKAMLEGKPLPVGTDYQLGEMYDEYNVRQYVLKRDNYTCQCCGAHPTKTKAVKLHVHHIETRRTGGNAPNNLITLCTVCHKALHAEKVTLDGKKRGKPLKDAAFMGIMRKTLMERLRKELKIPVQGTCGYITKYLREKYGILKSHTNDARCISKNPLAIPCDTCYYTKAVRHHNRQLHKATILKGGIRKANQAPYIVKGYRLWDKVSCNGTECFITGRRTSGYFALKKLDGTVISNSISYKKLRLLEVATNYITERK

SEQ ID NO: 11035 - protein, 465 aa, unidentified
  REGION 1..465: note = Human gut metagenome
MSTCVCVLSNSGERLMPTIRLGKVRRLLKDGKAKIIKHHPFTIQLLYDSKANTQPIEICEDVGYNYIGISVKSQSHEYVSAQYDTLQDEKACHDSCRKLRRTRRNRLRYRKPRFDNRKRGEGWLAPSLEHKKQLNIRLIERYVSVIPITHATVEVGSFDTMLVKAIEEGKATPESADYQKGPRYNLATLREAVFYRDNYICKVCGRKATEGAILHMHHMFYWKGRHGNSLSELITVCEKCHTPANHQKSGKLYGFGENVKFADLSGAAFMNTVRWQIVNELYAAFGKDFVSVTYGAMTKEKRIALHLEKSHNNDAYAMGSFHPVNRCAFEHYEKVKRNNRILEKFYDSQYIDTRTGELTNGKSLFNGRISRSHKKDSENLHKYRGKRICKGHRALRRKKLALNPGDLVSLNGEILVVHGTHTKKNGSVNVEFKTPSRGGKKSASLKKLKIVKTSNLMHSAWTKVS

SEQ ID NO: 11036 - protein, 464 aa, unidentified
  REGION 1..464: note = Human gut metagenome
MYVFVIGLDGTRLMPCKPRKARKLIEAHKAEIYKKQPFTIRLLYKTGCASQPITLGIDTGSQHIGIAVTSENKVLYQAEIELRSTMDKRSLMETRYSYRRSRRYRKTRYRSPKFKFHTKRTYSETLVKRKTTGIMTHWVKHTNSMSTNRPDGWLAPSMQSKVDHHIRWINRFLDVLPPDTKLRLEIARFDMARMKNPEVHNELYQHGPQYDYENLKAYVFDRDHYKCVVCKRKLGSKQPDGHSLKGMMHHITFRSKGATDNPDQLVTVCEYCHTPQAHKEGGVLWDLKEKHKSVQRGLRDATQMNIIRTRLVKAFPDAELTYGNITAADRKKMHLPKSHAGDAVAIAMKGEDVNICEPTVYIKQIRKKKRSLHEATPRKGRKRPNTQAVRNPKNTKSIGIYHIYDTVRFQNETGFISGFTGKSAYVQDFDGNYITMPGKSYKQINLSSLELVKHNNNWIQKTRN

SEQ ID NO: 11037 - protein, 414 aa, unidentified
  REGION 1..414: note = Human gut metagenome
MPCSPAKARLLLKEKKAIVVRRTPFTIQLTIATGESKQPVSLGVDAGYKHVGLSASTEKAELYASEVELRPDVSDLLSARRTLRQSRRNRKTRYRAPRFDNRIRTKRKGWLAPSVENRINAHLSRIGAILRLLPVTKITVETASFDTQLLKNPDISGKEYQEGEQLGFWNVREYVLFRDGHACQHCHGRSKDPVLNVHHLESRRTGGDSPGNLLTLCETCHKALHRREIKLKTKRGQSFRAEAFMGIMRWEVLNRLKASHPELEVHNTYGYRTKHTRIVNGIDKSHCADAFCIAGNLGAKRLGEFFFQKQTRRNNRQIHKLSILKHGLRKRNQAPLEVKGFRLFDKVVCQGEEGFIFGRRSSGSFDVRKLDGTRISAGISYKKLRLLEKRRTYLKEIRKEEALPPLPEGRSLRA

SEQ ID NO: 11038 - protein, 420 aa, Moorena sp.
MLLREKKAAVHRKSPFTIILKDRTDGDTQPVEFKVDPGSKVTGIVVVADYGKRGKTVIWAEELQHRGQTIKDALDSSRAIRRSRRNRKTRYRAPRFDNRTRPAGWLPPSLMSRVHNVTTWALRLQRFAPLASIAVETVRFDMQKMVSPEISGVEYQQGTLAGYELKEYLLEKWGRKCAYCNKKNLPLHVEHVIPKTRGGTDRVSNLTLSCEGCNHKKDNLTAAEFGHPEVQKPALAPLKDAAAVNTTRYAIGNALKSLGLPVSFWSGGRTKFNRTQQGYPKAHWIDAACVGETGEHVKLDSSAQMIQVKATGHGSHQMCRMDRFGFPRTSAKTTRVVNGFRTGDIVRAVVPYGKKTGTYDGKVAVRTSGSFNVSTAIGVVQGIGYKYCSVVHRADGYSYLTKTGAPLGNELPSIRAQELS

SEQ ID NO: 11039 - protein, 472 aa, unidentified
  REGION 1..472: note = Human gut metagenome
VVDNRLLSIKPLINIGEGVIYSSICTGLSLQTYQKRKEVPCMVYVLDINGQPLMPTTRHGKVRRLLNSHLAKVVKRCPFTIQLLYQSTKEIQPVSLGVDAGSKHIGMAATTEKKVVYQEELSPRNDVVKLLSARRTLRRTRRNRKTRYRKPRFNNRVHSKHKGWLAPSVEVKIQEHITAIKRICQILPISEIQVETAEFDFQRLKAMKEWKPLPVGTDYQLGEQYDFYNTRQYVLHRDGYTCQCCGTHDNNIKLHVHHIESRQTGGDAPSNLITLCEHCHKALHKGKFELPKGKKRGKTYRDATFMGIMRKTLLERLKKEIDVPVAGTYGYITKYLREKTDLEKSHINDAICISKYPYAKPLDTYYLTKVVRNHNRQIHKSNFSKGGIRKRNQAPYLIKGFRLFDKVLYQGKEYFIFGRRATGYFDIRTLDGTKVNKGSISYKKLRIQDTAKAYLKEARAIPHMNKFTCVLA

SEQ ID NO: 11040 - protein, 428 aa, unidentified; identical to SEQ ID NO: 5055
  REGION 1..428: note = Human gut metagenome

SEQ ID NO: 11041 - protein, 210 aa, unidentified
  REGION 1..210: note = Human gut metagenome
VWLYQAVYNLGEGFLPSSEERTAFYWLLIYRKEHGIMQYVYVLNKHGEPLMPCSPGKARLLLKQQKACVVKRTPFTIKLLYGSAGYKQPITLGVDAGSKHVGLSASTEKRELYREEFTPRNDVVDLLSTRRQNRRSRRNRKTRYRAPRFDNRVHSKHKGWLAPSVEVKIQEHITVIKRICRILPVTLVRVETAEFDTQRLKAMLKESLCL

SEQ ID NO: 11042 - protein, 522 aa, Moorena sp.
MGAVFVVDKNGKPLMPTYSKPKVRRMLKDGRAEIFRHEPFTIQLTQRAGGYTQPVHYDTDSGYQYAGVSVKSEKHEFLHMQADMLEDKKGRYDDRRKYRCTRRNRLRHRPPRFDNRRKGEGWIAPSLAHRLENQVRLFQTMCGVCPITEAHIEVGRFDAQALDAVEKGLPLPEGIDYQHGPRYAFDTIREAVFARDQHTCQCCGASPSKKPGTILVVHHALYWKGDHTDRLPGLLTLCTNCHTSANHQKGGKLRGLAPNAATANKAPAAFMNVVRWMMRDRFQADGVPTTITYGAATKRERLSRNVAKTHANDAYCIGEFRPKHRSLEIHIAKRRRNDRRLEKFRDATYIDARDGSIKSGKELSSGRTKRKEPRHGAKDLRRFRLKQLTKGCNAVRRKRYEIRPDDLVRTTDGRVYTVNGTQNRGATLQLRTTKTVLLTALVPKTGKEKELLPVETGQKLALKGRKEKHEVLSVDLASGKAVMRWYMGVKPENVTLLTGTYGGWTVVPAQAVNTCKKGETEK

SEQ ID NO: 11043 - protein, 425 aa, Nodularia sp.; identical to SEQ ID NO: 3165

SEQ ID NO: 11044 - protein, 426 aa, unidentified
  REGION 1..426: note = Human gut metagenome
LAKDHYRSIDREETNLRVYVLNKRGEPLMPCSAAKARILLKEKKAKVKRRTPFTIQLTIATGETKQPVTLGVDSGYRHVGLSASTEKAELYASEIELRQDIPELLAARRALRGARRSRKTRYRAPRFDNRKRDKGWLAPSVENRIGAHVSRVEAVLRILPVTKIIVETASFDVQRIKNPDVQGVEYQEGEQLGFWNVREYVLFRDGHECQHCHGKSKDWVLNVHHIESRRTGGDAPNNLITLCETCHKAFHRGEFELKVKRGRSFQAEAFMGVMRWTFFERLRARHPEIEVRNTYGYLTKDTRIANKIEKSHCADAFCIAGNLKAKRLGYYFFQKQTRRHNRQIHKLTILKGGVRKRHQTPYEIKGFRLYDKVLYRGKTAFIFGRRSSGYFDIRTLDGERISAAVNSKKLRLLEKRRTFLIELRRN

SEQ ID NO: 11045 - protein, 413 aa, unidentified; identical to SEQ ID NO: 2636
  REGION 1..413: note = Human gut metagenome

SEQ ID NO: 11046 - protein, 436 aa, unidentified
  REGION 1..436: note = metagenome
MSVFVLDKKHEPLMPCHPARARKLLKAGRARVVKTYPFTIRLVDRLLENSAVQPVAVKVDPGSEQSGMAVVRDDGKAHHHALFFINLVHRGKVIRDRLTGRRAFRHRRRSANLRYRAPRFLNRKRRKGWLPPSLQHRVDTTMSWVKKLRKLVPVTALWVENVKFDTQKLQNPEVSGVEYQQGTLFGFEVREYLLEKFGRRCVYCGAENTPLNIDHVVPRAKGGSDRVSNLVLACTECNQKKGAQPLEVFLKGKPEQFERIRRQLKAPLRDAAAVNATRWALFNALKQTGLPVATGTGAQTKFNRKAFGIPKEHWLDALCVGRINGADHPESMGVLQVRCTGRGSYQRTRLNKYGFPRGYLMRQKRVHGFATGDIVKAVKKGVTFQGRVAVRARGSFVLQTPDGKVDGIHWRHCRLISRNDGYGYAWLRPALHSSSV

SEQ ID NO: 11047 - protein, 457 aa, Anaerostipes sp.; identical to SEQ ID NO: 5989

SEQ ID NO: 11048 - protein, 413 aa, unidentified
  REGION 1..413: note = Human gut metagenome
MTSYSFVLDVNGKPLAPTKEQKAWFLIRKKRAALVSKYPMVIQLKKEIPENEICKDEIRCGIDDGGLHVGIALVQKCKTKNKVVFKGTMEQRNDVKHLMEVRRGYRRYHRYHKRYRQARFDNRKSSKREGRIAPSILQKRQATIRVIHWLNKWINITNYWLEDVSIDIRALTDGYKPYRWQYQKSNRLDENIRKAAILRDGGKCMECGKLNCRLEVHHIKPRRRNGSDTLDNLITLCKSCHQKTEGQEELYMDRYFSLLKSSDHKNLNYAQHVMIGKRWLRKQLSGLGVLYLTSGGDTANKRIDWNIEKSHANDAVCITDLQPDTCDMKEWTMKPMRRQSKAKTDHVLGIHHRDLVEYTFKNGETHRGYVTALYPEQKAINFQSPTKHCKKVNARKCKLLWKYSKIYWFENAS

SEQ ID NO: 11049 - protein, 457 aa, unidentified; identical to SEQ ID NO: 5177
  REGION 1..457: note = Human gut metagenome

SEQ ID NO: 11050 - protein, 413 aa, Blautia sp.; identical to SEQ ID NO: 3616

SEQ ID NO: 11051 - protein, 518 aa, unidentified; identical to SEQ ID NO: 3878
  REGION 1..518: note = Human gut metagenome

SEQ ID NO: 11052 - protein, 442 aa, unidentified
  REGION 1..442: note = Human gut metagenome
MVYVLNKKGQPLMPTNRHGKVRRLLKTKKAKVIKRCPFTIQLLYDTTNHTQDITLGVDAGSKHIGLSATTEDKVLFEADAELRNDISKLLEARYTFRRSRRNRKTRYRKKRFDNRVSSKHKGWLAPSIEHKIQSHFAMVEKVHRILPVTKIVVETASFDTQLLKAQLEGNPIPQGTDYQNGELAGWNIREYIFHRDNYTCQWCRGKSKDPVLVTHHHAYWKGDHTNKSSSLITLCNTCNDSKYHKKEANRLWGWEPKVTNSYKHAVFMGVMRWTFYNRLKEIYPNVSMTYGYITKNTRIKNNLPKTHYVDARCISGHPKAKSNGEYFYYKKVRRHNRQLHKANTLKGGIRKRNQAEYTVKGFRLFDRVEYKNNEYFIFGRRAYGFFDIRTLDGQKVNKGSISFKKLKLKETSKTYLIERRMADTGVSLAPLTTEVTSLRQTG

SEQ ID NO: 11053 - protein, 422 aa, unidentified
  REGION 1..422: note = Human gut metagenome
LRVFVLNKRGKPLMPCSPAKARLLLKEKKAIVKRRTPFTIQLTIATGETKQPVGLGVDAGYKHVGLSASTDKAELYASQVELRQDITDLLSARRALRRARRNRKTRYRAPRFNNRIRTKRKGWLAPSVENRINAHLSRIEAVLRLLPVTKITVETASFDMLLLKNPDIAGKEYQEGEQLGFWNVREYVLFRDGHVCQHCYGRSKDPVLNVHHLESRRTGGDSPGNLITLCETCHKALHRGEITLKAKRGQSFRAEAFMGIMRWEVLNRLKASHSELEVNNTYGYRTKHARIVNGIDKSHCADAFCIAGNLGAERLGEFFFQKQTRRNNRQIHKLSILKGGIRKRNQAPFEIKGFRLFDKVACKGEESFIFGRRSSGYFDVRKLDGTRISAGISYKKLRLLEKRRTYLTEIRKEEALPPLPEG

SEQ ID NO: 11054 - protein, 442 aa, unidentified; identical to SEQ ID NO: 3218
  REGION 1..442: note = Human gut metagenome

SEQ ID NO: 11055 - protein, 408 aa, unidentified
  REGION 1..408: note = Human gut metagenome
MVYVQDIDGKPMMPTTRHGKVRRLLKANKATVVNLCPFTIRLTYATSGYKQEIVLGVDAGTKHVGLSATTKSKEIYSSEVILRSDIVELLSTRRELRRTRRNRLRYRKPRFGNRVKSKHHGWVAPSVRYRIDAHIRVIDNVCSILPISRVIIEIAQFDTQKIKNPDISGNEYQEGDQLGFWNVREYVLARDGHKCQHCKGKSKDPILNVHHIESRKTGGDSPSNLITLCETCHKEYHKGNIDLKVKRGKSLRDAAVMGIMKWKLYEELKSRYPNVSMTFGYITKYNRIKYGIEKYHISDAFVISKNFNALRLEYHYKVRLVRRHNRQIHKQKVLKGGAKKPNQSPFEVFGFRLFDRVMFEGNYYFIFGRRKSGSFNIRDINGGNQRNVTYKKLKLSIGKRFMIQKEIN

SEQ ID NO: 11056 - protein, 430 aa, unidentified
  REGION 1..430: note = Human gut metagenome
MPKVYVLNRHGRPLMPCTPAKARHLLDAGKAKVRHRTPFTIQLLYGSTGYTQEVILGVDAGSKTIGLSAATETEELFSAEVKPRNDVVELMSARRQFRRARRNRTTRYRKPRFDNRVRSKHKGWLAPSVEVKIQEHMTAIRRACAILPVSKVVVETAEFDLQLLKAVAEGKPVPQGEDYQKGEMYGHYNVRQYVLWRDSYTCRICGAHGSVRKGVPLHVHHLESRRVGGDAPDNLVTLCTACHDKLHKGIIMAADIKKRKRRSTRDATFMGIMRMTLLRRLREQLPVPVVETRGYITKATRENLLVLPKSHANDALAIAHGPQGFRAEYLPNIRQADRLYTIRPVRHHNRQLHKATILKGGVRKANQAEKYICGFRLYDKVLYNGIECFVWGRRTSGSFLLRQLNGEKVKDGVSYKHLKLLERSQSYLVA

SEQ ID NO: 11057 - protein, 395 aa, Succinivibrio sp.
MPTTRHGMVRRLLKERKAKVVKKCPFTIQLDYEGANITQLITLGVDTGYANAGISACTEKKVLFEAKAKIRTDMVKLLSTRRETRRTRRSRKTRYRKARFFNRSIEKGWLPPSIRAKVESHLRLVAKVHEILPIDKIVVEIASFDIQKIKNPDIKGAEYQQGDQLGFKNVKAYVLARDGCTCRYCKGKSKDKVLRVHHLESRLIGGDAPNNLVTLCDSCHTKFHKGLISLDDIKRGKSFKAETFMGLMRNFFFKELCNKYPCVKCTYGYITKHLREKYHLKKDHHVDARCICGTPQALPSDVYLMKKVRCHNRQIHKFITLKGGRRKLNQAPYTVKGFRLFDKVKIDGKVGFIYGRRTRGAFDIRTVYGERINGSISYKKLQLIETRKSWLIEKC

SEQ ID NO: 11058 - protein, 515 aa, unidentified
  REGION 1..515: note = Human gut metagenome
MTALEERLSKTEYIYVLGFDGKPQMPTRRKRHVLKLLKTGRARIAEDIPFTIRLTYRNAPVLQPVTLAEDPGRTNIGAAVLSPLGDLLFAAVIETRNKEIKKLMTDRQKSRQASRRGERKARQRLAKRYGSMVKSGMVMRKLPMYAADRFVTCKFIRNTQARFCNRKRCPDWITPTVQHLVQTHLNIIRKISRYLPVTDIAFEVNRFAFMHMENPEAIGVDFQNGPLKGYGDVKEAIRTQQHGKCLMCKKPIAHFHHIVPRSRGGSDTIQNLAGLCPECHTKVHKDTAFRKDFDEKKSGQLKKYGALSALNQAVPFICKKLLEEYGEEHVHFCRGLDTSLIRTALGFEKTKKDQMHEVDAYCVGLAALEVNEVETPAFDHTFQIRQFRRQDRSIIHHQTGRSYYQGKEKVAQNRKPGFEQKTTALSQWYEEQVRIHGEKEAEKLRSQLRVEKSCRHYNDMDRFLPGAVFLYEGKRYVLSGRITNGKYLRACGQGMKNFPAAECTFIRHNAGLVFI

SEQ ID NO: 11059 - protein, 420 aa, unidentified
  REGION 1..420: note = Human gut metagenome
MQYAYVLNKRGEPLMPCSPGKARILLKQQKACVVKRTPFTIKLLHGSAGYKQPITLGVDAGSKHVGLSASTEKRELYSEEFTPRNDVVELLSTRRQNRRSRRNRKTRYRAPRFNNRVHSKHKGWLAPSVEVKIQEHITVIKRICRILPVTLVRVETAEFDTQRLKAMLAGKPLPVGTDYQLGEMYDEYNVRQYVLKRDNYTCQCCGAHTTAKKAVKLHVHHLESRKVGGNAPSNLITLCTTCHNNLHKGKITLDGKKRGKTLRDAAFMGIMRNTLLTRLRNELHIPVQNTYGYITKLLREQNDIKKSHVNDARCISKHPLAEPCSICYRTKAIRHHNRQIHKAKILKYGIRKANQAPYIVKGFRLWDKVLYNGQECFISGRRTSGYFALRKLDGTTITNSISFKKLQLLEPATNYLIERM

SEQ ID NO: 11060 - protein, 443 aa, unidentified
  REGION 1..443: note = Human gut metagenome
LTKDENRPSGRTTGLRAEQAEPAGIRKGDTLKVFVLNMRGKPLMPCSPAKARHMLKAGKAFVVRRTPFTIKLTIATGETKQDVTLGVDAGARHVGISATTEKEEVFASEVALRQDITGLLADRLAFRRARRNRKTRYRAPRFNNRVRSKHKGWLAPSVENRIQAHMSRIEAVCRLLPVTKIVIETASFDIQKIRNPEVEGTGYQQGDQLGFWNVREYVLFRDGHICQHCRGRSKDPILNVHHLESRKTGGDAPNNLITLCETCHKAYHAGKIKLKVKRGQSFRAEAFMGIMRWTLLDRVRKTHPKLPVENTYGYLTKHKRIALGLPKTHCADAFCIAGNLKALRRGDFLFQQQTRKHNRQIHKCSILKGGVRTLNQAPFLVKGFRLFDKVRIGGQIGFVFGRRVRGTFNIRRLDKTVIGTDINCKKLSLLETRKTFLTELRKE

SEQ ID NO: 11061 - protein, 430 aa, unidentified; identical to SEQ ID NO: 5683
  REGION 1..430: note = Human gut metagenome

SEQ ID NO: 11062 - protein, 507 aa, unidentified; identical to SEQ ID NO: 2446
  REGION 1..507: note = Human gut metagenome

SEQ ID NO: 11063 - protein, 431 aa, unidentified; identical to SEQ ID NO: 3801
  REGION 1..431: note = Human gut metagenome

SEQ ID NO: 11064 - protein, 421 aa, unidentified
  REGION 1..421: note = Human gut metagenome
MVYVISISGRPLMPTAHCGKVKHLLKDGKAKVVHREPFTIQLLYETTEYTQATTLGVDTGSGTFGAAVVTDDSHKVLYISEVEVRNDISKKMKQRSKYRRNRRYRKTRYRKARFDNRKSSIKNDRFSPTMQSKINAHEREIKFVKSILPVTHLVLETGTFDMALMNNPALADPEIARWGYQKGPNYGFANTKAMVRARDGYTCAICKGRHKNRQLDVHHIIFRNQGGSNEAENLITLCQTCHKKLHNGEITYSGKGKKKGSLSFATQMNSIRKQLLARHPEAIETFGYITSENCQLYGLPKAHCIDAAVIASDVYKPIFATQDVFYKRCIAKGTYQCTKGVRSEKSMPKTKIEGFKQFDKVKYQNGLYFIKGRMSSGYAVLSDIYGTKIDFPHVPKLKEMQRIAARKSIICTTAKIDLKAS

SEQ ID NO: 11065 - protein, 414 aa, unidentified; identical to SEQ ID NO: 2588
  REGION 1..414: note = Human gut metagenome

SEQ ID NO: 11066 - protein, 418 aa, unidentified; identical to SEQ ID NO: 6835
  REGION 1..418: note = Human gut metagenome

SEQ ID NO: 11067 - protein, 413 aa, unidentified; identical to SEQ ID NO: 3295
  REGION 1..413: note = Human gut metagenome

SEQ ID NO: 11068 - protein, 477 aa, unidentified
  REGION 1..477: note = IscB polypeptide
LEGNNVAVFVIDKRKKPLMPCSEKRARKLLDSGRARVHRLIPFSIRIIDCEVDGCVLQSVKIKIDPGSKFTGIAVVRETKSIDVATGKIDIEVHVLNLFELVHRGRQISEALTARRAMRRRRRCNLRYREPRFLNRRNKQRGWLAPSLQHRADTTVAWVNRFQRVVPVTGIAQELVRFDMQLMQNAEISGVEYQQGTLAGYEVREYLLNKWNRECSYCGAKDVPLQIEHIHSKACGGSNRISNLALACQPCNQKKGAQDVHVFLAKDTKRLDRILAQAKRPLKDAAAVNATRWALFNALKAAGVPVMTGSGGLTKYNRVDLEIPKTHALDAVCVGAVSAVTGWQKPILAIKCTGRGSYQRTRLDAFGFPRGYLTREKRIKGFQTGDMVSANVLKGKKMGFYVGRVAVRETGSFNIQTSQGVVQGISHRCCKVIQRADGYGYSIVAKMESEQVSHKARNASRSELYLSGLNAGVSRAI

SEQ ID NO: 11069 - protein, 523 aa, Moorena sp.
VPECNIGEANITLLAGVFSMNKNSVFVLDKNKKQCNPVHPAAARKLLTEGKAAVFRQYPFTIILKDESTDEIKQLRIKIDPGAKTTGLAIVSDTNIVWCAELGHRGFQVRDNLSDRRIKRRSRRSRKTRYRKPRFLNRKRPQAWLPPSSMSRVFNIQSWVKKLCRLAPTTSISMELVRFDMQKMVNPEINGVEYQRGELFGYEVREYLLEKFNRTCVYCNSKDGPFNLDHFHPKSKGGSDQVSNLVLSCVKCNQAKDNQLPADFLSDRPKLLAMIDKQRKQPLADAAAVNATRWKLKEILKTTGLPVEIGSGGLTKFNRKHLGISKSHWTDAACVGKSTPETLNIRGYQPLLIKAMGYSFRQMVKSDKYGFPRGAPKLRQKSFFGFQTGDMVKAVVPKGKYAGTHTGRIAVRKKVSQMTIKSSRKLRSKSVRQMLNWAHYRFELFLKHKAAEYNKIVLDVSEAYTSKTVSWTGEILNNLGGKKVVTGNDGFRLDRDLNGARGILIKSVVEKFSTTLGDTPSVS

SEQ ID NO: 11070 - protein, 420 aa, unidentified
  REGION 1..420: note = Human gut metagenome
MQYVYVLNKHGEPLMPCSPGKARLLLKQQKACVVKRTPFTIKLLFGSAGYKQPITLGVDAGSKHVGLSASTEKRELYSEEFTPRSDVVELLSTRRQNRRSRRNRKTRYRVPRFDNRVHSKHKGWLAPSVEVKIQEHITVIKHICKILPISLVRVEKAEFDTQRLKAMLAGKPLPVGTDYQLGEMYDEYNVRQYVLKRDHYTCQCCGTHNTAKKVVKLHVHHLESRKTGGNAPSNLVTLCTTCHKNLHKGRVTLDGKERGKPLRDAAFMGIMRKTLMVRLKEELPIPVQGTYGYITKMRREQNDIKKSHTNDARCISKHPLAEPCSVCYRTKAIRHHNRQTHKANFSKKGIRKRSQMPYLVEGFRLWDKVLYKGQECFVSGRRSSGSFALKKLDGTSISKGVTFKKLRLLEPATNYLIERM

SEQ ID NO: 11071 - protein, 459 aa, Moorena sp.; identical to SEQ ID NO: 9064

SEQ ID NO: 11072 - protein, 424 aa, unidentified; identical to SEQ ID NO: 3351
  REGION 1..424: note = Human gut metagenome

SEQ ID NO: 11073 - protein, 424 aa, unidentified
  REGION 1..424: note = Human gut metagenome
MRVFVFNMRGVPLMPCTQRKARILLKEGKAVIYKYNPFTIQLTHATGENTQDCHVGIDTGAKHAGVAITSEGKVLFKGEIELRQDVKSNLDTRRIYRRSRRNRKTRYRQPRFLNRRKADKWLPPSLQNRLDHTLHWIDTLRGLVPSPTLHIEVGKFDTAKMIDPKIHGVDYQHGQTYGFFDERYYVFARDNYTCQCCGKSKGKILQTHHIIYRSNGGTDRADNLITVCTDCHTSKNHQKGGILYMWQEQHKKVRQYKEPPFMNTLRRRIFAKYPDAAITYGSETTPKRKEKGLDKTHYNDAIIISGVQTISENPDEWLFIRQFRKKKRSLHEGTPRKGRKEPNRTQKRNSKNTPYYRGYHLNDKVRVLGKTGYISGFTGGAAYVKDSDNQYITLPNKSYKQVGISNLQHVCHNNNWQYITKTTV

SEQ ID NO: 11074 - protein, 413 aa, unidentified; identical to SEQ ID NO: 2636
  REGION 1..413: note = Human gut metagenome

SEQ ID NO: 11075 - protein, 461 aa, Parasutterella sp.; identical to SEQ ID NO: 3646

SEQ ID NO: 11076 - protein, 427 aa, Nodularia sp.
MCKVFVIDTNKRPINPIHSAQARQLLRNKKAAIYRRFPFTIILKESRPYAPVADLRIKVDPGAKTTGIALVNDATGEVVFAAELKHRGFAIRDALTSRRQLRRGRRNRQTRYRKPRFLNRTRPEEWLAPSLMSRVHNVETWVNRLSKFAPITEISTELVKFDMQLMRQPEIEGKEYQQGTLAGYETREYLLEKWNRQCAYCGVKDLPLQIEHIHPRSKGGSNSITNLTLSCEKCNIKKGTKDIKDFLKKDPSKLQKILAQAKKPLADATAVNATRYKLLEVLKSTGLTIECGSGGLTKFNRTSQQLVKTHWLDAACVGKSTPILNIKGIKPLLITANGHGNRQMCGTDKFGFPSRHRTNKQIHFGFQTGDIIKAVVTSGKKVGEYLGRVLCRATGSFDIATKTGRISGISHKYCSAIHKKDGYSYVF

SEQ ID NO: 11077 - protein, 307 aa, Anoxybacillus sp.
LFVYVINKHGNPLMPCSPRKARILLKNKKAKVVKRTPFTIQLLYGSSGYKQPISLGVDTGTKHVGLSATTKNQVLLEAEVQLRTDIQELLATRRQFRRSRRNRNTRYRKARFLNRKKPNGWLAPSIQHKVDSHIKLVKWVHSLLPITHITVEVAQFDTQKIKNPDIQGAAYQQGEQLGFWNVREYVLYRDGHTCQWCKGKSKDPVLNVHHIESRKTGGDSPSNLMTLCKTCHDMIHREGLEHEIQRRFSSLKDASHMTVMRWFIWNGLKKVYPHANITYGISSSVFALLMDCLNLIWWMLVVLVEIH

SEQ ID NO: 11078 - protein, 436 aa, unidentified
  REGION 1..436: note = Human metagenome
MTKTLTTQTTQACVLDRQGKPLMPTTRLGKVYRLLKTQKAHIVSYEPFTIQLDYQPDTQVIQPMTLGVDSGAIHSGYSVANEHREYYSAEVIARNDISNRLSERHMYRQTRRSRKTRYRKPRFKNRKNKKKGWLPPSLEQKVAAQANEIDHIHRYFPIETIIVETAEFDIQKIKNPDISGIEYQQGTLQGYNIRNYLLEKHGRKCFYCGKAVSDFEVEHMLPKSKGGSNRIDNLTLSCHDCNEKKGTLTAEEFIQQTLPAQKATAKLKQLPKEKRLFKYMAYMNATRWALYDAIKERYPNVKMTYGYITKYNRIQAGLPKAHHIDAKCITGFSTVPSMSQTVVKVKMRRHNRQLHRATFSKGHVRKAASLPTTVFGFQLYDLVLFNNHRYFIKGRRSSGAFALVSVEGLKNEERMYKKLTVLAHTNAYLTNRYVNA

SEQ ID NO: 11079 - protein, 421 aa, Lactobacillus sp.; identical to SEQ ID NO: 5881

SEQ ID NO: 11080 - protein, 515 aa, unidentified
  REGION 1..515: note = Human gut metagenome
MIPNERRHLMPYIYVIGMDGKPQMPTKRRRHVQKLLDTGKARITERVPFTIQLLYDNDPVLQPVILAEDPGRTNIGLAALDLKGNLLLSAAVETRNKEIAKLMEKRRQCRRASRNGERKARQRLAKKYGTMIRGGMRMRKLPQYAADAFIICKVIRNTQARFCNRRRPDGWLTPSARHLVQTHINLVHKVQKYLPVTDVAIEVNRFAFMQLEDPAICGVDFQTGPLKGYDDRDAAVYDLQDGKCLMCKHEITQYHHIVPRSRNGSNTIGNIAGLCDQCHDRVHKDADFAEQMKEKKEGMDKKYGALSVLNQAIPFICKQLETEFGRGHVHYCTGRETSLVRQSTGYQKTRKNQLHEVDAWCIGALALAEIPENVPDFKEIHLIRQFRRQDRSLVNAQTERVYKLGGKMVAKNRKKRTGQEIYALEDWYNRQVETYGKQEADCMRSRLKITKSRRRYNNPNRMMPGAVFLYEGVRYVMRGQHCNGAYLQAVGMGNRDFPARKCKILTRNTGLVFVS

SEQ ID NO: 11081 - protein, 428 aa, unidentified; identical to SEQ ID NO: 5055
  REGION 1..428: note = Human gut metagenome

SEQ ID NO: 11082 - protein, 494 aa, unidentified; identical to SEQ ID NO: 5675
  REGION 1..494: note = Human gut metagenome

SEQ ID NO: 11083 - protein, 420 aa, unidentified; identical to SEQ ID NO: 6067
  REGION 1..420: note = Human gut metagenome

SEQ ID NO: 11084 - protein, 448 aa, Thiohalospira sp.; identical to SEQ ID NO: 3947

SEQ ID NO: 11085 - protein, 431 aa, unidentified
  REGION 1..431: note = Human gut metagenome
MPDKVYVISRLGHPLMPCSPAKARHLLDDKKAKVVKRMPFTIRLLYGSTKYIQPIILGVDAGSKTIGLSASTAKEEVFAAEVMPRNDVVENLSTRREFRRARRNRTTRYRKPRSDNRVRSNHERWLAPSVKVKIQEHITSIKRVCTILPISKVVIETAEFDLQLLKAIQEGKPIPEGEDYQKGEMYGSYNVCQYVLWRDNYTCICCGVRGTPKNPVRLHVHHFESRKYGGNAPDNHGTLCDDCHKKFHLGIITDVKLKTRRRQSTRDAAFMGIMRKTLMWRLRTELFIPVAETKGYITKATREKLLVLPKSHTRDALAIAQGRHGFGIKEYAYVEPANHIYTVRPVRHHNRQLHKASILKGGIRKRNQASKYVFGFRLYDKVLYQGKACFVWGRRTSGTFLLRTIDGIKVKDGVNYRNLTLLERSSNYLIA

SEQ ID NO: 11086 - protein, 416 aa, unidentified; identical to SEQ ID NO: 8069
  REGION 1..416: note = Human gut metagenome

SEQ ID NO: 11087 - protein, 446 aa, unidentified
  REGION 1..446: note = Ga0373626_0000420
MQQFKVKFKNTPRNTPLVPCSVNPVLNRLERVSVQDKVRTLNNLEVDQREQAPGFKSIVFVLSINGKPLMPCTSTKARHLLEGGKAHVVKQNPFVIKLNFECENQVQDCSLGIDSGFKNIGFSAITDKKEIVAGTLLLDQRTSERLIEKRMYRRGRRSRLWYRKPRFNNRKTAIGYLPPSTQRRFNTHITLINKLKKLLPIKNVVIEVGNFDIQKIENPDIAGIQYQQGSLFEYQNMRSFLMFREQGRCQLCGKEFSKGNSFHIHHIISRSNGGIDREKNLALLHERCHKKLHKNKLYDVLKKNKVYKDATFMSIIRNKFRNILSNCKLIYGNETFVKRNILRLEKSHYNDAFVIAGGNEQRKVAPIIFKQKHRNNRVLQLNRKGFKPSIRKQRYSIQPGDFVFIKRKIHIVKGCSTYGKTVCCSDGNFGIKKITTIFHTGSIYLT

SEQ ID NO: 11088 - protein, 451 aa, unidentified
  REGION 1..451: note = Human gut metagenome
MSVAVISKTGERLMPTSEYRARKLLKSGKAIKYSYHPFTIQLTERKTGNIQPIELCMDTGYIHIGISVKSEKHEYLTEQIDTLTDERSRHNARRMYRSQRRNRKRYRQPRFNNRKKDKGWIAPSLEHKKNIHVQTISRINNVMPLTDITMEMGNFDTQVLKAKEEGRPLPQGVDYQHGERYSIATLREAVFARDGYKCQCCGRTIKDGAILHVHHIKYRSQGGTNSISNLATVCDKCHTPKNHKPGGKLYGWKPKLPSFKGATFMTTIRWQLYNEAKALFPDIDIHITYGAATKERRRELNIDKSHINDAFVMGQFHPRHRIKAVLYKKKRRNNRCLEKFYDAKYIDSRDGKKRSGQELFNGRINRNHKKDSENLHQYRLQKVTAGKRTVRKQHYSVQPHDIIIYESRKRETTGCHCNGARVMLLPDKKSVSIKKIKIYRYASGYFKSTFN

SEQ ID NO: 11089 - protein, 344 aa, unidentified
  REGION 1..344: note = Human gut metagenome
VVENLSTRREFRRARRNRTTRYRKPRSDNRVRSNHERWLAPSVKVKIQEHITSIKRVCTILPISKVVIETAEFDLQLLKAIQEGKPIPEGEDYQKGEMYGSYNVCQYVLWRDNYTCICCGVRGTPKNPVRLHVHHFESRKYGGNAPDNHGTLCDDCHKKFHLGIITDVKLKTRRRQSTRDAAFMGIMRKTLMWRLRTELFIPVAETKGYITKATREKLLVLPKSHTRDALAIAQGRHGFGIKEYAYVEPANHIYTVRPVRHHNRQLHKASILKGGIRKRNQASKYVFGFRLYDKVLYQGKACFVWGRRTSGTFLLRTIDGIKVKDGVSYRNLTLLERSSNYLIA

SEQ ID NO: 11090 - protein, 413 aa, unidentified
  REGION 1..413: note = Human gut metagenome
MPCSPAKARLLLKEKKAIVVRRTPFTIQLTIATGEAKQPVSLGVDAGYKHVGLSASTEKAELYASEVELRQDVSDLLSARRALRQCRRNRKTRYRTPRFGNRIRTKRKGWLAPSVENRINAHLSRIESVLRLLPVTKITVETASFDTQLLKNPDIAGKEYQEGEQLGFWNVREYVLFRDGHVCHHCYGRSKDPVLNVHHLESRRTGGDSPGNLITLCETCHKALHRGEITLKAKRGQSFRAEAFMGIMRWEVLNRLKASHPELEVNNTYGYWTKHARIANGIAKSHCADAFCIAGNLGAERLGEFFFQKQTRRNNRQIHKLSILKGGRRKRNQAPFEVKGFRLFDKVACKGEESFIFSRRSSGYFDVRKLDGTRISAGISYKKLRLLEKRRTYLTEIRKEAFPPLPEGRSLRA

SEQ ID NO: 11091 - protein, 474 aa, Halomonas sp.; identical to SEQ ID NO: 6707

SEQ ID NO: 11092 - protein, 529 aa, unidentified; identical to SEQ ID NO: 6786
  REGION 1..529: note = Human gut metagenome

SEQ ID NO: 11093 - protein, 426 aa, Parasutterella sp.; identical to SEQ ID NO: 3045

SEQ ID NO: 11094 - protein, 465 aa, Marinobacter sp.
MAVLVLDRKKNPLMPCSEKRARLLLTRRRAVVVRVYPFTLRLKDRVGGAVQKVVLKIDPGSKETGLAVSRVSAQGEHVLCLIELIHRGRQISKALDQRRGFRSRRRGKLRYRVPRFNNRTKPKGWLAPSLQHRVDTTTSVIKRLRALVPVTSISQELVRFDLQQMENPEISGVEYQQGILLGYEVREYLLEKWCRECAYCAVTDTPLEIEHIVSKANGGSNRISNLTIACHDCNQEKGSQTLADFFQTSKRLKDKQPRMDNVLIQCKRPLRDAAAVNSTRWTLFQSLKTTELPVNVGTGGQTKFNRQRLGIPKTHALDAACVGIVEQVFDWQKTTLRIKATGRGSYKRTRLTKHGFPRGYLMREKSVHGFQTGDMVRANVPTGKKEGTWLGRVAIRKTGSFNIQTSDGAVQGIHHRHCQLIQRADGYGYHLHHKKEKGNRKVCRADARRALPPRPKRTGFPAQNR

SEQ ID NO: 11095 - protein, 447 aa, unidentified; identical to SEQ ID NO: 5309
  REGION 1..447: note = Human gut metagenome

SEQ ID NO: 11096 - protein, 421 aa, unidentified
  REGION 1..421: note = Human gut metagenome
MQYVYVLNMHGEPLMPCSPRKARLLLRGGKARVVKRTPFVIKLLHGSAGYKQSVVLGVDAGSKHVGLSACTKSIELYKEEMMPRNDVVGLLSARRQYRHSRRNRKTRYRAPRFDNRVHSKHKGWLAPSVEVKIQEHITAIKRVCRILPIVLVRVETAEFDTQRLKAMLEGRPLPVGIDYQRGEMYNEYNVRQYVLKRDRYVCQHCGAHPTSEKPVRLHVHHLESRHTGGNAPNNLIILCEHCHRALHEGKIKLRNDKKRGKSLRDAAFMGIMRDALLMRLRYKLSVPIEQTYGYITKLLREENKIAKSHTNDARCIAGFPKATPCDTLYRTRAIRHHNRQIHKAKILKGGIRKRNQSPYLVNGFRLWDKVRYNGEECFISGRRSSGYFAIKKYDGAVVSNSASYKKLTLIETATNYITERG

SEQ ID NO: 11097 - protein, 421 aa, unidentified; identical to SEQ ID NO: 6517
  REGION 1..421: note = Human gut metagenome

SEQ ID NO: 11098 - protein, 417 aa, unidentified
  REGION 1..417: note = Human gut metagenome
MPCSPAKARLLLEEKKAIVKRRTPFTIQLTIATGEAKQPVALGVDSGYKHIGLSATTEKAELYASEVELRQDITDLLSARLALRRSRRSRKTRYRAPRFDNRVANKREGRLAPSVENRIAAHMSRVEAVMRVLPVTAITVETAAFDTQLLKNPDITGAAYQQGEQLRFWNVREYVLFRDGHVCQHCRGKSKDPILNVHHIESRRTGGDAPNNLITLCETCHKAFHRGEIKLKVRRGKSFKAETFMGIMRRTLFERLKKAHPELNVRNTYGYLTKHKRISYGIAKSHCADAYCIADNLGAKRLEGFFFQKQTRKHNRQIHKLLILKGGLKKKNQAPYEVKGFRLFDKVICKGEEAFIFGRRTSGSFDVRRLDGTRISAGINYKKLRLLEPRTTYLTEFRKEAALPPLHECRGFRAEFL

SEQ ID NO: 11099 - protein, 418 aa, Exiguobacterium sp.; identical to SEQ ID NO: 2406

SEQ ID NO: 11100 - protein, 413 aa, unidentified
  REGION 1..413: note = Human gut metagenome
MTSYSFVLDANGKPLAPTKEQKAWFFIRKKRATLVSKYPMVIQLKKEIPEKEICQDEIRCGIDDGGLHVGIALVQKCKTKNKVVFKGTMEQRNDVKHLMEVRRGYRRYHRYHKRYRQARFDNRKSSKREGRIAPSILQKRQATIRVIHWLNKWINITNYWLEDVSVDIRALTDGYQSYRWQYKKSNRLDENIRKAAILRDDGKCMECGKSNCRLEVHHIKPRRRNGSNTLDNLITLCESCHQKTEGQEELYMDRYFSLLKSSDNKNLNDAQHVMIGKMWLRKQLSGLGVLYLTSGGDTANKRIDWNIEKSHANDAVCITDLQPDTCDMKEWTMKPMRRQSKAKTDHVLGIHHRDLVEYTFKNGETHRGYVTALYPEQKAINFQSPTKHCKKVNARKCKLLWKYSKIYWFENAS

SEQ ID NO: 11101 - protein, 591 aa, Moorena sp.
MDTIYVLNRDGRPLMPMHSWGRVQRFLKSGRASVVSSLPFTIRLKKQIEDPELDRCILGIDPGRTNIGLCVTDGKGKRQASRRGERKRRQRRAIHFDKSGETAMTEYWRVLPGTKKAVCQKHIRGQESKFMHRRRPKGWRTPTAEQLYRTHLNAVAKIEKLLPIADIVIEMNRFDFAKMENPGIRNWEYQRGRLFGFKNVQEAVIARQNGKCLLCGRPIEHVHHVRPRSQGGSDHIDNLAGLCCACHQKVHTDPAAKARLASEAKKRLKKYGALSVINQIMPALLDELAYRYLLWITTGWETAKTRRGCGLPEKEKDDGTHYIDAWCIAVSIMENRLYVPDSRDLDDVFHLMRQFRRHDRQKVEATKARSYYLDGRLVAKNRRRRTGQADGKDPKPALSEWRQGHEKDVARLTVRKSTRSYNDLKRVLPGAEVLCDEKRYVVKGKHNDRWIALDAADHTLEKAQSRFTLLHHNTGGMTCENGQIELFFHSATEGYKLELIKNDNRASFEMDCDHTLQYFEDKGYCTFAYESVIGKGHITILEGEEKVDALQKLMDHYHPGKHAYFNPAAIPRTTVYKLTVESVTGKRKKKK

SEQ ID NO: 11102 - protein, 545 aa, unidentified; identical to SEQ ID NO: 3709
  REGION 1..545: note = Human gut metagenome

SEQ ID NO: 11103 - protein, 466 aa, unidentified
  REGION 1..466: note = Human gut metagenome
LSIKPLINIGEGVIYSSICTGLSLQTYQKRKEVPCMVYVLDINGQPLMPTTRHGKVRRLLNSHLAKVVKRCPFTIQLLYQSTKEIQPVSLGVDAGSKHIGMAATTEKKVVYQEELSPRNDVVKLLSARRTLRRTRRNRKTRYRKPRFNNRVHSKHKGWLAPSVEVKIQEHITAIKRICQILPISEIHVEISEFDLQRLKAMEEGRTLPVGTDYQLGEQYDFYNTRQYVLHRDGYTFQCCGTHDNNIKLHVHHIESRQTGGDAPSNLITLCEHCHKALHKGKLELPKGKKRGKTYRDATFMGIMRKTLLERLRKEVDVPASGTYGYITKYWRERAGLEKSHINDAICISKYPYAKPLDTYYLTKAVRNHNRQIHKSNFSKGGIRKRNQAPYLVKGFRLFDKVLYQGKEYFIFGRRATGYFDIRTLDGTKVNKGSISYKKLRIQDTAKAYLKEARAIPHMNKFTCVLA

SEQ ID NO: 11104 - protein, 414 aa, unidentified
  REGION 1..414: note = Human gut metagenome
MPCSPAKARLLLKEKKAIVKRRTPFTIQLTITTGEAKQPVSLGIDAGYKHVGLSASTEKAELYASEVELRQDITDLLSARRALRQSHRNRKTRYRAPRFDNRISTKRKGWLAPSVENRINAHLSRIEAVLRLLPVTKITVETASFDLQLLKNPDISGKEYQEGEQLGFWNIREYVLCRDGHVCQHCYGRSKDPVLNVHHLESRRTGGDSPGNLITLCETCHKALHRGEITLKAKRGQSFRAEAFVGIMRWEVHNRLRALHPGIEVSNTYGYRTKHARIANGIAKSHCADAFCIAGNLGAERLCEFFFQKQTRRNHRQIHKLSILKGGIRKRNQAPFEVKGFRLFDKVACQGEEGFIFGRRSSGFFDVRKLDGTRISAGISCKKLHLLEKRRTYLTEIRKEEALPPLPEGRGLRA

SEQ ID NO: 11105 - protein, 340 aa, Moorena sp.
WGKTKNKVLFKATMQQRQDVNKKMELRSGYRRYRRSHKRYRPKRFNNRSSSKRFGRLPPTIKQKKQAILRVVKKLSKYIRFDKIVLEDVAIDIRVLTEGRKLYEWQYQHSNRLDENLRKATLMRDEYTCQMCGAEDTVLQAHHIIPTRDSGPDSIHNLITLCLDCHDKVTDNEYEYKDQFLDIISGREFSLIPAMHVMQGKTYLREELAKIANLEVTTGGDTANSRIDYEISKSHSNDAICVTGLLPVNMVKIKEWLIKPLRKKKKNRTMSLKGFKHRDIVRYTKRDGTTYIGQITALRVKNDKYNSKVCNFRTFEGETFRGYGLKNLELISRAKGLMFI

SEQ ID NO: 11106 - protein, 416 aa, unidentified
  REGION 1..416: note = Human gut metagenome
MVYVLDKNGQPLMPTDRHRKVRLMLQSGQAKVIKRCPFTIQLNYDSGHQTQEISLGIDAGSKHIGVSATTKIKVLYEVDVELRNDIVDLLSSRRELRRGRRNRKTRYRQAKFNNRRRGNGWLAPSIRQKIGTHLTVVENICKILPISRIMVETASFDIQKIKNPDIQGAEYQQGDQLEFWNVREYVLFRDGHTCQCCKGKSKDKILNVHHIESRKTGGNAPNNLITLCETCHTGYHKGTVQLPKAIKRGMRFKDAAFMGIMRWAFYEALKQQYEPVGTPVHNTYGYITKHTRIAYNLPKEHYVDARCISGNPEASSNGEYYYQKKVRCHNRQIHKLTILKGGIRKQNQATYLVKGYRLFDKVSYQGKGYFVFGRRQSGFFDIRTLSGEKVNKGSLSCKKLKFIATRTYYLTERRAV

SEQ ID NO: 11107 - protein, 413 aa, unidentified; identical to SEQ ID NO: 2636
  REGION 1..413: note = Human gut metagenome

SEQ ID NO: 11108 - protein, 426 aa, unidentified
  REGION 1..426: note = Human gut metagenome
LAKDLYRSIDREETNLRVYVLNKRGEPLMPCSAAKARILLKEKKAVVKRRTPFTIQLTIATGETKQPVTLGVDSGYRHVGLSASTEKAELYASEIELRQDVSELLAGRRALRHARRSRKTRYRAPRFDNRKREKGWLAPSVENRIGAHVSRVEAVLRILPVTKIIVETASFDVQRLKNPDIQGVEYQQGEQLGFWNVREYVLFRDGHECQHCHGKSKDKVLNVHHIESRRTGGDAPNNLITLCETCHKAFHRGEIELRVKRGRSFQAETFMGVMRWSFFERLRASHPEIEVRNTFGYLTKNTRISHGIEKTHCADAFCIAGNLKAKRLGYYFFQKQTRRHNRQIHKLTILKGGVRKRHQTPYEIKGFRLYDKVLYRGKVAFIFGRRSSGYFDIRTLDGERISASVSYKKLRLLEKRRTYLIELRRN

SEQ ID NO: 11109 - protein, 417 aa, unidentified
  REGION 1..417: note = metagenome
MPCSPAKARLLLKEKKAIVKRRTPFTIQLTIATGEAKQPVALGVDSGYKHIGLSATTEKAELYASEVELRQDITDLLSARLALRRSRRSRKTRYRAPRFDNRVASKRKGWLAPSVENRIAAHMSRVEAVMRVLPVTAITVETAAFDTQLLKNPDIAGEAYQQGEQLGFWNVREYVLFRDGHVCQHCRGKYKDPILNVHHIESRRTGGDAPNNLITLCETCHKAFHRGEIKLKVRRGKSFKAATFMGIMRWTLFERLKKAHPELSVRNTYGYLTKHKRISHGIAKSHCADAYCIADNLGAKRLEGFFFQKQTRKHNRQIHKLSILKGGLRKKNQAPYEVKGFRLFDKVICKGEEAFIFGRRTSGSFDVRRLDGTRISAGISCKKLRLLEPRTTYLTEFRMEAALPPLHECRGFRAEFL

SEQ ID NO: 11110 - protein, 420 aa, unidentified; identical to SEQ ID NO: 6507
  REGION 1..420: note = Human gut metagenome

SEQ ID NO: 11111 - protein, 529 aa, unidentified; identical to SEQ ID NO: 5528
  REGION 1..529: note = Human gut metagenome

SEQ ID NO: 11112 - protein, 468 aa, Petrotoga sp.; identical to SEQ ID NO: 3825

SEQ ID NO: 11113 - protein, 518 aa, unidentified; identical to SEQ ID NO: 7468
  REGION 1..518: note = Human gut metagenome

SEQ ID NO: 11114 - protein, 346 aa, unidentified; identical to SEQ ID NO: 4983
  REGION 1..346: note = Human gut metagenome

SEQ ID NO: 11115 - protein, 404 aa, Salipiger sp.
LLRDGKAAVFRRYPFTIILKRKVPDAEPAPVEVKIDPGSKVTGLALVQGDKVIWGGELTHRGHQIRDRLQMRRERRRGRRNKLRYRKPRYRTKAQINNAGRKREKGWLAPSLMHRVETIMTWMDRFCRYAPAASIAMELVRFDLQQMQNPEISGVEYQQGDLAGYEVKEYLLAKWGRKCAYCGAEGRPLEVEHIQPRSRGGSNRVSNLTLACEPCNQKKGNRPVEDFLSGRPDLLARIRKQAKQPLRDAASVNSTRWVLINALKLTGLPVTTGTGGRTKYNRKRMGWPKAHWLDAAAVGRVDALTLRTDKPLLISAKGQGGRQKGVFDKHGQPRRNKAGAAQIRPLKPIHGWRSGDIAKARGLEGRISPRTKGNFELRAAGRKPCSFPLRDFAAIHRNDGYAYQ

SEQ ID NO: 11116 - protein, 406 aa, unidentified; identical to SEQ ID NO: 2703
  REGION 1..406: note = Human gut metagenome

SEQ ID NO: 11117 - protein, 470 aa, unidentified; identical to SEQ ID NO: 2949
  REGION 1..470: note = Human gut metagenome

SEQ ID NO: 11118 - protein, 452 aa, Polaromonas sp.
MAVFVLDRSGQPVMPCSEKRARLLLQSKRARVHRVMPFTIRLIDRSQADCLLQPLRLKLDPGSRATGLALVRDIETIEPAMGEVTRGAAVVSLLELEHRGRQISEALTARRQMRRRRRNQLRYRAPRFLNRGNKQKGWLAPSLQHRVDTTAAWVARIQRWAPVTALSSELVRFDMQQLQNTEIEGAEYSQGTLAGYEVREYLLEKWKRTCAYCDAQNTPLQIEHIEPRARGGSHRISNLCLACQPCNQKKAARTLQDFLKKDPKRLARILAQAQRPLRDAAAVNVTRWALANALKTTGFPLELASGGRTKFNRCTLDVPKTHALDAACVGQVEAITGWQQPAFYTLTIKAMGRGSYQRTRLDAYGFPRGYLMRAKSVHGFQTGDRVKAVVPQGKKVGTHVGRVAIRKTGSFNITTPAGVVQGISHKHCRIVQRNDGYGYFFHRADLTQDANR

SEQ ID NO: 11119 - protein, 431 aa, unidentified
  REGION 1..431: note = Human gut metagenome
MPNKVYVINKHGRPLMPCSPAKARHLLDEGKAKVKKRTPFTIQLVYGSSGYTQEVILGVDAGSKTIGMSASTTKEELLSAEVKPRNDVVDLLSTRREFRRAQRNRKTRYRKPRFDNRVRSKHKGWLAPSVEVKIQEHITAIRRVCGILPVSKVVIETAEFDLQMLKAIADGKPVPQGEDYQQGEMYGHYNVRQYVLWRDGYTCQCCGAHTTKKKEVRLHVHHLESRKVGGDAPDNQVTLCESCHEKLHKGLIAEKDFKKRKRKSTRDATFMGIMRKTLMQRLCSELPIPVIETRGYITKATREKLLVLPKSHTNDALAIAQGKQGFNVGYLPEIAQIDKIYTIRPVRHHNRQLYKATILKGGIRKSNQTKKYVFGYRLFDKVQFNEQDCFIWGRRTTGIFTIKTINGKMIKDGISFKKLKLAEKSTSYLIA

SEQ ID NO: 11120 - protein, 443 aa, Anoxybacillus sp.
MVEENMTCFMQRKGENPMVFVLDTNKRPLAPCHGAVARKLLKQGKAAIYKRFPFTIILKKSVDESENETTYRLKIDYGSRHTGLAILRGQEVVWLGQLDHRTDIKERIDKRRAFRRARRNRKTRYRKPRFLNRKRKEGWLPSSLESRVQNIQTWVNRLKKLCPIGYISYENAKFDTQLMRNPEINGVEYQQGTLQGYEVREYLLEKFGRKCCYCGKENVPLEVEHIIPKSRGGTDRVDNLCLACHDCNQRKGSKTAEEFGYPHIQKQVKESLKDASAINSTRWKAYEVLKQTGLDVECGTGARTKMNRIRLDLPKTHYFDACCVGESTTNHLYFKTKEVLFIKAKGRGSRSRTNLDRYGFPRGYLARQKFFFGFQTGDMVKAVVPRGKYQGVWFGEVACRKTGSFDIKGKDGKRIAQGINYRYVQVIQRFDGYAYGKGGAELA

SEQ ID NO: 11121 - protein, 411 aa, unidentified; identical to SEQ ID NO: 6901
  REGION 1..411: note = Human gut metagenome

SEQ ID NO: 11122 - protein, 427 aa, Moorena sp.; identical to SEQ ID NO: 3216

SEQ ID NO: 11123 - protein, 432 aa, unidentified; identical to SEQ ID NO: 6070
  REGION 1..432: note = Human gut metagenome

SEQ ID NO: 11124 - protein, 312 aa, unidentified
  REGION 1..312: note = Human gut metagenome
SAPRFNNRVHGKHKGWLAPSVEVKIQEHITVIKRICRILPVTLVRVETAEFDTQRLKAMLAGKPLPVGTDYQLGEMYDKYNVRQYVLKRDNYTCQCCGAHTTAKKAVKLRVHHLESRKVGGNAPSNLITLCTTCHNALHKGKVSLDGKERGKPLRDTAFMGIMRKTLMTQLREELPIPVQGTYGYITKMRREQNNIKKSHVNDARCISKHPLAEPCSVCYRTKAIRHHNRQTHKANFSKGGIRKRSQMPYVVEGYRLWDKVLYNGQECFVSGRRASGSFTLKKLDGTRVSKGVTFKKLQLLEPATNYLIERM

SEQ ID NO: 11125 - protein, 423 aa, Moorena sp.; identical to SEQ ID NO: 2845

SEQ ID NO: 11126 - protein, 535 aa, unidentified; identical to SEQ ID NO: 6116
  REGION 1..535: note = Human gut metagenome

SEQ ID NO: 11127 - protein, 470 aa, unidentified; identical to SEQ ID NO: 2925
  REGION 1..470: note = Human gut metagenome

SEQ ID NO: 11128 - protein, 431 aa, unidentified
  REGION 1..431: note = Human gut metagenome
MPNKVYVINKHGRPLMPCSPAKARHLLDAGKAKVKKRTPFTIQLVYGSSGYTQEVILGVDAGSKTIGVSALTKKEELFAANVIPRNDVVDLLSTRREFRRARRNCKTRYRKPRFDNRVRSKHKGWLAPSVEVKIQGHITAIRRVCGILPVSKVVVETAEFDLQLLKAIEKGKPVPQGEDYQQGEMYGHYNVRQYVLWRDDYTCQCCGAHTTKKKEVRLHVHHLESRKTGGDAPSNLITLCDSCHEKLHKGLIAEKDFKKRKRRSTWDATFMGIMRKTLMQRLCSELPIHVVETRGYITKATREKLLVLPKSHINDALAIAQGKHGFNVGYLPGILQIDMIYTIRPVRHHNRQLHKATILKGGIRKSNQTGKYVFGYRLFDKVQFNGQDCFIWGRRTTGIFTIKTINGKMIKDGISFKKLKPVEKSTSYLIA

SEQ ID NO: 11129 - protein, 456 aa, unidentified
  REGION 1..456: note = Marine metagenome
MQRVFVLGKNKERLSPCTPARARKLLSKNKAAVFRQFPFTIILKERETGNTQPLYFKIDQGSKTTGISLVSINKNSNKVIYACNLVHRGHAISESLTKRRAIRSSRRSRKTRYRKPKWTNTMSKKQFEHINKRPKGWLAPSIKSRLDNTVNLFNKLNKLTPITNVSIENVRFDMQKINNPTISEIGYQQGDLFGFEVKEYLLYQHKHTCAYCHGLSKDPILEIEHILCKSKGGTNRLSNLSLACRKCNQDKGSLLPNEWLQKLSKSKSALNKKRFTLFSKVLKGVKPSLKDAAAVNSIRNALVNSFNLPIELGSGGLTKYNRKQNNYPKEHWIDAACVGLSGEEIHIPTSLIPVEIKANGRGSRQMCRIDKNGFPRTSAKKASNKFNFKTGDIVIAKVKKGKKQGTYLGRVAVRESGYFNITQKSGVVQGISYQYCQLLHKNDGYSYSNLVNLITT

SEQ ID NO: 11130 - protein, 456 aa, unidentified; identical to SEQ ID NO: 5876
  REGION 1..456: note = Human gut metagenome

SEQ ID NO: 11131 - protein, 426 aa, Moorena sp.; identical to SEQ ID NO: 3201

SEQ ID NO: 11132 - protein, 461 aa, unidentified
  REGION 1..461: note = Human gut metagenome
VQPLYLGIDPGRTNIGVAVVKADGTAVFAAHLETRNKKIPKLMQDRKKARRARRTNGRRCRRQRRAKANGTISKKCVKQDTAQSKNPSKRAKEIGVIKRHLPGCKKDVLCVGIKNKEAKYTNRARLEGWLTPTANQLLQTHINLVKKIQKFLPISDVVLEVNKFAFMRLDNPNIQKWQYQRGPLYQKGSLENAVSEMQEHHCLFCEKPIEHYHHVVPKSENGSNTIANIVGLCAEHHNLVHKDVAWQEKLVEEKTGLNKKYGALSVLNQIIPALTKELSFLFPKHSFMTNGKSTHDYRAAHGISKDHWLDAYCIACSVLPIDVCDSTINNCVPYELKQFRRHDRRALNNENMNRVYTLNDKVVATNRHKATEQEAASLEEFRKEHPNDVCKLKVKEHHPTYRNMNRNYPGSVFLVGKQIHVMQGIASSKDGKATKYNDTRATTIAAGKCKFVAKNSGILFV

SEQ ID NO: 11133 - protein, 431 aa, unidentified; identical to SEQ ID NO: 2952
  REGION 1..431: note = Human gut metagenome

SEQ ID NO: 11134 - protein, 277 aa, unidentified
  REGION 1..277: note = Human gut metagenome
MPNKVYVINKHGRPLMPCSPAKARHLLDEGKAKVKKRTPFTIQLVYGSSGYTQEVILGVDAGSKTIGMSASTTKEELLSAEVKPRNDVVDLLSARREFRRARRNRKTRYRKPRFDNRVRSKHKGWLAPSVEVKIQEHITSIKRVCRILPVSKVVIETAEFDLQMLKTIADGKPVPQGEDYQKGEMYGHYNVRQYVLWRDNYTCQCCGAHANKKKEVRLHVHHLESRKTGGDAPDNLITLCESCHEKLHKGVIAEGDCKSVSVVPHGMPHSWASCGRL

SEQ ID NO: 11135 - protein, 431 aa, unidentified
  REGION 1..431: note = Human gut metagenome
MPDKVYVISRLGHPLMPCSPAKARHLLDDKKAKVVKRMPFTIRLLYGSTKYIQPIILGVDAGIKTIGLSASTAKEEVFAAEVMPRNDVVENLSTRREFRRARRNRTTRYRKPRSDNRVRSNHERWLAPSVKVKIQEHITSIKRVCTILPISKVVIETAEFDLQLLKAIQEGKPIPEGEDYQKGEMYGSYNVCQYVLWRDNYTCICCGVRGTPKNPVRLHVHHFESRKYGGNAPDNHGTLCDDCHKKFHLGIITDVKLKTRRRQSTRDAAFMGIMRKTLMWRLRTELFIPVAETKGYITKATREKLLVLPKSHTRDALAIAQGRHGFGIKEYAYVEPANHIYTVRPVRHHNRQLHKASILKGGIRKRNQASKYVFGFRLYDKVLYQGKACFVWGRRTSGTFLLRTIDGIKVKDGVSYRNLTLLERSSNYLIA

SEQ ID NO: 11136 - protein, 414 aa, unidentified
  REGION 1..414: note = Human gut metagenome
MPCSPAKARLLLKEKKAIVVRRTPFTIQLTIATGETKQPVSLGVDAGYKHVGLSASTEKAELYASEVELRQDITDLLSARRALRQSRRNRKTRYRAPRFDNRIRTKRKGWLAPSVENRINAHLSRIEAVLRLLPVTKITVETASFDLQLLKNPDIAGKEYQEGEQLGFGNIREYVLCRDGHVCQHCYGGSKDPVLNVHHLESRRTGGNSPDNLLTLCETCHKALHRGEITLKTKRGQSFRAETFMGIMRWEVLNRLKASHSELKVHNTYGYLTKHARIENGIAKSHGADAFCIAGNLGAERLGEFFFQKQTRRNNRQIHKLSILKGALRKRNQAPFEVKGFRLFDKVACQGEEGFIFGRRSSGFFDVRKLDGTRISAGISYKKLHLLEKRQTYLIEIRKEEAFPPLPEGRGLRA

SEQ ID NO: 11137 - protein, 450 aa, Moorena sp.
MQKLSVELKNAPWGAPQAPRSASGGLNREVTLSGDRKVLADNGSDVDRQSGKTEQDPRVPVLNMRGEPLMPTTPGKARRLLDQDKAEVVCRKPFSIQLKYATGENKQPLKLGKDPGYEQTGISIVDKENEREVFGAEVRHRTDIPRKMLRRSKYRRNRRNRLWYRKPRFDNPKTEDGWLAPSVEHKLDSNVRLTEKLKELFPITETVIEVAKFDQQKMRNPEIEGIEYQHGTLYGYNVKHYLLEKFDYQCVYCGDEDVPLEVEHIVPKSRGGTDRVDNLTISCPDCNQEKGDQTAEEFGHPEVQERAKETLKETAFMNQVRWKLVDELDAEPTYGHITKKNRTDMDIEKSHINDAFVIAEGTDDMERCKHITSEQVRRNNRSLQITRKRYGRSIRKQRYDLQPNDLVRYESKEHRVKGVHCKGSRVVLDNGKSVSIKDVELVCYGKGLFS

SEQ ID NO: 11138 - protein, 423 aa, Lactobacillus sp.; identical to SEQ ID NO: 5050

SEQ ID NO: 11139 - protein, 425 aa, Moorena sp.
MSNFVFVLDTHKRPLDPIHPGTARHLLNTGKAAVFRRYPFTIILKEACLDVPVQGLELKLDPGSKVTGIAVKRGNKIIFGAELQHRGQQIKDALLSRRQLRRSRRNRKTRYRQARFLNRTRPDGWLAPSLQHRADTVLTWVNQFRRLAPITSIAQELVRFDLQLMQNPEISGVEYQQGELQGYEVREYLLTKWNRKCAYCGAENVPLEVEHIQPRSKGGSDRVSNLALACHPCNQSKGNQDIRDFLSGKPDLLNRILKQAKLPLKDAAVVNSTRWALFNALKATGLPVATGTGGQTKFNRTRLDLPKSHWLDAACVGQVESLEVLTSKPLLIAAKGHGTRQMCRTDKFGFPSRHVPRNKFVKGFQTGDIVKAIVTTGKKVGTYVGRVAVRSTGSFNISTAQGLVQGINHKYCNPIHRKDGYSYAF

SEQ ID NO: 11140 - protein, 428 aa, Moorena sp.
MSKVLVIDPDKKPQNPVHPAQARQLLRDSKAAIYRKFPFTIILKELRPDVSVHPLRIKIDPGAKTTGIAVVNDSTGEVVLAIELQHRGFQIRDALTSRRQLRRSRRNRTTRYRQPRFDNRKRPEGWLPPSLISRVCNIETWVNRLHNFAPISNISQELVRFDTQLMQNPDVQGKEYQQGTLAGYETREYLLEKFDRKCAYCDKKDVPLQIEHIHSRAKGGSNRISNLTLSCEKCNIKKGTQDIKDFLKKEPTRLKKIEQQCKKPLADTAAVNATRFKLLEVLKSTLIPVETGSGGLTKFNRSQRELDKTHWIDAAVVGTSTPEKLIIKNVKPLIVVAVGHGTRQMCRTDKYGFPNRYVPREKKHFGFQTGDIVKAVVKTGKKVGEYIGKVAIRSSGSFNISTKNGLVQGISYKYCKRIHAKDGYSYAV

SEQ ID NO: 11141 - protein, 442 aa, unidentified
  REGION 1..442: note = Human gut metagenome
MSTSVFVLDKKHRPLMPCRPARARRLLRAGRARVVKRFPFVIRLVDRTVEQSEVQPVLIKLDPGSRETGAAVVRDDEKKRHHALAFFVIKHRGGAIRDALKARSAFRRRRRSQNFRCRSPRFLNRVKPKGWLPPSLRHRVETTLSFVRRMCRYLPVSGIAAELVKFDSQKLQNPEVSGVKYQQGTLFEYEVREYLLEKFGRKCVYCGAEGVPLNIDHVVPRAKGGSNRVSNLVLACVSCNQKKGARSLEDFLKGKPEVLARVRRELKTPLRDAAAVNATRWVLFNELKATGLPVETGSGALTKFNRHAFGVEKEHWLDALCVGRLNGVVTRKGLNVLEIRCMGRGSRQRTRLTKYGFPRGYLMRQKCVHGFATGDMVEANVPKGKKAGLWRGRVAVRVSGSFNIQTPKGVIQGVGWKHCRLISHNDGYGYAWLGHAPHSSPA

SEQ ID NO: 11142 - protein, 933 aa, Streptomyces sp.; identical to SEQ ID NO: 10486

SEQ ID NO: 11143 - protein, 450 aa, Moorena sp.; identical to SEQ ID NO: 2935

SEQ ID NO: 11144 - protein, 414 aa, unidentified; identical to SEQ ID NO: 2588
  REGION 1..414: note = Human gut metagenome

SEQ ID NO: 11145 - protein, 427 aa, unidentified
  REGION 1..427: note = Human gut metagenome
LRVFVLNKRGQPLMPCSPAKARLLLKERKAIVKRRTPFTIQLTIATGEAKQPVMLGVDSGYKHIGLSATTEKAELYASEVELRQDITDLLSARLALRRSRRSRKTRYRAPRFDNRVASKREGWLAPSVENRIAAHMSRVEAVMQVLPVTAITVETAAFDTQLLKNPDIIGAAYQQGEQLGFWNVREYVLFRDGHVCQHRRGKSKDPILNVHHIESRRTGGDAPNNLITLCETCHKALHRGEIKLKVKRGKSFKAETFMGIMRWTFFERLKKAHPELNVRNTYGYLTKHKRISYGIAKSHCADAYCIADNLGAKRLEGFFFQKQTRKHNRQIHKLSILKGGLRKKNQAPYEVKGFRLFDKVMCKGEEAFIFGRRTSGSFDVRRLDGTRISAGINYKKLRLLEPRTTYLTEFRKEAALPPLHECRGFRA

SEQ ID NO: 11146 - protein, 415 aa, unidentified; identical to SEQ ID NO: 2674
  REGION 1..415: note = Human gut metagenome

SEQ ID NO: 11147 - protein, 430 aa, unidentified
  REGION 1..430: note = Human gut metagenome
MPKVYVLNRHGRPLMPCTPAKARHLLDAGEAKVRHRTPFTIQLLYGSTGYTQEVILGVDAGSKTIGLSAATETEELFSAEVKPRNDVVELMSARRQFRRARRNRTTRYRKPRFDNRVRSKHKGWLAPSVEVKIQEHMTAIRRACAILPVSKVVVETAEFDLQLLKAVAEGKPVPQGEDYQKGEMYGHYNVRQYVLWRDSYTCCICGVHGSVRKGVPLHVHHLESRRVGGDAPDNLVTLCTACHDKLHKGIIMAADIKKRKRRSTRDATFMGIMRMTLLRRLREQLPVPVVETRGYITKATRENLLVLPKSHANDALAIAHGPQGFRAEHLPNIRQADRLYTIRPVRHHNRQLHKATILKGGVRKTNQAEKYICGFRLYDKVLYNGIECFVWGRRTSGSFLLRQLNGEKVKDGVSYKHLKLLERSQSYLVA

SEQ ID NO: 11148 - protein, 420 aa, unidentified; identical to SEQ ID NO: 3247
  REGION 1..420: note = Human gut metagenome

SEQ ID NO: 11149 - protein, 431 aa, unidentified; identical to SEQ ID NO: 2977
  REGION 1..431: note = Human gut metagenome

SEQ ID NO: 11150 - protein, 421 aa, unidentified
  REGION 1..421: note = Human gut metagenome
MIYVRSKDGKALMPSERGGRIGYLLRHGKAHVVSRVPFVVQLDYESTTYTQEVSLGIDAGSKHIGVSASSEKKEQLAAQVELRSDVVNLLSTRRELRRARRNRKTRYRKVRFDNRKKKDGWLAPSIKQKVESHLKVIRLAHKLLPITKTTIEVAQFDAQKIKNPDIKGDEYQQGEQIGFWNVREYVLARDGHRCVHCKGKSKDPILNVHHLESRKTGGNSPSNLVTLCETCHKAYHCGEFDLKIKRGTALRDAAVMNIMRWAVYERAKEEFGNVNLTYGYITKHTRIENGIAKTHAADAFCIAKNVNAMRLSFFFMCRCVPRHTRVLHVANPKKGGIRRSTIASHKIGKSRFQRFDMVRWKGKECFIFGSTNGRPILRYIEGIQVANQLSVNIKAIKFLKRIRYNILVEERTSESWIENES

SEQ ID NO: 11151 - protein, 430 aa, Moorena sp.; identical to SEQ ID NO: 9911

SEQ ID NO: 11152 - protein, 512 aa, unidentified; identical to SEQ ID NO: 4031
  REGION 1..512: note = Human gut metagenome

SEQ ID NO: 11153 - protein, 426 aa, unidentified
  REGION 1..426: note = Human gut metagenome
LAKDLYRSIDREETNLRVYVLNKRGEPLMPCSSAKARILLKEKKAVVKRRTPFTIQLTIATGETTQPVTLGVDAGYKHVGLSASTKKAELYASEIELRQDVSELLAGRSALRHARRSRKTRHRAPRFDNRKRDKGWLAPSVENRIGAHVSRVEAVLRILPVTKIIVETASFDVQRLKNPDIQGVEYQQGEQLGFWNVREYVLFRDGHECQHCHGKSKDKVLNVHHIESRRTGGDAPNNLITLCETCHKAFHRGEIELRVKRGRSFQAETFMGVMRWTFFERLRARHSEIEVRNTFGYLTKNTRITHGIEKTHCADAFCIAGNLKAKRLGYYFFQKQTRRHNRQIHKLTILKGGARKRHQTPYEIKGFRLYDKVLFQGKTAFIFGRRSSGYFDIRTLDGERISASVSYKKLRLLEKRRTYLIELRRN

SEQ ID NO: 11154 - protein, 408 aa, unidentified; identical to SEQ ID NO: 10304
  REGION 1..408: note = Human gut metagenome

SEQ ID NO: 11155 - protein, 418 aa, unidentified; identical to SEQ ID NO: 8891
  REGION 1..418: note = Human gut metagenome

SEQ ID NO: 11156 - protein, 477 aa, unidentified; identical to SEQ ID NO: 2707
  REGION 1..477: note = Human gut metagenome

SEQ ID NO: 11157 - protein, 406 aa, unidentified; identical to SEQ ID NO: 2703
  REGION 1..406: note = Human gut metagenome

SEQ ID NO: 11158 - protein, 465 aa, unidentified; identical to SEQ ID NO: 10623
  REGION 1..465: note = Human gut metagenome

SEQ ID NO: 11159 - protein, 544 aa, unidentified
  REGION 1..544: note = Human gut metagenome
MKQKKQKVMVYILNKKGKPLMPTTRCGHVRKLLNSKKAVVVNSNPFTIRLKYDTPNGVQDVFAGIDSGRENIGSGVSNEDGDCLYLGELKTSNKSIKLKMTERAGFRKERRRHDRQNKQRKARKDHTEIQNGNADICRTTISCKSVQISYPAAEKSVTHKIIRGKEGKFANRHRDEGWITPSARQLVQMHMNDLKSMCKILPISHVTLERVAFDFQKLENENIKVWEYGKGKLYGYDSPEEYIHDVQDGKCLVCGKPHIDYLHHIIPRSKGGSDKVSNIAGLCYDCHYGPMGVHNCRETQDRLPELKNEANKQYKVNLLNSVMPVLIEEMDKFCKANSIIFSICEGHDTAKVRDMYDLQKDHCLDGFAISLVGRNVKSVDVMPDRIYQKQRYKKKSKNIIQKRNCREYYDGKKLVAVNRHKGTDQKADSLEEYMNTYAETHTADECKKHFDSLTVKPARRTYTFHKKGCICPFHIGDKVRYEKKNKIKGNTKVETFICESIHFYKDKNKAKVEHNKTKSKRMKFCRVLEAGCTPYIDYRKLALM

SEQ ID NO: 11160 - protein, 512 aa, unidentified
  REGION 1..512: note = Human gut metagenome
MSTVYVLNKDGKPLMPTTRCGHVRHLLKEQKARAVTSKPFTIQLLYETDDVVQPLYLGIDPGRTNIGVAVVKADGTAVFTAHLETRNREIPKLMKKRKDSRRTRRTNGRRCRRQRRAKANGTISKKCVKQDTAQNGSVSKRAKKIGVIKRHLPGCEKEVLCIGIKNKEAKFSNRVRPEGWLTPTANQLLQTHINLVKKIQKFLPISDVVLEVNKFAFMQLDNPNIQKWQYQQGPLYQKANLEEAVSEMQEHHCLFCKKPIAHYHHVVPQSENGSDTIGNIVGLCTKHHDLVHKDTEWQKKLAKKKTGLNKKYGALSVLNQIIPALTKELSSLFPKHFFATNGKSTYDYRAAHGVSKDHWLDAYCIACSVLADDVCDNNINSHVPYELKQFRRHDRRALHKENMSRVYTLNGKSVATNRHKATEQTTDSLEEFRQRQPNDVCKLKVKEHHPEYRNPKRNFPGCVFLVGKHTHVMQGTSGSHNGKADGYYDTNGNSYSSGECKFVAKNGGIVFA

SEQ ID NO: 11161 - protein, 421 aa, unidentified
  REGION 1..421: note = metagenome
MRGQPLMPCSPAKARHLLKAGKAVVKRRTPFTIQLRIATGETKQNVTLGVDAGAKHVGLSATTEKEEVFASEVELRQDITGLLAARLSLRRERRQRKTRYRAPRFLNRVRSKHKGWLAPSVENRIQAHMSRIDAICGLLPVTKIVIETASFDIQKIKHPDVEGTDYQQGDQLGFWNVREYVLFRDGHVCQHCHGHAKDKILNVHHLESRQTGGDAPNNLITLCETCHKAYHAGKIKLKVKRGQSFKAETFMGIMRWTLLDRVRKAHPDLPVENTYGYLTKNTRITLGLRKTDCIDAYCIAGNLNARRRGVFLYQRQVRKHNRQIHRCTVLSKTLKDGTKVGYRKLNQTPYLVKNFRLFDKVRCLGQTGFIFGRRSSGSFDVRRLDRVKLSSNISYKKLTLLEKRRTFLTELRKEDGASSPV

SEQ ID NO: 11162 - protein, 422 aa, unidentified; identical to SEQ ID NO: 5457
  REGION 1..422: note = Human gut metagenome

SEQ ID NO: 11163 - protein, 431 aa, unidentified
  REGION 1..431: note = metagenome
MPNKVYVINKHGRPLMPCSPAKARHLLDAGKAKVKKRTPFTIQLVYGSSGYTQEVILGVDAGSKTIGMSASTTKEELLSAEVKPRNDVVDLLSTRREFRRARRNRKTRYRKPRFDNRVRSKHKGWLAPSVEVKIQEHITSIKRVCRILPVSKVVIETAEFDLQLLKAIEEGKPVPQGEDYQQGEMYGHYNVRQYVLWRDGYTCQCCGAHATKKKEVRLHVHHLESRKVGGDAPDNQVTLCESCHEKLHKGLIAEKDFKKRKRRSTRDATFMGIMRKTLMQRLCSELPIPVVKTRGYITKATREKLLVLPKSHTNDALAIAQGKRGFNVGYLPEIAQIDKIYTIRPVRHHNRQLHKATILKGGIRKSNQTEKYVFGYRLFDKVQFNGQDCFIWGRRTTGIFTIKTINGKMIKDGISFKKLKPVEKSTGYLIA

SEQ ID NO: 11164 - protein, 494 aa, unidentified; identical to SEQ ID NO: 5675
  REGION 1..494: note = Human gut metagenome

SEQ ID NO: 11165 - protein, 476 aa, unidentified
  REGION 1..476: note = Human gut metagenome
LEVVGTEGVSHPGLPGKYKHKGGQLMSVAVISKTVERLMPTSEYRARKLLKSGKAIKHSYHPFTIQLTERETGDIQLIELCMDTGYIHIGISVKSKKHEYLAEQIDTLTDERGRHDACRMYRRQRRSRKRYRQARFNNRKRDQGWIAPSLEHKKKIHIQAISRINKVMPITDITMEMGNFDTQVLKAKEEGKPLPQGAEYQHGERYGIATLREAVFARDGYKCQCCGRTIKDGAILHVHHIKYRSQGGTNSMSNLATVCDKCHTPKNHKPGGKLYNWKPKLPSFKGATFMTTIRWQLYSEVKALFSDIDIYIAYGAATKERRRELDIDKSHINDAFVMGQFHPKHRIKAVLYKKKRRNNRCLEKFYDAKYIDSRDGKKRSGQELFNGRINRNHKKDSENLHQYRLQKVTAGKRTVRKQHYKIQPHDIVIYENRKRETAGCHCNGTRMMLLPDKKSASIKKVKIYRYAGGYFKSAFN

SEQ ID NO: 11166 - protein, 419 aa, Bacillus sp.
MVYVLTQDRRPLMPCSSAIARLLLKQGKAKVKRRTPFTIQLRYKTDTEYVQTLTHGVDTGSAKVGSAVADEKGNVLYLSQIEIRNDITDKMKQRSKYRRNRRNRKTRYRKARWLNRKNSIKKNRFSPTMTSKINAHLKEMKFVSTILPITRQIVETATFDPHVLKNPAVLTNKWLYQKGLNYGYANTKAYVLTRDAYRCQHCKGKSKDKRLEVHHIIFRSMGGSDEESNLLTLCKTCHDALHHGKIELKKRGKKKGQLNHATQMNSIRIQLLRQTNAEETFGFITKEHRQLTRLPKEHYFDAVAVATKGVTPTFKSNNILFKKCVSDGDYQQTKGVRSEQKIPMRKLFGFRKFDKVQYKGEKYFIKGRMSSGYAILMDIEGNKVPLKPIPKFSKMQRVSARTSWITIQKTIPSFYLCAT

SEQ ID NO: 11167 - protein, 455 aa, unidentified
  REGION 1..455: note = Mouse gut metagenome
MSVFVISKNGKRLMPTVRYGLVRHMLKDGRAVIYCRKPFTIQLTYVSSKYIEPLELCIDTGAQHIGISLKSNKREFVSEQRDLFKDEKEKHDGCRMYRRTRRSRLRYRKPRFNNRVSSKKEGWFAPSLKNKADQHIMLIQRLTALAPIKDIYLEVGSFDTQLLDAIAKGLPIPEGTDYQQGALYGEETLRKAVFQRDNYTCQVCGRTIKDGAKLHTHHFLYWKGRHGDRLDELCTVCEKCHTSANHQKGGKLYGWGTDKHFKSYVAAAFMNIVRWYIVNQVKVLVSDAKVHTTYGAATKLARKDLNIEKSHVNDAYAMGRLHPNIRCKTEYYKKVRRNNRCLEKFYDAKYIDVRDGKKKSGKELGCQRTNRREPRMSENNLRIYHGQKVSKGRRSIRKQRYSIRPGDVVLFNGQKYLSAGCHCNGARTILNTGKSVSIKKVQIICHIGGWIKTKQ

SEQ ID NO: 11168 - protein, 494 aa, unidentified
  REGION 1..494: note = Human gut metagenome
MTMVYVQNKDGKPLMPTTRYCYVRLLLKEKKARVVCTTPFTIQLNYDTPDITQDLILGIDPGRTNIGVAVVKEDGSCVFSAHLETRNKDVPLLMQKRAAFRRNHRTLDRRRKRQRRAKAAGTTIAEGSVERLLSGYEKPIVCHHIRNKEARFNNRSRPAGWLTPTANHLLQTHINLIAKIAKVLPITKVVVELNRFAFMAMDNPNIRRWEYQQGPLYGLGPVEDAVYAQQDGHCLFCKKPIDHYHHVVPRHKGGSETLANRCGLCEKHHALVHKDKAWAEKLVTRKGGTNKKYHALSVLNQIIPHLMEYLGSETPYDVYATDGKSTKGFRVAKNVPKEHYTDAYCIACSIWDADTKVSAPVEPFELKQFRRHDRQSCIRQMVDRKYLLDGKVVATNRHKSIEQKSDSLEEFREAYGDPAVSQLTVRPHLPQYKDMTRIMPGAVMDFDGIVGVFQGSEGFHNGKPDYYKSTKGAKVSTKRCALLAQNAGMVFIPA

SEQ ID NO: 11169 - protein, 465 aa, unidentified
  REGION 1..465: note = Human gut metagenome
MSTCVCVLSNNGERLMPTIRLGKVRHLLKDGKAKIIKHHPFTIQLLYDSKTNTQPIEICEDVGYNYIGISVKSEFHEYVSVQYDTLQDEKDCHDGCRRVRRSRRNRLRYRQARFDNRKRDDGWLAPSFEHKKELNVNVIKMYCKVMPITHAIVEVGSFDTMLVKAIEEGKATPESADYQKGPRYKLATLREAVFYRDNYTCQVCGRKANEGAILHVHHMFYWKGRHGNSLSELITVCEKCHTPANHQKGGKLYGFGEDIKFANLSGVAFMNTVRWQIVNVLYAAFGKPFVTFTYGAMTKEKRIALHLEKSHNNDAYAMGSFHPVNRCAFEHYEKVKRNNRILEKFYDSQYIDTRTGELTNGKSLFNGRISRSHKKDSENLHKYRGKRICKGHRALRRKKVALNPGDLVSLNGEILVVHGTHTKKNGSVNVEFKIPSRGGKKSASLKKLKIVKTSNLMHSAWTKVS

SEQ ID NO: 11170 - protein, 419 aa, Moorena sp.; identical to SEQ ID NO: 2658

SEQ ID NO: 11171 - protein, 420 aa, unidentified; identical to SEQ ID NO: 4992
  REGION 1..420: note = Human gut metagenome

SEQ ID NO: 11172 - protein, 420 aa, unidentified
  REGION 1..420: note = Human gut metagenome
MQYVYVLNKHGKPLMPCSPGKARLLLKQQKAHVVKRTPFTIKLLYGSAGYKQHITLGVDAGSKHVGLSASTEKLELYCEEFTPRNDVVDLLSTRRAFRRSRRNRKTRYREPRFDNRVHSKHKGWLAPSVEVKIQEHITVIKHICKILPITLVRVETAEFDTQRLKTMLEGKPLPVGKDYQLGEMYDEYNVRQYVLKRDNYTCQCCGVHTTAEKMVKLHVHHLESRKTGGNAPSNLITLCTTCHDALHKGKVSLDGKERGKPLRDAAFMGIMRKTLMGRLREELPISVQGTYGYITKMRREQNDIKKSHMNDALCIAKHPKAQHCENSYRSKAVRHHNRQIHKAKMLKGGIRKLNQAPYIVKGFRLWDKVLYNGQECFISGRRSSGYFALRKLDGTTITNSASFKKLQLLEATSSYLIERM

SEQ ID NO: 11173 - protein, 404 aa, Salipiger sp.; identical to SEQ ID NO: 11115

SEQ ID NO: 11174 - protein, 431 aa, Calothrix sp.; identical to SEQ ID NO: 5518

SEQ ID NO: 11175 - protein, 420 aa, unidentified; identical to SEQ ID NO: 3089
  REGION 1..420: note = Human gut metagenome

SEQ ID NO: 11176 - protein, 512 aa, unidentified
  REGION 1..512: note = Human gut metagenome
MSTVYVLNKDGKPLMPTTRGGHVRYLLKEKKARVVTSKPFTIQLLYETDDVVQPLYLGIDPGRTNIGVAVVKTDGTAVFTAHLETRNKEIPKLMQGRKKARRARRTNGRRCRRQRRAKANGTISKKCVKQTTAQNGSVSKRAKKIGVIKRHLPGCEKKVLCIGIKNKEAKFSNRTRPEGWLTPTANQLLQTHINLIKKIRKFLPVNDVVLEINKFAFMQLDNPNIQKWQYQQGPLYQKASLKEAVSEMQEHHCLFCKQSIVHYHHVVPQSENGSDTIGNIVGLCTKHHDLVHKDTAWQKKLAKKKTGLNKKYGALSILNQIIPALTKELSSLFPKHFFATNGKSTHDYRAAHDVSKDHWLDAYCIACSILPNDTCDKNINGRVPYKLKQFRRHDRRALHKENMSRVYTLDGKKVATNRHKAIKQTTDSLEEFRQRQPNDVCKLKVKEHHPEYRNPERNFPGCVFLVGKHTHVMQGTSGSHNGKADGYYDTNGNSYPSGKCKFVAKNKGIVFA

SEQ ID NO: 11177 - protein, 436 aa, Moorena sp.
MNRVFVLSSIKKPLMPCTPARARRLLRDGKAAVYRLQPFTIILRFRADGDTQSIGFKTDPGSKTSGIALVAESQSGRQVIWAANLQHRGQAVRANLAARRALRRGRRSRNTRYRAARFQNRTRPTGWLPPSLESRVGNLRTWYSRLLGFTPITSAEVETVRFDTHALAHPGIQGVEYQQGTLAGTEVREYLLEKWQRTCAYCGKTGVPLQVEHIQPRSKGGSNRISNLTLACEPCNTRKGNRPLAEFLAAKPEQMRRIQTQANAPLRDAAAVNATRYAIGNAIRTFGLPTGFWSGGRTKFNRTCQGYPKDHWIDAACVGETGAAVHVPQGFRPLSIKATGRGTRQVVRTDRYGFPRGAAGRCKRVFGFQTGDLVRLEQPAGKYSGTHVGRLAGIRADGRFDIKTASAQITSTYQRFTLLQRSDGYEYQIKSGERAG

SEQ ID NO: 11178 - protein, 447 aa, unidentified
  REGION 1..447: note = Human gut metagenome
VPAYRIKHITKKEVPYMVYVLDIDGQPLMPTSRHRKVRKLLNSHLAKVAKRCPFTIQLLYQSTKETQPVSLGVDAGSRHIGLAATTEQKVVYQEELVPRNDVVKLLSARRALRSSRRSRKTRYRKPRFNNRVHSKHKGWLAPSVEVKIQEHITAIKRICQILPISDIHVETAEFDLQRLKAMEEGRPLPVGTDYQLGEQYDFYNTRQYVLHRDEYTCQCCGTHDNNVKLHVHHIESRQTGGDVPNNLITLCEHCHKLLHAGKTIIPKGKKRGKSYRDATFMGIMRKTLLERLKKEIDVPVEGTYGYITKYWRERAGLEKSHIHDAVCISKYPYAKPLDIYYLTKTVRHHNRQIHKSNFSKGGIRKRNQAPYLVKGFRLFDKVLYQGKSYFIFGRRATGFFDIRTLNGAKVNKGSISYKKLRIQDTANAYLKEIKAIPHMNKFTCVLA

SEQ ID NO: 11179 - protein, 470 aa, unidentified; identical to SEQ ID NO: 2949
  REGION 1..470: note = Human gut metagenome

SEQ ID NO: 11180 - protein, 425 aa, Arthrospira sp.; identical to SEQ ID NO: 5602

SEQ ID NO: 11181 - protein, 428 aa, unidentified; identical to SEQ ID NO: 7211
  REGION 1..428: note = Human gut metagenome

SEQ ID NO: 11182 - protein, 442 aa, unidentified; identical to SEQ ID NO: 3218
  REGION 1..442: note = Human gut metagenome

SEQ ID NO: 11183 - protein, 427 aa, Moorena sp.
MRVFVLDKNRKPLDPCHPAKARKLLKSGKAKVLRRYPFTIIIKDLEVENCVTHDHQLKIDPGAKTTGLAIVQGNRVIWGAELTHRGEHIREALTSRRQLRRSRRNRKTRYRQPRFLNRTRSKGWLPPSLMSRVHNVLTWVNKLIKFCPISGISQELVRFDTQKMLNPEISGIEYQQGTLYGYELREYLLEKWDRTCAYCGAKNTRLEIEHIKPRSKGGVNRVSNLAIACHDCNQAKGNLEIEEFLSSKPSILKRILSQAQKPLADAAAVNATRWKLYNELKLIGLPVEVASGGLTKYNRCRQNLPKTHWLDAANVGKVDTLYIEDYQPLLIAAKGHGKRQICGTNKYGFPIRHNSRKKIHKGFQTGDIVRSVVTKGKKIGTYIGRVATRKTGSFDITTALARVSGISYKYCQAIHRKDGYSYQFHGG

SEQ ID NO: 11184 - protein, 373 aa, Moorena sp.; identical to SEQ ID NO: 3006

SEQ ID NO: 11185 - protein, 424 aa, unidentified
  REGION 1..424: note = Human gut metagenome
MRVFVFNMRGRPLMPCSQRKARLLLRENKAMIYKYHPFTIQLTYTTGETKQDCHIGIDTGSKYIGAAVRSEDKVFWKGEIELRQDIRSNLDTKRIYRRSRRNHKTRYRKPRFLNRKRRDEWLPPSLQSRINHTFHWIDTLSSLVPNPILHIEVGKFDVAKMINPEIHGVDYQHGQTYGFFDERYFVFARDNYTCQCCGKSKNKILNTHHIIYRSNGGTNRVDNLITVCTDCHTLQNHRKGGIFYQWQEQHKKVKQYKEPPFMNTLRKRIFVAYPDAEITYGSETTPKRKAMKLDKTHYNDAIVISGINEIKENPEEWLLIKQFRKKKRSLHEATARKGRKKPNRNQTRNSKNTPYYKGFYLNDKVSVFGKSGYITGFTSNAAYIKDENNDYITLPNKTYKQVSINKMKLECHNNNWQYIIKNAV

SEQ ID NO: 11186 - protein, 355 aa, Arthrospira sp.
  SITE 169: note = misc_feature - Xaa can be any naturally occurring amino acid
  SITE 350: note = misc_feature - Xaa can be any naturally occurring amino acid
MSNHIFVLDTNRKPLTPCKPGMARSLLKAGKASVFRRYPFTIILNKEVDANPEPLELKLDPGSKVTGIALKQGNHIIFAAELQHRGQQIKEALLSRRQLRRSRRNRKTRYRPARFLNRTRPEGWLAPSWQHRVDTLMTWVHRFRRLAPVGRITQELVRFDLQLMENPEXSGVEYQQGELQGYEIREYLLEKWGRTCAYCGAQNVLLEVEHIQPRSKGGSDRVSNLTMACHSCNQAKGNGDIRDFLSGQPDVLSRLLRQAKSPLKDAAAVNSTRWALFKALKATGLPVTTGTGGQTKFNRLRLNLPKAHWLDAACVGPVESLEVLTSKPLLILAKGHGTRQMCGTNKYGFXTRHRS

SEQ ID NO: 11187 - protein, 531 aa, unidentified; identical to SEQ ID NO: 4135
  REGION 1..531: note = Human gut metagenome

SEQ ID NO: 11188 - protein, 419 aa, Anoxybacillus sp.; identical to SEQ ID NO: 5328

SEQ ID NO: 11189 - protein, 323 aa, unidentified
  REGION 1..323: note = Human gut metagenome
TRYRAPRFDNRIRTKRKGWLAPSVENRINAHLSRIEAVLRLLPITKITVETASFDMQRLKNPDISGKEYQEGEQLGFWNVREYVLFRDGHVCRHCHGRSKDPVLNVHHLESRRTGSDSPDNLITLCVTCHKALHRGEITLKAKRGQSFRAQAFMGIMRREVLNRLKASYPELKVHETYGYLTKHARIANGIVKSHGADAFCIAGNLGAERLGEFFFQKQTRRNNRQIHKLSILKGGIRKRNQAPFEAKGFRLFDKVACQGEEGFIFGRRSSGSFDVRKLDGTRISAGISCKKLRLLEKRRTYLTEIRKEEALPPLPEGRGLRA

SEQ ID NO: 11190 - protein, 493 aa, Moorena sp.
MSMTKLDRELHDADFIYIISADGYPLMPTRRRGHVKRLLNHGKARIVLHVPFTVQLKYKSPEKTQPVYAGIDPGRTNIGVSAVTEDGECIYRAHVSSRNRDVPKKMKKRRECRRASRRGERLRRKRRAKRNGTVTSFPNGRMLPGYEKPVMVKDIINETVRFIYRKRPDGWLTSTARQLVQTHESIVRLVSSILPVTEWTLEVNKFSFMQMDSGRCYGADFRNGRMKGYEGSHEYVYARQGGVCPFCGKPIEHYHHMIPRSMGGSDLPENLIGLCRNCHEEIHLGRLSTKTEGIMKKYGALSVLNQAIPFIVRRLADKYGEEHVHFCTGKDTHAMRTAMHMPKDHDTDVVCIACTGMNVIPSASLPKKFEVMQFRRHDRALIKSQRERTYMLDGETVCKNRHRRFEQKCDSLDEFRKEHPKLVSELNVSKSVRYYNNPDRLMPGAVFLFGGERHVLQSQLTGGKYYRAVGCGKKSFPSAKCTVIRCNSGLVYI

SEQ ID NO: 11191 - protein, 420 aa, unidentified; identical to SEQ ID NO: 6017
  REGION 1..420: note = Human gut metagenome

SEQ ID NO: 11192 - protein, 431 aa, Klebsiella sp.; identical to SEQ ID NO: 2435

SEQ ID NO: 11193 - protein, 434 aa, Anoxybacillus sp.; identical to SEQ ID NO: 3421

SEQ ID NO: 11194 - protein, 544 aa, unidentified
  REGION 1..544: note = Human gut metagenome
MKQKKQKVMVYILNKKGKPLMPTTRCGHVRKLLDSKKAVVVNSNPFTIRLKYDTPNGVQDVFAGIDSGRENIGSGASNEDGDCLYLGELKTSNKSIKMKMTERAGFRRERRRHDRQNKQRKARKDQTEIQNGNDDICRTTISCKSVQISYPAAEESVTHKIIRGKEGKFANRHHDEGWITPSARQLVQIHMNDLKSMCKILPISHVTLERVAFDFQKLENENIKVWEYGKGKLYGYDSPEEYIHDVQDGKCLVCGKPHIDYLHHIIPRSKGGSDKISNLAGLCYDCHYGPMGVHNCQGTQDRLPELKNEANKQYKVSLLNSVMPVLIEEMDKFCKVNSIMFSICEGHDTAKVRDVYDLKKGHCLDGFAISLVGRNVKSVGVMPDRIHQKQRYKKKSKNIIQKRNCREYYDGKKLVAVNRHKGTDQKADSLEEYMNTYAETHTADECKKHFESLTVKPAKRTYTFHKEGRICPFHIGDKVRYEKKNKIKGNTKVETFICKGIHFSKDENKSKVEHNKTKSKKMKFCKVLESGCTPYIDYKKLGLA

SEQ ID NO: 11195 - protein, 545 aa, Actinomadura sp.; identical to SEQ ID NO: 8502

SEQ ID NO: 11196 - protein, 416 aa, Moorena sp.
LVYILSKNGNPLMPTSRHGKVKHLLKDGMAKVVRRTPFTIQLLYDSPEYTQPITLGVDAGSKVVGLSATTEKKELFVSEITLRDDIPELLSTRRQNRRTRRNHLRYRMARFLNRTASKKEGWLAPSIKHKVDSHLKVIGNVHRILPISRIVIETASFDIQKIRNPEISGREYQQGEQLGFWNTREYVLWRDKHECQHCHGKSKDRILNVHHKESRKTGGDSPGNLVTLCETCQKSHHEGRIKLKLTPNKSYRHASFMGIMRWYVYNSLQELYPEVSMTYGYITKNNRIRNNIEKTHSADAYCISGNMNAIRIDEIYNQVFKRKHNRQIHKANFLKGGKKKLNQSAYEVKGFRLFDHVRYRDEDCFIFGRRISGYFDLRKLDGSVVHRSASFKELKLLKRQNTILIERKGCNRVLLS

SEQ ID NO: 11197 - protein, 413 aa, unidentified
  REGION 1..413: note = Human gut metagenome
MVYVLNVNGQPLMPTENHAKVRVLLKQGKAKVVNNCPFTIQLLYSSMNYTQPVTLGVDAGSKHIGLSATTDDRELYAADVELRNDIVKLLAARRASRRSRRNRKTRYRKPRFNNRKRDKGWLAPSIKEKIGTHLKVVDDTCKLLPVSKIIVETASFDIQKIKNPDINGTDYQQGEQLGFWNVREYVLFRDGHKCQCCKGKSKDKILNVHHIESRQTGGNAPNNLITLCETCHTGYHKGIVKLPAKIKRGMKFNDAAFMGIMRWAFYGELKKRYPDVSLTYGYITKNTRIENGLPKEHYVDARCISGHPLARPLGTVFYIKKVRCHNRQIHKFTILKKGVRKRNQTEYEVYGFRLYDKVSWKGQTCFVFSRKSTGYITLRLLDGTRVKESASYKKIKLLRMRSGYLIELRNVID

SEQ ID NO: 11198 - protein, 465 aa, unidentified; identical to SEQ ID NO: 8068
  REGION 1..465: note = Human gut metagenome

SEQ ID NO: 11199 - protein, 411 aa, unidentified
  REGION 1..411: note = Human gut metagenome
MVYVQDIDGKPMMPTTRHGKVRRLLKDNKAVVVNTCPFTIKLTYKTSDYKQEIVLGVDAGTKHVGLSATTKSKELYASEVILRSDVVDLLSTRRGLRRTRRSRLRYRKQRFNNRVKSKKDGWIAPSVRHKIDSHVRIISFVYSILPVSKLIVEVAQFDTQKIKNPEISGKEYQEGEQLGFWNVREYVLARDGHKCQHCKGESKDPILNIHHIESRKIGGDSPSNLITLCETCHKEFHKGNIKLKVSRGKSLRDAAVMGIMKWKLYEELKSRYDNVSMTFGYITKYNRINHGIEKSHVSDAFVISRNFNSCRLGYYYKRKLVRRHNRQIHKMKILKGGIRKRNQAPFKVFGFRLFDKVMFQGEEHFIYARRLSGQFNIRDINGENKKDVSCKKLKYVSHGLVSVKTNLFLSQ

SEQ ID NO: 11200 - protein, 346 aa, unidentified
  REGION 1..346: note = Human gut metagenome
LYSQSKIAQSAQEYGVCRGGIENRRSRRNRKTRYRPPRFDNRVHSKHKGWLAPSVEVKIQEHITVIKRICRILPITLVRVETAEFDTQRLKAMLEGKPLPVGTDYQLGEMYDEYNVRQYVLKRDNYTCQCCGAHTTAKKAVKLHVHHLESRKMGGNAPGNLITLCITCLDALHKGKVSLDNKKRGKPMRDAAFMGIMRRTLMSRLREELPITVQGTYGYITKMQREQNDIKKSHVNDARCISKHPLAEPCSVCYRTKAIRHHHRQTHKANFSKGGIRKRSQMPYVVEGYRLWDKVLYKGQECFVSGRRTSGSFTLKKLDGTRISKGVTFKKLRLLEPATNYLIERM

SEQ ID NO: 11201 - protein, 422 aa, unidentified; identical to SEQ ID NO: 9550
  REGION 1..422: note = Human gut metagenome

SEQ ID NO: 11202 - protein, 429 aa, unidentified
  REGION 1..429: note = Human oral metagenome
MLVYILRQNGQPFMPTERFGKVRRLLKEKKAKVVRREPFTIRLLYEPETDVVQECYCGVDTGSRHVGVAVISNDKVLYQSQTELRSDIKRKIDSRRQTRRSRRSRKTRYRKPRFLNRRNSIKKDRLPPSVKHKVQANIDEIEFCKKILPISDLILEVSQFDTALMKNPSLITEKVRHWGYQKGFNYGYSSRREAILHRDGYTCQCCGKKNCRLEVHHIIFRSNGGTDDENNLITLCENCHKGVHAGIVELNKKPKKSKGLKHATHMSIIRSQLLKKYPNAIETFGFVTTENRNHLKLKKDHYIDACVIASGGLEFKVLDVIYRKRRVPVQDRVLTKGIRGEQKLPTGKIFGFKKFDKVEYLGEICFIKGRRSSGAFVLMDIDNNSIDFRDRGGKQNPFYRFVKRVNTRRSVLCISKRIEREVRLIPILS

SEQ ID NO: 11203 - protein, 426 aa, Bacillus sp.; identical to SEQ ID NO: 5544

SEQ ID NO: 11204 - protein, 521 aa, unidentified
  REGION 1..521: note = Human gut metagenome
MANLKLIDELLEKTEYIYVLGVDGKPQMPTNRKVRVRSLFKSGLAKIVDTVPFTIRLLYENDAVLQPITIAEDPGRTNIGAAVLTQLGDLVFSAVVETRNKSIKKLMTDRKAHRQASRRGERKARQRLAKKHGSMIKAGMMMRKLPQYAADKFVTCKIIKNTEARFCNRKRMPDWLTPTVNHLVQIHINLIKKIEKYLPITDVAIEVNRFAFIQMESPGISGVDFQNGPLKGFDDVKAAIREQQHGKCLMCKNDIEHFHHIVPRSRGGSDTIQNQAGLCKKCHAKVHTDAEFQAKLKDKKEGLIKKYGALSALNQAVPFICKELIKIYGVEHVHFCTGKDTSLIRSSLGYEKTKENQMHEVDAYCIGLAAIGADKINKIKHPSFVNVYKIKQFRRQNRSIINHQYERTYYLDDKKIATNRKPRFEQKGDAFSDWYSKQVELNGKKQADKSAGRVVVKKSRRNYNSRNRVMPGAVFSYDGKRLVLSGQTTRGKYYKAYGDPKTNYPAAKCQIYKHNEGLVFM

SEQ ID NO: 11205 - protein, 420 aa, unidentified
  REGION 1..420: note = Human gut metagenome
MQYVYVLNKHSEPLMPCSPRKARLLLKQKKACVVKRTPFTIKLLYGSTGYKQPITLGVDAGSKHIGISAATEKYELYCEEATPRNDVVDLLSARRAFRRSRRNRKTRYRAPRFNNRVHSKHKGWLAPSVEVKIQEHITLIKRVCRILPVTFVRVETAEFDTQRLKAMLEGKPLPVGTDYQLGEMYDEYNVRQYVLKRDNYTCQCCGAHPTKTKAVKLHVHHIETRRTGGNAPNNLITLCTACHKALHAGKVTLDGKKRGRSLKDAAFMGVMRKTLMERLLKELKIPVQGTYGYITKYLREKHSIPKSHTNDARCISKNPLAIPCDTCYYTKAIRHHNRQLHKATILKGGICKANQAPYTVKGYRLWDKVSYNGSECFITGRRTSGYFALKKLDGTVVSNSASYKKMRLLEVATNYITERR

SEQ ID NO: 11206 - protein, 415 aa, unidentified; identical to SEQ ID NO: 6534
  REGION 1..415: note = Human gut metagenome

SEQ ID NO: 11207 - protein, 406 aa, unidentified
  REGION 1..406: note = Human gut metagenome
MVYVQDIDGKPMMPTTRHGKVRRLLKANKATVVNLCPFTIQLTYKSTDHKQPVTLGIDAGAKHIGFSATTEKEELFACETILRTDIVDLLSTRSQNRRTRRSRLRYRKPKFNNRVFSKKKGWVAPSVKQRIDSHLNEVNEIHKILPITKIVIEAAQFDTHKMKNPNISGIDYQNGEQLGFWNVREYVLFRDGHKCSYCKGKSKDLILNIHHIESRKTGGDSPSNLITLCETCHKEYHKGNIDLKVRRGKSLCGAAIMEIMKWRLYDELKSRYSNVSMTFGYITKYNRIKYGIEKSHTSDAFVISKNFNAKRIEYQYLKRLVRRHNRQIHKMKILKGGKKKNNQAPFEVFGFRLFDKVLYNNEINFIYGRRKSGNFNIRDFNGENPKDVSYKKLKLIRGKRHPIILK

SEQ ID NO: 11208 - protein, 423 aa, Lactobacillus sp.; identical to SEQ ID NO: 5050

SEQ ID NO: 11209 - protein, 414 aa, unidentified; identical to SEQ ID NO: 2588
  REGION 1..414: note = Human gut metagenome

SEQ ID NO: 11210 - protein, 424 aa, Planktothrix sp.
MSNFVFVIDTNKRPINPVHPAQARLWLTQGKATVFRRFPFTIILKTASTQITKPIQLKIDPGSQTTGIALVSEDAVIWGAELTHRGQAIKANLESRRSVRRVRRNRKTRYRQPRFLNRTRHKGWLAPSLEHRVQTTLTWVNRLRKFVPITGISQELVRFDTQALVNPEISGNEYQRGELAGFEVKEYLLAKWGRKCVYCGAENTPLEIEHILAKSRGGTDRVSNLTLACHPCNQKKGNQPIEKFLKNKPSILRRVLAQAKAPLKDAAAVNSTRWELYQRLQETGLPVSVGTGGRTKFNRVKLGIQKRHYLDAACVGVVEKLTLKTTKPLLITAKGWGMRQMSTTNKYGFPIKHRTRQKAFFGFQTGDIVRAILPSGKFAGAHIGRLTVRATGVFEMVTAKGKISPVRAKYCQIVHRVDGYNYAA

SEQ ID NO: 11211 - protein, 408 aa, unidentified; identical to SEQ ID NO: 8240
  REGION 1..408: note = Human gut metagenome

SEQ ID NO: 11212 - protein, 397 aa, unidentified
  REGION 1..397: note = Human gut metagenome
MFTQVRSSKVRRLLKENKAVVVSLCPFTIKLTYVTSDYKQEIVLGVDARTKHVGLSATTKSKELYSSEVLLRNDIVDLLSTRRELRKTRRNRLRYRKPRFNNRIKSKRSGWIAPSVKYKVDAHIRVIDNVCSILPIFRIVIEVAQFDTQKIKNPNISGKEYQEGDQLGFWNTREYVLARDGHKCQYCKGKSKDKILNVHHIESRKTGGNSPSNLITLCETCHKEYHKGNIDLKIRRGKSLRDAAVMGIMKWRLYEELKSKYDNISMTFGYVTKYNRINHDIEKSHVSDAFVISKNFNAIRLGYYYKVRLVRRHNRQIHKQKIQKGGIKRLNQSPFEVFGFRLFDRVMFENSYYFIFGRRKTGSFNIRDIDGKSQKNITYKKFKLSRCKRFMIQKEMN

SEQ ID NO: 11213 - protein, 442 aa, unidentified
  REGION 1..442: note = Human gut metagenome
MVTVQQSTHHLPFGRVFIRRNLFMVYVISQDGKPLMPCSDPIARLLLKQGKAKVKKREPFTIKLTYETTNYTQGLTLGVDTGSGTIGTAVSKDNGDIVYMSEVVVRNDITDKMTQRAKYRRNRRNRKTRYRKARWLNRASSIKKDRFSPTMQSKLHSHVREIEYIQSILPVTEMVFETGQFDMHLMKNPSLANPKVRPWGYQKGANYGFENTKAMVLNRDNYTCQCCKGKHKDSKLEVHHIVFRSQGGSDEESNLLTLCHTCHKDLHSGKINPKLSGKVKGNLKYATQMNSIRKQLFRFYPNAIETFGYVTKANRLHLGVDKEHYYDACTIATQGNAFNVKSNLYKKKCVSDGDFQKTKGIRSEQPIVIDKICGFRKFDKVRYFGNDYFIKGRMSTGYAILMDIDGNKIDFSTMPRGYKTPKLSNCKRITARSTVMTQVKVV

SEQ ID NO: 11214 - protein, 457 aa, unidentified; identical to SEQ ID NO: 6741
  REGION 1..457: note = Human gut metagenome

SEQ ID NO: 11215 - protein, 417 aa, unidentified
  REGION 1..417: note = Human gut metagenome
MPCSPAKARLLLKEKKAIVKRRTPFTIQLTIATGEAKQPITLGVDSGYKHIGLSATTEKAELHASQVELRQDITDLLSARLALRRSRRSRKTRYRAPRFNNRVASKRKGWLAPSVENRIAAHMSRVEAVMRVLPVTAITVETAAFDTQLLKNPDIAGAAYQQGEQLGFWNVREYVLFRDGHVCQHCRGKSKDPILNVHHIESRRTGGDAPNNLITLCETCHKAFHRGEIELKVRRGKSFKAETFMGIMRWTLFERLKKAHPELRVRNTYGYLTKHKRISHGIAKSHCADAYCIADNLGAKRLSGYLFQKQTRKHNRQLHKLSILKGGLRKKNQAPYEVKGFRLFDKVICKGEEAFIFGRRTSGSFDVRRLDGTRISAGINYKKLRLLEPRTTYLTEFRKEAALPPLHKCRGFRAEFL

SEQ ID NO: 11216 - protein, 512 aa, unidentified
  REGION 1..512: note = gut metagenome
MSTVYVLNKDGKPLMPTTRCGHVRRLLKEQKAQVVTSKPFTIQLLYETDDVVQPLYLGIDPGRTNIGVAVVKIDGTAVFTAHLETRNKEIPKLMQGRKKARRARRTNGRRCRRQRRAKANGTISKKCVKQTTAQNGSVSKRAKKIGVIKRHLPGCEKEVLCIGIKNKEAKFSNRARPEGWLTPTANQLLQTHINLVKKIQKFLPISDVVLEINKFAFMRLDNPNVQKWQYQQGPLYQKASLEEAVSEMQEHHCLFCKNTIDHYHHVVPQHKNGSNTIGNIVGLCAKHHDLVHKETSWQEKLAKKKTGLNKRYGALSVLNQIIPALTKELSSLFPKHFFATNGKSTYDYRAAHGVSKDHWLDAYCIAGSVLPNDACDNNINSHVPYELKQFRRHDRRALHKENMSRVYTLNGKSVATNRHKAIKQTTDSLEEFRQRQPNDVCKLKVKEHHPEYRNPKRNFPGCVFLVGKHTHVMQGTSGSHNGKADGYYDANGNSYSSGKCKFVAKNKGIVFA

SEQ ID NO: 11217 - protein, 533 aa, unidentified
  REGION 1..533: note = Human gut metagenome
MSNVVYVVDKHGKPLMPTKRFGKVRHLLGTGKAVAISNYPFTIRLKYESTHYTQDIYVGIDTGRENIGSGASKEDGTNVYLANTKTHNKSIKKQMSNRACFRRERRRHHRQKKQRKAVSDGNTIQNGDDDTVCTKHACKSVQISYPMAENTVTHKVIRGKEGKFANRKRPDGWITPSARQVVQITMNELKSITKILPVTHMTMERVSFDFQKLENENIKAWEYGKGPLYGYKTYKDYIFDEQHGKCACCGKPITQYHHIVHRANGGIDSVKNIIGLCDDCHKEIHASINAEERLKELKAGVIQRYYIGLLNSVMPALIEEMAIYCEEQGIVFAITDGNTTSKAREQYNIPKDHCFDAYAISLADRDVENIDICDIIYQKRRFKKKSNNIINARNKRVYKLDGKVVAYNRHKATDQKDDSLEEFFVKYRDNHSEKEVQQMMHNIKIEPAKRTYTFHKTGQIAPIHPGDVVRYVKHNKIRGNMKTETLVADNVKMSKDGRVGYGTKNKKLKYCKRIASGCVQIIDVMKAKEHIIN

SEQ ID NO: 11218 - protein, 396 aa, Moorena sp.; identical to SEQ ID NO: 4508

SEQ ID NO: 11219 - protein, 442 aa, unidentified
  REGION 1..442: note = Human gut metagenome
MSTSVFVLDKKHRPLMPCRPARARRLLRAGRARVVKRFPFVIRLVDRTVEQSEVQPVLIKLDPGSRETGAAVVRDDEKKRHHALAFFVIEHRGGAIRDALKARSAFRRRRRSQNFRCRSPRFLNRVKPKGWLPPSLRHRVETTLSFVRRMCRYLPVSGIATELVKFDSQKLQNPEVSGVKYQQGTLFEYEVREYLLEKFGRKCVYCGAEGVPLNIDHVVPRAKGGSNRVSNLVLACVSCNQKKGARSLEDFLKGKPEVLARVRRELKTPLRDAAAVNATRWVLFNELKATGLPVETGSGALTKLNRHAFGVEKEHWLDALCVGRLNGVVTRKGLNVLEIRCMGRGSRQRTRLTKYGFPRGYLMRQKCVHGFATGDMVEANVPKGKKAGLWRGRVAVRVSGSFNIQTPKGVIQGVGWKHCRLISHNDGYGYAWLGHAPHSSPA

SEQ ID NO: 11220 - protein, 420 aa, unidentified; identical to SEQ ID NO: 5136
  REGION 1..420: note = Human gut metagenome

SEQ ID NO: 11221 - protein, 413 aa, unidentified; identical to SEQ ID NO: 2636
  REGION 1..413: note = Human gut metagenome

SEQ ID NO: 11222 - protein, 417 aa, unidentified
  REGION 1..417: note = Wastewater metagenome
MTFVLNEKGEPMMPCDNVVARLLLKNKQAKVVKTYPFVIKMLVETTDFKQDLILGIDTGSSKIGASVVNESNEVVYLSQVEIRNDITEKMKRRAKYRRNKRNRKTRYRKPRFLNRKNSTKTGRFSPTMTSKINAHLKESKFIRKILPITETRIETANFDPHALKNPEVLKDLKLYQEGYNYGFANAKAYVLDRDNYRCQNKKCTSKCKKLEVHHIVFRRNNGSDEASNLITLCKVCHDDLHADKLILNFKGKKKGTLKHATQMNSIRIQLMKMLPNAIETYGFVTKEHRQKMNLPKEHFFDAVAIASKNKDISFRTDEIIYKKCVAKGDYQRTKGVRSQLKIPVAKIKGFRKFDTVKFKGEKYFIKGRFTTGYAILMGIDNQKVDLKPIPKFENLKRISARKTWLIDIKKLNLQTKI

SEQ ID NO: 11223 - protein, 378 aa, Moorena sp.
MQNYVLVIDTNKRPLNPISPKKARRLLDKGKAAVFRMYPFTIILKTAIYNPVVLPCHIKIDPGSNTTGFALVQNNQVIWGMELEHRGELIKKKLEYRKAVRRGRRNRHTRYRKPRFLNRRRKDGWLPPSLEHRILTIHTWVKRLIKFCPVNEIWVERVKFDTQKMPNPEINGIQYQQGELAGYEVREYLLEKWGRECTYCGKQSIPLQIEHIHPKSKGGSNSAKPTLRERVSNLCLACEKCNQRKGNKSIEDFLKKKPNLLQKIKTKAKQPLPDAAAVNTTRNKLVKVLRSIKLVVTGTGAQTKYNRTKLGLPKQHWIDAACVGDIETLVLRTSQPLLVTCKGPGGRQKAALNKYGYPIRHNPLKPIKGACYWGHSQA

SEQ ID NO: 11224 - protein, 431 aa, Escherichia coli; identical to SEQ ID NO: 4170

SEQ ID NO: 11225 - protein, 545 aa, Actinomadura sp.
VLLQRAALESGLADTPRIGNETGLRPPARLGGGTGAGHVRGETTGTSPGPGGVTPDLRGGERRREAHHVFVLDKDGAPLQPCHPARARRLLASGRAVVARHTPFVIRLKDRTAAASEVEGVEVGIDPGSRHTGIAVFTARKGERRGRYAIQLDHRGARIRKKLGQRAAYRRRRRSANLRYRAPRFLNRVRPDGWLAPSLKHRVDTTTSWVERLARWAPVEAVHVELAAFDTHALSAGRSLEGVEYQHGTLYGYQVREYLLEKWGRACAYCGAVNVPLTVDHIHPRSKGGADRVCNLALACVPCNQSKSDRPIELFLAHRPATVVWVLAQAKAPLRDAAAINSTRLGLRHALDRRFPGRVVVGSGGRTRWNRTRSGLPKSHTLDALCVGETGAVTAYPATVLVVACTGRGGHSRTRTDRYGFPRLRLPRSKTVRGFQTGDLVKAVVPGAKRAGTHLGRVAVRATGSFNITTRHGTVNGVGHRYVRLLQRADGYGYTTRPEIAARVHGPDAGRQVPALKAGTSSLQCLAGDPIPPTPDGGGFLEGSP

SEQ ID NO: 11226 - protein, 428 aa, unidentified
  REGION 1..428: note = Human gut metagenome
LKVFVLNMRGQPLMPCSPAKARHLLKAGKAAVRRRTPFTIQLRIATGETKQNVTLGVDAGAKHVGLSAATEKEEVFASEVELRQDITGLLAARLSLRRERRQRKTRYRAPRFLNRVRSKHKGWLAPSVENRIQAHLSRIDAICGLLPVTKIVIETASFDIQKIKHPDVEGTDYQQGDQLGFWNVREYVLFRDGHVCQHCHGHAKDKILNVHHLESRQTGGDAPNNLITLCETCHKACHAGKIKLKVKRGQSFREEAFIGIMRWTLLDRVRKAHPGLPVENTYGYLTKNTRITLGLPKAHCVDAYCIAGNLKAVRRGVYLHQRQVRKHNRQIHKCTVLSKTLKDGTKIGYRKLNQTPHLVKNFRLFDKVRCLGQTGFIFGRRSSGYLDVRRLDGVKLSSGISYRKLTLLEKRSTYLTELRKEDGASSPV

SEQ ID NO: 11227 - protein, 337 aa, unidentified
  REGION 1..337: note = Human gut metagenome
MPKVYVLNRHGRPLMPCTPAKARHLLDAGKAKVRHRTPFTIQLLYGSTGYTQEVILGVDAGSKTIGLSAATETEELFSAEVKPRNDVVELMSARRQFRRARRNRTTRYRKPRFDNRVRSKHKGWLAPSVEVKIQEHMTAIRRACAILPVSKVVVETAEFDLQLLKAVAEGKPVPQGEDYQKGEMYGHYNVRQYVLWRDSYTCRICGVHGSVRKGVPLHVHHLESRRVGGDAPDNLVTLCTACHDKLHKGIIMVADIKKRKRRSTRDATFMGIMRMTLLRRLREQLPVPVVETRGYITKATRENLLVLPKSHTNDALAIAHGPQGFRAEYLPNIRQAD

SEQ ID NO: 11228 - protein, 442 aa, unidentified; identical to SEQ ID NO: 4418
  REGION 1..442: note = Human gut metagenome

SEQ ID NO: 11229 - protein, 374 aa, unidentified
  REGION 1..374: note = Human gut metagenome
MVIQLKKKIQENEICKDEIRCGIDDGGLHVGIALVQKCKSKNKVVFKGTIEQRNDVKHLMEVRRNYRRYHRYHKRYRQARFDNRKSSKRKGRIAPSILQKRQATIRVINRLNKWINITNYWLEDVSIDIRVLTDGYKSYSWQYQKSNRLDENIRKATILRDGGKCMECGKSNCRLEVHHIKPRRRNGSNTLDNLITLCESCHQKTEGQEELYMDRYFSLLKSSDNKNLNYAQHVMIGKMWLRKQLSGLGVLYLTSGGDTANKRIDWNIEKSHTNDAVCITDLQPDTCDIKEWAIKPMRRQSKAKTDHVLGIHHRDLVEYTFKNGETHRGYVTALYPDQKAINFQSQTKHCKKVNARKCKLLWNYSKIYWFENAS

SEQ ID NO: 11230 - protein, 388 aa, unidentified
  REGION 1..388: note = Human gut metagenome
VLQAPNPVQHWRRMSTGLRAVQAEPAGIRKGDALKVFVLNMRGRPLMPCSPARARHLLKAGKAVVRRRTPFTIQLRIATGETKQSVTLGVDAGAKHVGLSATTEKEEVFASEVELRQDITGLLAARLSLRRDRRHRKTRYRAPRFLNRVRSKHKGWLAPSVENRIQAHMSRIDAVCRLLPVTRIVIETASFDVQKIRNPEVEGTGYQQGDQLGFWNVREYVLFRDGHVCQHCHGHSKDKILNVHHLESRQTGGDAPNNLITLCETCHKACHAGKIKLKVKRAQSFRAEAFMGIMRWTLLDRVRKAHPGLPVENTYGYLTKNTRITLGLPKAHCVDAYCIAGNLKAVRRGVYLHQRQVRKHNRQIHKCTVLSKTLKDGTKIGYRKLNQT

SEQ ID NO: 11231 - protein, 412 aa, Bacillus sp.
MVSYCFVLDQKGRKLSPTNENRGWVLIRKNKAALINKFPMVIQLFKEVLDEEIDQTPIHFNIDDGSKFTGIALVQECQTKNKPVFKGTIEHRTDVKDKMDTRRSYRRYKRSHKKYRPNRFNNRSSSTREGRIPPSIKQKKEATLRVLRKLIKWIRINHIHLENVMIDIRKLEKGSQPYRWDYQKSNRLDENLRLMRDDFTCQDCRKKQCRLEVHHIIPRRLQGSDSIHNLITLCSSCHENVTGEETNHTKRFFDKIQEKKIFFHDAMHVMQGKTYLQQELKKIAPLTLTTGGDTANRRIDWDIEKSHSNDAIVLSQLHVSSKQCQIKDWVIKPMRKRSKKKTEKVNGFQHRDFVRYTKRNGDVYEGYITALYPKKKQCNFTTTEGKVLKRYGVNRLKLLWRFSHIYFLNKPE

SEQ ID NO: 11232 - protein, 470 aa, unidentified; identical to SEQ ID NO: 2825
  REGION 1..470: note = Human gut metagenome

SEQ ID NO: 11233 - protein, 420 aa, unidentified; identical to SEQ ID NO: 10478
  REGION 1..420: note = Human gut metagenome

SEQ ID NO: 11234 - protein, 406 aa, unidentified; identical to SEQ ID NO: 6079
  REGION 1..406: note = Human gut metagenome

SEQ ID NO: 11235 - protein, 510 aa, Halomonas sp.
MLAKGKAPKVLIAADGNGVGRSRSWTFPRGDGPTGPRHKARKGNDKEEIAMAVFVLDRQKRPLMPCSEKRARLMLARGRAVVHKRYPFTIRLKDRVDGETQPLRLGIDPGSRITGLALMRENSEEREVGKHHVLCLFELVHRGFQIREALDQRRAFRRRRRTKNLRHRAPRFDNRTRRDGWLAPSLQHRVDTLSAWVDRLCRLAPITSLSQELVRFDTQKLDNPEISGVEYQQGTLLGYEVREYLLVKWGHECAYCGATNTPLEIEHIESRSHGGSDRIGNLTLACHDCNQEKGADTLDAFFATARGLKKRLTQHRQSADARYRRVIQQHDRPLRDASAVNATRWALNRNLKRKGLPVAVGTGGLTKYNRQRLGIPKTHALDAACVGQVEALHGWQVPTLTLRAMGRGSYQRTRLDKFGFPRGILMRRKQVHGFQTGDMVKAVVPSGKKAGTHVGRVAIRQTGSFNIQTEHGVVQGISWRHCTLLQRGDGYCYHLTPTRNDKGEAGRAVA

SEQ ID NO: 11236 - protein, 413 aa, unidentified
  REGION 1..413: note = Human gut metagenome
MTNYAFVLDADNKQLTPTKEQKAWFLIRKKRATLVSKYPMVIQLKKKIPDKEICKDEVRCGIDDGGLHVGVALVQKCHTRNKVIFKGVIEQRNDVKHLMDVRRGYRRYHRYHKRYRPARFNNRNSSKREGRITPSILQKRQATIRVVNQLNKWINITNYWLEDVAIDIRALTDGYKPYRWQYQKTNRLDENIRKAVILRDGCKCMECEKSNCRLEVHHIKPRRLKGSNTLDNLITLCAKCHQKTESVEELYMDRYFALLKSSDNKNLNYAQHVMIGKKWLREQLSNLGMLHLTNGGDTANKRIDWDITKSHSNDAICITDLKPDTCEIKEWVIKPMRRQSKAKADNVLGIKHRDLVEYTFRNGETHRGYVTALYPEQNAINFQSPTKHCKKVNARKCKVLWKYSKIYWLDNVS

SEQ ID NO: 11237 - protein, 442 aa, unidentified
  REGION 1..442: note = Human gut metagenome
MVYVLNKDGQPLMPTSRHGKVRRLLKTKKAKVIKRCPFTIQLLYDTTNHTQNITLGIDAGSKHIGLSATTEDKVLFEADVELRNDISKLLEARYTFRRSRRNRKTRYRKKRFDNRVSSKHKGWLAPSIEHKIQSHFAMVEKVHRILPVTKIVVETASFDTQLLKAQLEGKPIPQGTDYQNGELAGWNIREYIFHRDNYTCQWCKGKSKDPVLVTHHHAYWKGDHTNKPSSLITLCNTCNDSKYHKKEADRLWGWEPKVTNSYKHAVFMGVMRWTFYNRLKEIYPNVSMTYGYITKNTRIENNLPKAHYVDARCISGHPEAKSNGEYFYYKKVRCHNRQLHKANTLKGGIRKRNQAEYTVKGFRLFDRVEYQNNEYFVFGRRASGFFDIRTLDGQKVNKGSISFKKLKLKETSRTYLIERRMADTGVSLAPLTTEVTSLRQTG

SEQ ID NO: 11238 - protein, 413 aa, unidentified; identical to SEQ ID NO: 2636
  REGION 1..413: note = Human gut metagenome

SEQ ID NO: 11239 - protein, 416 aa, unidentified
  REGION 1..416: note = Human gut metagenome
MVYVLNIQGNPLMPCKEAKARRLLKNSLAKIIKRTPFTIQLLFECENKTQDITLGIDAGSKTIGVSASTEKQELYSAEVVLRNDIVDLISTKRQNRRTRRNRLRYRKPRFNNRIKFKKDRWLAPSILQKIETHLNVVKKIHKILPISKIIVETASFDIQKIKNPNITGVEYQQGEQLEFWNVREYVLHRDGHTCQHCKGKSKDKILNVHHIESRKTGGDSPSNLITLCETCHKKYHNGEIKLKVKRGQSFRDSAFMGIMRWAFYEKLKETYQNVKMTFGYITKNTRISNNLPKEHCIDAYCIAGNLKAKLMNSYFYQIKKRCQNRQIHKANFLKGGRKKLNQAPYIVKGFRLFDKVSYQGNPYYIFGRRSSGTFDVRDLSGNKVNKGSINCKYLKLLETRKYYLTEKRERAIPPND

SEQ ID NO: 11240 - protein, 442 aa, Selenomonas sp.; identical to SEQ ID NO: 4776

SEQ ID NO: 11241 - protein, 361 aa, unidentified
  REGION 1..361: note = Human gut metagenome
LKVFVLNMRGQPLMPCSPAKARHLLKAGKAVVKRRTPFTIQLRIATGETKQNVTLGVDAGAKHVGLSATTEKEEVFASEVELRQDITGLLAARLSLRRDRRHRKTRYRAPRFLNRVRSKHKGWLAPSVENRIQAHMSRIDAVCRLLPVTKIVIETASFDVQKIRNPEVEGTGYQQGDQLGFWNVREYVLFRDGHVCQHCHGRSRDKILNVHHLESRKTGGDAPNNLITLCETCHKAYHAGKIKLKVKRGQSFRAEAFMGIMRWTLLDRVRKAHPGLPVENTYGYLTKHTRITHGLPKTHCVDAYCIAGNLKAVRRGVYLHQRQMRKHNRQIHKFTVLSKRLEDRIPQAQPVTLSRPWLQAL

SEQ ID NO: 11242 - protein, 413 aa, unidentified
  REGION 1..413: note = Human gut metagenome
MTNYAFVLDANGKQLAPTKEQKAWFLIRKKRATLVSKYPMVIQLKKEISDEQICKDEICCGIDDGGIHVGLALVQKCKTKNKVVFKGTIEQRNDVKHLIEVRKGYRNYHRFHKRYRQARFNNRKSSKRKGRIAPSIFQKRQATIRVIKQLNKWINIANYSLEDVTIDIRALTDGYKSYRWQYQQSNRLDENIRKAVILRDGCKCMECGKSNCRLEVHHIKPRRLNGSNTLDNLISLCEKCHQRTEGQEELYMDRYFSILSSTDNKNLDYAQHVMIGKKWLREQLSELGTLILTTGGDTANKRIDWNIEKSHANDAICITGLQPDACNVKEWTIKPMRRQSKAKTDNVLGIKHRDLVEYTFKNGETHRGYVTALYPKQNAINFQSPTKHCKKVNAKKCKLIWKYSKIYWLDNVL

SEQ ID NO: 11243 - protein, 545 aa, unidentified
  REGION 1..545: note = Human gut metagenome
LSRTIPLTANTQPRETQPPVSAGETYSKRRVAYMPTVYVLNKDGKPLMPTTRCMHVRHLLKNGKARVVKSKPFTIQLLYETDDVVQPLYLGIDPGRTNIGVAVVKADGAAVFTAHLETRNKEVPKLMKKRKESRCARRTNGRRCRRQRRAKTNGTISKKCVKQTTAQNGSVSKRAKEIGVIKRHLPGCEKDVLCIGIKNKEAKFTNRARPEGWLTPTANQLLQTHINLVKKIQKFLPISDVVLEVNKFAFMQLDNPNIQKWQYQQGPLYQKGSLENAVSEMQEHHCLFCEKPIEHYHHVVPKSENGSNTIANIVGLCTEHHNLVHKDATWQKKLAKEKVGLVKKYSALSVLNQIIPALTKEMNSLFPKHFFVTNGKSTYDYRTAHGVSKDHWLDAYCIACSVLPNDVCDSNINSHVPYELKQFRRHDRRVLHKANMSRVYTLNGKTVATNRHKAIKQTTDSLEEFRQSHPGDVCKLKVKEHHPAYRNLNRNYPGSVFLVDGQVHVMQGVSGSHNGKADGYYNTNGNAYPYYKCKFVVKNEGIVFA

SEQ ID NO: 11244 - protein, 436 aa, unidentified
  REGION 1..436: note = Human oral metagenome
MTKAFTQTNSQVCVLDQNGNPLMPTKRLGKVYRLLKDKKAHIVNYEPFTIQLEYEPQTHIIQPMTLGVDSGAIHSGYSVANEHREYYNAEVIARDNISKNLSDRHMYRRNRRSRKTRYRQPRFNNRKNKGEGWIPPSLEQKVNVQLNEIEHLHRYFPIETIIIEVAEFDIQKIKNPDISGKEYQQGTLYGYNIRNYLLEKYGRKCFYCDKEVSDFEVEHMIPRAIGGSNRIDNLTLSCHDCNSNKGTLTAEAFIKQTMAPRKAALKLKQLPTEKRLFKYMAHMNATRWALYNAVKDKYPSVQITYGYITKYNRIQAGLPKAHHIDAKCITGFSQVPSFDTTVVKVKMRRHNRQLHRATFSKGHVRKVASLPTVMYGFQLYDIVLYNRHRYYIQSRRSTGSFALVSIEGLKDENRMYNKLTQLAHTNAYLVHHYVEI

SEQ ID NO: 11245 - protein, 428 aa, unidentified
  REGION 1..428: note = Human gut metagenome
LKVFVLNMRGQPLMPCSPAKARHLLKAGKAVVRRRTPFTIQLRIATGETKQSVTLGVDAGAKHVGLSAATEKEEVFASEVELRQDITGLLAARLSLRRDRRHRKTRYRAPRFLNRVRSKHKGWLAPSVENRIQAHMSRIDAVCRLLPVTKIVIETASFDIQKIKDPSVEGTDYQQGDQLGFWNVREYVLFRDGHVCQHCHGHSKDKILNVHHLESRQTGGDAPNNLITLCETCHKACHAGKIKLKVKRGQSFRAEAFMGIMRWTLLDRVRKAHPGLPVENTYGYLTKNTRITLGLPKAHCVDAYCIAGNLKAVRRGVHLYQRQVRKHNRQIHKCTVLSKTLKDGTKIGYRKLNQTPHLVKNFRLFDKVRCLGQTGFIFGRRSSGYFDVRRLDGVKLSSGISYRKLTLLEKRSTYLTELRKEDGASSPV

SEQ ID NO: 11246 - protein, 442 aa, unidentified; identical to SEQ ID NO: 7213
  REGION 1..442: note = Human gut metagenome

SEQ ID NO: 11247 - protein, 447 aa, unidentified
  REGION 1..447: note = Human gut metagenome
VPAYRIKHITKKEAPYMVYVLDIDGQPLMPTSRHRKVRKLLNSHLAKVVKRCPFTIQLLYQSTKETQPVSLGVDAGSRHIGLAATTEQKVVYQEELVPRNDVVKLLSARRALRSSRRSRKTRYRKPRFNNRVHSKHKGWLAPSVEVKIQEHITAIKRICQILPISDIHVETAEFDLQRLKAMEEGRPLPVGTDYQLGEQYDFYNTRQYVLHRDEYTCQCCGTHDNNVKLHVHHIESRQTGSDAPNNLITLCEHCHKLLHAGKTILPKGKKRGKSYRDATFMGIMRKTLLERLKKEIDVPVEGTYGYITKYWRERAGLEKSHINDAICISKHPYARPLETYYLTKAVRHHNRQIHKTKLSKGGIRKRNQAPYLVKGFRLFDKVLYQGESYFIFGRRITGYFDIRTLDGTKVNKGSTSYKKLRIQDTAEAYLTEVRAIPHMNEFTCVLA

SEQ ID NO: 11248 - protein, 476 aa, Moorena sp.
MVFVLDKHKKPLMHCTEKRARLLLRRGRAVVHRLAPFTIRLKDRVLEDSEVQPLRLKLDPGSKVTGVAVLRGNEVVFLGEIRHRTDIEDRLAKRRMIRRNRRNRKTRYRKPRFLNRHPEKCAGCGKNAKHGSRYCRKCGQRPKDNGNRNTWLPPSLGARVDQVIHALRKIRVPIGGISVELVRFDTQKLENPEISGVEYQHGTLFGYEVKEYLLQKFGHRCAYCGGESGDPVLEVEHVVPRSRGGSNRVSNLAIACRTCNEEKDDWMPGEWLAILQRSKRKLDRVRAVNVQKALGQLKVPLRDAAAANTTRWALYRRLLSLGSSVKVGSGGRTKWNRERMGLPKEHYWDAACVGDSTPEKFRDIPAWVQVWEAKGRGNRQVCRTDKQGFPVRHLNRQKRHFGFQTGDMVVAEIPRGKYAGRWRGRVAVRANGWFDLFVGGVRAVQGVSHKHCRVLQRGDGWAYEQMRPAVAAPPHA

SEQ ID NO: 11249 - protein, 447 aa, unidentified
  REGION 1..447: note = Human gut metagenome
ETPSNIGEGSQPVERPRRQNLRVFVLNKRGKPLMPCSPAKARLLLKEKKAIVVRRTPFTIQLTIATGETKQPVGLGVDAGYKHVGLSASTDKAELYASQVELRQDITDLLSARRALRRARRNRKTRYRAPRFNNRIRTKRKGWLAPSVENRINAHLSRIEAVLRLLPVTKITVETASFDMLLLKNPDIAGKEYQEGEQLGFWNVREYVLFRDGHVCQHCYGRSKDPVLNVHHLESRRTGGDSPGNLITLCETCHEALHRGEIALKTKRGHSFRAEAFMGMMRWEVLNRLKASHSELEVNNTYGYRTKHARIVNGIDKSHCADAFCIAGNLGAERLCEFFFQKQTRRNNRQIHKLSILKGGIRKRNQAPFEIKGFRLFDKVACKGEESFIFGRRSSGYFDVRKLDGTRISAGISYKKLRLLEKRRTYLTEIRKEEALPPLPEGRGLRA

SEQ ID NO: 11250 - protein, 413 aa, unidentified; identical to SEQ ID NO: 3220
  REGION 1..413: note = Human gut metagenome

SEQ ID NO: 11251 - protein, 442 aa, unidentified; identical to SEQ ID NO: 3161
  REGION 1..442: note = Human gut metagenome

SEQ ID NO: 11252 - protein, 482 aa, unidentified
  REGION 1..482: note = Human gut metagenome
LVGNVQAPWDVYPSPTLCGLCLKVLRGRNGDADKKPIPTLTKDENRPSGRTTGLRAEQAEPAGIRKGDTLKVFVLNMRGKPLMPCSPAKARHMLKAGKAVVVRRTPFTIKLTIATGETKQDVTLGVDAGARHVGISATTEKEEVFASEVKLRQDITGLLADRLAFRRARRNRKTRYRSPRFNNRVRSKHKGWLASSVENRIQAHMSRIDAVCRLLPVTKIVIEAASFDVQKIKNPTIEGTDYQQGDQLGFWNVREYVLFRDGHVCQHCHGRSRDKILNVHHLESRKTGGDAPNNLITLCETCHKAYHAGKIKLKVKRGHSFRAEAFMGIMRWTLLNRMRKAHPSLPVENTYGYLTKHKRIALGLPKTHCADAFCIAGNLKALRRGDFLFQQQTRKHNRQIHRCSILKGGVRKLNQAPFLVKGFRLFDKVRIGGQIGFVFGRRVRGIFNIRRLDKTVIGTDINCKKLSLLETRKTFLTELRKE

SEQ ID NO: 11253 - protein, 395 aa, Pseudomonas sp.
LQSLTLKFDPGSKFTGIALVRQKGQRVSVLSLMELAHRGAAIRQAMQQRAAFRRRRRGQNLRHRAPRFDNRTRPEGWLPPSLRHRLDTTLGWVGRMRNWAPISDLAVERVKFDMQAIQNPEISGVQYQQGELAGYEVREYLLEKWGRCCAYCDAENTPLEIEHIVPRSAGGSDRVPNLTLACRPCNQRKGNQPVEVFLKARPELLARIKAKAKAPLRDAAAVNATRNALFRGLLDTGLSVTTGTGAQTKYNRRRLDLPKTHALDAACVGEIRAIEHWHRPTLAIKATGRGDYQRTRLTTHGFPRGYLTRQKRHFGFQTGDQVRAEVPTGKKAGTHLGRVAVRKTGSFNIQTSDGVVQGVHHRHFTLIQRADGYAYSHIQTDSPQSQKEAARAEVR

SEQ ID NO: 11254 - protein, 354 aa, unidentified
  REGION 1..354: note = Human gut metagenome
CGIDDGSLHVGIALVQKCQTRNKVVFKGIIEQRNDVKHLMDVRRGYRRYHRYHKRYRPARFNNRFSSKREGRIAPSILQKRQAIIRVINRLNKWINITNYWLEDVAIDIRALTDGYKSYSWQYQRSNRLDENIRKAVILRDNCRCKECGKSNCRLEVHHIKPRRLNGPNTLDNLITLCENCHQKTEGKEELYMSRYFGLLKSSDSKRLNYAQHAMIGKKWLREELSNLGMLYLTNGGNTANKRIDWSIEKSHSNDAICITDLQPDTCNIKEWTIKPMRRQSKAKTDNVLGIKHRDLVEYTFRNGETYKGYVTALYPEQKAINFQSSTKHCKKVNARKCKLLWKYSKIYWLENAG

SEQ ID NO: 11255 - protein, 420 aa, unidentified
  REGION 1..420: note = Human gut metagenome
MQYAYVLNKRGEPLMPCSPGKARILLKQQKACVVKRTPFTIKLLHGSAGYKQPITLGVDAGSKHVGLSASTEKRELYSEEFTPRNDVVELLSTRRQNRRSRRNRKTRYRAPRFNNRVHSKHKGWLAPSVEVKIQEHITVIKRICRVLPITLVRVETAEFDTQRLKAMLAGKPLPVGTDYQLGEMYDEYNVRQYVLKRDNYTCQCCGAHTTAKKTVKLHVHHLESRKVGGNAPSNLITLCTTCHNNLHKGKITLDGKKRGKTLRDAAFMGIMRNTLLTRLRNELNIPVQNTYGYITKLLREQNDIKKSHVNDARCISKHPLAKPCSVCYRTKAIRHHNRQIHKAKILKGGIRKANQAPYIVKGFRLWDKVLYNEQECFISGRRSSGYFALRKFDGTTITNSISFKKLRLLEPATNYLIERK

SEQ ID NO: 11256 - protein, 466 aa, unidentified
  REGION 1..466: note = Human gut metagenome
MSTCACVLSKSGERLMPTIRLGKVRHLLKDGKAKIIKHHPFTIQLLYDSETNIQPIEICEDVGYNYIGISVKSESHEYVSAQYDTLQDEKDCHDSCRRMRRTRRNRLRYRQKRFDNRKRDKGWLAPSLEHKKELNVNVIKMYCKVMPITHVTVEVGSFDTMLVKAIEEGKAAPEGVDYQKGPRYNLATLREAVFYRDNYTCQVCGREAQKDSAILHVHHMFYWKGRHGNSLSELLTVCEKCHTPANHQKGGKLYGFGENIKFANLSGAAFMNTVRWQIVNELCAAFGKPFVTFTYGAMTKEKRIALHLEKSHNNDAYAMGSFHPVGRCAFEHYEKVKRNNRILERFYDSQYIDIRTGKVTNGKSLFNGRINRNHKKDSENLHKYRGKRIRKGYRALRRKKVALNPGDLVFLNGEILVVHGTHTDKKGAVRVEFKVAAKNGKKSANLKKLKIIKTSNLTYSAWKKVF

SEQ ID NO: 11257 - protein, 419 aa, unidentified; identical to SEQ ID NO: 6355
  REGION 1..419: note = Human gut metagenome

SEQ ID NO: 11258 - protein, 481 aa, unidentified
  REGION 1..481: note = Human gut metagenome
MWTTVLRGEKPYGRSSALPVRECVSIAKKRRHHMVAVLSKTGIRLMPTSSYRARKLLAKKKAVICGYRPFTIRLTERETGDVQPVELAVDTGYFHVGNSLKTAKHELAAVEIRTLMDEKQRYDDRRQYRRMRRSRLRYRAMRFDNRRRPDGWLAPSIQGRMEQNLAFLRRVLSVVPVTRIVMEMGQFDTQVLKAVEEGRPLPEGTDYQQGERYGIATLREAVFTRDNYTCQCCKKTVRDGTILHVHHIVYRSQGGTNRMGNLITVCEKCHTPKNHKPGGKLYKWNPTVKSFKGATFMTAVRWIMYRSVKESFPDVDVRITYGAKTKLQRRALDITKSHVNDAYIMGNFHPKHRVRPVILQKKRRNNRILEKFYDAKYIDTRDGIKKTGQQLFNGRTNRNHNTDTENLRPYRGTKLSKGKRAIRTTRYRIQPHDILVYQGQEMEASGCHNKGTRVMTTAKKSLPIGKVRVRRYSGGYYAVAE

SEQ ID NO: 11259 - protein, 456 aa, unidentified; identical to SEQ ID NO: 4017
  REGION 1..456: note = Human gut metagenome

SEQ ID NO: 11260 - protein, 451 aa, unidentified; identical to SEQ ID NO: 10609
  REGION 1..451: note = Human gut metagenome

SEQ ID NO: 11261 - protein, 462 aa, unidentified
  REGION 1..462: note = Human gut metagenome
MSVLVIGSNGRALMPTNPRKARLLLKKKTASVVCRHPFTIQLLYKTGCATQEGSIGIDTGSQYIGVGVTCGDRVILKEEHELRSSMEKRSLLVARAAMRRGRRYRKVRYRKPKWRHHTKRMYFEKPNRRGQHWRKVKTTTQSPRPKGWLPPSLQSKCDHHFRIIDRYLKYLPDSITRNLVIEVGRFDMARMNDSMIHGEMYQRGPMYDAENLRAYIFARDGYQCACCKAKAGTTRKADGTTVKLVAHHILFRSRGATDNPRYIISVCDHCHTTKAHQPGGVLYSWMKNNKKVTRGLRDATFMNILRKRLFARYPQSAFTYGNITAADRKQLRLPKSHANDAVDISLLGKEASTVKNICQTMHYKQIRKSKRSLHEAIPRKGRKNPNTKAVRNKKNTTQVNGFKLGDSVLADGKKLFICSFTGTSAYLIDKNGCYISQPGKTYKQWPLSKLKRLHPNGNWLMA

SEQ ID NO: 11262 - protein, 431 aa, Escherichia coli; identical to SEQ ID NO: 4170

SEQ ID NO: 11263 - protein, 431 aa, Escherichia coli; identical to SEQ ID NO: 3801

SEQ ID NO: 11264 - protein, 427 aa, Moorena sp.; identical to SEQ ID NO: 5461

SEQ ID NO: 11265 - protein, 430 aa, unidentified
  REGION 1..430: note = Human gut metagenome
VEQNLRVFVLNKRGKPLMPCSPAKARHLLKEKKAIVVRRTPFTIKLTIATGESKQPVSLGVDAGYKHVGLSASTEKAELYASEVELRQDITDLLSARLALRRSRRNRKTRYRAPRFDNRIRTKRKGWLAPSVENRINAHLSRIEAVLRLLPVTKITVETASFDMQLLKNPDIAGKEYQEGEQLGFWNVREYVLFRDGHVCHHCYGRSKDPVLNVHHLESRRTGGDSPGNLITLCETCHKALHRGEITLKAKRGQSFRAEAFMGIMRWEVLNRLKASHPELEVNNTYGYWTKHARIANGIAKSHCADAFCIAGNLGAERLGEFFFQKQTRRNNRQIHKLSILKGGRRKRNQASFEVKGFRLFDKVACKGEESFIFSRRSSGYFDVRKLDGTRISAGISYKKLRLLEKRRTYLTEIRKEAFPPLPEGRSLRA

SEQ ID NO: 11266 - protein, 424 aa, unidentified
  REGION 1..424: note = Human gut metagenome
MVYVISQKNKPLMPCSSPIARLLLKLGRAKVKKREPFTIKLTYETTNYIQNLTLGVDTGSGTIGTAVSNDNSDIVYMSEVIVRNDITDKMTQRRKYRKNRRGRKTRYRKARWLNRANSTKTDRFSPTMQSKLHSHVKEIEYIKSILPITTMVFETGQFDTHLMKNPNLANPKVKHWGYQKGGNYGFENTKAMVLNRDNYTCQCCKGKHKDSKLEVHHIIFRSQGGSDEESNLITLCHTCHKDLHSGTINFKLKGKLKGNLKYATQMNSIRKQLFRIYPDAIETFGYVTKANRLVLGIDKEHYYDACTIATQGNIFTVKSNLYKKKCVSDGDFQKTKGIRSEQPIVTDKICGFRKFDKVRYFGNDYFIKGRMSTGYAILMDIDGNKADFSAMPKGYKTPKMVKLKRIEARTTWMITTVEVTPNIA

SEQ ID NO: 11267 - protein, 453 aa, Moorena sp.; identical to SEQ ID NO: 4050

SEQ ID NO: 11268 - protein, 420 aa, unidentified
  REGION 1..420: note = Human gut metagenome
LMQDRKKARRARRTNGRRCRRQRRAKANGTISKKCVKQDTAQSKNPSKRAKEIGIIKRRLPGYKKDVLCIGIKNKEAKYTNRTRPEGWLTPTANQLLQTHINLVRKMQKFLPISDVVLEVNKFAFMRLDNPDIQKWQYQQGPLYQKGSLENAVSEMQEHHCLFCDKPIDHYHHVVPQSENGSNTIANIVGLCAEHHNLVHKDAAWQKKLAEEKVGLNKKYGALSVLNQIIPALTNKLSVLFPKHFFVTAGKSTHDYRAAHGVSKDHWLDAYCIACSVLPSNVCDSNINNHMPYELKQFRRHDRRVLNNENMNRVYTLDNKAVAINRHKATEQEAASLEEFRKEHPNDVCKLKVKEHHPTYRNMNRNYPGSIFLVGKHVHIMQGIAGSKDGKATTYKDSNANSITASKCKFVAKNSGILFV

SEQ ID NO: 11269 - protein, 406 aa, unidentified; identical to SEQ ID NO: 2752
  REGION 1..406: note = Human gut metagenome

SEQ ID NO: 11270 - protein, 442 aa, unidentified; identical to SEQ ID NO: 2903
  REGION 1..442: note = Human gut metagenome

SEQ ID NO: 11271 - protein, 433 aa, unidentified
  REGION 1..433: note = Human oral metagenome
MWVYVLNMNGQPLMPTHNGAKVRVLLKQKRAKVISKCPFTIKLLYTSTEFTQPLTLGVDTGSKYVGSAVVNDETSEVLYESQVELRDDIKLKMDRRRAFRRTRRNKLRYRPTRFNNRKASKRKDRYSPTLIAKFQGHKREIEFIKSILPVTDIVLEVGEFDTQLLQDPTLAYRKWGYQRGELYQQENYKQAARARDNYTCQCCGKKNCRLEVHHLLPRTRGGSNKLANLITLCSDCHQLAHSSEEQLLSFQKKFGKKAKGTLRYATQMNVLRSMLQKEYHNAEITYGFITKEMRRVFNLEKTHTIDACCIASRGVLFTNENSNKYKKKCVPKGNYAKTGVCGCKFVILPKGKIAGFKRYDKVLYNNKEYFVAGRMSTGYVYLIDIDNNRVQVEITRRSTGEKYVSKAKIKVSLIKKVASVGSCVCVKQYGSFL

SEQ ID NO: 11272 - protein, 512 aa, unidentified
  REGION 1..512: note = Human gut metagenome
MSTIYVLNKDGKPLMPTTRGGHVRHLLKEQKARVVQSNPFTIQLLYETNDVVQPLYLGIDPGRTNIGVAVVKADGTAVFAAHLETRNKKIPKLMQDRKKARRARRTNGRRCRRQRRAKANGTISKKCVKQDTAQSKNPSKRAKEIGIIKRRLPGYKKDVLCIGIKNKEAKYTNRTRPEGWLTPTANQLLQTHINLVRKIQKFLPISDVVLEVNKFAFMRLDNPDIQKWQYQQGPLYQKGSLENAVSEMQEHHCLFCDKPIDHYHHVVPQSENGSNTIANIVGLCAEHHNLVHKDAAWQKKLAEEKVGLNKKYGALSVLNQIIPALTNKLSVLFPKHFFVTAGKSTHDYRATHGVSKDHWLDAYCIACSVLPSDVCDSNINNHMPYELKQFRRHARRALNNENMNRVYTLNDKVVATNRHKATEQEAASLEEFRKEHPNDVCKLKVKEHHPTYRNMNRNYPGSVFLVGKQIHVMQGIASSKDGKATKYNDTRATTIAAGKCKFVAKNSGILFV

SEQ ID NO: 11273 - protein, 353 aa, Arthrospira sp.; identical to SEQ ID NO: 3451

SEQ ID NO: 11274 - protein, 431 aa, Petrotoga sp.
MEKRSVQRVFVLDKNKQPLMPCHSARARELLKKGKAAVFRYHPFTIILKEREGGDTQPIQVKIDPGSKTTGVALVADFKRGKKIIWASVIYHRGHIIKKDLDVRRAVRRFRRNRKTRYRKPRFLNRKRKEGWLPPSLISRAENILTWVKRIRRFSPVTSISMELVRFDTQKLQNPEIKGVEYQRGTLYGYEVKEYLLEKWGRKCAYCGNENVPLEIEHIVPKSKGGSNRVSNLTLACHECNQKKNNQSIDEFLANNPKKLNQIKARAKGPLKDVAAVNITRWYLFNQLKKEKLPIEVGTGGQTKYNRETQGYPKEHWIDATCVGESGYNVQLEPDMQVLEITANGHGMRRMCFVDKYGFPKSYRPKERTYMGYKTGDIVLANVPKGKNKGIHIGRIAIRHRPSFLLNGVGDVHPKYLTLLQKNDGYGYQMS

SEQ ID NO: 11275 - protein, 427 aa, Fischerella sp.; identical to SEQ ID NO: 6171

SEQ ID NO: 11276 - protein, 458 aa, Lactobacillus sp.; identical to SEQ ID NO: 4474

SEQ ID NO: 11277 - protein, 557 aa, unidentified
  REGION 1..557: note = Human gut metagenome
MIYNLVSIRERSFMKQKKQKVMVYILNKKGKPLMPTTRCGHVRKLLDSKKAVVVSSNPFTIRLKYDTPNGVQDVFAGIDSGRENIGSGASNEDGDCLYLGELKTSNKSIKMKMTERAGFRKERRSHDRQNKQRKARKDHTEIQNGNADICRTTISCKSVQISYPAAEKSVTHKIIRGKEGKFANRHRDEGWITPSARQLVQMHMNDLKSMCRILPISHVTLERVAFDFQKLENENIKAWEYGKGKLYGYDSPEEYIHDVQGGKCLICGKPHIDYLHHIIPRSKGGSNKVNNLAGLCYDCHYGPMGVHNCQDTQDRLPELKNEANKQYKVSLLNSVMPVLIEEMDKFCKANSIIFSICGGHDTAKVRDMYDLQKDHCIDGFAISLAGRNVKSVDVMPDRIHQKQRYKKKSKNIIQKRNCREYYDGKKLAAVNRHKGTDQKADSLEEYMNTYAETHTADECKKHFESLTVKPARRTYTFHKEGRICPFHIGDKVRYEKKNKIKGNTKVETFICEGIRFPKDENKAKVEHNKTKSKKMKFCRVLEPGCTPYIDYRKLVLI

SEQ ID NO: 11278 - protein, 383 aa, unidentified
  REGION 1..383: note = Human gut metagenome
MYAADRFVTCKFIRNTQARFCNRKRCPDWITPTVQHLVQTHLNIIRKISRYLPVTDIAFEVNRFAFMHMENPKAMGVDFQNGPLKGYDDVKEAICTQQHGKCLMCKKPISHFHHIVPRSRGGSDTIQNLAGLCPECHTKVHKDTAFRKDFDEKKSGQLKKYGALSALNQAVPFICKKLLEEYGEEHVHFCRGLDTSLIRTAFGFEKTKKNQMHEVDAYCIGLAALEVNEVETPAFDHTFQIRQFRRQDRSIIHHQTGRSYYQGKEKVAQNRKPGFEQKTTALSQWYKEQVRIHGEKEAEKLRSQLRVEKSCRHYNDMDRFLPGAVFLYEGKRYVLSGRITNGKYLRACGQGMKNFPAAECTFIRHNAGWCGIKKVDILFSRIS

SEQ ID NO: 11279 - protein, 442 aa, unidentified; identical to SEQ ID NO: 2903
  REGION 1..442: note = Human gut metagenome

SEQ ID NO: 11280 - protein, 453 aa, unidentified
  REGION 1..453: note = Human gut metagenome
CVLGNNGERLMPTIRLGKVRHLLKDGKAKIIKHHPFTIQLLYDSKTNTQPIEICEDVGYNYIGISVKSQSHEYVSAQYDTLQDEKACHDSCRKLRRTRRNRLRYRKPRFDNRKRGEGWLAPSLRHKKELNVNVVKMYCAVMPITHATVEVGSFDTMLVKAIQEGKAIPEGADYQKGPRYNLATLREAVFYRDNYTCQVCGRKVADGAILHMHHMFYWKGRHGDSLNELLTVCEKCHTPANHQKSGKLYGFGENVKFADLSGAAFMNTVRWQIVNELYAAFGKDFVTVTYGAMTKEKRIALQLEKRHNNDAYAMGEFHPSCRCKFRHYQKRRRNNRVLEKFYDATYIDTRTGNKAKGKELFNGRISRNHKKDSENLHKYRAHKITKGRRSIRSKHYDIQSGDTVLYAGRKCITTGCFNKGKWLRIPVGSTAKSVAISKVKLINHVGAWKKGSSI

SEQ ID NO: 11281 - protein, 430 aa, unidentified; identical to SEQ ID NO: 4504
  REGION 1..430: note = Human gut metagenome

SEQ ID NO: 11282 - protein, 408 aa, unidentified
  REGION 1..408: note = Human gut metagenome
MVYVQDIDGKPLMPTTRHGKVRRLLKDSKAVVVNTCPFTIKLMYKTSDYKQEIVLGVDSGTKHIGLSATTKSKELYSSEVILRSDIVDLLSTRRELRRTRRNRLRYRKPRFENRVKSKRLGWVAPSVRHRIDAHIRVIDNICSTLPISRIIVEIAQFDTQKIKNPDISGNEYQEGDQLGFWNVREYVLTRDGHKCQHCKGKSKDPILNVHHIESRKTGGDSPSNLITLCETCHKEYHKGKIDLRVKRGKSLRDAAVMGIMKWKLYEELRSRYDNVSMTFGYITKYNRIKYGIEKSHISDAFVISKNFNALMLEYHYKVRLIRRHNRQIHKQKVLKGGVKKPNQSSFEVFGFRLFDRVMFEGNCYFIFGRRKSGSFNIRDIDGGNQRDITYKKLKLLRCKRFMIQKETN

SEQ ID NO: 11283 - protein, 420 aa, Moorena sp.
MQNYVFVIDANFQPLNPIIPKKARRLLDKGKAAVFRMYPFTIILKTSINNPTISPCQIKIDPGSKVTGFALVQDGQVIWAMELEHRGGLIKKKLSSRSAVRRGRRNRNTRYRKPRFLNRKRPEGWLPPSLEHRILTTQTWVKRLIKFCPVNEIWVERVKFDAQKMQNPEISGIQYQQGELAGYEVREYLLEKWGRECTYCGKKSVPLQIEHIYPKSKGGSERVSNLCLACEKCNQRKGNKPIEDFLKKKPSLLQKIKTKALSPLKDAAAVNTTRNKLVKVLQKTKPVVTGTGAQTKYNRTKLGFPKEHWIDAACVGNIEALTLKTFQPLLVTCKGQGGRQKAALNKYGYPIRHNPLRPIKGWCSGDIAKNILTGKFGRVNPRSKSNSFNYTVPGEKAISLHVKNLVRIHRQDGYTYGFCQ

SEQ ID NO: 11284 - protein, 275 aa, unidentified
  REGION 1..275: note = Human gut metagenome
MQYAYVLNKRGEPLMPCSPGKARILLKQQKACVVKRTPFTIKLLHGSAGYKQPITLGVDAGSKHVGLSASTEKRELYSEEFTPRNDVVELLSTRRQNRRSRRNRKTRYRAPRFNNRVHSKHKGWLAPSVEVKIQEHITVIKHICRILPITLVRVETAEFDTQRLKAMLAGKPLPVGTDYQLGEMYDEYNVRQYVLKRDNYTCQCCGAHTTAKKTVKLHVHHLESRKVGGNAPSNLITLCTTCHNNLHKGKITLDGKNVVKRFVMRLLWVSCVTHY

SEQ ID NO: 11285 - protein, 414 aa, unidentified; identical to SEQ ID NO: 4492
  REGION 1..414: note = Human gut metagenome

SEQ ID NO: 11286 - protein, 415 aa, Eubacterium sp.; identical to SEQ ID NO: 6925

SEQ ID NO: 11287 - protein, 465 aa, unidentified; identical to SEQ ID NO: 3603
  REGION 1..465: note = Human gut metagenome

SEQ ID NO: 11288 - protein, 408 aa, unidentified
  REGION 1..408: note = Human gut metagenome
MVYVQDINGKPMMPTTRHGKVRRLLKENKAVVVSLCPFTIKLTYVTSDYKQEIVLGVDAGTKHVGLSATTKSKELYSSEVILRNDIVDLLSTRRELRKTRRNRLRYRKPRFNNRIKSKRSGWIAPSVKYKVDAHIRVIDNVCSILPIFRIVIEVAQFDTQKINNPEISGKEYQEGDQLGFWNTREYVLARDGHKCQHCKGKSKDPVLNVHHIESRKTGGNSPSNLITLCETCHKEYHKGNIDLKIRRGKSLRDAAVMGIMKWRLYEELKSKYDRVSMTFGYVTKYNRINHDIEKSHVSDAFVISKNFNAIRLGYYYKVRLVRRHNRQIHKQKIQKGGIKRLNQSPFEVFGFRLFDRVMFENSYYFIFGRRKTGSFNIRDIDGKSQKNITYKKFKLSRCKRFMIQKEMN

SEQ ID NO: 11289 - protein, 373 aa, Moorena sp.; identical to SEQ ID NO: 3006

SEQ ID NO: 11290 - protein, 431 aa, unidentified; identical to SEQ ID NO: 5232
  REGION 1..431: note = Human gut metagenome

SEQ ID NO: 11291 - protein, 415 aa, Scytonema sp.
MSNFVFLIDSNKTPMNPIHPSHAKKLLASNKAAVFRYHPFTLIMNRVVENIVTYPITLKIDPGSKVTGIALVNNRDEVIWGMELHHRGQAIKDSLETRKGVRRGNRARHTRYREARFLNRKRPNGWLAPSLRHRVQTTETWVKRLCQFAPIAAIVQELVRFDLQQLENPEISDLEYQQGELQGYEVREYLLNKWERKCAYCGAENVALQVEHIKPKAKGGTNRISNLCLACQKCNEKKGTQDIEKFLAKKPEVLKRILSQAKRPLKDAAAVNTTRSCLFNVLKSTELPVTTGSGGRTKFNRTKLQLPKTHWIDAACVGIAEKLSVLTTKPLLVKSTGKGTRRLCRINKFGFPCSKPRTSYTHGWNTGDIASGKGVAGRVVVQSSTRLEIRVDGKRIGGKLSDFKRLHMKDSYSYG

SEQ ID NO: 11292 - protein, 414 aa, unidentified; identical to SEQ ID NO: 2588
  REGION 1..414: note = metagenome

SEQ ID NO: 11293 - protein, 331 aa, unidentified
  REGION 1..331: note = Human gut metagenome
LLSTRRQNRRSRRNRKTRYRVPRFDNRVHSKHKGWLAPSVEVKIQEHITVIKHICKILPISLVRVETAEFDTQRLKAMLAGKPLPVGTDYQLGEMYDEYNVRQYVLKRDHYTCQCCGTHNTAKKLVKLHVHHLESRKTGGNAPSNLVTLCTTCHKNLHKGRVTLDGKERGKPLRDAAFMGIMRKTLMVRLKEELPIPVQGTYGYITKMRREQNDIKKSHVNDARCISKHPLAEPCSVCYRTKAIRHHNRQTHKANFSKGGIRKRSQMPYVVEGYRLWDKVLYKGQECFVSGRRASGSFTLKKLDGTRISKGVTFKNLRLLEPATNYLIERM

SEQ ID NO: 11294 - protein, 415 aa, unidentified; identical to SEQ ID NO: 3548
  REGION 1..415: note = Human gut metagenome

SEQ ID NO: 11295 - protein, 406 aa, unidentified
  REGION 1..406: note = Human gut metagenome
MVYVQDIDGKPMMPTTRHGKVRRLLKANKATVVNLCPFTIQLTYKSTDHKQPVTLGIDAGAKHIGFSATTEKEELFACETTLRTDIVDLLSMRLQNRRTRRSRLRYRKSRFNNRGSSKKKGWVAPSVKQRIDSHLNEVNEIHKILPITKIVIEVAQFDTQKMKNHDISGADYQNGEQLGFWNVREYVLFRDGHKCSHCKGKSKDPVLNVHHLESRKTGGDSPSNLITLCESCHKAFHKGEIELKKKRGKSLRDAAVMGIMKWKLYEELKSRYDNVSMTFGYITKHNRIKYGIEKNHTSDAFVISRNFNAKRIERQYLKRLIRRHNRQIHKMKILKGGKKKNNQAPFEVFGFRLFDKVLYNNEIFFVYGRRKSGNFNIRDFNGENPKDVSHKKFKLIRGKRHPIILK

SEQ ID NO: 11296 - protein, 424 aa, Blautia sp.; identical to SEQ ID NO: 3351

SEQ ID NO: 11297 - protein, 424 aa, unidentified
  REGION 1..424: note = Human gut metagenome
MIYVRSKEGSVLMPTERCGKIGYLLRHGKAHVVSRVPFVVQLDYDSTTYTQDVSLGIDAGSKHIGVSASSEKKEMLAAQVELRSDIVKLLSTRRELRRTRRNRKTRYRKVRFDNRKKKDGWLAPSVEQKIESHLKVIRLVHKLLPVTKTTIEVAQFDAQKIKNPDIKGDEYQQGEQMGFWNVREYVLARDGHKCLHCKGKSKDPILNVHHLESRKTGGNSPSNLVTLCETCHRAYHRGEFELKIKRGNSLRDAAVMNIMRWAVYERAKAEFGNVHLTYGYITKHTRIENEIVKTHAADAFCIAKNIHARRLSSLFMCRCVPRHTRALQVATPKIGGIRRKTIASHKIGKSNFQRFDMVRWKGMDCFIFGSTNGRLILRDTEGTKMHENASVNIKTVKFLKRLKNNILMEEKDFRKLNNYGKRQN

SEQ ID NO: 11298 - protein, 414 aa, unidentified
  REGION 1..414: note = Human gut metagenome
MVYVINKQGQALMPTERFGKVRRLLKNSLAHVVCRIPFTIQLDYDTTDYTQPVSLGVDAGSKHIGISATTSEKEMYAADVELRNDIVDKLSTRREQRRTRRSRLRYRKARFNNRVSSKRKGWLAPSVENKIQTHLTVVEKIHKFLPITNIVVETASFDIQKINNPSISGSEYQQGEQLDFFNVREYVLFRDNHTCQHCKGKSKDKVLNVHHIESRKTGGDSPNNLITLCETCHKAYHRGEFELNVKRGKSFRDAAFMGIMRWSFYDRIKNIYPDVSMTFGYITKNTRITNNLPKDHYVDARCISGNPVAKPLGYYFYQKKVRCQNRQIHKANFLKGGRKKLNQAPFLVKGFRLFDLVEYQKDLYYIFGRRDSGFFDIRKLDGTKVNKGSINCKYLRLVDKRKSILIEKRMQVNL

SEQ ID NO: 11299 - protein, 431 aa, unidentified
  REGION 1..431: note = Human gut metagenome
MVYVLDQEGRPLMPTNRHGKVKHLLREGKAKVVKRTPFTIQLLYESTHYTQDIILGVDAGSKTIGMSATTEKQEVFAAEVTPRNDIVKLMSERRSLRRARRNRKTRYRPARFNNRVRSKHKGWLAPSVEVKIQEHITSIKRVLHLLPITKVIVETAEFDLQLLKAIENGDPLPEGTDYQKGEQLGHYNLRQYILHRDAYTCQACGEHKEGTKLHVHHLESRRVGGNAPDNLVTLCEACHKALHQGLITEDDLKKRKRRSTRDATFMGIMRKTLMTRLRNELTIPVAETRGYFTKYTRVEVLQLPKSHINDAFSICQGSIGFKASKETQANRIEEHYLIKPVRHHNRKLHKLTILKDGIRKSNQSDRYTKGYRLYDKVLFNGQECFIFGRRTSGYFDLRKLDGTKVHASASWKKLALLERQSNYLIEGKVAG

SEQ ID NO: 11300 - protein, 443 aa, unidentified
  REGION 1..443: note = Human gut metagenome
NIGEGSQPVERPRRQNLRVFVLNKRGKPLMPCSPAKARLLLKEKKAIVVRRTPFTIQLTIATGESKQPVSLGVDAGYKHVGLSASTEKAELYASEVELRKDITDLLSARRALRQSRRNRKTRYRAPRFDNRIRTKRKGWLAPSVENRINAHLSRIEAVLRLLPITKITVETASFDMQRLKNPDISGKEYQEGEQLGFWNVREYVLFRDGHVCRHCHGRSKDPVLNVHHLESRRTGSDSPDNLITLCETCHKALHRGEITLKAKRGQSFRAQAFTGIMRREVLNRLKASYPELKVHETYGYLTKHARIANGIVKSHGADAFCIAGNLGAERLGEFFFQKQTRRNNRQIHKLSILKGGIRKRNQAPFEAKGFRLFDKVACQGEEGFIFGRRSSGSFDVRKLDGTRISAGISCKKLRLLEKRRTYLTEIRKEEALPPLPEGRGLRA

SEQ ID NO: 11301 - protein, 414 aa, unidentified
  REGION 1..414: note = Human gut metagenome
MLCSPAKARLLLKEKKAIVVRRTPFTIQLTIATGESKQPVSLGVDAGYKHVGLSASTEKAELYASEVELRPDVSDLLSARRTLRQSRRNRKTRYRAPRFDNRIRTKRKGWLAPSVENRINAHLSRIGAILRLLPVTKITVETASFDTQLLKNPDISGKEYQEGEQLGFWNVREYVLFRDGHACQHCHGRSKDPVLNVHHLESRRTGGDSPGNLLTLCETCHKALHRREIKLKTKRGQSFRAEAFMGIMRWEVLNRLKASHPELEVHNTYGYRTKHTRIVNGIDKSHCADAFCIAGNLGAKRLGEFFFQKQTRRNNRQIHKLSILKHGLRKRNQAPFEVKGFRLFDKVVCQGEEGFIFGRRSSGSFDVRKLDGTRISAGISYKKLRLLEKRRTYLKEIRKEEALPPLPEGRSLRA

SEQ ID NO: 11302 - protein, 515 aa, Actinoplanes sp.; identical to SEQ ID NO: 2821

SEQ ID NO: 11303 - protein, 366 aa, unidentified
  REGION 1..366: note = Human gut metagenome
MYVTSDYKQEIVLGVDAGTKHVGLSATTKSKELYSSEVILRNDIVDLLSTRRQLRRTRRNRLRYRKPRFNNRVKSERPGWVAPSVRYKIDAHIRVIDNVCSILPISRIVIEVAQFDTQKIKNPEISGKEYQEGDQLGFWNTREYVLARDGHKCQYCKGKSKDPVLNVHHLESRKTGGDSPSNLITLCETCHKEYHKGNIDLKIRRGKSLRDAAVMGIMKWRLYEELKSKYDRVSMTFGYVTKYNRINHDIEKSHVSDAFVISKNFDAIRLGYYYKVRLVRRHNRQIHKQKILKGGIKRLNQSPFEVFGFRLFDRVMFENSYYFILGRRKTGSFNIRDIDGKKQKDITYKKLKLSRCKRFMIQKEMN

SEQ ID NO: 11304 - protein, 428 aa, unidentified
  REGION 1..428: note = Human gut metagenome
LKVFVLNMRGRPLMPCSPAKARHLLKAGKAVVRRRTPFTIQLRIATGETKQSVTLGVDAGAKHVGLSAATEKEEVFASEVELRQDITGLLAARLSLRRERRQRKTRYRAPRFLNRVRSKHKGWLAPSVENRIQAHLSRIDAICGLLPVTKIVIETASFDIQKIKHPDVEGTDYQQGDQLGFWNVREYVLFRDGHVCQHCHGHAKDKILNVHHLESRQTGGDAPNNLITLCETCHKACHAGKIKLKVKRGQSFREEAFIGIMRWTLLDRVRKAHPGLPVENTYGYLTKNTRITLGLPKAHCVDAYCIAGNLKAVRRGVYLHQRQVRKHNRQIHKCTVLSKTLKDGTKIGYRKLNQTPHLVKNFRLFDKVRCLGQTGFIFGRRSSGYFDVRRLDGVKISSCISYRKLTLLEKRSTYLTELRKEDGASSPV

SEQ ID NO: 11305 - protein, 426 aa, unidentified
  REGION 1..426: note = Cyanobacteria bacterium UBA11372
MLKPNLVFVLDTHRKPLIPCKPSVARRLLNAGKAAAFRRFPFTIILKKEVTDTPESIELKLDPGSKTTGIALKQGNKIIFGAELTHRGQAIKASLELRRSLRRGRRNRHTRYRQARFLNRTRLKGWLAPSLQHRVETTMTWVNRFIRLAPIGSIVQELVRFDLPQLENPEISGIEYQQGELQGYEVREYLLNKWDRKCAYCGAENVPLQVEHIHPRAKGGSNRISNLCLACEKCNLKKGTQSIEQFLVNKPDLLKQILGQAKRPLKDAAAVNSTRWSLFNRLKQSGLPVVTGSGGLTKFNRTRLELPKAHWLDAACAGQVEFIELVTNQPLQIKATGHGTRQMCRTDKFGFPSRYVPRFKFVQGFQTGDIVKAVVATGKKVGEYVGRVAVRSTGSFNISDPSGLVQGISHKYCKPIQRKDGYGYGF

SEQ ID NO: 11306 - protein, 450 aa, Moorena sp.; identical to SEQ ID NO: 2935

SEQ ID NO: 11307 - protein, 456 aa, unidentified
  REGION 1..456: note = Human gut metagenome
MSTCVCVLSNSGERLMPTFRLGKVRRLLKDGKAKIVKHHPYTIQLLYDSKTNTQPIEICEDVGYNYIGISVKSESHEYVSAQYDTLQDEKEHHDDCRKMRRARRNRLRYRKPRFDNRKRSEGWLAPSLEHKKQLNIRLIERYVSVIPITRATVEVGSFDTMLLQAIQKGESKPEGVDYQKGPRYNLATLREAVFYRDDYTCQVCGRKITDGAILHMHHMFYWKGRHGYQLDELVAVCEKCHTPANHQKGGKLYGFGKDKKFANLSGAAFMNAVRWQIVDALHATYGKEFVTITYGAMTKEKRIILGIEKTHNNDAYAMGDYHPAHRCVFRHYQKRRRNNRVLEKFYDATYIDARTGNKAKGKELFNGRINRNHKKDSENFHKYRSKKVSKGRRSIRRQRYAIQPYDTVRLEGKTYITSGCHNKGTRLLIPVNGKSKSVAISKVQVVCHAGAWIQII

SEQ ID NO: 11308 - protein, 430 aa, unidentified
  REGION 1..430: note = Human gut metagenome
MVYMLSHTGQPLMPTEDHRKVRLLLKDKKAKVVKRTPLTVQLLSCTHEYKQPVTLGVDAGSRHIGLSACTENRELYAEDLQPRNDIVKNLSDRRQYRRSRRNRKTRYRAPRFENRVHGKHKGWLAPSVEVKIQEHITAIKRICLRLPVTQVIVETAEFDMQLLKAMELGLPLPAGTDYQEGEMLGQYNVRQYVLFRDSYACQCCGAHPTAKKEVKLHVHHIESRKTGGNAPGNLITLCERCHKLLHEGKITLPGKRLHRPMRDAAFMGIMRKTLLARLRNELSVPVYETHGYITKYLREKHGIEKSHTNDARCIAGYPLASPCADIFCTKAVRHHNRQIHKATILKGGIRKRNQLPYLVHGFRLWDKVLCNGKEGFITGRRTSGFFVVKQLNGTTLSVGISHKKLRLLEKRTNYITERRTAIPLRLTLGV

SEQ ID NO: 11309 - protein, 419 aa, unidentified; identical to SEQ ID NO: 4877
  REGION 1..419: note = Human gut metagenome

SEQ ID NO: 11310 - protein, 373 aa, Moorena sp.; identical to SEQ ID NO: 3006

SEQ ID NO: 11311 - protein, 442 aa, unidentified; identical to SEQ ID NO: 4533
  REGION 1..442: note = Human gut metagenome

SEQ ID NO: 11312 - protein, 536 aa, unidentified; identical to SEQ ID NO: 2718
  REGION 1..536: note = Human gut metagenome

SEQ ID NO: 11313 - protein, 426 aa, unidentified; identical to SEQ ID NO: 3614
  REGION 1..426: note = Human gut metagenome

SEQ ID NO: 11314 - protein, 418 aa, unidentified
  REGION 1..418: note = Human metagenome
MVYVLNIDGQPLMPTNRHGNIRRLLKFGQAKVVKRCPFTVQLQYRSDTNVQEVSLGVDAGSKTIGLSATTKDKVLFEAEVMLRTDIVDLLATRREARRTRRNRKTRYRKARFDNRRKGEGWLAPSIRQKIETHLNVVKKVCQILPVSKITVEVASFDIQKIKNPDIQGEEYQQGEQLGFWNVREYVLFRDNHTCQCCKGKNKDKRLNVHHIESRKTGGDAPNNLITLCETCHTDYHIGKIQLPKSIKRGMVFRDAAFMGIMRWAFYNTLKEKYSDIPVHLTYGYITKNTRISNKLQKTHYIDARCISGNPLAESPSEVYLCKKVRCHNRQLHKFNISKDSKRKNNQAPYVVKGFRLFDKVKFNNIECFIFGRRATGFMDIRTFDGKRISPCAGYKKLKLLETRKNYIIERRQAGPSHI

SEQ ID NO: 11315 - protein, 415 aa, Moorena sp.; identical to SEQ ID NO: 3370

SEQ ID NO: 11316 - protein, 450 aa, Moorena sp.; identical to SEQ ID NO: 2935

SEQ ID NO: 11317 - protein, 440 aa, Clostridium sp.; identical to SEQ ID NO: 5468

SEQ ID NO: 11318 - protein, 479 aa, unidentified
  REGION 1..479: note = Wastewater metagenome
LAKGSNLKDFVLRYICFKEFYLYLQKGVFMIKITNVPVLSCDGKPLMPTTQAYARILLKRNKAKVVDTEIFTIKLLQENKPSAKKHEVTLGLDVGFSNIGYSVRNDEQEFIGGTLEMLEGMSERITKKAMHRKQRNSRKRYRAARFDNRKKETGWLAPTIQHKNNTHDKIIEKLCNLFPVTVKVFEIGNFDTKKMVAPKHDCINYQEAYLEYKGNLRNSILFRDDYTCQLCNKNLFKDANVSLQVHHIIFESKGGTNKPSNLITLCTKCHTQANHKEGGVLYQWMIESKKVTKSLKEATYMNILASRLKEKHDFIQVFGYQTSVKRKNLGLEKSHSNDAFVISGGTTQIRAPHQTNFKQKRRHNRSLETFKDAKYIDIRSAESVDASVLNCGRRRRNKNLNTENLRVFRGKKMRKGVISRRLRTYKFESGDKVRYKGKLYTVRGNQNQGTRMKFKETGDKTYLVKDVVLHKANVGTYVD

SEQ ID NO: 11319 - protein, 428 aa, unidentified; identical to SEQ ID NO: 4442
  REGION 1..428: note = Bioreactor metagenome

SEQ ID NO: 11320 - protein, 426 aa, Lactobacillus sp.; identical to SEQ ID NO: 3294

SEQ ID NO: 11321 - protein, 535 aa, Streptomyces sp.; identical to SEQ ID NO: 4636

SEQ ID NO: 11322 - protein, 414 aa, unidentified; identical to SEQ ID NO: 2588
  REGION 1..414: note = Human gut metagenome

SEQ ID NO: 11323 - protein, 416 aa, unidentified
  REGION 1..416: note = Human gut metagenome
MVYVLDKNGQPLMPTDRHRKVRLMLQSGQAKVIKRCPFTIQLNYDSGHQTQEISLGIDAGSKHIGVSATTKIKVLYEADVELRNDIVDLLSSRRELRRGRRNRKTRYRQAKFNNRRRGNGWLAPSIRQKIGTHLTVVKNICKILPISRIMVETASFDIQKIKNPDIQGAEYQQGDQLGFWNIREYVLFRDNHTCQCCKGKSKDKILNVHHIESRKTGGNAPNNLITLCEICHTGYHKGAVQLPKTVKRGMRFKDAAFMGIMRWAFYEALKQQYEPVGTPVHNTYGYITKHTRIAYNLPKEHYVDARCISGNPEASSNGEYYYQKKVRCHNRQIHKLTVLKGGIRKQNQATYLVKGYRLFDKVSYQGKGYFVFGRRQSGFFDIRTLSGEKVNKGSLSCKKLKFIATRTYYLTERRAV

SEQ ID NO: 11324 - protein, 594 aa, unidentified
  REGION 1..594: note = Human gut metagenome
MSEIKRCIETWVFAKTGGLNKAICFYKYHRHMDVCCACRFSQLAVPHEWHCLVQYRSQQTPSQGKHNLLLWQGRLIVREVAYMSTVYVLNKDGKPLMPTTRGGHVRYLLKEKKARVVTSKPFTIQLLYETDDVVQPLYLGIDPGRTNIGVAVVKTDGTAVFTAHLETRNKEIPKLMQGRKKARRARRTNGRRCRRQRRAKANGTISKKCVKQTTAQNGSVSKRAKKIGVIKRHLPGCEKKVLCIGIKNKEAKFSNRTRPEGWLTPTANQLLQTHINLIKKIRKFLPVNDVVLEINKFAFMQLDNPNIQKWQYQQGPLYQKASLEEAVSEMQEHHCLFCKKSIVHYHHVVPQSENGSDTIGNIVGLCTKHHDLVHKDTAWQKKLAKKKTGLNKKYGALSILNQIIPALTKELSSLFPKHFFATNGKSTHDYRAAHDVSKDHWLDAYCIACSILPNDTCDKNINGRVPYKLKQFRRHDRRALHKENMSRVYTLDGKKVATNRHKAIKQTTDSLEEFRQRQPNDVCKLKVKEHHPEYRNPERNFPGCVFLVGKHTHVMQGTSGSHNGKADGYYDTNGNSYPSGKCKFVAKNKGIVFA

SEQ ID NO: 11325 - protein, 431 aa, unidentified
  REGION 1..431: note = Human gut metagenome
MPNKVYVINKHGRPLMPCSPAKARHLLDAGKAKVKKRTPFTIQLVYGSSGYTQEVILGVDAGSKTIGVSALTKKEELFAANVIPRNDVVDLLSTRREFRRARRNCKTRYRKPRFDNRVRSKHKGWLAPSVEVKIQEHITTIRRVYGILPVSKVVVETAEFDLQLLKAIADGKPVPQGEDYQKGEMYGHYNVRQYVLWRDDYTCQCCGAHATKKKEVRLHVHHLESRKVGGDAPDNQVTLCESCHEKLHKGLIAEKDFKKRKRRSTRDATFMGIMRKTLMQRLYSELPIPVIETRGYITKATREKLLVLPKSHTNDALAIAQGKRGFNVGYLPEIAQIDKIYTIRPVRHHNRQLHKAAILKGGIRKSNQAGKYVFGYRLFDKVQFNGQDCFIWGRRTTGIFTIKTINGKMIKDGISFKKLKPVEKSTSYLIA

SEQ ID NO: 11326 - protein, 410 aa, Geobacillus sp.; identical to SEQ ID NO: 4122

SEQ ID NO: 11327 - protein, 437 aa, Moorena sp.
MSKVFVLDTNCKPLNPVYPGQARRLLSQGKASIFRRYPFTIILNTEVNNCEIEPLRLKIDPGAKITGLAIISDKTGEVIWGAELTHRGFAIRDALTNRRQLRRSRRNRKTCYRQARFLNRKRGEKWLAPSLISRVHNILTWVRRLIKVAPITDISQELVRFDTQIMENPEITGIEYQQGELAGYEVREYLLEKFERQCIYCGAEDTPLEIEHLIPRSKGGSNRVSNLGIACHACNQKKGNKTVQEFLKEKPDLAKKILARAKKPLADTSAVNSTRWELFNQLKQLGLPVEVGTGGLTKYNRCSQNLEKTHWLDACCVGKSTPKLLIKNIRLLQIKATGHGTRQMCRTDKFGFPSRYVPRYKFIYGFQTGDIVKAIVTKGKKIGTYTGKVATRSSGSFNISTTNGLIQGISYKYCQNIQKKDGYCYGLQTPTLHSSHR

SEQ ID NO: 11328 - protein, 423 aa, Scytonema sp.; identical to SEQ ID NO: 2740

SEQ ID NO: 11329 - protein, 424 aa, Anaerostipes sp.
MRVFVFNMRGRPLMPCSQRKARLLLRENKAMIYKYHPFTIQLTYTTGETKQDCHIGIDTGSKYIGAAVRSEDKVFWKGEIELRQDIRSNLDTKRIYRRSRRNRKTRYRKPRFLNRKRRDEWLPPSLQSRINHTFHWIDTLSSLVSNPILHIEVGKFDVAKMINPEIHGVDYQHGQTYGFFDERYFVFARDNYTCQCCGKSKNKILNTHHIIYRSNGGTNRVDNLITVCTDCHTSQNHRKGGIFYQWQEQHKKVKQYKEPPFMNTLRKRIFVAYPDAEITYGSETTPKRKAMKLDKTHYNDAIVISGINEIKENPEEWLLIKQFRKKKRSLHEATARKGRKKPNRNQTRNSKNTPYYKGFYLNDKVSVFGKSGYITGFTSNAAYIKDENNDYITLPNKTYKQVSINKMKLECHNNNWQYIIKNAV

SEQ ID NO: 11330 - protein, 512 aa, unidentified
  REGION 1..512: note = Human gut metagenome
MSTVYVLNKNGKPLMPTTRCGHVRRLLKEQKARAVASKPFTIQLLYETDDVVQPLYLGIDPGRTNIGVAVVKADGTAVFTAHLETRNKEIPKLMKKRKDSRRARRTNGRRCRRQRRAKANGTLSKKCVKQTTAQNGSVSKRAKKIGVIKRHLPGCEKEALCIGIKNKEAKFNNRTRPEGWLTPTANQLLQTHINLVKKIQKFLPISDVVLEVNKFAFMRLDNPNIQKWQYQQGPLYQKANLEEAVSEMQEHHCLFCKKPIAHYHHVVPQSENGSDTIDNIVGLCTKHHDLVHKETAWQEKLAKKKTGLNKKYGALSVLNQIILALTKGLSFLFPKHFFVTTGKNTYDYRTAHSVSKDHWLDAYCIACSVLPNDVCDSSINSHVPYELKQFRRHDRRALHKENMSRVYTLNGKKVATNRHKAIEQTTDSLEEFRQRQPNDVYKLKVKEHHPEYRNPKRNFPGCVFLVGKRTHVMQGSSGSHNGKADGYYDTNGNSYSSGKCKFVAKNEGIVFA

SEQ ID NO: 11331 - protein, 431 aa, unidentified
  REGION 1..431: note = metagenome
MPDKVYVISRLGHPLMPCSPAKARHLLDDKKAKVVKRTPFTIRLLYGSTKYIQPVILGVDAGSKTIGLLASTVKEELFAAEVMPRNDVVENLSTRRAFRRARRNRTTRYREPRSDNRVRSNHECWLAPSVKVKIQEHITSIKRVCTILPVSKVVIETAEFDLQLLKAIQDGKPIPEGEDYQKGEMYGSYNVRQYVLWRDNYTCTCCGVKGTDKKPVKLHVHHFESRKHGGNAPDNYGTLCEDCHKKFHLGIIIDEILKTRKRRSTRDAAFMGIMRKTLMQRLRAELSIPVAETKGYITKATREKLLVLPKSHTSDALAIAQGRHGFGIKAHTYVEPANHIYTVRPVRHHNRQLHKASILKSGIRKRNQASKYVFGFRLYDKVLYQGKECFVWGRRTSGSFLLRTIDGIKVKDGVSCRNLTLLERSSNYLIA

SEQ ID NO: 11332 - protein, 426 aa, Parasutterella sp.; identical to SEQ ID NO: 3045

SEQ ID NO: 11333 - protein, 447 aa, unidentified
  REGION 1..447: note = Human gut metagenome
MYWLIALNISKKEVSCMVYVLDIDGQPLMPTTRHGKVRRLLNSHLAKVVKRCSFTIQLLYQSTKETQPVSLGVDAGSKHIGLAATTDKKVVYQEELVSRNDVVKLISARRILRRSRRNRKTRYRKARFNNRVHSKHKGWLAPSVEVKIQEHITTIKRICQILPISEIQVETAEFDLQRLKAMKEGKPLPVGTDYQLGEQYDFYNTRQYVLHRDGYTCQCCGTHDNNIKLHVHHIESRQTGGDAPNNLIILCEHCHKALHEGKLELPKGKKRGKSYRDATFMGVMRKTLLERLKKEIDVPVEGTYGYITKCWREKTGLEKSHINDAICISKHPYAKPLDTYYLTKAVRHHNRQIHKSNFSKGGIRKRNQAPYLVKGFRLFDKVLYQGKEYFIFGRRATGYFDIRTLDGTKVNKGSIKYKKLRIQDTAKAYLKEARAIPHVNKFTCVLA

SEQ ID NO: 11334 - protein, 412 aa, unidentified; identical to SEQ ID NO: 6751
  REGION 1..412: note = Human gut metagenome

SEQ ID NO: 11335 - protein, 427 aa, unidentified; identical to SEQ ID NO: 4977
  REGION 1..427: note = Human gut metagenome

SEQ ID NO: 11336 - protein, 415 aa, Bacillus sp.; identical to SEQ ID NO: 2431

SEQ ID NO: 11337 - protein, 420 aa, unidentified; identical to SEQ ID NO: 3685
  REGION 1..420: note = Human gut metagenome

SEQ ID NO: 11338 - protein, 418 aa, Anoxybacillus sp.
KRPLAPCHEAVARKLLKQGKAAIYRRFPFTIILKKSVDESEIKATYRLKIDYGSRHTGLAILRGQEVVWLGQLDHRTDIKERIDKRRAFRRARRNRKTRYRKPRFLNRKRKEGWLPSSLESRVQNIQTWVNRLKKLCPIGYISYENAKFDTQLMRNPEINGVEYQQGTLQGYEVREYLLEKFGRKCCYCGKENVPLEVEHIIPKSRGGTDRVDNLCLACHDCNQRKGSKTAEEFGYPHIQKQVKESLKDASAINSTRWKVYEVLKQTGLDVECGTGARTKMNRIRLDLPKTHYFDACCVGESTTNHLYFKTKEVLFIKAKGRGSRSRTNLDRYGFPRGYLARQKFFFGFQTGDMVKAVVPRGKYQGVWFGEVACRKTGSFDIKGKDGKRIAQGINYRYVQVIQRFDGYAYGKGVAELA

SEQ ID NO: 11339 - protein, 428 aa, unidentified
  REGION 1..428: note = Human gut metagenome
LKVFVLNMRGKPLMPCSPAKARHMLKAGKAVVVRRTPFTIKLTIATGETKQDVTLGVDAGARHVGISATTEKEEVFASEVKFRQDITGLLADRLAFRRARRNRKTRYRAPRFNNRVRSKHKGWLAPSVENRIQAHISRIEAVCRLLPVTKIVIETASFDIQKIRNPEVEGTGYQQGDQLGFWNVREYVLFRDSHVCQHCHGHSKDKILNVHHLESRQTGGDAPNNLITLCETCHKACHAGKIKLKVKRAQSFRAEAFMGIMRWTLLDRVRKAHPGLPVENTYGYLTKHTRITHGLPKTHCVDAYCIAGNLKAVRRGVYLHQRQMRKHNRQIHKFTVLSKRLEDGTKIGYRKLNQSPYLVHGFRLFDKVRCLGQIGFIFGRRSSGYFDVRRLDGVKLSPSISWRKLTLLEKRSTYLTELRKQDGASSPV

SEQ ID NO: 11340 - protein, 414 aa, unidentified
  REGION 1..414: note = Human gut metagenome
MPCSPAKARLLLKEKKAIVKRRTPFTIQLTIATGETKQPVSLGVDAGYKHVGLSASTEKAELYASEVELRQDITDLLSARRALRQSRRNRKTRYRAPRFDNRIRTKRKGWLAPSVENRINAHLSRIEAVLRLLPVTKITVETASFDMQLLKNPDISGKEYQEGEQLGFWNIREYVLCRDGHVCQHCYGRSKDPVLNVHHLESRRTGGDSPGNLVTLCETCHKALHRGEITLKAKRGQSFRAEAFMGIMRWEVLNRLKASHPELEVNNTYGYRTKHARIANDIAKSHCADAFCIAGNLGAERLGEFFFQKQTRRNNRQIHKLSILKGGIRKRNQAPFEVNGFRLFDKVACQGEEGFIFGRRSSGFFDVRKLDGTRISAGISYKKLHLLEKRRTYLTEIRKEEVLPPLPEGRGLRA

SEQ ID NO: 11341 - protein, 424 aa, unidentified; identical to SEQ ID NO: 4376
  REGION 1..424: note = Human gut metagenome

SEQ ID NO: 11342 - protein, 408 aa, Bacillus sp.; identical to SEQ ID NO: 4228

SEQ ID NO: 11343 - protein, 337 aa, unidentified
  REGION 1..337: note = metagenome
LRVFVLNKRGKPLMPCSPAKARLLLKEKKAIVKRRTPFTIQLTIATGETKQPVGLGVDAGYKHVGLSASTEKAELYASEVELRKDITDLLSARRALRQSRRNRKTRYRAPRFNNRIRTKRKGWLAPSVENRINAHLSRIEAVLRLMPVTKITVETASFDMQLLKNPDIAGKEYQEGEQLGFWNIREYVLCRDGHVCQHCYGRSKDPVLNVHHLESRGTCGDSPGNLITLCETCHKALHRGEITLKAKRGQSFRAEAFMGIMRWEVLNRLKASHPELEVNNTYGYWTKHARIANGIAKSHCADAFCIAGNLGAERLGEFFFQKQTRRNNRQIHKLSIL

SEQ ID NO: 11344 - protein, 414 aa, unidentified; identical to SEQ ID NO: 5510
  REGION 1..414: note = Human gut metagenome

SEQ ID NO: 11345 - protein, 418 aa, unidentified; identical to SEQ ID NO: 10024
  REGION 1..418: note = Human gut metagenome

SEQ ID NO: 11346 - protein, 417 aa, unidentified
  REGION 1..417: note = Human gut metagenome
MIYVRSKEGSVLMPTERCGKIGYLLRHGKAHVVSRVPFVVQLDYDSTTYTQDVSLGIDAGSKHIGISASSEKKEMLAAQVELRSDIVKLLSTRRELRRTRRNHKTRYRKSRFDNRKKKDGWLAPSVEQKIESHLKVIRLVHKLLPVTKTTIEVAQFDAQKIKNPYIKGDEYQQGEQMGFWNVREYVLARDGHKCVHCKGKSKDPILNVHHLESRKTGGNSPSNLVTLCETCHKAYHRGEFDLKIKRGSSLRDAAVMNIMRWAVYERAKAEFGNVHLTYGYITKHTRIENGIAKTHAADAFCIAKNVHAMRLSSFFMCRCVPRHTRALHVANPKKGGIRRNTIASHKIGKSNFQRFDMVRWMGKECFIFGSTHGRPVLRDIDGLQVANQPSVNIKTIKFLKRLKNNILMEEKNFRRLN

SEQ ID NO: 11347 - protein, 424 aa, unidentified
  REGION 1..424: note = Human gut metagenome
MRVFVKNMRGEPLMPCTQRKARLLLKAGKARICKYHPFTIQLDYATGETKQDCTVGIDTGSKNIGIAVRSEDKVLFKGEVELRQDVKSNLDTRRIYRRSRRNRKTRYRKPRFLNRKRPDTWLPPSLENRIRHTFRWIDAFCLLVPSPCLHIEVGKFDAAKMIDPKIQGVDYQHGQTYGYYDVRYFVFARDHYTCQVCGKSRDKILRTHHIRYRSNGGTDRTDNLITVCTDCHTGRNHQKGGILYRWQEENKKVRSYKEPPFMNILRQRIFQRYPYAHITYGSETTQRRKELCLGKTHYNDAIAISGIQTITEDPKGWLLIRQSRKKKRSLHEANPRKGRKKPNRTQERSSKNTPSYRNFYLNDKVSVLGRSGYISGFTSGGCYVKDTDGQYITLPGKTYKQVGIANVHRICHNNNWQYITKRAL

SEQ ID NO: 11348 - protein, 421 aa, unidentified
  REGION 1..421: note = Human gut metagenome
MRGRPLMPCSPAKARHLLKAGKAAVRRRTPFTIQLRIATGETKQSVTLGVDAGAKHVGLSAATEKEEVFASEVELRQDITGLLAARLSLRRERRQRKTRYRAPRFLNRVRSKHKGWLAPSVENRIQAHMSRIDAICELLPVTKIVIETASFDIQKIKHPDVEGTDYQQGDQLGFWNVREYVLFRDGHVCQHCHGHAKDKILNVHHLESRQTGGDAPNNLITLCETCHKACHAGKIKLKVKRGQSFRAEAFMGIMRWTLLDRVRKAHPGLPVENTYGYLTKNTRITLGLPKTHCVDAYCIAGNLKAVRRGVYLHQRQVRKHNRQIHKCTVLSKTLKDGTKIGYRKLNQTPHLVKNFRLFDKVRCLGQTGFIFGRRSSGYFDVRRLDGVKISSCISYRKLTLLEKRGTCLTELRKEDGASSTV

SEQ ID NO: 11349 - protein, 413 aa, unidentified; identical to SEQ ID NO: 3587
  REGION 1..413: note = Human gut metagenome

SEQ ID NO: 11350 - protein, 431 aa, unidentified; identical to SEQ ID NO: 10509
  REGION 1..431: note = Human gut metagenome

SEQ ID NO: 11351 - protein, 317 aa, unidentified; identical to SEQ ID NO: 10219
  REGION 1..317: note = Human gut metagenome

SEQ ID NO: 11352 - protein, 454 aa, unidentified
  REGION 1..454: note = Ga0315273_10104718
MQKLQAKFKNTPKDASLVPCSVNSSLNKEETLSVKDKILTCNNPEENLHQHRGGSSLRVSNIVYVLNMRGQPLMPTTPRKARILLQSKKAKVVKRIPFTIQLTYQTGESKQLIDLCVDSGYKHIGLSAKTSKNEVFSADIKLRDNIKQLLAERSMYRRNKRNRLWYRKSRFNNRGKEGWFPPSIMNKINSHINIIDKICFLLPITNIIVETASFDIQKIKNPDIQGKEYQEGPQKDFDNVKAYVLYRDEYQCQYCKKSDIKLHVHHIESRQTGTNNPDNLITLCEKHHRDLHDGKIKLNVKKPKDFRNQTFMSIARNKMMEMLRKRYNNVQETFGYITKANRLSLGLEKSHINDAFSIGNGNIQTRCFSNIIVQKRRNNRCLQINRNGFKPSIRRKKSKLQPGDLVKVKNILYNVVGMFNKGTYVRVKNNMNKILNFNIKKINWEYSFGGFVWN

SEQ ID NO: 11353 - protein, 462 aa, unidentified; identical to SEQ ID NO: 7335
  REGION 1..462: note = Human gut metagenome

SEQ ID NO: 11354 - protein, 437 aa, unidentified
  REGION 1..437: note = Ga0315279_10004814
VVYIISKTGKPLMPTNRLGKVRHLLKDGLAKVVQRTPFTIHLLYDSDEYTQPITLGVDAGSKTIGLSATTDKKEVFSAEVQLRTDIVDLLSTRKQNRGTRRSHKTRYRKVRFLNRRIDKGWLAPSIRHKIATHLTMVDKIHKILPITNIIVEVAQFDIQKIKNPDTSGVEYQQGEQLGFFNVREYVLYRDDHKCQLCNGKSKDKILNVHHIESRKTGGNAPNNLITLCETCHKKHHEGDIKLKIKRGTIFKDPAFMGIMRWALYNTLKEKYPNILMTYGYLTKNTRIANNLPKIHRTDALCITGNPTVKWLDTWYFYKKVRCQNRQIHKNTINKGGTRKLNQLPFIIFDIRLFDKVKYNNQECFVFGRRLSGSFDIRLLDGTTVNAGVGYKKVKVLEQRKTILIESRKAIPPTADIDQTQFETDQQPVGFLAEKDHE

SEQ ID NO: 11355 - protein, 427 aa, unidentified; identical to SEQ ID NO: 5428
  REGION 1..427: note = Human oral metagenome

SEQ ID NO: 11356 - protein, 465 aa, unidentified
  REGION 1..465: note = Human gut metagenome
MSTCVCVLSNNGERLMPTIRLGRVRHLLKDGKAKIIKHHPFTIQLLYDSKTNTQPIEICEDVGYNYIGISVKSQSHEYVSAQYDTLQDEKACHDSCRKLRRTRRNRLRYRKPRFDNRKRGEGWLAPSLKHKKELNVNVVKMYCTVMPITHATVEVGSFDTMLVKAIQEGKVIPEGADYQKGPRYNLATLREAVFYRDNYVCKICGRKATEGAILHMHHMFYWKGRHGNSLNELLTVCEKCHTPANHQKSGKLYGFGEKIKFADLSGAAFMNTVRWQIVNELYAAFGKPFVTITYGAMTKEKRIALQLEKSHNNDAYAMGEFHPNLRCMFEHYEKARRNNRILEKFYDSRYIDIRTGEIATGKELFNGRINRNHKKDSENLHKYRGKRTYAGHRALLRKKVNLNPGDLVSLNGENLIVHSTHTKKNGAVNVEFETPAKSGQKSASLKKLKIVKAANSIHPAWKKIS

SEQ ID NO: 11357 - protein, 422 aa, unidentified
  REGION 1..422: note = Human gut metagenome
LNKRGKPLMPCSPAKARLLLKEKKAIVVRRTPFTIQLTIATGESKQPVSLGVDAGYKHVGLSASTEKAELYASEVELRKDITDLLSARRALRQSRRNRKTRYRAPRFDNRIRTKRKGWLAPSVENRINAHLSRIEAVLRLLPITKITVETASFDMQRLKNPDISGKEYQEGEQLGFWNVREYVLFRDGHVCRHCHGRSKDPVLNVHHLESRRTGSDSPDNLITLCETCHKALHRGEITLKAKRGQSFRAQAFMGIMRREVLNRLKASYPELKVHETYGYLTKHARIANGSVKSHGADAFCIAGNLGAERLGEFFFQKQTRRNNRQIHKLSILKGGIRKRNQAPFEAKGFRLFDKVACQGEEGFIFGRRSSGSFDVRKLDGTRISAGISCKKLRLLEKRRTYLTEIRKEEALPPLPEGRGLRA

SEQ ID NO: 11358 - protein, 293 aa, unidentified
  REGION 1..293: note = Human gut metagenome
SVEVKIQEHITVIKRICRILPITLVRVETAEFDTQRLKAMLAGKPLPVGTDYQLGEMYDEYNVRQYVLKRDHYTCQCCGAHNTAEKVVKLHVHHLESRKTGGNAPSNLVTLCTTCHKNLHKGKVTLDGKERDKPLRDAAFMGIMRKTLMARLKEELPIPVQGTYGYITKMRREQNDIKKSHTNDARCISKHPLAEPCSVCYRTKAIRHHNRQTHKANFSKKCIRKRSQMPYLVEGFRLWDKVLYKGQECFVSGRRSSGSFALKKLDGTSISKGVTFKKLRLLEPATNYLIERM

SEQ ID NO: 11359 - protein, 462 aa, unidentified
  REGION 1..462: note = Human gut metagenome
MGVLVIGQNGRELMPTTTRKARILLKEDKASVVCRHPFTIHLWYKTGCATQEGSIGIDTGSQHIGVGVTCGSKVILKDEHELRSSMEKRSLMETRATMRRGRRYRKVRYRKPKWRHHTKRMYFEKANRKGQHWRKVKTTTQSPRPKGWLPPSLQSKCDHHFRIIDRYLKYLPDSITKNLAIEVGRFDMARMNDPTIHGEMYQRGPMYDAENLRAYIFARDGYKCACCKAKAGSIRKKDGTSVKLVAHHILFRSRGATNNPRYMISVCDHCHTTKAHQPGGILYSWMENNKKVTRGLRDATFMNILRRRLFDRFPQAAFTYGNITAVDRKRLLLPKSHANDAVAISLFGKDVSVINATCQTLHYKQVRKSKRSLHEATPRKGRKGPNTKAIRNKKNTTHVNGFKLWDSVLANGQKLFICSFTGSSAYLVDQDGHYVLPPGKTYKQWTLSKLDRLHPNGNWLMA

SEQ ID NO: 11360 - protein, 425 aa, Moorena sp.
MSVNFVLVLDTNKKPLTPCKPGVARSLLKAEKAAVFRRYPFTIILKKEVMSQPKQCQLKIDPGSKTTGLALILNSAVVWAGELTHRGQQIKDALTSRRQLRRSRRFRKTRYRLPRFLNRTRPIGWLAPSLNHRVETTMTWVNRLIKFCPINSISQELVRFDTQKLQNPEVSGVKYQQGQLYGYEIREYLLEKWHRKCAYCGATEARLEIEHIKPKSKGGSDRVSNLAIACHDCNQTKGNQDIEQFLSGKPDLLKRILRQAKSPLKDAAAVNSTRSKLYNELKLTRLPVETGSGGLTKYNRCRLGLPKTHWLDAACVGTIDKLIVETNQPLIIKSTGHGNRQMCGTNKNGFPVRHRSNQQVHFGFKTGDIVKANVPKGKKLGSYAGRVLCRAKGSFDISTAKGIVSGINHKYCQSIHKKDGYNYSL

SEQ ID NO: 11361 - protein, 415 aa, unidentified
  REGION 1..415: note = Human oral metagenome
MFVYVISKDGQPLMPTTRFGKVRRLLKEKKAKVIIRCPFTIKLLYEPETQVVQEVVLGQDTGSKYVGTACVSNNKILYQSEVVLRKDIKKKMDSRRNLRRNRRHRKTRYRKARFLNRANSKKKDRLPPSVKSKVQSHIDEIEFCKKILPISKIILEVSQFDTALMKNPALIDEKVKRWGYQKGFNYGYSSRREAVLNRDNYTCQCCGKKHVRFEVHHIFFRSQGGSDDEKNLITLCKECHNAIHAGTLILNKKPKTLRLKYATQMSIIRSQLLKVYPDAIETFGFVTKENRNSLNLSKEHYIDACVIASSGREFKLNNIIYQKRRVAKGDYKLTRGKQKMPIGKIQGFKRFDKVKYLGQEYFIKSRMSTGFAILGDIFNNKIDFSYMPKCKKTPKLSNLERISARSSCLCISRTA

SEQ ID NO: 11362 - protein, 512 aa, unidentified
  REGION 1..512: note = Human gut metagenome
MSTVYVLNKDGKPLMPTTRCGHVRHLLKEQKARVVASKPFTIQLLYKTNDVVQPLYLGIDPGRTNIGVAVVKADGTAVFTAHLETRNKEIPKLMKKRKDSRRARRTNGRRCRRQRRAKANGTISKKCVKHDTAQNGSVSKRAKEIGVIKRHLPGCEKDVLCIGIKNKEAKFSNRTRPEGWLTPTANQLLQTHINLVKKIRKFLPISDAVLEINKFAFMQLDNPNIQKWQYQQGPLYQKANLEEAVSEMQEHHCLFCKKPIAHYHHVVPQSENGSDTIGNIVGLCTKHHDLVHKDTAWQKKLAKKKTGLNKKYGALSVLNQIIPALTKELSSLFPKHFFATNGKSTYDYRSAHGVSKDHWLDAYCIACSVLPNDVCDIGINNRVPYELKQFRRHDRRALNNENMSRVYTLNNNVVATNRHKATKQTTDSLEEFRQNHPDDVCKLKVKEHHPTYRNMNRNYPGSVFLIGKQVHVMQGIAGSKDGEATTYKDTNANSIAAGKCKFVAKNSGILFV

SEQ ID NO: 11363 - protein, 442 aa, unidentified
  REGION 1..442: note = Human gut metagenome
MSTSVFVLDKKHRPLMPCRPARARRLLRAGRARVVKRFPFVIRLVDRTVEQSEVQPVLIKLDPGSRETGAAVVRDDEKKRHHALAFFVIKHRGGAIRDALKARSAFRRRRRSQNFRCRSPRFLNRVKPKGWLPPSLRHRVETTLSFVRRMCRYLPVSGIATELVKFDSQKLQNPEVSGVKYQQGTLFEYEVREYLLEKFGRKCVYCGAEGVPLNIDHVVPRAKGGSNRVSNLVLACVSCNQKKGARSLEDFLKGKPEVLARVRRELKTPLRDAAAVNATRWVLFNELKATGLPVETGSGALTKFNRHAFGVEKEHWLDALCVGRLNGVVTRKGLNALEIRCMGRGSRQRTRLTKYGFPRGYLMRQKCVHGFATGDMVEANVPKGKKAGLWRGRVAVRVSGSFNIQTPKGVIQGVGWKHCRLISHNDGYGYAWLGHAPHSSPA

SEQ ID NO: 11364 - protein, 376 aa, Parasutterella sp.
  SITE 18: note = misc_feature - Xaa can be any naturally occurring amino acid
MFIIWKADVRAEIHPATXTEKAELYASEVELRQDITDLLSARRALRQSRRNRKTRYRAPRFNNRLCTKRKGWLAPSVENRINAHLSRIKAVLRLLPVTKITVETASFDLQLLKNPDISGKEYQEGEQLGFWNIREYVLCRDGHVCQHCYGRSKDPVLNVHHLKSRRMGGDSPGNLITLCETCHKALHRGEITLKAKRGQSFRAEAFVGIMRWEVHNRLRALHPGIEVSNTYGYRTKHARIANGIAKSHCADAFCIAGNLGAERLCEFFFQKQTRRNNRQIHKLSILKGGIRKRNQAPFEVKGFRLFDKVACQGEEGFIFGRRSSGFFDVRKLDGTRISAGISCKKLHLLEKRRTYLTEIRKEEALPPLPEGRGLRA

SEQ ID NO: 11365 - protein, 430 aa, unidentified
  REGION 1..430: note = Human gut metagenome
MPKVYVLNRHGRPLMPCTPAKARHLLDAGKAKVKKRTPFTIQLVYGSSGYTQEVILGVDAGSKTIGMSASTTKEELFSAEVKPRNDVVDLLSTRREFRRARRNRKTRYRKPRFDNRVRSKHKGWLAPSVEVKIQEHITAIKTVCRILPVSKVVVETAEFDLQLLKAIADGKPVPQGEDYQKGEMYGHYNVRQYVLWRDGYTCQCCGAHATQKKEVRLHVHHLESRRVGGDAPDNLVTLCTACHDKLHKGIIMAADIKKRKRRSTRDATFMGIMRMTLLRRLREQLPVPVVETRGYITKATRENLLVLPKSHTNDALAIAHGPQGFRAEYLPNIRQADRLYTIRPVRHHNRQLHKATILKGGVRKANQAEKYICGFRLYDKVLYNGIESFVWGRRTSGSFLLRQLNGEKVKDGVSYKHLKLLERSQSYLVA

SEQ ID NO: 11366 - protein, 330 aa, unidentified
  REGION 1..330: note = metagenome
MTQRAKYRRNRRNRKTRYRKARWLNRASSIKKDRFSPTMQSKLHSHVREIEYIQSILPITEMVFETGQFDMQLMKNPSLANPKVRPWGYQKGANYGFENTKAMVLNRDNYTCQCCKGKHKDSKLEVHHIVFRSQGGSDEESNLLTLCHTCHKDLHSGKINPKLSGKVKGNLKYATQMNSIRKQLFRFYPNAIETFGYVTKANRLHLGVDKEHYYDACTIATQGNAFNVKSNLYKKKCVSDGDFQKTKGIRSEEPIVTDKICGFRKFDKVRYFGNDYFIKGRMSTGYAILMDIDGNKIDFSTMPRGYKTPKLSNCKRITARSTVMTQVKVV

SEQ ID NO: 11367 - protein, 453 aa, Moorena sp.
MSVAVLSSTGRKLMPTSNYRARKLLKGGRATIECYRPIFTIRLTDRKEGETQPIEYACDTGYQHVGVSIKSKKHEFVHAQYDMLSDETERHNNRRKYRRTRRNRLRYRKPRFDKRSKKNKDMASSLRHRKENQIRLFESFCKVLPITSATFEMGKFDTQLLQAIADGKPLPEGKDYQQGSKYLFQTEREAVFARDNYTCQVCGKSIKDGAILHTHHIGFWKNYRSNRISNLLTVCGHCHTAKNHKPGGKLWGLEPKSTDLQDATYMSTVRWSMYRDLMLSHPEVDIHIQYGAKTAVIRKTLHLSKTHANDAYCIGSLHPKHRTTEAVYQKKRRNNRILAKFYDAKYVDVRDGKKKTGATLSCGRTNRRESRRSDKNLRIFRGKKVSKGRTSVRKRRYFYQPGDTVLHRSQRFAVNGTHCNGTRVILSTGKSVKKTDLVCIKKEGGWRFLPTQA

SEQ ID NO: 11368 - protein, 238 aa, unidentified; identical to SEQ ID NO: 7175
  REGION 1..238: note = Human gut metagenome

SEQ ID NO: 11369 - protein, 442 aa, Sutterella sp.
MSTTVFVLDKKHRPLMPCRPARARRLLRAGRARVVKRFPFVIRLVDRTVEQSEVQPVLIKLDPGSRETGAAVVRDDEKKRHHALAFFVIKHRGGAIRDALKARSAFRRRRRSQNFRCRSPRFLNRVKPKGWLPPSLRHRVETTLSFVRRMCRYLPVSGIATELVKFDSQKLQNPEVSGVKYQQGTLFEYEVREYLLEKFGRKCVYCGAEGVPLNIDHVVPRAKGGSNRVSNLVLACVSCNQKKGARSLEDFLKGKPEVLARVRRELKTPLRDAAAVNATRWVLFNELKATGLPVETGSGALTKLNRHAFGVEKEHWLDALCVGRLNGVVTRKGLNVLEIRCMGRGSRQRTRLTKYGFPRGYLMRQKCVHGFATGDMVEANVPKGKKAGLWRGRVAVRVSGSFNIQTPKGVIQGVGWKHCRLISHNDGYGYAWLGHAPHSSPA

SEQ ID NO: 11370 - protein, 427 aa, Parasutterella sp.; identical to SEQ ID NO: 6030

SEQ ID NO: 11371 - protein, 477 aa, Subdoligranulum sp.
MSTCVCVLSNSGERLMPTFRLGKVRRLLKDGKAKIVKHHPFTIQLLYDSKANTQPIEICEDVGYNYIGISVKSESHEYVSAQYDTLQDEKACHDSCRKLRRTRRNRLRYRKPRFDNRKRGESWLAPSLKHKKELNVNVVKMYCAVMPITHATVEVGSFDTMLVKAIQEGKAIPEGADYQKGPRYNLATLREAVLYRDNYTCQVCGRKVADGAILHMHHMFYWKGRHGDSLNELLTVCEKCHTPANHQKSGKLYGFGENVKIADLSGAAFMNTVRWQIVNELYAAFGKDFVTVTYGAMTKEKRIALRLEKSHNNDAYAMGEFHPNCRCTFEHYEKVRRNNRILEKFYDSRYIDIRTGEIATGKELFNGRINRNHKKDSENLHRYRGKRTYAGHRALLRKKVNLNPGDLASLNGEVLVVHGTHTNKKGAVNVEFKTPGKSGQKSASLKKLKIVKAADSMHSAWEKNLNHLKKGVAGYLR

SEQ ID NO: 11372 - protein, 515 aa, unidentified
  REGION 1..515: note = Human gut metagenome
MTALEEKLSKTEYIYVLGFDGKPQMPTRRKRHVLKLLKTGRARIAEDIPFTIRLTYRNAPVLQPVTLAEDPGRTNIGAAVLSPLGDLLFAAVIETRNKEIKKLMADRQKSRQASRRGERKARQRLAKRYGSMVKSGMVMRKLPMYAADKFVICKFIRNTQARFCNRKRCPDWITPTVQHLVQTHLNIIRKISRYLPVTDIAFEVNRFAFMHMENPEAMGVDFQNGPLKGYGDVKEAIRTQQHGKCLMCKKPIAHFHHIVPRSRGGSDTIQNLAGLCTECHTKVHTDTAFRKDFDEKKSGQLKKYGALSALNQAVPFICKKLLEEYGEEHVHFCRGLDTSLIRTAFGFEKTKKNQMHEVDAYCIGLAALEVNEVETPAFDHTFQIRQFRRQDRSIIHHQTGRSYYQGKEKVAQNRKPGFEQKTTALSQWYKEQIRIHGEKEAEKLRSQLRVEKSCRHYNDMDRFLPGAVFLYEGKRYVLSGRITNGKYLRACGQGMKNFPAAECTFIRHNAGLVFI

SEQ ID NO: 11373 - protein, 414 aa, unidentified
  REGION 1..414: note = Human gut metagenome
MPCSPAKARLLLKEKKAIVKRRTPFTIQLTIATGETKQPVGLGVDAGYKHVGLSASTDKAELYASQVELRQDITDLLSARRALRRARRNRKTRYRAPRFNNRIRTKRKGWLAPSVENRINAHLSRIEAVLRLLPVTKITVETASFDMLLLKNPDIAGKEYQEGEQLGFWNVREYVLFRDGHVCQHCYGRSKDPVLNVHHLESRRTGGDSPGNLITLCETCHEALHRGEIALKTKRGHSFRAEAFMGMMRWEVLNRLKASHSELEVNNTYGYRTKHARIVNGIDKSHCADAFCIAGNLGAERLCEFFFQKQTRRNNRQIHKLSILKGGIRKRNQAPFEIKGFRLFDKVACKGEESFIFGRRSSGSFDVRKLDGTRISAGISYKKLRLLEKRRTYLTEIRKEEALPPLPEGRGLRA

SEQ ID NO: 11374 - protein, 430 aa, unidentified; identical to SEQ ID NO: 4504
  REGION 1..430: note = Human gut metagenome

SEQ ID NO: 11375 - protein, 431 aa, unidentified
  REGION 1..431: note = Human gut metagenome
MPNKVYVINKHGRPLMPCSPAKARHLLDAGKAKVKKRTPFTIQLVYGSSGYTQEVILGVDAGSKTIGMSASTTKEELLSAEVKPRNDVVDLLSTRREFRRARRNRKTRYRKPRFDNRVRSKHKGWLAPSVEVKIQEHITSIKRVCRILPVSKVVIETAEFDLQLLKAIADGKPVPQGEDYQKGEMYGHYNVRQYVLWRDDYTCQCCGAHATKKKEVRLHVHHLESRKVGGDAPDNQVTLCESCHEKLHKGLIAEKDFKKRKRRSTRDATFMGIMRKTLMQRLYSELPIPVIETRGYITKATREKLLVLPKSHTNDALAIAQGKRGFNVGYLPEIAQIDKIYTIRPVRHHNRQLHKAAILKGGIRKSNQAGKYVFGYRLFDKVQFNGQDCFIFGRRTSGYFVVKTIDGKVIHNSASFKKLKLVERASNYLIA

SEQ ID NO: 11376 - protein, 651 aa, Sphaerisporangium sp.
  REGION 5..58: note = misc_feature - Xaa can be any naturally occurring amino acid
  REGION 202..260: note = misc_feature - Xaa can be any naturally occurring amino acid
VLPQXXXXXXXXXXXXXXXXXXXXXXXXXXXXXXXXXXXXXXXXXXXXXXXXXXXXXXVLPQPAALESVGADNPGGGDETAHGLPALPGAGVEHGRGEIGVDGTRLLRRHPEGASASQGADREVHPVVFVLDKHGRPLDPCHPARARRLLACGRAVVVRHTPFVIRLRDRVAADSTMAGVELGIDPGSKHTGIAVFRTDGGXXXXXXXXXXXXXXXXXXXXXXXXXXXXXXXXXXXXXXXXXXXXXXXXXXXXXXXXXXXRTGLYALQLDHRGGQIRDKLASRAALRRGRRSRNLRYRAPRFLNRTKPKGWLAPSLKHRVGGTMSWVSRLSRWTPVTAVHVEKVSFDTHALSAGKPLEGVEYQQGTLAGYEVREYLLAKWGRKCAYCGAENTPLNIDHIHPRSRGGSDRISNLCVACIPCNQAKNATPIEEFLKAKPALLKRILLAAKAPLRDAAAVNSTRWALWRALTQTGLGVATASGGRTKWNRSRTDAPKSHTLDALHVGHLDAVIDWPSVVLVVAATGRGTYARTRADRYGFPRLRLPRTKTVHGYATGDLVRAVVPTGAKAGIHTGRVAVRTSGSFNIRTRHGLVQGIHHRHVRLLQRADGYAYTTHPEVRHRAAFPPPPEGGGSTLEVIDDPDLRLLRRVGTVG

SEQ ID NO: 11377 - protein, 502 aa, Streptomyces sp.
MQRACTRPAARHTDLDSFGEAVLGREAHQLNRTVTINAGADSAEAQAVGPGAGCSRVFVLDRRGVPLTPCHPARARILLAKGRAAVVRHTPFVIRLKDRLVEESEVDGVEVRIDPGSKGTGIAVTDDLTTVDTVTGEVVTSRRGLFAVELRHRGAQIKAKLEQRSNYRRRRRVAHLRYRAPRFNNRTRPRGWLAPSLQHRVDTTMSWVERLRRWAPVAAVHVERSSFDSHALGLGKESLDGVEYLQGTLAGYEVRQYLLEKWGRACAYCGAQGAPLQVEHIQPKADGGSDRIANLTLACQPCNQAKAAKPIEIFLAERPSVLARIQRQAKTPLRDSAAMNATRWRLWSRLNKVGLHVSAWSGGRTKYNRHTQHLAKTHTLDALAVGDIPTGTRIVRHPDTVLVAKATGRGSYARTRTDKYGFPRLRLPRQKTFFGYQTGDLVRAVVPTGKKAGTHIGRVAIRKTGNFNISTAAGPVTDIHRRHIRRLQRADGYGYTMRKETA

SEQ ID NO: 11378 - protein, 437 aa, Clostridium sp.; identical to SEQ ID NO: 8243

SEQ ID NO: 11379 - protein, 439 aa, Moorena sp.
LVFVIDKQKNQLLPTTNAKARILLNANKAVIHKIYPFVIRLKTSKTINANNKCAIKLDPGANTTGVAIVDKEKCLFLMEIIHRGKEIRKALFQRKVVRRNRRQRNTRYRQARFQNRIKRNGWLAPSVKSRADNIINIVNKLSKYIPLTNVAIESVSFNTTDMTEGIKLYGKEYQNGNLKDTKLRKFLMEKYSNRCNYCGSIEKLEVEHILSKSKGGTDSIKNLTLSCRKCNELKNNLSLKQFGKLINRDLSHLEPLQTPKSAAIIQSARNYTIAQLAKSFEIETGEGWETSFNRKEVNLPKEHYYDALCVGKDYDYRIVANTVLVIKARGRGSRQMCLMDKYGFPRTSPKSSKSVKGFQTGDIIKAKVPDGKKQGKYFGKVAVRTNGYFNITTDTQTIQGIGHKHCKVIQRGDGYAYFMKGASGFLSGLEDRVSTAILR

SEQ ID NO: 11380 - protein, 406 aa, unidentified
  REGION 1..406: note = Human gut metagenome
MVYVQDINGKSLMPTTRHGKVRRLLKDKKAVVVNLCPFTIKLMYVTSDYKQEIVLGVDAGTKHVGLSATTKSKELYASEVILRNDIVDLLSTRRELRRVRRNRLRYRKPRFNNRVKSKHPGWIAPSVRYKIDDHIRVIDNICSILPISRIVIEVAQFDTQKIKNPDISGKEYQEGDQLGFWNVREYVLARDGHKCQHCKGKSKDAILNVHHLESRKTGGNSPSNLITLCETCHKEYHKGNIKLKVKRGTSLRDAAAMGIMKWKLLDKLKSLFPNVSMTFGYITKHNRIKHEIKKSHISDAFVISKNFEAKRLGYYFKEKLVRRHNRQIHKTKILKGGKKKMNQAPFKVFGFRLFDKVEFQGNEYFIYARRLSGYFNIRDINSENKKDVTYKKLNHIGYGLISVETE

SEQ ID NO: 11381 - protein, 456 aa, unidentified
  REGION 1..456: note = Human gut metagenome
MSTCVCVLSNSGERLMPTFRLGKVRRLLKDGKAKIVKHHPFTIQLLYDSKANTQPIEICEDVGYNYIGISVKSESHEYVSAQYDTLQDEKEHHDDCRKYRRTRRNRLRYRKPRFDNRKRSEGWLAPSLEHKKQLNIRLIERYVSVIPITRATVEVGSFDTMLLQAIQKGESKPEGVDYQKGPRYNLATLREAVFYRDNYTCQVCGRKVADGAILHMHHMFYWKGRHGYQLDELVTACEKCHTPANHQKGGKLFGFGEDKEFANLSGAAFMNAVRWQIVNALYATYGKEFVTITYGAMTKEKRIILGIEKTHNNDAYAMGDYHPAHRCVFRHYQKRRRNNRVLEKFYDATYIDARTGNKAKGKELFNGRISRNHKKDSENFHKYRNKKVSKGRRSIRRQRYAIQPYDTVRLEGKTYITSGCHNKGTRLLIPANGKSKSVAISKVQVVCHAGAWIQII

SEQ ID NO: 11382 - protein, 532 aa, unidentified
  REGION 1..532: note = Human gut metagenome
MSTVYVLNKDGKPLMPTTRGGHVRHLLKEQKARVVRAKPFTIQLLYETNDVVQPLYLGIDPGRTNIGVAVVKADGTAVFTAHLETRNKEIPKLMQDRKKARRARRTNGRRCRRQRRAKANGTISKKCVKQDTAQSKNPSKRAKEIGIIKRHLPGCEKDVLCIGIKNKEAKYTNRARLEGWLTPTANQLLQTHINLVRKMQKFLPISDVVLEVNKFAFMRLDNPDIQKWQYQQGPLYKKESLESAVSEMQEHHCLFCKKPIDHYHHVVPKSENGSNTIANIVGLCAEHHNLVHKDAAWQKKLAEEKVGLNKKYGALSVLNQIIPALTNKLSVLFPKHFFVTAGKSTHDYRAAHGVSKDHWLDAYCIACSVLPSNVCDSNINNHMPYELKQFRRHDRRALHKENMGRVYTLNGKAVATNRHKAIKQTTDSLEEFRQNYPDDVYKLKVKEHHPAYRNLNRNYPGSVFLVGKQAHVMQGIASSKDGKTTKYNDTNATTITAGKCKFVAKNSGILFVQCKFRKALSDGTTKKLQYPV

SEQ ID NO: 11383 - protein, 413 aa, unidentified; identical to SEQ ID NO: 2636
  REGION 1..413: note = Human gut metagenome

SEQ ID NO: 11384 - protein, 443 aa, Halomonas sp.; identical to SEQ ID NO: 7694

SEQ ID NO: 11385 - protein, 431 aa, unidentified; identical to SEQ ID NO: 7229
  REGION 1..431: note = metagenome

SEQ ID NO: 11386 - protein, 474 aa, Halomonas sp.
LKDLRHQARKGSILEGDRMAVFVLGKNKQPLMPCSEKRARLLLERGRAVVVNRTPFVIRLRDRRQSDGTLQPTLLAADPGSKETGLALIRLEDNTTDEQAPAIRHVLCLFQLVHRGFQIRQALEQRAGFRRRRRSKNLRHRKPRFDNRTRKKGWLPPSLQHRVDTTMAWVDKLCRWVPVTHLSMELVRFDMQKLENPEITGVEYQQGTLLGYEVREYLLEKWGRACAYCGTGDTRLEIEHVVPRSRDGSDRVSNLTIACHDCNTAKDSQWLTDFFATDKGLKKRLKANGLSAAVRLERVERQLKLPLRDATAVNATRWALFGAMKTTGLPVAVGSGGRTQYNRQCLGIPKTHALDAACVGNVDFLKGWQIPTLVIKATGRGSYQRTRLDKYGFPRGYLMRQKQVQGFQTGDRVRAIVPTGKKAGTHTGRVAIRKTGSFNIQTEQGAIQGISWRYCTLLQRGDGYGYHPLPTIQA

SEQ ID NO: 11387 - protein, 441 aa, Sulfobacillus sp.; identical to SEQ ID NO: 4231

SEQ ID NO: 11388 - protein, 485 aa, Moorena sp.; identical to SEQ ID NO: 10557

SEQ ID NO: 11389 - protein, 512 aa, unidentified
  REGION 1..512: note = Human gut metagenome
MSTVYVLNKDGKPLMPTTRCGHVRHLLKEQKARVVTSKPFTIQLLYETDDVVQPLYLGIDPGRTNIGVAVVKTDGTAVFTAHLETRNKEIPKLMQGRKKARRTRRTNGRRCRRQRRAKANGTISKKCVKQTTAQNGSVSKRAKEIGVIKRHLPGCEKDVLCVGIKNKEAKFSNRTRQEGWLTPTANQLLQTHINLIKKIRKFLPISNVVLEINKFAFMQLDNPNIQKWQYRQGQLYQKASLEEAVSEMQEHHCLFCKKPIAHYHHVVPQSENGSNTIGNIVGLCTKHHDLVHKDTTWQKKLAKKKTGLNKKYGALSVLNQIIPALTKELSSLFPKHFFATNGKSTYDYRAAHSVSKDHWLDAYCIACSVLANDVCDSNINSRVPYELKQFRRHDRRALNNENMSRVYTLNGKVVATNRHKATKQTTDSLEEFRQNHSDDVCKLKVKEHHPTYRNMNRNYPGSVFLIGKQVHVMQGIAGSKNGEATTYKDTNANSIAAGKCKFVAKNSGILFV

SEQ ID NO: 11390 - protein, 427 aa, Parasutterella sp.; identical to SEQ ID NO: 3787

SEQ ID NO: 11391 - protein, 421 aa, unidentified
  REGION 1..421: note = Bioreactor metagenome
MLVFVKNKHGENLMPCKPSKARKLLKQKKAKIISYKPFTIQLLYGSSGYKQPVTLGVDLGSKHIGIAVTSEDKVLIKGEIELRDDIKENLDIRRQYRRSRRYRKTRYRKPRFNNRKRPEDWLPPSIQSRIDNTFRWIDNFINLLPNPKLCIEVGKFDVQKMMNPDIEGVEYQQGETYGYYDVRYYVFARDNYTCQVCKKKDKILQTHHIVYKSKGGTDRPSNLITVCTDCHTHKNHQEGGIFYKWMVEKKKMPSYKETPLMNIMRRRVFEKYPEANIVYGSYTAIRRKELGLEKTHYNDAIAITGIESIKHNPDNYFKIKQFRKKKRSLHEAIPRKGRKEPNRTQKRNSKNTKYRNGFYLNDKVKVLGKVGFITGFTNGGAYIQDIEGNYITIPNKSYKQVSFKYIEFINHNNNWQFISHL

SEQ ID NO: 11392 - protein, 407 aa, unidentified
  REGION 1..407: note = Human gut metagenome
TNGRRCRRQRRAKANGTISKKCVKQTTAQNGSVSKRAKEIGVIKRHLPGCEKDVLCIGIKNKEAKFSNRTKPEGWLTPTANQLLQTHINLVKKIRKFLPISDVVLEINKFAFMQLDNPNVQKWQYQQGPLYQKANLEEAVSEMQEHHCLFCKKPIAHYHHVVPQSENGSNTIGNIVGLCTKHHDLVHKDTAWQKKLTKKKTGLNKKYSALSVLNQIIPALTKELSSLFPKHFFATNGKSTYDYRAAHGVRKDHWLDAYCIACSVLPNDVCDKNINSRVLYELKQFRRHDRRALNNENMSRVYTLNENVVATNRHKATKQTTDSLEEFRQNHPDDACKLKVKEHHPTYRNMSRNYPGSVFLVGNQVHVMQGVAGSKDGKATTYKDTNANSIAAGKCKFVAKNSGILFV

SEQ ID NO: 11393 - protein, 431 aa, Petrotoga sp.; identical to SEQ ID NO: 5928

SEQ ID NO: 11394 - protein, 415 aa, unidentified
  REGION 1..415: note = Human gut metagenome
MENKIEYCFVIDKNNKPLTPTKVNKGWYLIRKGRAKLKSKYPMVIQLEKEVKSDEYDESHMVCGIDDGSTHVGLAIVQKCLTKNKVVFKGTIEQRQDVKRLMDVRRGYRRYHRYHKRYRQARFNNRSSSKRTCRLAPSIKQKKDAILRVLYQLNKWVNIQEYYLEDVCIDIRAMTDDYKPYRWQYQKSNRLDENLRKATILRDGCRCQECGKSNCILEVHHIRARRYGGANTIGNLITLCKKCHDKTESREKDFEERYFNMIKSKPKRFDYAMHVMQGKTYLREKISELGILHLTNGGETANKRIEWDIVKSHSNDAICIADGIPDTCDIKEWIIKPMRRKSKAKTDNVLGIKHRDLVSYTYKSGETHTGYVTALYPEQLALNFQSKTKHCKKVNARKCRLLWKFNKIYWLEQCV

SEQ ID NO: 11395 - protein, 424 aa, Moorena sp.; identical to SEQ ID NO: 2651

SEQ ID NO: 11396 - protein, 430 aa, unidentified
  REGION 1..430: note = Human gut metagenome
LSWSNYSNIQEVIETLVYVLNNQGNPLMPCKEAKARKLLKQNKAIIAKYEPFTIQLTFECENQTQEVSLGVDAGSKHIGISVTTEKQVLYEADVELRNDIVDKLSSRRETRRARRNRLRYRPARFNNRVHSKHKGWLAPSVEQKINSHIQIIKKLHQILPVSKIIVETAQFDIQKIQDPDIKGEQYQQGNQMGFWNVREYVLFRDEHKCQYCKGKSKDNRLNVHHIESRKTGGNSPNNLITLCETCHNDYHQGKIQLNIKRSKSFRDAAFMGIMRKTLLLRLKQIYPNVQETFGYITKSTRIENNLPKEHYIDARCISGNPLAKPFGYYLYQKCIRRQNRKINRDKFIKGGIKKKNRLAGDVFGFGLFDTVGYQKKRYFVFGRRKRGEFDIRTLDGEKVNNGSIRYKKLKLIQKNNNILTERRLSVAPQL

SEQ ID NO: 11397 - protein, 458 aa, Scytonema sp.
MMITNSVFVLSKNGKILKPTTTVRARILQAQGKAKKLKLFPFTLILDKDVDENVEPYLELRIDPGSRYTGISLVDLNKNEVIWAMELEHRGLAIKMELIKRAGIRRSRRSRRVRYRKKRFDRKKPDGWLAPSLRHRLLTTQTWIKRLLKIAPIKSIAIESVKFDLQKMETPDIEGIEYQQGTLFGYTLREALLEHWGRECVYCGKTDVPLQIEHINARSKGGSERFSNLTLSCEKCNQKKGNKPVEQFLKGKPEILQKIKSHQKKSRFNAAAVNSTRKAIFEMAHQFGLPVISGDGASTKMIRIKSGLPKLHWIDSACVGTSEIVKLRICQPLRVTCTGHGTRQAQRVNAKGFPAIASIKKNPVTGKKEVKLVSKNQKYTHATAGDYVICNLLKDRKHIKAGIYRARVKTPTPKGVEVLISGHRIAIDQQYVKLIHRSDGYEYSFAKIDQNLLRFKAI

SEQ ID NO: 11398 - protein, 369 aa, Caldalkalibacillus sp.; identical to SEQ ID NO: 10125

SEQ ID NO: 11399 - protein, 442 aa, unidentified; identical to SEQ ID NO: 3161
  REGION 1..442: note = Human gut metagenome

SEQ ID NO: 11400 - protein, 442 aa, unidentified; identical to SEQ ID NO: 3161
  REGION 1..442: note = Human gut metagenome

SEQ ID NO: 11401 - protein, 416 aa, unidentified; identical to SEQ ID NO: 6135
  REGION 1..416: note = Human gut metagenome

SEQ ID NO: 11402 - protein, 268 aa, Moorena sp.
MPNKVYVINKHGRPLMPCSPAKARHLLDEGKAKVKKRTPFTIQLVYGSSGYTQEVILGVDAGSKTIGMSASTTKEELLSAEVKPRNDVVDLLSTRREFRRAQRNRKTRYRKPRFDNRVRSKHKGWLAPSVEVKIQEHITSIKRVCRILPVSKVVIETAEFDLQLLKAIEEGKPVPQGEDYQQGEMYGHYNVRQYVLWRDGYTCQCCGAHATKKKEVRLHVHHLESRKVGGDAPDNQVTLCESCHEKLHKGLIAEKDFKKRKRKSTRDA

SEQ ID NO: 11403 - protein, 421 aa, unidentified
  REGION 1..421: note = Fermentation metagenome
MKVYVISQDGKPLMPTTPARARKKLRDKRAKCIRKTPFTIKLLYKTTTYTQPITLGIDTGSSYIGSAAVDGEGNVLYLSEVEVRNDIADKMKQRAKYRRNRRNRKTRYRQARWLNRKNSIKSDRFSPTMASKINSHLKEISFAKSLLPITHIILETGTFDPHALKNPDVLKNKWLYQHGTNYGFANTKAFVLDRDSHVCQYCKGKSKDHRLEVHHIIFRSNGGSDEAENLITLCKTCHDKVHANKIKLKGGKSKGVLKHATQMNSIRKQLLRLLPDAEETFGYITKEHRYLMFLPKEHYFDAVAIASLDNIRNEGLISTNLQTCLLRKKCISKGDYQQTKGIRSERSIQTGKIMGFRKFDKVKYIGNEYFIKGRMSTGYAILMDITGNKIPLKPIPKFCRMERLNARKSWIMQQETIQNIA

SEQ ID NO: 11404 - protein, 251 aa, unidentified
  REGION 1..251: note = Human gut metagenome
MVYVQDIDGKPMMPTTRHGKVRQLLKDKKAVVINTCPFTIKLMYKTSDYKQEIVLGVDAGTKHVGLSATTKSKELYSSEVILRSDIVDLLSTRRELRRTRRNRLRYRKPRFDNRIKSKRTGWVAPSVRHRIDAHIRVIDNVCSILPISRIIVEVAQFDTRKIKNPNISGNEYQEGNQLGFWNVREYVLTRDGHKCRHCKGKSKDPILNVHHIESRKTGGDSPSNLITLCETCHKEYHKGKIDLRVKRGKSL

SEQ ID NO: 11405 - protein, 431 aa, Klebsiella sp.; identical to SEQ ID NO: 2435

SEQ ID NO: 11406 - protein, 477 aa, Acidithiobacillus sp.; identical to SEQ ID NO: 4655

SEQ ID NO: 11407 - protein, 423 aa, Moorena sp.; identical to SEQ ID NO: 9087

SEQ ID NO: 11408 - protein, 424 aa, Microcoleus sp.
MSNQIFVLDINRRPLTPCTPGIARSLLKAGKAAVFRQYPFTIILKKEVNATPEAITLKLDPGSKTTGIALVQGTVVLFGAELTHRGQTIKASLESRRVLRRGRRSRHTRYRQARFLNRTRPKGWLAPSLQHRVKTTLTWVNKLIKLAPINSIAQELVRFDLKQLENPEISGIEYQQGTLLGYEVREYLLEVWERKCAYCSIENVPLQIEHIHSKAKGGSNRISNLCLACDTCNKKKGTQDIKQFLAKKPDILKRIQAQRKRPLKDATAVNSTRWALLNRLKETGLPVTAGSGGQTKFNRTRLQLLKSHWLDAACVGKVEELKVLTAQPLLIKTAGHGTRQICGTNKFGFPIRHKSRKQIHFCFQTGDIVSATVTAGKKIGSYTGRVLCRASGSFDIVTTTGRVAGISHKYCRPIHKKDGYSYGF

SEQ ID NO: 11409 - protein, 426 aa, Parasutterella sp.; identical to SEQ ID NO: 3045

SEQ ID NO: 11410 - protein, 427 aa, Nostoc sp.; identical to SEQ ID NO: 2670

SEQ ID NO: 11411 - protein, 416 aa, unidentified
  REGION 1..416: note = metagenome
MVYVLSQNGQPLMPTENHAKVRVLLKHGKAKVVKKCPFTIQLQYENTTHTQEVNLGIDAGSKTIGVSATTETKVLYEAEVVLRNDIVELLSGRQSLRRSRRNRKTRYRKPRFDNRKRPDGWLAPSIRQKIETHVIVVANVMKILPVTKIIVETASFDIQKIKNSEIEGEGYQHGEQLDFWNIREYVLFRDEHTCQCCKGKSKDNILNVHHIESRKTGGNAPNNLITLCETCHKAYHKGIITLPKEIHRGMRFRDAAFMGIMRWAFYDRLKELYNPLGVEVVNTYGYITKNTRIEHGLAKEHYVDARCISGNPAAKPMDHYYFQKKVRCHNRQIHKNTILKGGIRKRNQAAYEVKGFRLYDQVLWRGQKCFIFGRRSTGRMDLRLLNGTHINASVGYKNLKLLSMRKNYLIEQRKVG

SEQ ID NO: 11412 - protein, 504 aa, unidentified; identical to SEQ ID NO: 3854
  REGION 1..504: note = Human gut metagenome

SEQ ID NO: 11413 - protein, 418 aa, unidentified
  REGION 1..418: note = Human gut metagenome
MVYVTNRQGKALMPTDRHGKVRRLLKSGLAHVVRRIPFTIQLDYDTTEITQPITLGIDSGSKFIGVCATTNKKELYAANVELRNDIVDKLSTRREQRRTRRSRLRYRKTRFNNRVSSKRKERVAPSVENKIQTHMTVVRNAYKILPISKIVVETASFDIQKIKNPNIDGEDYQNGEQMGFWNIREYVLWRDGHTCQHCHGKSGDKILNAHHLESRKTGGNSPSNLITLCETCHKAYHRGEFELKVKRGTSFRDAAFMGIMRWAFFERLKQIYTNVSMTFGYATKNTRIANGLPKEHYVDARCISGNPQAKPLGYYFYQKKARCQNRQIHKINILKGGKKKLNQAPFMVKGFRLFDLVDYQKELFYVFARRKSGYFDIRRLDGTKVNKGSINCKKLRLVEIRRTLLTERRNSGSIPPRS

SEQ ID NO: 11414 - protein, 451 aa, unidentified
  REGION 1..451: note = Human gut metagenome
MSVAVISKTGMLLMPTSEYRARKLLKSKKAIIHGHNPFTIQLTEREIGCVQQIELCMDTGYIHIGISVKSEKHEYLGLQIDTLTDEKPRHNACRMYRRQRRSRKRYRQPRFNNRKRNNGWIAPSLEHKKNIHIQAVSRICKVMPITDITLEMGNFDTQVLKAREEGRPLPQGVDYQHGERYGIATLREAVFTRDGYTCQCCGRTIEDDAILHVHHIVYRSHGGTNRMSNLITVCDKCHTPANHKQGGKLYNWKPKIASFKGATYMTTIRWKLYNEVKTLFPDIDIHITYGAETKERRRAFDIDKSHVNDAFVMGQFHPKHRSKPICYKKKRRNNRCLEKFYDAKYIDSRDGKKRSGQELFNGRISRNHKKDSENLHQYRLQKVTPGRRAIRRQHYPIQPHDIIIYNGNKIEVSGCQHKGTRVVFSKTKKSVQISKIKLFKYAGGYSKSVFN

SEQ ID NO: 11415 - protein, 442 aa, unidentified; identical to SEQ ID NO: 2903
  REGION 1..442: note = Human gut metagenome

SEQ ID NO: 11416 - protein, 434 aa, unidentified; identical to SEQ ID NO: 7534
  REGION 1..434: note = Human gut metagenome

SEQ ID NO: 11417 - protein, 442 aa, unidentified; identical to SEQ ID NO: 2903
  REGION 1..442: note = Human gut metagenome

SEQ ID NO: 11418 - protein, 346 aa, Arthrospira sp.; identical to SEQ ID NO: 2872

SEQ ID NO: 11419 - protein, 451 aa, unidentified
  REGION 1..451: note = Human gut metagenome
MSVAVISKTGERLMPTSEYRARKLLKLGKAVKYSYHPFTIQLTERKTGDIQPIELCMDTGYIHIGISVKSEKHEYLAEQIDTLTDERARHDACRMYRTQRRGRKRYRQPRFNNRKRDKGWIAPSLEHKKDIHVQAISRINKVMPLTDITMEIGNFDTQVLKAKEEGKPLPQGADYQHGERYGIATLREAVFARDGYKCQCCGRTIKDGAILHVHHIKYRSQGGTNSMSNLATVCDKCHTPKNHKPGGKLYNWKPKLPSFKGATFMTTIRWQLYNEVKALFPDIDIHITYGAMTKRRRRELDIDKSHVNDAFAMGRFHPKHRVKAVLYKKKRRNNRCLEKFYDAKYIDSRDGSKKTGQELSNGRINRNHKKDSENLRQYRLQKVTAGKRTVRKQHYKIQPHDIVIYENRKRETAGCHCNGTRVMLLTDKKSASIKKVKVYRYAGGYFKSAFN

SEQ ID NO: 11420 - protein, 438 aa, Methanosarcina sp.
MIFVLNKNKQPLSPCHSAVARKLLKTGKAVIHKKYPFTIRLKELKTSINKVEFRLKIDYGSRHTGLAILNGSKVIGLAHIHHKTSIKSNMDNRRAMRRTRRNRTTRYRKPRFNNRKRKEHWLPPSLQSRVDNIQNWVNRLQKLCPLTHISYENVKFDTQIMQNPEISGIEYQQGELQGYEVREYLLEKWNRKCAYCGAENVPLEIEHIIPKARHGTSRVSNLTLACRTCNEAKGTKTAEEFGYPEIQKQARKTLKDAALVTATRWKVYNVLSKPALNIECGTGARTKMNRIRLNLPKDHHFDAICVGASTPNKIIFKTNQVLHIKAKGRGSHCRTNLDKYGFPRGYLSRQKSFFGFQTGDIVKAVVPKGKYKGIHFGAVACRKTGYFDIKNKEGVRIVQGINHKYCNILSRADGYEYATEHLEVDGIPPMTKVIGVLP

SEQ ID NO: 11421 - protein, 431 aa, unidentified
  REGION 1..431: note = Human gut metagenome
MPNKVYVINKHGRPLMPCSPAKARHLLDAGKAKVKKRTPFTIQLVYGSSGYTQEVILGVDAGSKTIGMSVSTTKEELLSAEVKPRNDVVDLLSTRREFRRARRNRKTRYRKPRFDNRVRSKHKGWLAPSVEVKIQEHITTIRRVYGILPVSKVVVETAEFDLQLLKAIADGKPVPQGEDYQKGEMYGHYNVRQYVLWRDDYTCQCCGAHATKKKEVRLHVHHLESRKVGGDAPDNQVTLCESCHEKLHKGLIAEKDFKKRKRKSTRDATFMGIMRKTLMQRLYSELPIPVIETRGYITKATREKLLVLPKSHTNDALAIAQGKQGFNVGYLPGIVQINKIYTIRPVRHHNRQLHKATILKGGIRKSNQAGKYVFGYRLFDKVQFNGQDCFIWGRRTTGIFTIKTINGKMIKDGISFKKLKPVEKSTSYLIA

SEQ ID NO: 11422 - protein, 383 aa, unidentified; identical to SEQ ID NO: 11278
  REGION 1..383: note = Human gut metagenome

SEQ ID NO: 11423 - protein, 442 aa, unidentified; identical to SEQ ID NO: 2834
  REGION 1..442: note = Human gut metagenome

SEQ ID NO: 11424 - protein, 437 aa, unidentified
  REGION 1..437: note = Human gut metagenome
MITGKHISSIRLWQEEKFSERKVSEMTNIKEYAFVLDAEGKQLSPMRTEKAWYKIRHNQAKLINKYPMVVQLNKVVPEDEICKDEVRCGIDDGGLHVGIALVQNCQTKNKVLLKGTIEQRNDVKKKIEQRKMYRNHRRYYKRYRKCRFSNRASSMRKGRIAPSIFQKRQATMRIINQINKWINISGYWLEDVSIDIRAMADGYRSYGWQYQKSNRLDENIRKAVIMRDGCKCMECGKSNCRLEVHHIKPRRNNGSNTMSNMITLCSKCHDKTEGKEEQFMSRYFSMINGSDNKHLNYASHVMIGKTWLREQLSNLAPLRLTTGGDTANKRIDWSIEKSHSNDAICITGLKPDTVMVKDWMLKPIRRKCNGKTDSVFGFRYRDYVEYTYKNGRTYKGYVTALIPKNHAISFQSISKKCAKVNALKCKLLWRFNRIYWL

SEQ ID NO: 11425 - protein, 414 aa, unidentified; identical to SEQ ID NO: 11037
  REGION 1..414: note = Human gut metagenome

SEQ ID NO: 11426 - protein, 451 aa, unidentified; identical to SEQ ID NO: 3061
  REGION 1..451: note = Human gut metagenome

SEQ ID NO: 11427 - protein, 459 aa, unidentified
  REGION 1..459: note = Cyanobacteria bacterium UBA11159
MSNQPNYAFVLDTNRKPLTPCKPSIARKLLNAGKAKVFRLYPFAIILNKEVVEIPEPLTLKIDPGSKTTGLAILSGCNLLWVAELTHRGQTIKASLESRHSLRRGRRNRHTRYRQARFLNRTRFNGWLAPSLQHRVETTLTWVKKLTRSGPINVVAQELVRFDLQQMDNPEISGIEYQQGGLAGYEVREYLLNKWERKCAYCGIENIPLQIEHIHPKAKGGTNRVSNLCLACEPCNIKKGTKNIEEFLKKKPDVLKKVLAQAKQPLKDAAAVNSTRWSLFNRLKKTGLEVATGSGGLTKFNRTRLQLSKTHFFDAACVGDTPELLVLANQPLLIKATGHGSRQMCRTDKFGFPSRYVTQFKFVKGFQTGDIVKAIVTSGKKIGTYTGRVAVRSTGSFNISTTNGLVQGISYKHCQQIHQKDGYGYGFSRLEANKFAAALSSPVSHTRSFQRRRYSDEST

SEQ ID NO: 11428 - protein, 462 aa, unidentified
  REGION 1..462: note = Human gut metagenome
MSVLVIGRNGRALMPTNPRKARLLLKKKTASVVCRHPFTIQLLYKTGCATQEGCIGIDTGSQHIGVGITCGDRVILKDEHALRSSMEKRSLLATRAVMRRGRRYRKVRYRKPKWRHHTKRMYFEKANRRGQHWRKVKTTTQSPRPKGWLPPSLQSKCDHHFRIIDRYLKYLPDPITRNLVIETGRFDMARMNDPTIHGEMYQRGPMYDAENLRAYIFARDNYQCACCKAKAGTTRKADGTTVKLVAHYILFRSRGATDNPKYIISVCDHCHTTKAHQPGGILYSWMENNKKVARGLRDATFMNILRKRLFARYPQAAFTYGNITAADRKKLRLPKSHANDAVAISLFGKEASTVKNICQTMHYKQIRKSKRSLHEAIPRKGRKNPNTKAVRNKKNTTQANGFKLWDSVLADGKKLFICSFTGTSAYLIDKNGCYISQPGKTYKQWPLSKLKRLHPNGNWLMA

SEQ ID NO: 11429 - protein, 242 aa, unidentified
  REGION 1..242: note = Human gut metagenome
LQFYRKEHGIMQYVYVLNKHGEPLMPCSPGKARLLLKQQKACVVKRTPFTIKLLFGSAGYKQPITLGVDAGSKHVGLSASTEKRELYSEEFTPRSDVVELLSTRRQNRRSRRNRKTRYRVPRFDNRVHSKHKGWLAPSVEVKIQEHITVIKHICKILPISLVRVETAEFDTQRLKAMLAGKPLPVGTDYQLGEMYDEYNVRQYVLKRDHYTCQCCGTHNTAKKVVKLHVHHLESRKTGGNAP

SEQ ID NO: 11430 - protein, 430 aa, unidentified
  REGION 1..430: note = Human metagenome
MVLVIDKHKKPCNTISEAYARRLLFKKQAVIHKRFPFTIRLKNDNAVLKDRSYTVKIDPGSRHTGVAVVDDKDSVVMLAELEHRGHVIKRNMDSRRAVRRHRRNRKTRYRPARFLNRTKHKGWLAPSVKSRADNIVNFIKKYKKLLNISKVMIENVSFDVAQMSSNTKLWGNAYQQGPLYQQKLRSFIFSRSNNQCVYCGAKATEIDHIIPRANGGTDSTYNLVASCRACNEKKSNLTLKEFGKSVGKDFSKLKPKKLPKDAAIVQSARNYMVREITKLVSDTTTHDAWLTKYNRDQLGLPKEHYYDALSVGEVPPKFNLFTDKILQISAKGRGSRQMCRVNRYGFPRTSAKASKSVKGFQTGDMVKVIVLTGSKQGEYLGRVAVKSSGYFDIQTRTKTIEGIGYKYCHIVQRSDGYLYSYNERSSLGNE

SEQ ID NO: 11431 - protein, 424 aa, Scytonema sp.; identical to SEQ ID NO: 2747

SEQ ID NO: 11432 - protein, 419 aa, unidentified
  REGION 1..419: note = Human oral metagenome
MFVYVLDKNGQPLMPTSRFGKVRRLLRDKKAKVVKRCPFTIRLLYEPETKIVQDIVLGVDTGSKHVGVACVGNRKVLYQAQVELRDDIKRKMDRRRTFRRNRRSRKTRYRKHRFLTRGNSTKKGRYCPTVLSKCYGHEREIEFCKKILPIKDTVLETGKFDTQLMEKPWLQEHKWAYQKGVNYGYANAREHALVRDKYTCQCCGKKSCGLEVHHIIYRSKGGSDSLENLITLCEDCHKAVHLGKVDLKLKGKRRSNLRYATQLSILRSMLLKKYSNAIETFGFVTKANRENLGIEKEHYIDACVIASGGLEFSPSEVLYQKRCVSVQNRVLTKGSRDEKRYPIGKVHGFKQYDKVKYLGRTCFIKARRTNGGFVLMDIESNSIDFRDRGGKQNPSYKAIKRLNARKSILCIQKIVERGI

SEQ ID NO: 11433 - protein, 568 aa, unidentified
  REGION 1..568: note = Human gut metagenome
LFLQIPQAFGCLLRLSIFPVDSSARVALSRTIPLTANTQPRETQPPVSAGETYSKRRVAYMPTVYVLNKDGKPLMPTTRCMHVRHLLKNGKARVVKSKPFTIQLLYETDDVVQPLYLGIDPGRTNIGVAVVKADGAAVFTAHLETRNKEVPKLMKKRKESRCARRTNGRRCRRQRRAKTNGTISKKCVKQTTAQNGSVSKRAKEIGVIKRHLPGCEKDVLCIGIKNKEAKFTNRARPEGWLTPTANQLLQTHINLVKKIQKFLPISDVVLEVNKFAFMQLDNPNIQKWQYQQGPLYQKGSLENAVSEMQEHHCLFCEKPIEHYHHVVPKSENGSNTIANIVGLCTEHHNLVHKDATWQKKLAKEKVGLVKKYSALSVLNQIIPALTKEMNSLFPKHFFVTNGKSTYDYRTAHGVSKDHWLDAYCIACSVLPNDVCDSNINSHVPYELKQFRRHDRRVLHKANMSRVYTLNGKTVATNRHKAIKQTTDSLEEFRQSHPGDVCKLKVKEHHPAYRNLNRNYPGSVFLVDGQVHVMQGVSGSHNGKADGYYNTNGNAYPYYKCKFVVKNEG

SEQ ID NO: 11434 - protein, 440 aa, Moorena sp.; identical to SEQ ID NO: 5150

SEQ ID NO: 11435 - protein, 427 aa, Parasutterella sp.; identical to SEQ ID NO: 4733

SEQ ID NO: 11436 - protein, 441 aa, Sulfobacillus sp.; identical to SEQ ID NO: 4231

SEQ ID NO: 11437 - protein, 423 aa, unidentified; identical to SEQ ID NO: 7434
  REGION 1..423: note = Cyanobacteria bacterium UBA11370

SEQ ID NO: 11438 - protein, 546 aa, unidentified
  REGION 1..546: note = Human gut metagenome
MVYVQDINGKPMMPTTRHGKVRRLLKSNKAIVVNLCPFTIKLMYVTSDYKQEIVLGVDAGTKHVGLSATTKSKELCSSEVILRNDIVDLLSTRRELRRTRRNRLRYRKPRFDNRVKSKRPGWIAPSVRYKIDAHIRVIDNVCSILPISRIVIEVAQFDTQKINNPNISGKEYQEGDQLGFWNTREYVLCRDGHKCQYCKGKSKDSILNVHHIESRKTGGNSPSNLITLCETCHKEYHKGNIDLKIRRGKSLRDAAVMGIMKWRLYEELKSKYDRVSMTFGYVTKYNRINHDIEKSHVSDAFVISKNFNAIRLGYYYKVKLVRRHNRQIHKQKIQKGGIKRLNQSPFEVFGFRLFDRVMFENSYYFIFGRRKTGSFDIRDIDGKRQKNITYKKLKLSRCKRFMIQMELNKKKHGHVLKMKEILTETLRKSGAAVCDKIKEMFLSGECDHLTANDLETWTQLANPAKYYTGEEAVSYLNVTSKRFYEYRKAKLVPDPVKIKGFPKPLYTKVMLDDAIKTISGMSEREIYMRILNAKSRESRAKERRGV

SEQ ID NO: 11439 - protein, 442 aa, unidentified; identical to SEQ ID NO: 2903
  REGION 1..442: note = Human gut metagenome

SEQ ID NO: 11440 - protein, 420 aa, unidentified; identical to SEQ ID NO: 3685
  REGION 1..420: note = Human gut metagenome

SEQ ID NO: 11441 - protein, 443 aa, Anoxybacillus sp.; identical to SEQ ID NO: 4041

SEQ ID NO: 11442 - protein, 426 aa, unidentified; identical to SEQ ID NO: 2776
  REGION 1..426: note = Bioreactor metagenome

SEQ ID NO: 11443 - protein, 418 aa, Bacteroides sp.; identical to SEQ ID NO: 2425

SEQ ID NO: 11444 - protein, 424 aa, Microcoleus sp.
MSNQILVLDTNRKPLTPCTPGMARSLLKARKATVFRRYPFTIIITKEVQNTPQSLTLKLDPGSKVTGIALLKNDKLIWAAELTHRGSAIKHALLSRRQLRRARRNRKTRYRKARFLNRTRHEGWLAPSLQHRVDTIQTWVNRISRYAPVGSLVQELVRFDLQLMQNPEISGVEYQQGELQGYEVKEYLLNKFNRQCVYCGAKDTKLEVEHIHPRSKGGSDRVSNLALACHPCNQWKGNQDIKDFLSGKVDILKRVLAQSKVPLKDAAVVNATRWALFNALRTTGLPVSTGSGGKTKFNRTRLGLPKTHWLDAACVGDTPTLEVLTLQPLLIKSAGHGTRQMCGTNKFGFPIRHRTRVQIHKGFQTGDLVKATVTSGKKIGFYVGRVLCRATGSFDIATVTERVTGISHKYCTPIHKKDGYNYSY

SEQ ID NO: 11445 - protein, 512 aa, unidentified; identical to SEQ ID NO: 7153
  REGION 1..512: note = Human gut metagenome

SEQ ID NO: 11446 - protein, 439 aa, Moorena sp.
MKVCVVNQHGRPLMPTTPRKARLLLKAGKAQIIQRIPFTIQLLYGTRGHAQPITLGIDAGYATVGFAAVTEQEELVGGELKLLAGMSERLSERAMYRSGRRRRTRHRQPRFDNRRRAEGWLAPSIQHKLDSHLRLIERLGAVLPISCIVIEVANFDIQRLKDPDIEGAGYQQGEQAGFWNLREYILHRDAHTCQNPNCPNRAKEKVLQVHHLGYWRRDGSDRPANLITLCTRCHTPENHLPGGFLWGWEPRLNSFRPETFMSMVRGRLVEAVGAETTYGYLTKGRRIELGLPKSHANDAFVIAGGSTQPRTAPLLLEQVRRNRRALQIWYDAKYIDTRTGEVVKAQVLNNGRRTRNRNLKGENLRRYRGAKISKGRRYIRRRRYPYQPGDLVRFERQVYRVQGMGGYGRNLKLAGRPKEVKATLVTPARRRKGICQQVP

SEQ ID NO: 11447 - protein, 430 aa, unidentified
  REGION 1..430: note = Human metagenome
MVFVLNRSKKPLNMITNAEARILLRKKLAVIHKIYPFTIRLRGNSCVSNDRAYTIKLDPGSRHTGVAVVDDKDAVVMLAELEHRGHIIKKSLNSRRAVRKSRRQRKTRYREARFLNRTKPQGWLAPSVKSRADNVINFIKKYKKLLNIDRVMIERVSFNVAQMSSEVELYGTDYQQGPLYQKKLRDFIFSKTNGRCVYCGAPAQEIDHIVPRANGGTNSVNNLTAACRACNEKKSNLTLKAFGKLMNRDYSHLTPKKLPKSAAIVQSARNYMVREITKLVANTKSYDSWLTKYNRDELGLPKEHYYDALSVGEVPNKFNFLTDKILQISAKGRGSRQMCCMNRFGFPRTLPKGSKSVRGFQTGDIVKAIVPKGSKKGEYFGRVAVRSSGSFNIETSDCLIQHIGYKYCRLIQKSDGYSYNYKEYNVASTF

SEQ ID NO: 11448 - protein, 406 aa, unidentified; identical to SEQ ID NO: 2752
  REGION 1..406: note = Human gut metagenome

SEQ ID NO: 11449 - protein, 413 aa, unidentified
  REGION 1..413: note = Human gut metagenome
MTSYSFVLDANGKQLAPTKEPKAWFLIRKKRAALVSKYPMVIQLKKKIQENEICKDEIRCGIDDGGLHVGIALVQKCKSKNKVVFKGTIEQRNDVKHLMEVRRNYRRYHRYHKRYRQARFDNRKSSKRKGRIAPSILQKRQATIRVINRLNKWINITNYWLEDVSIDIRVLTDGYKSYSWQYQKSNRLDENIRKATILRDGGKCMECGKSNCRLEVHHIKPRRRNGSNTLDNLITLCESCHQKTEGQEELYMDRYFSLLKSSDNKNLNYAQHVMIGKMWLRKQLSGLGVLYLTSGGDTANKRIDWNIEKSHTNDAVCITDLQPDTCDMKEWTMKPMRRQSKAKTDHVLGIHHRDLVEYTFKNGETHRGYVTALYPDQKAINFQSQTKHCKKVNARKCKLLWKYSKIYWFENAS

SEQ ID NO: 11450 - protein, 425 aa, Spirulina sp.
MSNLVLVIDTNKKPLTPCKPGTARRLLNAGKAAVYRRYPFSIVLKKVVNENPEPCQIKIDPGSKTTGIAILKGNQLLWGANLHHRGQAIKASLLSRRQLRRSRRSRKTRYRQPRFLNRTRPQGWLPPSLQHRVETVMTWVNRLRRFCAIGSIAQELVRFDTQIMQNSEISGTEYQQGELAGYEVREYLLEKWGRECAYCGAKDTPLEVEHIQPKSKSGSNRVSNLTLACRPCNQAKGNQAVADFLSGKPNLLGRILKQAKAPLKDTAAVNSTRWALFNALKATGLTVQTGTGGQTKFNRCRFNLPKDHWLDAACIGDVESLEMLTQQPLNIKATGHGTRQMCRTDKFGFPKRYVPRNKFVKGFQTGDIVRADVPKGKKAGVHVGRVAVRSTGSFNISTANGLVQGINAKYCRKVHGKDGYAYGIG

SEQ ID NO: 11451 - protein, 416 aa, unidentified
  REGION 1..416: note = metagenome
MVYVLDKNGQPLMPTDRHRKVRLMLQSGQAKVIKRCPFTIQLNYDSGHQTQEISLGIDAGSKHIGVSATTKIKVLYEADVELRNDIVDLLSSRRELRRGRRNRKTRYRQAKFNNRRRGNGWLAPSIRQKIGTHLTVVENICKILPISRIMVETASFDIQKIKNPDIQGAEYQQGDQLEFWNVREYVLFRDGHTCQCCKGKSKDKILNVHHIGSRKTGGNAPNNLITLCETCHTGYYKGTVQLPKAIKRGMRFKDAAFMGIMRWAFYEALKQQYEPVGTPVHDTYGYITKHTRIAYNLPKEHYVDARCISGNPEASSNGEYYYQKKVRCHNRQIHKLTVLKGGIRKQNQATYLVKGYRLFDKVSYQGKGYFVFGRRQSGFFDIRTLSGEKVNKGSLSCKKLKFIATRTYYLTERRAV

SEQ ID NO: 11452 - protein, 431 aa, unidentified
  REGION 1..431: note = Human gut metagenome
MDAWDIIVVLNKRGKPLMPCSPAKARLLLKEKKAIVKRRTPFTIQLTIATGETNQPVSLGVDAGYKHVGLSASTEKAELYASEVELRQDVSDLLSARRALRQSRRNRKTRYRAPRFNNRLRTKRKGWLAPSVENRINAHLSRIEAVLRLLPVTKITVETASFDLQLLKNPDISGKEYQEGEQLGFWNVREYVLFRDGHVCQHCHGRSKDPVLNVHHLESRRTGGDSPGNLITLCETCHKALHRSEITLKTKRGQSFRAEAFMGIMRWEVLNRLKASHPELEVNNTYGYRTKHARIANGIAKSHCADAFCIAGNLGAERLGEFFFQKQTRRNNRQIHKLSILKGGIRKRNQAPFEVKGFRLFDKVACQGEEGFIFGRRSSGFFDVRKLDGTCISAGISYKKLHLLEKRRTYLTEIRKEEALPPLPEGRGLRA

SEQ ID NO: 11453 - protein, 466 aa, unidentified
  REGION 1..466: note = Human gut metagenome
MSTCACVLSKNGERLMPTIRLGKVRHLLKDGKAKIIKHHPFTIQLLYDSETNIQPIEICEDVGYNYIGISVKSESHEYVSAQYDTLQDEKDCHDSCRKMRRIRRNRLRYRKPRFDNRKRNKGWLAPSLEHKKELNVNVIKMYCKVVPITHVTVEVGSFDTRLVKAIEEGKAAPEGVDYQKGPRYNLATLREAVFYRDNYTCQVCGREAQKDSAILHVHHMFYWKGRHGNSLSELLTVCKKCHTPASHQKGGKLYGFGENIKFANLSGAAFMNTVRWQIVNELCAAFGKPFVTFTYGAMTKEKRIALHLEKSHNNDAYAMGSFHPVGRCAFEHYEKVKRNNRILERFYDSQYIDIRTGKVTNGKSLFNGRINRNHKKDSENLHKYRGKRIRKGYRALRRKKVALNPGDLVFLNGEILVVHGTHTDKKGAVRVEFKVAAKNGKKSANLKKLKIIKTSNLTYSAWKKVS

SEQ ID NO: 11454 - protein, 405 aa, unidentified
  REGION 1..405: note = Human oral metagenome
MVYVINKEGQALMPTERFGKVRRLLKNGLAHVVCRIPFTIQLDYETTHFVQPISLGVDAGSKHIGISATTSEKELYAADVELRNDIVDKLSTRREQRRTRRSRLRYRKARFNNRVSSKHKGWLAPSVENKIQTHLTVVEKIHKFLPITKIIVETASFDIQKIKNPSISSKEYQQGEQLNFFNVREYVLFRDNHTCQHCKGKSKDHILNVHHIESRKTGGNSPSNLITLCESCHKAYHNGKIDIKIKRGASFRDATFMGIARWTTYERLKNIYPNVSMTFGYITKNTRITNGLPKEHHVDARCISGNPKSKPLGYYFYQKKVRCQNRQIHKANFLKGGRKKLNQSAFLVKGYRLFDLVEYQKELYYIFGRRDSGFFDIRRLDGTKVNKGSISCKRIRLVDIRRNIT

SEQ ID NO: 11455 - protein, 439 aa, unidentified
  REGION 1..439: note = Human gut metagenome
LMPTSEYRARKLLKSGKAVKHSYHPFTIQLTERKTGDVQPIELCMDTGYIHIGISVKSEKHEYLAEQIDTLTDERIRHDACRMYRRQRRGRKRYRKPRFNNRKRDKGWIAPSLKHKKDIHVQAISRINKVMPLTDITMEMGNFDTQVLKAKEEGKPLPQGACYQHGERYGTATLREAVFSRDGYKCQCCGRTIRDGAMLHVHHVKYRSQGGTNSMANLATVCDKCHTPKNHKPGGKLYNWKPKLPDFKGATFMTTIRWQLYNEVKSLFPDINVHITYGAATKEQRRELNIDKSHVNDAFAMGKFHPKHRANAVLYKKKRRNNRCLEKFYDAKYIDSRDGSKKTGQELFNGRINRNHKKDSENLHQYRLQKIKAGKRTIRKQHYSIQPHDIIMYKNRKRETSGCHCNGTRVVLLPDKKTAAIQKVKIYKYAGGYFKSAFN

SEQ ID NO: 11456 - protein, 320 aa, unidentified
  REGION 1..320: note = Human gut metagenome
RAPRFDNRIRTKRKGWLAPSVENRINAHLSRIEAVLRLLPVTKITVETASFDLQLLKNPDISGKEYQEGEQLGFWNIREYVLCRDGHVCQHCYGRSKDPVLNVHHLESRRTGGDSPGNLITLCETCHKALHRGEITLKAKRGQSFRAEAFMGIMRWEVLNRLKASHPELEVNNTYGYRTKHARIANDIAKSHCADAFCIAGNLGAERLGEFFFQKQTRRNNRQIHKLSILKGGIRKRNQAPFEVNGFRLFDKVACKGEEGFIFGRRSSGFFDVRKLDGTRISAGISYKKLHLLEKRQTYITEIRKEKALPPLPEGRGLHA

SEQ ID NO: 11457 - protein, 424 aa, unidentified; identical to SEQ ID NO: 8578
  REGION 1..424: note = Human gut metagenome

SEQ ID NO: 11458 - protein, 302 aa, unidentified
  REGION 1..302: note = Human gut metagenome
VKVKIQEHITSIKRVCTILPISKVVIETAEFDLQLLKAIQEGKPIPEGEDYQKGEMYGSYNVCQYVLWRDNYTCICCGVRGTPKNPVRLHVHHFESRKYGGNAPDNHGTLCDDCHKKFHLGIITDVKLKTRRRQSTRDAAFMGIMRKTLMWRLRTELFIPVAETKGYITKATREKLLVLPKSHTRDALAIAQGRHGFGIKEYAYVEPANHIYTVRPVRHHNRQLHKASILKGGIRKRNQASKYVFGFRLYDKVLYQGKACFVWGRRTSGTFLLRTIDGIKVKDGVSYRNLTLLERSSNYLIA

SEQ ID NO: 11459 - protein, 545 aa, Actinomadura sp.; identical to SEQ ID NO: 11225

SEQ ID NO: 11460 - protein, 427 aa, unidentified; identical to SEQ ID NO: 9882
  REGION 1..427: note = coral metagenome

SEQ ID NO: 11461 - protein, 431 aa, unidentified
  REGION 1..431: note = Human gut metagenome
MPNKVYVINKHGRPLMPCSPAKARHLLDAGKAKVKKRTPFTIQLVYGSSGYTQEVILGVDAGSKTIGMSASTTKEELLSAEVKPRNDVVDLLSTRREFRRARRNRKTRYRKPRFDNRVRSKHKGWLAPSVEVKIQEHITSIKRVCRILPVSKVVIETAEFDLQLLKAIADGKPVPQGEDYQQGEMYGHYNVRQYVLWRDGYTCQCCGAHATKKKEVRLHVHHLESRKVGGDAPDNQVTLCESCHEKLHKGLIAEKDFKKRKRKSTRDATFMGIMRKTLMQRLCSELPIPVIETRGYITKATREKLLVLPKSHTNDALAIAQGKQGFNVGYLPGIVQINKIYTIRPVRHHNRQLHKATILKGGIRKSNQTEKYVFGYRLFDKVQFNGQDCFIWGRRTTGIFTIKTINGKMIKDGISFKKLKLVEKSTSYLIA

SEQ ID NO: 11462 - protein, 445 aa, Moorena sp.
MIKIDSQVFVYIQDQEGNALMPTKRYGHVRRLIANGKAKVIRANPFTIRLLYQTTKHKQPIVLGLDSGYENIGFSAVTTKEEVLSGEMSLLKGQSNRLKEKSSYRRTRRSRLRYRKPKFDNRKKVEKTLAPSIENKLQTHIRLVEFARSILPISKVIVEVGNFDIQKLKDESIEGVSYQKGEQYGFYNLREYILYRDNHRCQNPNCSNKSSEKILQIHHLGYWKSDSSNRPSNLITLCDKCHRSENHLKGKLLYGWQPKLNSYRAESFMSTVRWKLVEKLNSKVTYGYITKGKRTELKIEKSHSNDAFVIAGGKNQNRANTIKIEQVRKNNRSLEKFYDASYLDSRTREKASGQELNTGRRTRNTSLNTENLSKYRATKLKPGRRSIRKQRYPFQPKDRVIFNGKKYLVSGVQNYGDYIKLQGLQKPVKISNVKLIYYGNGFRVT

SEQ ID NO: 11463 - protein, 373 aa, Moorena sp.; identical to SEQ ID NO: 10254

SEQ ID NO: 11464 - protein, 465 aa, unidentified; identical to SEQ ID NO: 3070
  REGION 1..465: note = Human gut metagenome

SEQ ID NO: 11465 - protein, 421 aa, Moorena sp.; identical to SEQ ID NO: 5881

SEQ ID NO: 11466 - protein, 449 aa, Allochromatium sp.
MAVFVLDRQKHPLMPCTEKRARLLLERGRAVVVRLAPFTIRLKDRVGETRQPLRLKLDPGSRVTGLALVRESATRDPEPGAVERLEHGLWFGELEHRGQAIREALEQRRHCRRARRARKTRYREPRFLNRTRRDGWLPPSLQHRIGTTVNWVERLQRLAPITALSQELVRFDTQAMQNPEISGVEYQQGELAGYEVREYLLEKWNRTCAYCGATHVPLEIEHIVPRAKGGSDRVSNLTLACRPCNEHKGNRLIEAFLKGRPVLLKQIQAQAQAPLQDAAAVNATRWALLNALKTTGLAVETGSGGRTKFNRTRLGIPKTHALDAACVGAVDQLRDWNRPVLAIRATGRGAYRRTRTFNNGFPRAYLMRHKRVNGFQTGDWVRAEVPKGKKAGVHVGRVAIRRTGSFNVQTPGGTVAGISHRYCRLLQRADGYGYTIHTKPVTEDARRAA

SEQ ID NO: 11467 - protein, 420 aa, Petrotoga sp.
MLVYVLNKHGKPLMPCKPSKARKLLKEEKAKVVKKEPFTIQLLYGSSGYKQPITLGVDAGSKTVGLSATTENKELFAAEVELRDDIPKLISQKRQYRRDRRFRKTRYREPRFLNRVHSKNKGWLAPSVEHKIKSHIKLIDLVRHLLPITKIVVEVASFDIQKIKNPNIEGKQYQQGEQLAFWNTREYVLWRDNYTCQHCKGKSKDKRLNVHHIESRQIGGNAPSNLITLCETCHKDYHDGKIKLNFKRGQKFKDATFMGIMRWTLYNRLKTLYPNVHLTYGYITKNTRIQNSLTKTHRIDALCISGHPQAKQLEYYYHIKEVRRHNRQIHKAKILKGGIRKLNQAPYLVHGFRLFDKIRYNGIECFIFGRRSTGYFDIRKVDGTVIHRSAKSNDLILVSKVKTLLWERRENSAFLSPLKW

SEQ ID NO: 11468 - protein, 422 aa, unidentified
  REGION 1..422: note = Human gut metagenome
LRVFVLNKRGQPLMPCSPAKARLLLKEKKAIVKRRTPFTIQLTIATGEAKQPVTLGVDSGYKHIGLSATTEKAELYASQVELRQDITDLLSARLALRRSRRSRKTRYRAPRFDNRVASKHKGWLAPSVENRIAAHMSRVEAVMRVLPVTAITVETAAFDTQLLKDPDIAGGAYQQGEQLGFWNVREYVLFRDGHVCQHCRGKSKDPILNVHHIESRRTGGDAPNNLITLCETCHKAFHRGEIKLKVRRGKSFKAETFMGIMRRTLFERLKKAHPELNVRNTYGYLTKHKRISYGIAKSHCADAYCIADNLGAKRLEGFFFQKQTRKHNRQIHKLLILKGGLKKKNQAPYEVKGFRLFDKVICKGEEAFIFGRRTSGSFDVRRLDGTRISAGINYKKLRLLEPRTTYLTEFRKEAALPPLHKC

SEQ ID NO: 11469 - protein, 423 aa, unidentified; identical to SEQ ID NO: 3951
  REGION 1..423: note = Human gut metagenome

SEQ ID NO: 11470 - protein, 436 aa, unidentified
  REGION 1..436: note = Human oral metagenome
MTKTLTTQTTQACLLDQNGKPLMPTTRLGKVYRLLKTQKAHIVSYEPFTIQLDYEPDTHIIQPMTLGVDSGAIHSGYSVANEHREYYSAEIIARNDISNRLSDRRMYRQTRRSRKTRHRKPRFNNRKNKKKGWLPPSLEQKVATQLNEIDHLHRYFPIETIIVEVAEFDIQKIKNPDILGIEYQQGTLQGYNIRNYLLEKHGRKCFYCGKTVSDFEVEHMFPKSKGGSNRIDNLTLSCHNCNEKKGTLTAEKFIQQTLPAKKAAAKLKQLPKEKRLFKYMAHMNATRWTLYNTIKEKYPNVKMTYGYITKYNRIQAGLPKAHHIDAKCITGFSNVPSISQTVVKVKMRRHNRQLHRATFSKGHIRKAASLPTKVFGFQLYDLVLFNNHRYYIKGRRSSGSFALVSVEGLKNEKRSYKKITLLAHTNAYLINHYVNV

SEQ ID NO: 11471 - protein, 487 aa, unidentified; identical to SEQ ID NO: 11019
  REGION 1..487: note = Human gut metagenome

SEQ ID NO: 11472 - protein, 417 aa, unidentified
  REGION 1..417: note = Human gut metagenome
MPCSPAKARLLLKEKKAIVKRRTPFTIQFTIATGEARQPVTLGVDSGYKHIGLSATTEKAELYASQVELRQDITDLLSARLALRRSRRSRKTRYRAPRFDNRVASKRKGWLAPSVENRIAAHMSRVEVVMRVLPVTAITVETAAFDTQLLKNPDIAGEAYQQGEQLGFWNVREYVLFRDGHVCQHCRGKYKDPILNVHHIESRRTGGDAPNNLITLCETCHKAFHRGEIKLKVRRGKSFKAETFMGIMRWTLFERLKKAHPELRVRNTYGYLTKHKRISHGIAKSHCADAYCIADNLGAKRLEGFFFQKQTRKHNRQIHKLSILKGGLRKKNQAPYEVKGFRLFDKVICKGEEAFIFGRRTSGSFDVRRLDGTRISAGISCKKLRLLEPRTTYLTEFRKEAALPHLHECRGFRAEFL

SEQ ID NO: 11473 - protein, 419 aa, unidentified
  REGION 1..419: note = Human gut metagenome
MVYVINKQGQALMPTERFGKVRRLLKNSLAHVVCRIPFTIQLDYDTTDYTQPVSLGVDAGSKHIGISAITSEKELYAADVELRNDIVDKLSTRRELRRTRRSRLRYRKARFNNRVSSKRKGWLAPSVENKIQTHLTVVEKIHKFLPITNIVVETAAFDIQKINNPSISGSEYQQGEQLDFFNVREYVLFRDNHTCQHCKGKSKDKVLNVHHIESRKTGGDSPNNLITLCETCHKAYHRGEFELNVKRGKSFRDAAFMGIMRWSFYEKLKNIYPNVSMTFGYITKNTRITNNLPKEHYVDARCISDNPVAKPLGYYFYQKKVRCQNRQIHKANFLKGGRKKLNQAPFLVKGFRLFDLVEYQNDLYYIFGRRDSGFFDIRKLNGTKVNKGSINCKHLRLMATRKSILIEKRMQINYENTGF

SEQ ID NO: 11474 - protein, 465 aa, unidentified
  REGION 1..465: note = Human gut metagenome
MSTCVCVLSNNGERLMPTIRLGRVRHLLKDGKAKIIKHHPFTIQLLYDSKTNTQPIEICEDVGYNYIGISVKSQSHEYVSAQYDTLQDEKACHDSCRKLRRTRRNRLRYRKPRFDNRKRGEGWLAPSLKHKKELNVNVVKMYCTVMPITHATVEVGSFDTMLVKAIQEGKVIPEGADYQKGPRYNLATLREAVFYRDNYVCKICGRKATEGAILHMHHMFYWKGRHGNSLNELLTVCEKCHTPANHQKSGKLYGFGEKIKFADLSGAAFMNTVRWQIVNELYVAFGKPFVTITYGAMTKEKRIALQLEKSHNNDAYAMGEFHPNLRCMFEHYEKTRRNNRILEKFYDSRYIDIRTGEIATGKELFNGRINRNHKKDSENLHKYRGKRTYAGHRALLRKKVNLNPGDLVSLNGENLIVHSTHTKKNGAVNVEFETPAKSGQKSASLKKLKIVKAANSIHPAWKKIS

SEQ ID NO: 11475 - protein, 425 aa, Moorena sp.; identical to SEQ ID NO: 10997

SEQ ID NO: 11476 - protein, 448 aa, unidentified; identical to SEQ ID NO: 9314
  REGION 1..448: note = Human gut metagenome

SEQ ID NO: 11477 - protein, 413 aa, unidentified; identical to SEQ ID NO: 5215
  REGION 1..413: note = Human gut metagenome

SEQ ID NO: 11478 - protein, 422 aa, unidentified
  REGION 1..422: note = Human gut metagenome
LNKRGKPLMPCSPAKARLLLKEKKAIVVRRTPFTIQLTIATGESKQPVSLGVDAGYKHVGLSASTEKAELYASEVELRKDITDLLSARRALRQSRRNRKTRYRAPRFDNRIRTKRKGWLAPSVENRINAHLSRIEAVLRLLPITKITVETASFDMQRLKNPDISGKEYQEGEQLGFWNVREYVLFRDGHVCRHCHGRSKDPVLNVHHLESRRTGSDSPDNLITLCETCHKALHRGEITLKAKRGQSFRAQAFMGIMRREVLNRLKASYPELKVHETYGYLTKHARIANGIVKSHGADAFCIAGNLGAERLGEFFFQKQTRRNNRQIRKLSILKGGIRKRNQAPFEAKGFRLFDKVACQGEEGFIFGRRSSGSFDVRKLDGTRISAGISCKKLRLLERRRTYLTEIRKEEALPPLPEGRGLRA

SEQ ID NO: 11479 - protein, 512 aa, unidentified
  REGION 1..512: note = Human gut metagenome
MSTVYVLNKDGKPLMPTTRCGHVRHLLKEQKARVVTSKPFTIQLLYEADDLVQSLYLGIDPGRTNIGVAVVKTDGTAVFTAHLETRNKEIPKLMQGRKKARRARRTNGRRCRRQRRAKANGTISKKCVKHDTAQNGSVSKRAKEIGVIKRHLPGCEKDVLCIGIKNKEAKFSNRTRPEGWLTPTANQLLQTHINLVKKIQKFLPISDVVLEINKFAFMRLDNPNVQKWQYQQGPLYQKANLEETVSEMQEHHCLFCKKKIDHYHHVVPQSENGSDTIGNIVGLCTKHHDLIHKDTAWQKKLAKKKTGLNKKYGALSVLNQIIPALTKELSSLFPKHFFVTNGKSTYDYRAAHGVSKDHWLDAYCIACSVLPNDTCDKTINSRVPYELKQFRRHDRRALNNENMSRVYTFNGKMVATNRHKATEQTTDSLEEFRQRQPNDVCNLKVKEHHPTYRNMNRNYPGSVFLVGNQVHVMQGIAGSKDGEATTYKDTNANSIAAGKCKFVAKNSGILFV

SEQ ID NO: 11480 - protein, 420 aa, unidentified; identical to SEQ ID NO: 11059
  REGION 1..420: note = Human gut metagenome

SEQ ID NO: 11481 - protein, 520 aa, unidentified
  REGION 1..520: note = Human gut metagenome
MNYLDFVLMVDKNKVPCIPIKESTAAYLLRHNKAKIINHDPTVIQRFDEYSADYEIRNIFELKIDSGYLNIGFSVSDSEHEYLAGQVNLLQGMSERLTVRASNRKFKRARLRYRKNKNVDYKTVHNSTYKNGNQDGWIAPSIQHKIDSHIRLIKKIAQWVPIDRIIIEVAKFDIQKMIADLDGRIISGKDYQNGEMKGYENVTAYVRDRDKHTCQMCLSSGKVKNKNNDTIEVHHIIPRAAGGTNRPSNLICLCHHHHRLVHSNNNNNKYFRELQNKKMPDTYKDSTFMNIVRYKIYNALCADFKDVELAYGYETKINRKLIGLPKFHYTDAVCLKEWKNISLTKFIYIVDQKRCNDRKMESFFDAKYIDIRDGKTKSGTELCYTRLDNASSWRTTCKNEVDNLRQYREKKITKGRKQRECHFYCLKPGDLIFINLGNHKGNLAEVKTMQIQKGKYKIFFTYKNQKVDNPTISLSSEEYEQLKKNECSKVKIVRTRRGMIWRKYNRLEYENTYKDQYDKN

SEQ ID NO: 11482 - protein, 413 aa, Clostridium sp.; identical to SEQ ID NO: 4134

SEQ ID NO: 11483 - protein, 430 aa, unidentified
  REGION 1..430: note = Human gut metagenome
MPKVFVLNRHGRPLMPCTPAKARHLLDAGKAKVRHRTPFTIQLLYGSTGYTQEVILGVDAGSKTIGLSAATETEELFSAEVKPRNDVVELMSARRQFRRARRNRTTRYRKPRFDNRVRSKHKGWLAPSVEVKIQEHMTAIRRACAILPVSKVVVETAEFDLQLLKAVAEGKPVPQGEDYQKGEMYGHYNVRQYVLWRDSYTCCICGVHGSVRKGVPLHVHHLESRRVGGDAPDNLVTLCTACHDKLHKGIIMAADIKKRKRRSTRDATFMGIMRMTLLRRLREQLPVPVVETRGYITKATRENLLVLPKSHANDALAIAHGPQGFRAEHLPNIRQADRLYTIRPVRHHNRQLHKATILKGGVRKTNQAEKYICGFRLYDKVLYNGIECFVWGRRTSGSFLLRQLNGEKVKDGVSYKHLKLLERSQSYLVA

SEQ ID NO: 11484 - protein, 413 aa, Moorena sp.; identical to SEQ ID NO: 6473

SEQ ID NO: 11485 - protein, 632 aa, unidentified
  REGION 1..632: note = Human gut metagenome
MSVAVVSKTGMLLMPTSEYRARKLLKSKKAIIHGYHPFTIQLTERGTGYIQPVELCMDTGYIHIGTSVKSEKHEYLGEQIDTLTDERRKHDACRMYRRQRRNRKRYRQPRFNNRERDDGWIAPSLEHKKTIHIQAISRICKVMPVTDITLEMGNFDTQVLKAREEGKPLPQGLDYQHGERYSVTTLREAVFLRDGYTCQCCGRTIKDGAILHAHHVVYRSQGGTNRISNLITVCDKCHTPANHKPGGKLYGWKPKVASFKGATYMTTIRWKLYNEVKVLFPDIDIHIAYGAETKERRRAFDITKSHVNDAFVMGQFHPKHRSKPVCYKKKRRNNRCLEKFYDAKYIDSRDGKKRTGQELFNGRISRNHKKDSKNLHQYRRQKISAGKRAIRKPELVHIPQLKQKATVGYSVEAIVKVLDGVTNSQVDVTGTTKPLLECITSGVIRGAVAMVGCNNPKIRPDYAHIELMKKCIANDIIIIASGCSAQAAAKAGLMDKSARDLCGAGLKRVCELADIPPVLHMGSCVDISRMMILAAELAKDAGLQINQLPVVGCAPEWMSEKAVSIGNYVVGTGIDTFLGVDPYVSGSSEMCELLTEGTRKWTGAAYTVETDIEKLVDLMIERIEEKRTALGI

SEQ ID NO: 11486 - protein, 465 aa, unidentified; identical to SEQ ID NO: 3070
  REGION 1..465: note = Human gut metagenome

SEQ ID NO: 11487 - protein, 440 aa, unidentified
  REGION 1..440: note = Human gut metagenome
LVSGQLIMAWEAIQTRRIKPHDIGEGTLRRHAAGTVSFPVLCKNRKETLMSVLVIGRNGRALMPTNPRKARLLLKKKTASVVCRHPFTIQLLYKTGCATQEGCIGIDTGSQHIGVGITCGDRVILKDEHALRSSMEKRSLLATRAVMRRGRRYRKVRYRKPKWRHHTKRMYFEKANRRGRHWRKVKTTTQSPRPKGWLPPSLQSKCDHHFRIIDRYLKYLPDPITRNLVIEAGRFDMARMNDPTIHGEMYQRGPMYDAENLRAYIFARDNYQCACCKAKAGTTRKADGTTVKLVAHYILFRSRGATDNPKYIISVCDHCHTTKAHQPGGILYSWMENNKKVARGLRDAVFMNILRKRLFARYPQSAFTYGNITATDRKQLRLPKSHANDAVAISLFGKEASTVKNICQTMHYKQIRKSKRSLHEAIPRKGRKNPNTKAVR

SEQ ID NO: 11488 - protein, 427 aa, Nostoc sp.; identical to SEQ ID NO: 2670

SEQ ID NO: 11489 - protein, 515 aa, unidentified; identical to SEQ ID NO: 8359
  REGION 1..515: note = Human gut metagenome

SEQ ID NO: 11490 - protein, 426 aa, unidentified; identical to SEQ ID NO: 3614
  REGION 1..426: note = Human gut metagenome

SEQ ID NO: 11491 - protein, 515 aa, unidentified
  REGION 1..515: note = Human gut metagenome
MATVYVLNKDSKPLMPTTRCGHVRYLLKEKKARVVRANPFTIKLLYETDDVVQPLYLGIDPGRTNIGVAVAKGDGTAVFTAHLETRNKEIPKLMAKRKEYRQGRRHYRRCKRQRRAAAHGTLSKRCKKQDTAQGSNISERAQKIGVFERNLPGCEKPVLCIGIKNKEARFNNRVRPAGWLTPTANQLLLTHINFVKKICKFLPISDVVLEINKFAFMALDNPNIQKWQYQQGPLYQKGSLENAVSEQQDHHCLFCKQSIVHYHHVVPQSENGSDTIGNIVGLCTKHHDLVHKDTAWQKKLAKKKTGLNKKYGALSVLNQIIPALTKELSSLFPKHFFATNGKSTYDYRAAHGVSKDHWLDAYCIACSVLPDGCFDNTVNSRIPHELRQFRRHDRQVCHQQNAKRKYYLDRKLVAINRHKATEQKTDSLEEYRNNGGATDKLVVKEHKPTSKRLNRILPGALMTANGKLNVMMASKGLHNGIPDYYVFADNSEAKPTKYTLINKNKGIVFVLNSVS

SEQ ID NO: 11492 - protein, 385 aa, unidentified
  REGION 1..385: note = Human gut metagenome
MATVYVLNKDSKPLMPTTRCGHVRYLLKEKKARVVRANPFTIKLLYETDDVVQPLYLGIDPGRTNIGVAVAKGDGTAVFTAHLETRNKEIPKLMAKRKEYRQGRRHYRRCKRQRRAAAHGTLSKRCKKQDTAQGSNISERAQKIGVFERNLPGCEKPVLCIGIKNKEARFNNRVRPAGWLTPTANQLLLTHINFVKKICKFLPISDVVLEINKFAFMALDNPNIQKWQYQQGPLYQKGSLENAVSEQQDHHCLFCKKAIEHYHHVVPRSENGSNTIANIVGICIKHHDLVHKDTAWQKKLAKKKTGLNKKYGALSVLNQIIPALTKELSFLFPKHFLRPMAKVPTTIVQHTELVKTTGSMPIVLLALFYRMVALTIQSTVVFPMN

SEQ ID NO: 11493 - protein, 415 aa, unidentified; identical to SEQ ID NO: 6534
  REGION 1..415: note = Human gut metagenome

SEQ ID NO: 11494 - protein, 431 aa, unidentified
  REGION 1..431: note = Human gut metagenome
MPDKVYVISRLGHPLMPCSPAKARHLLDDKKAKVVKRMPFTIRLLYGSTKYIQPIILGVDAGSKTIGLSASTAKEEVFAAEVMPRNDVVENLSTRREFRRARRNRTTRYRKPRSDNRVRSNHERWLAPSVKVKIQEHITSIKRVCTILPISKVVIETAEFDLQLLKAIQEGKPIPEGEDYQKGEMYGSYNVCQYVLWRDNYTCICCGVRGTPNNPVRLHVHHFESRKYGGNAPDNHGTLCDDCHKKFHLGIITDVKLKTRRRQSTRDAAFMGIMRKALMWRLRTELFIPVAETKGYITKATSEKLLVLPKSHTRDALAIAQGRHGFGIKEYAYVEPANHIYTVRPVRHHNRQLHKASILKGGIRKRNQASKYVFGFRLYDKVLYQGKACFVWGRRTSGTFLLRTIDGIKVKDGVSYRNLTLLERSSNYLIA

SEQ ID NO: 11495 - protein, 413 aa, Moorena sp.; identical to SEQ ID NO: 2636

SEQ ID NO: 11496 - protein, 518 aa, unidentified; identical to SEQ ID NO: 7468
  REGION 1..518: note = Human gut metagenome

SEQ ID NO: 11497 - protein, 570 aa, Streptomyces sp.
MRHVRSLNSNVTHTTPLSPKSLRAPASGATCPRRPHVRVISPDPCSLGNPRCVASGTSREGRSLAPSYRVTSPGHHDLRISRGASMTTFFTGEQTHQAVLPQQPALKSAGADTPGSRDETAHGLPDPKPGTGVGHGRGETGAVRTRTRRRHARRLDPGSKATGIAVTDERDEVGAKGRTALVRRGLVSIELRHRGRQIHSGMVRRAGHRRRRRSANLRYRAPRRDNRTRPDGWLPPSLRHRIDSTMSLVARLCRYAPVLEIHVEQVAFDTALIAAAVSSREQDFSERTHAGSEIREFLLAKWERSCAYCGATGVLLNIEHVRPRSRGGSDRVANLVIACVPCNQAKGAARIDEFLADRPARLERVIAQLRRPLHDVAAMNTTRLLLVKTLATHGVAVHTWSGGRTSWNRLAMGRPKSHTLDALATGVIDLERGDAVVRIPAQILVVRSTGRGSYARTTPDRYGFPRLQRPRRKIHHGFSTGDLVAAVVPKGKWAGRWVGRVSVRAGGQHRITTLTSRFDVSHRNLRLLQRADGYTYGFADEIRLSEEHGPAYSGRTLKGGDPGNVRTPDA

SEQ ID NO: 11498 - protein, 274 aa, unidentified
  REGION 1..274: note = Human gut metagenome
MVYVQDIDGKPMMPTTRHGKVRRLLKDNKAVVVNTCPFTIKLTYKTSDYKQEIVLGVDAGTKHVGLSATTKSKELYSGEVILRNDVVELLSTRRESRRARRNRLRYRKPRFENRVKSKRLGWVAPSVRHKVDAHIRVIDNICSTLPISRIIVEIAQFDTQKIKNPDISGNEYQEGDQLGFWNVREYVLARDGHKCQHCKGKSKDPILNVHHIESRKTGGDSPSNLITLCETCHKEYHKGNIDLKVKRGKSLRDAAVMGIMKWKLYEELKSRYDN

SEQ ID NO: 11499 - protein, 414 aa, unidentified
  REGION 1..414: note = Human gut metagenome
MPCSPAKARLLLKEKKAIVKRRTPFTIQLTIATGETKQPVGLGVDAGYKHVGLSASTDKAELYASQVELRQDITDLLSARRALRRARRNRKTRYRAPRFNNRIRTKRKGWLAPSVENRINAHLSRIEAVLRLLPVTKITVETASFDMLLKKNPDIAGKEYQEGEQLGFWNVREYVLFRDGHVCQHCYGRSKDPVLNVHHLESRRTGGDSPGNLITLCETCHEALHRGEIALKTKRGHSFRAEAFMGMMRWEVLNRLKASHSELEVNNTYGYRTKHARIVNGIDKSHCADAFCIAGNLGAERLCEFFFQKQTRRNNRQIHKLSILKGGIRKRNQAPFEIKGFRLFDKVACKGEESFIFGRRSSGYFDVRKLDGTRISAGISYKKLRLLEKRRTYLTEIRKEEALPPLPEGRGLRA

SEQ ID NO: 11500 - protein, 426 aa, Moorena sp.
MSKIFVIDSDERPLDPIHPAQARQLLRNKKAAIFRRFPFTLILKEARPEAPTQPLRLKIDPGAKYTGMALVNDSTGEVVFAAELKHRGFAIRDSLTSRRQLRRGRRNRKTRYRQPRFLNRTRPKGCLPPSLQSRIENIKTWVAKLRKYVPLEAISQELVRFDMQLIQNPEIQGKEYQQGTLAGYETREFLLEKWNRQCAYCGIKDVPLQIEHIHARAKGGSNSITNLTLSCSKCNTKKGTKDIKDFLKKDSQRLDKILKQAKRPLADAAAVNTTRFALLEVLRATSLPVEIGSGGLTKFNRNQQKLPKTHWLDAACVGTSTPILNIKGIKPLMITANGHGTRQSCRTDKYGFSNRHCSRTKFHFGFQTGDIVKAVVTSGKKIGKYVGRIATRATGSFNISTKNGLVQGISYKLCKQIHKKDGYSYA

SEQ ID NO: 11501 - protein, 529 aa, unidentified
  REGION 1..529: note = Human gut metagenome
MSTIYVLNKDGKPLMPTTRGGHVRHLLKEQKARVVQSNPFTIQLLYETNDVVQPLYLGIDPGRTNIGVAVVKADGTAVFAAHLETRNKKIPKLMQDRKKARRARRTNGRRCRRQRRAKANGTISKKCVKQDTAQSKNPSKRAKEIGVIKRHLPGCKKDVLCVGIKNKEAKYTNRARLEGWLTPTANQLLQTHINLVKKIQKFLPISDVVLEVNKFAFMRLDNPNIQKWQYQRGPLYQKGSLENAVSEMQEHHCLFCEKPIEHYHHVVPKSENGSNTIANIVGLCAEHHNLVHKDVAWQEKLVEEKTGLNKKYGALSVLNQIIPALTKELSFLFPEHSFVTNGKSTYDYRATHGVSKDHWLDAYCIACSVLPSDVCDSNINNHMPYELKQFRRHDRRVLHKANTSRVYTLNGKKVATNRHKAAKQTADSLEEFRQSHPDDVCKLKVKEHHPAYRNLNRNYPGSVFFVGKQVHVMQGIASSKDGKATKYNDTSATTIAAGKCEFVAKNSGILFVQCKFRKVFSDETTKKLQ

SEQ ID NO: 11502 - protein, 413 aa, unidentified; identical to SEQ ID NO: 2636
  REGION 1..413: note = Human gut metagenome

SEQ ID NO: 11503 - protein, 417 aa, Moorena sp.
MRGQCLMPCSPRKARVLLREKKAVVKQKSPFTIQLTIPTGETKQEVTLGVDAGSKHIGISVTTAKTELFASEVELRQDVTGLLADRRALRRSRRARKTRYRAPRFNNRVHSKHKGWLAPSIENHIQAHLSRIEAVLKLFPVTKIVVETASFDIQKIKNPAITGNGYQQGELLDFFNLREYILWRDNHTCQHCKGKSKDKVLQVHHLESRRTGGNATNNLITLCKTCHEKSHTGEITLNIKRGRSFKDAAFMNIMRPAFVARLRKAHPGMLIEETYGYITKYQRIKLKLPKTHCADAFCIAGNLHATRSDVYLYQKQTRKHNRQIHKVNAIKGGIRKLNQAPYIVKGFRLFDKVKCFGKKCYGKEGFIMGRRQDGGFDIRTIDGQHISKSVSPKKLKLIEKRKTFLTAIKKEGASSPV

SEQ ID NO: 11504 - protein, 512 aa, unidentified
  REGION 1..512: note = Human gut metagenome
MSTVYVLNKDGKPLMPTTRCGHVRHLLKEQKARAVASKPFTIQLLYETDDVVQPLYLGIDPGRTNIGVAVVKTDGTAVFTAHLETRNKEIPKLMKKRKDSRRARRTNGRRCRRQRRAKANDTISKKCVKQDTAQSGSVSKRAKKIGVIKRHLPGCEKEVLCIGIKNKEAKFSNRTRPESWLTPTANQLLQTHINLVKKIQKFLPISDVVLEINKFAFMQLDNPNVQKWQYQQGPLYQKATPEEAVSEMQEHHCLFCKKPIAHYHHVVPQSENGSNTIGNIVGLCTKHHDLVHKDTTWQKKLAKKKTGLNKKYGALSVLNQIIPALTKELSSLFPKHFFATNGKSTYDYRAAHGVSKDHWLDAYCVACSVLPNDVCDSGINSRVPYELKQFRRHDRRALHKKNMSRVYTLNGKSVATNRHKAIKQTTDSLEEFRQRQPNDVCKLKVKEHHPEYRNPKRSFPGCMFLVGKQTHVMQGTSGSHNGKADGYYDTNGNSYSSGKCKFVAKNEGIVFA

SEQ ID NO: 11505 - protein, 454 aa, Streptomyces sp.; identical to SEQ ID NO: 9429

SEQ ID NO: 11506 - protein, 414 aa, unidentified
  REGION 1..414: note = Human gut metagenome
MPCSPAKARLLLKEKKAIVVRRTPFTIQLTIATGESKQPVSLGVDAGYKHVGLSASTEKAELYASEVELRPDVSDLLSARRTLRQSRRNRKTRYRAPRFDNRIRTKRKGWLAPSVENRINAHLSRIGAILRLLPVTKITVETASFDTQLLKNPDISGKEYQEGEQLGFWNVREYVLFRDGHACQHCHGRSKDPVLNVHHLESRRTGGDSPGNLLTLCETCHKALHRREIKLKTKRGQSFRAEAFMGIMRWEVLNRLKASHPEQEVQNTYGYRTKHARIENGIAKSHCADAFCIAGNLGAERLGEFFFQKQTRRNNRQIHKLSVLKHGLRKRNQAPFEIKGFRLFDKVACKGEEGFIFGRRSSGYFDVRKLDGTHISAGISYKKLRLLEKRQTYITEIRKEEALPPLSEGRGLRA

SEQ ID NO: 11507 - protein, 442 aa, Sutterella sp.; identical to SEQ ID NO: 3234

SEQ ID NO: 11508 - protein, 424 aa, Phormidium sp.; identical to SEQ ID NO: 4427

SEQ ID NO: 11509 - protein, 501 aa, unidentified; identical to SEQ ID NO: 9337
  REGION 1..501: note = Lachnospiraceae bacterium UBA2901

SEQ ID NO: 11510 - protein, 413 aa, unidentified; identical to SEQ ID NO: 5705
  REGION 1..413: note = Human gut metagenome

SEQ ID NO: 11511 - protein, 396 aa, unidentified; identical to SEQ ID NO: 4508
  REGION 1..396: note = Human gut metagenome

SEQ ID NO: 11512 - protein, 493 aa, unidentified; identical to SEQ ID NO: 2644
  REGION 1..493: note = Human gut metagenome

SEQ ID NO: 11513 - protein, 309 aa, Moorena sp.
MARFLNRTASKKEGWLAPSVKHKVDSHLKVIGNVHRILPISRIVIETASFDIQKIRNPEISGREYQQGEQLGFWNTREYVLWRDNHECQHCHGKSKDRILNVHHKESRKTGGDSPGNLVTLCETCHKSHHAGRIQLKLTPNKSYRHASFMGIMRWHVYNSLKELYPEVSMTYGYITKNNRIRNSIEKTHSTDAYCISGNVNAMRIDEIYYQVFKRKHNRQIHKANFLKGGKKKPNQSAYEVKGFRLFDHVRYRDEECFIFGRRTSGYFDLRKLDGSIVHRSASFKELKLLKRQNTILIERKGCNGVLLS

SEQ ID NO: 11514 - protein, 369 aa, Lactobacillus sp.
VVSQEKVLCQSEVELRQDVHKNLYTRKIYRGGRRNRKTRYRQSRFLNRVHGKRDGLWLPPSVKGKVNHNIAWIKRYLAVLPNPDLHVEVGKFDMAKMLNPQISGKQYQEGSLKGWKNYEYYVLARDKYTCQLCRKHGKGVKLAVHHIIYRSQGGTDRVSNLITLCTDCHTTKNHQPGGKLYKWMKAKKKVTKYLKGATFMNILRKRIMTAFPEASFQYGSQTYVDRKNLNLPKGHFMDAIAISGIKSVGQMPETVTMISQFRKKKRSLHEATARKGRKQPNKAAKRNAKNTKYARGIWLNDYVRIIENNAKGYVQGFKSNGYAVYLTDGLGNYVLNNGKKNINRKQCRLIMHNGNWQKAEQKLSLYEFK

SEQ ID NO: 11515 - protein, 413 aa, unidentified; identical to SEQ ID NO: 2636
  REGION 1..413: note = Human gut metagenome

SEQ ID NO: 11516 - protein, 419 aa, unidentified; identical to SEQ ID NO: 4877
  REGION 1..419: note = Human gut metagenome

SEQ ID NO: 11517 - protein, 427 aa, Moorena sp.; identical to SEQ ID NO: 2799

SEQ ID NO: 11518 - protein, 417 aa, unidentified
  REGION 1..417: note = Human gut metagenome
MPCSPAKARLLLKEKKAIVKRRTPFTIQLTIATGEAKQPVTLGVDSGYKHIGLSATTEKAELYASQVELRQDITDLLSARLALRRSRRSRKTRYRAPRFNNRVASKRKGWLAPSVENRITAHMSRVEAVMRVLPVTAITVETAAFDTQLLKNPDIAGEAYQQGEQLGFWNVREYALFRDGHVCQHCRGKYKDPILNVHHIESRRTGGDAPNNLITLCETCHKAFHRGEIKLKVKRGKSFKAATFMGIMRWTLFERLKKAHPELSVRNTYGYLTKHKRISHGIAKSHCADAYCIADNLGAKRLSGYLFQKQTRKHNRHIHKLSILKGGLRKKNQAPYEVKGFRLFDKVICKGEEAFIFGRRTSGSFDVRRLDGTRISAGISYKKLRLLEPRTTYLTEFRKEAALPPLHKCRGFRAEFL

SEQ ID NO: 11519 - protein, 430 aa, unidentified; identical to SEQ ID NO: 4504
  REGION 1..430: note = Human gut metagenome

SEQ ID NO: 11520 - protein, 414 aa, unidentified; identical to SEQ ID NO: 2588
  REGION 1..414: note = Human gut metagenome

SEQ ID NO: 11521 - protein, 474 aa, unidentified; identical to SEQ ID NO: 9173
  REGION 1..474: note = Mouse gut metagenome

SEQ ID NO: 11522 - protein, 427 aa, Aphanizomenon sp.; identical to SEQ ID NO: 9845

SEQ ID NO: 11523 - protein, 413 aa, unidentified
  REGION 1..413: note = Human gut metagenome
MTSYAFVLDANGKQLAPTKEQKAWFLIRKKRATLVSKYPMVIQLKKKIPDKEIYKDEIRCGIDDGGLHVGIALVQKCQTRNKVVFKGTIEHRNDVKHLIDVRRGYRRYHRYHKRYRPARFNNRSSSKREGRIAPSILQKRQAIIRVINRLNKWINITNYWLEDVAIDIRALTDGHKPYWWQYQKSNRLDENIRKAVILRDGRKCMECGKSNCRLEVHHIKPRRLKGSSTLGNLITLCTKCHQKTEGVEELYMDKYFALLNSSDNKNLDYTQHVMIGKKWLRKQLSNLGLLYLTSGGDTANKRIDWDITKSHSNDAVCITDLRPDTCEIKEWIIKPMRRQSKAKTDNVFGIKHRDLVEYTFGNGETHRGYVTALYPEQNALNFQSLTKHCKKVNARKCKVLWKYSKIYWLDNVV

SEQ ID NO: 11524 - protein, 465 aa, unidentified; identical to SEQ ID NO: 3856
  REGION 1..465: note = Human gut metagenome

SEQ ID NO: 11525 - protein, 465 aa, unidentified; identical to SEQ ID NO: 5478
  REGION 1..465: note = Human gut metagenome

SEQ ID NO: 11526 - protein, 442 aa, unidentified; identical to SEQ ID NO: 6360
  REGION 1..442: note = Human gut metagenome

SEQ ID NO: 11527 - protein, 413 aa, unidentified; identical to SEQ ID NO: 2636
  REGION 1..413: note = Human gut metagenome

SEQ ID NO: 11528 - protein, 428 aa, unidentified
  REGION 1..428: note = Human gut metagenome
LKVFVLNMRGQPLMPCSPAKARHLLKAGKAAVRRRTPFTIQLRIATGETKQSVTLGVDAGAKHVGLSAATEKEEVFASEVELRQDITGLLAARLSLRRERRQRKTRYRAPRFLNRVRSKHNGWLPPSVENRIQAHLSRIDAICGLLPVTKIVIETASFDIQKIKHPDVEGTDYQQGDQLGFWNVREYVLFRDGHVCQHCHGHAKDKILNVHHLESRQTGGDAPNNLITLCERCHKACYAGKIKLKVKRGQSFREEAFIGIMRWTLLDRVRKAHPGLPVENTYGYLTKNTRITLGLPKAHCVDAYCIAGNLKAVRRGVYLHQRQVRKHNRQIHKCTVLSKTLKDGTKIGYRKLNQTPHLVKNFRLFDKVRCLGQTGFIFGRRSSGYFDVRRLDGVKISSCINYRKLTLLEKRGTCLTELRKEDGASSPV

SEQ ID NO: 11529 - protein, 430 aa, unidentified; identical to SEQ ID NO: 4504
  REGION 1..430: note = Human gut metagenome

SEQ ID NO: 11530 - protein, 412 aa, unidentified
  REGION 1..412: note = Human gut metagenome
MFVYMVYVQDINGKPMMPTTRHGKVRRLLKDKKAIVVNLCPFTIKLTYVTSDYKQEIVLGVDAGTKHVGISATTKSKELYSSEVILRNDIVDLLSTRRELRRTRRNRLRYRKPRFNNRVKNKRPGWIAPSVRYKIDAHIRVIDNVCSILPISCIVIEVAQFDTQKIKNPEISGKEYQEGNQLDFWNIREYVLARDGHKCQYCKGKSKSKILNVHHIESRKTGGDSPSNLITLCEDCHKEYHKGNIDLKIKRGSSLRDAAVMGIMKWKLYEKLRSRYDRVSMTFGYITKHNRIKHGIEKSHVSDAFVISKNFNAIRLGYYYKVKLVRRHNRQIHKQKILKGGVKKLNQSPFEVFGFRLFDRVVFENSYYFVFGRRKTGNFNIRDIDGRNKRDITCKKLRLSRCKRFMIQKVIN

SEQ ID NO: 11531 - protein, 425 aa, Moorena sp.
MFVFVLSKDKRPLSPCHQARARKLLKQGKAAVYRKYPFTIILKEEVNPNKPKPCRIKLDPGAKVTGIALIQGDRVIFGAELEHRGFRIKDSLESRRQLRRGRRGRKTRYRKPRFLNRTRPKGWLPPSLQSRVENINTWVNRLRKLCPVDSISVELVRFDTQQLENPEISGVEYQQGTLFGYEVREYLLEKYNRTCQYCGAKEVPFEIEHIVPKSKGGSDRVSNLTLSCHKCNQKKGNRSVEEFLKGKPEVLKRVKANAKKPLRDAAAVNAARWAVFNRLKASGLEVEAGSGGLTKFNRTKHELPKTHWLDAACVGKSTPSKLRMLVQKPLKIKATGHGTRQMCRTNKYGFPTRYVPHKKDVKGFQTGDIVKAVVTKGKKTGIYVGRVAVRSTGSFNISTAKGVIQGINHKYCRQIHKKDGYSYAT

SEQ ID NO: 11532 - protein, 535 aa, unidentified; identical to SEQ ID NO: 6116
  REGION 1..535: note = Human gut metagenome

SEQ ID NO: 11533 - protein, 408 aa, unidentified; identical to SEQ ID NO: 5302
  REGION 1..408: note = Human gut metagenome

SEQ ID NO: 11534 - protein, 456 aa, unidentified
  REGION 1..456: note = Human gut metagenome
MSTCVCVLSNNGERLMPTFRLGKVRRLLKDGKAKIVKHHPFTIQLLYDSKTNTQPIEICEDVGYNYIGISAKSKSHEYVSAQYDTLQDEKEHHDDCRKMRRTRRNRLRYRKPRFDNRKCDKGWLAPSLEHKKQLNISLIERYVSVIPITHATVEVGSFDTMLLQAIQKGKAKPESADYQKGPHYNLATLREAVFYRDNYTCQVCKRKIADGAILHMHHMFYWKGRHGYQLDELATVCEKCHTPANHQKGGKLFGFGEGKEFADLSGAAFMNAVRWQIVDALYTTYDKEFVTITYGAMTKEKRIALQLEKTHNNDAYAMGDYHPACRCKFRHYQKRRRNNRVLEKFYDATYIDARTGNKAKGKELFNGRINRNHKKDSENLHKYRSKKVSKGRRSIRRRRYAIQSYDTVRLEGKTYITSGCHNKGTRLLIPVNGKSKSVAISKVQVVCHAGAWIQIS

SEQ ID NO: 11535 - protein, 389 aa, unidentified
  REGION 1..389: note = Human gut metagenome
MLRSGMAKVIKKCPFTIQLQYESERNVQPVSLGVDAGSKHIGISATTKTKVLYESDVELRDDIVKLLATRRQLRRSRKTRYRPARFDNRKRKEGWLAPSIRQKIGSHLTVVANVCKILPINQIIVETASFDIQKIKNPDIQGTEYQQGEQMDFWNVREYVFFRDGHTCQCCKGRSKDKILNVHHIESRKTGGNAPNNLITLCETCHKGYHNGTVILPKNIKRGMQFKDAAFMGIMRWAFYNALKEQYEPAIPVSMTYGYLTKNTRIEHGLLKEHYIDARCISGNPDAVSDGTYYYQKKVRCHNRQIHKQTILKGGIRKSNQAEYLVKGYRLFDKVSYQGREYFIFGRRKTGFFDIRTLSGEKVRKGSISVKKLTFADTRKNYLIERRIV

SEQ ID NO: 11536 - protein, 455 aa, unidentified
  REGION 1..455: note = Human gut metagenome
VIKSSEGKERCPLHQTPSNIDEGCLLPERAWRQNLRVFVINQRGKPLMPCSPAKARVLLREKKVRVKRRTPFTIQLTTATGEARQDVSLGVDAGYRHVGLSASTEKAELYASEAVLRDDITDLLSARLALRRARRNRKTRYRAPRFSNRVHSKNKGWLAPSVEHKIASHLKLVENVCRLLPVTNITVETASFDMQAIKNPDIKGTEYQQGEQLGFWNVREYVLWRDGHQCQHCRGKSGDPILNVHHLESRRTGGDAPNNLVTLCETCHKAYHAGRIDLKLKRGRSMRAEAFMGIMRWTFFYRLKEIHADKTVENTYGYLTKHTRITHGIEKSHCADAYCIAGNLSAERLPEYLYQKQVRKHNRQIHKLTIGRGGIRKRQQTPFEVKGFRLFDKVRLGGEEGYIFGRRSSGYFDVRRLDGQKLSAGVSFKKLHLLEKRKTYLTVLLPRLKTKVSAP

SEQ ID NO: 11537 - protein, 490 aa, Anaerostipes sp.; identical to SEQ ID NO: 6170

SEQ ID NO: 11538 - protein, 546 aa, Streptomyces sp.; identical to SEQ ID NO: 8861

SEQ ID NO: 11539 - protein, 394 aa, unidentified
  REGION 1..394: note = Human gut metagenome
MVTVQQSTHHLPFGRVFIRRNLFMVYVISQDGKPLMPCSDPIARLLLKQGKAKVKKREPFTIKLTYETTNYTQGLTLGVDTGSGTIGTAVSKDNGDIVYMSEVVVRNDITDKMTQRAKYRRNRRNRKTRYRKARWLNRASSIKKDRFSPTMQSKLHSHVREIEYIQSILPVTEMVFETGQFDMHLMKNPSLANPKVRPWGYQKGANYGFENTKAMVLNRDNYTCQCCKGKHKDSKLEVHHIVFRSQGGSDEESNLLTLCHTCHKDLHSGKINPKLSGKVKGNLKYATQMNSIRKQLFRCYPNAIETFGYVTKVNRLHLGVAKEHYYDACTIATQGNAFNVKSNLYKKKCVSDGDFQKTKGIHSEQPIVTDKICGFRKFDKVRYFGNDYFIKGRM

SEQ ID NO: 11540 - protein, 447 aa, Petrotoga sp.; identical to SEQ ID NO: 4357

SEQ ID NO: 11541 - protein, 424 aa, Moorena sp.
MRVFVLDKNRKPLDPCRPARARIMLKLGRAKVVRRYPFTIILPDKSLENCVTHKHQLKIDPGAKTTGLAISQNNKVIWGAELTHRGFQIKDALTDRRQLRRSRRHRKTRYRKPRFLNRKRPEGWLAPSLMSRVHNILTWTKKLIKFCPITGISQELVRFDTQKMENPEISGVEYQQGTLYGYELREYLLEKWHRQCAYCGAANTPLEIEHIKPLARGGSNRVCNLAIACHKCNQTKGVQEIEQFLYGKPSVLKRVLAQAKRPLADAAAVNTTRWKLYNELKSTDLPIETGSGGSTKYNRCRQNLPKTHWLDAANVGQVDKLRIEDYQPLLITAKGHGTRQMCRTNKFGFPSRYVTRLKFVKGFQTGDIVKAIVTKGKKIGTYTGRVATRKTGSFNISTKNGLIQGISHQYCTIVHRKDGYSYSF

SEQ ID NO: 11542 - protein, 417 aa, unidentified
  REGION 1..417: note = Human gut metagenome
MPCSPAKARLLLEEKKAIVKRRTPFTIQLTIATGEAKQPVTLGVDSGYKHIGLSATTEKAELYASQVELRQDITDLLSARLALRRSRRSRKTRYRAPRFDNRVASKREGWLAPSVENRIAAHMSRVEAVMQVLPVTAITVETAAFDTQLLKNPDITGAAYQQGEQLGFWNVREYVLFRDGHVCQHCRGKSKDPILNVHHIESRRTGGDAPNNLITLCETCHKAFHRGEIKLKVRRGKSFKAETFMGIMRRTLFERLKKAHPELNVRNTYGYLTKHKRISYGIAKSHCADAYCIADNLGAKRLEGFFFQKQTRKHNRQIHKLLILKGGLKKKNQAPYEVKGFRLFDKVICKGEEAFIFGRRTSGSFDVRRLDGTRISAGINYKKLRLLEPRTTYLTEFRKEAALPPLHECRGFRAEFL

SEQ ID NO: 11543 - protein, 431 aa, unidentified; identical to SEQ ID NO: 2697
  REGION 1..431: note = Human gut metagenome

SEQ ID NO: 11544 - protein, 462 aa, Halomonas campaniensis; identical to SEQ ID NO: 6329

SEQ ID NO: 11545 - protein, 445 aa, unidentified
  REGION 1..445: note = Human metagenome
MKGKLLMVFVLNRSKKPLDMITNAEARILLRKKLAVIHKVYPFTIRLRDNSCGSKDRAYTVKIDPGSRHTGIAITDDKNAVVMLAEIEHRGHLIKKDLVSRKAVRYSRRQRKTRYRPARLLNRTKPEGWLAPSVKSRADNVINFIKKYKKLINIDKVMIENVSFDTAQMSSNTNLIGTAYQQGPLYQKELRSFIFSRSNGKCVYCGAKATEIDHTIARANGGTDSTYNLVAACRACNKKKSNSSLKEFGKLMNKDYSHLEPKKLPKDAAIVQSAREYTIRKIKDIIPNTISYAAWMTKYNRDQLGLPKEHYYDALSVGNIQNYKFLTNKVLVISAKGRGSRQMCRVDKYGFPRASAKASKVVRGFQTGDIVKAVVTKGPKAGEYLGRVAVKSDGYFNIQTKAKTIQCIGHEYCHLIQRGDGYSYNYKESDSLSGKNNRVSIASIR

SEQ ID NO: 11546 - protein, 374 aa, unidentified
  REGION 1..374: note = Human gut metagenome
VVIQLKKKIQENEICKDEIRCGIDDGGLHVGIALVQKCKSKNKVVFKGTIEQRNDVKHLMEVRRNYRRYHRYHKRYRQARFDNRKSSKRKGRIAPSILQKRQATIRVINRLNKWINITNYWLEDVSIDIRVLTDGYKSYSWQYQKSNRLDENIRKATILRDGGKCMECGKSNCRLEVHHIKPRRRNGSNTLDNLITLCESCHQKTEGQEELYMDRYFSLLKSSDNKNLNYAQHVMIGKMWLRKQLSGLGVLYLTSGGDTANKRIDWNIEKSHTNDAVCITDLQPDTCDIKEWAIKPMRRQSKAKTDHVLGIHHRDLVEYTFKNGETHRGYVTALYPDQKAINFQSQTKHCKKVNARKCKLLWNYSKIYWFENAS

SEQ ID NO: 11547 - protein, 416 aa, unidentified; identical to SEQ ID NO: 7785
  REGION 1..416: note = Human gut metagenome

SEQ ID NO: 11548 - protein, 387 aa, unidentified
  REGION 1..387: note = gut metagenome
QLTIATGETKQPVSLGVDAGYKHVGLSASTENAELYASEVELRQDVSDLLSARRALRQSRRNRNTRYRAPRFDNRIRTKRKGWLAPSVENRINAHLSRIETVIRLLPVTKITVETTSFDMQLLKNSDIAGKKYQEGEQLGFWNVREYVLFRDGHVCQHCHGRSKDPVLNVHHLESRRTGGDSPGNLITLCETCHKALHRGEITLKAKRGQSFRAETFMGIMRWEVLDRLKASHPKLEVQNTYGYRTKHARISNGIAKSHCADAFCIAGNLGAERLGEFFFLKQTRRNNRQIHKLSILKGGIRKRNQAPYEIKGFRLFDKVACQGEEGFIFGRRSSGYFDVRKLNGTRISAGISCKKLRLLEKRQTYLTEIRKEEALPPLPEGRGLRA

SEQ ID NO: 11549 - protein, 506 aa, unidentified
  REGION 1..506: note = Human gut metagenome
LFLQIPQAFGCLLRLSIFPVDSSARVALSRTIPLTANTQPRETQPPVSAGETYSKRRVAYMPTVYVLNKDGKPLMPTTRCMHVRHLLKNGKARVVKSKPFTIQLLYETDDVVQPLYLGIDPGRTNIGIAVVKADGAAVFTAHLETRNKEVPKLMKKRKESRCARRTNGRRCRRQRRAKTNGTISKKCVKQTTAQNGSVSKRAKEIGVIKRHLPGCEKDVLCIGIKNKEAKFTNRARPEGWLTPTANQLLQTHINLVKKIQKFLPISDVVLEVNKFAFMQLDNPNIQKWQYQQGPLYQKGSLENAVSEMQEHHCLFCEKPIEHYHHVVPKSENGSNTIANIVGLCTEHHNLVHKDATWQKKLAKEKVGLVKKYSALSVLNQIIPALTKEMNSLFPKHFFVTNGKSTYDYRTAHGVSKDHWLDAYCIACSVLPNDVCDSNINSHVPYELKQFRRHDRRVLHKANMSRVYTLNGKTVATNRHKAIKQTTDSLEEFRQSHPGDVCKLKVK

SEQ ID NO: 11550 - protein, 414 aa, unidentified
  REGION 1..414: note = Human gut metagenome
MPCSPAKARLLLKEKKAIVKRRTPFTIQLTIATGESKQPVTLGVDAGYKHVGLSASTEKAELYASEVELRQDVSDLLSARRALRQSRRNRKTRYRAPRFNNRLRTKRKGWLAPSVKNRINAHLSRIEAVLRLLPVTKISVETASFDMQLLKNPDIAGKEYPEGEQLGFWNVREYVLFRDRHVCQHCYGRSKDPVLNVHHLESRRTGGDSPGNLITLCETCHKALHRGDITLKAKRGKSFRAEAFMGIMRWEVHNRLRALHPGIEVSNTYGYRTKHARIANGIAKSHCADAFCIAGNLGAERLCEFFFQKQTRRNHRQIHKLSILKGGIRKRNQAPFEVKGFRLFDKVACQGEEGFIFGRRSSGFFDVRKLDGTRISAGISCKKLHLLEKRRTYLTEIRKEEALPPLPEGRGLRA

SEQ ID NO: 11551 - protein, 427 aa, Calothrix sp.
MSKIFVLDTEERPLDPIHPAHARQLLRNKKAAVFRQFPFTIILKESRPESAVSSLRLKIDPGAKFTGIALVNDSTGEVINAFELKHRGFAIRDALTCRRQLRRSRRARKTRYRKPRFLNRTRPDSWLAPSLQSRIDNIKTWVEKLRKFAPIEAIASELVRFDMQLMANPDIQGKEYQQGTLAGYETREYLLEKWGRRCAYCGVKDVPFQVEHIHPRAKGGSNSITNLTLSCEKCNTKKGTKDIKEFLKKDTSRLEKILKQAKRPLADVAAVNTTRFALLKTLKATGLPVETGSGGLTKFNRSQQKLEKTHWIDAACVGESTPILNIKGVKPLLITASGHGTRQSCRTDKYGFPSRHCSRTKFHFGFQTGDIVKAVVKTGKKVGEYVGRIATRATGSFNISTTNGLLQGISHRYCKAIHKKDGYGYSN

SEQ ID NO: 11552 - protein, 512 aa, unidentified
  REGION 1..512: note = Human gut metagenome
MSTVYVLNKDGKPLMPTTRGGHVRHLLKEQKARVVRTNPFTIQLLYETDNLVQPLYLGIDPGRTNIGVAVVKTDGTAVFTAHLETRNKEIPKLMQGRKKARRARRTNGRRCRRQRRAKANGTISKKCVKQATAQNGSVSKRAKEIGVIKRHLPGCEKEVLCIGIKNKEAKFSNRTRPEGWLTPTANQLLQTHINLVKKIQKFLPISDVVLEINKFAFMRLDNPNVQKWQYQQGPLYQKASLEEAVSEMQEHHCLFCKKPIAHYHHVVPQSENGSDTIGNIVGLCTKHHDLVHKDTAWQKKLAKKKTGLNKKYGALSVLNQIIPALMKELSSLFPKRFFATNGKSTYDYRAAHGVSKDHWLDAYCIAGSVLPNDACDNNINNRVPYELKQFRRHDRRALHKENMSRVYTLNGKSVATNRHKAIKQTTDSLEEFRQRQPNDVCKLKVKEHHPEYRNPKRNFPGCVFLVGKHTHVMQGTSGSHNGKADGYYDTNGNSYSSGKCKFVVKNEGIVFT

SEQ ID NO: 11553 - protein, 477 aa, Acidithiobacillus sp.
MLVFVMDQYDRPGHPTRRLDWVRKQVKRKWAKIVGGGISGKPAVLVLRERSFDRSKTVKRRFFAALDTGFLNVGYAVTELLADGTLGVLLKGTLNARTPDIRGLMDERRMYRRARRYHRRLNVKKKGQTPKSRPPRYESRGKRDSVTLRHGLETHVNLYARLARLAPLPDHQVRRGFESVSFDLRALAYGKPRTGSGYQVSPVGKATGEKVRTFVVRRDGGCIVCGSTEHLHDHHLRKRSQQGSNRANNQVTLCDNCHDDVHAGLIELPITDGAQWRDASMVNAVCGKLRKLARDLDLTPVPVEQSVAARRRLAMVKTHALDAVSVAVAMTDAAAVDYRDTLDMDMAQYRRHRRARIHAQRDRLYYLPGDKKPVAHNRRKRSDQGDVDSLAEFRRAHPQDMGRLKVKKAVRLYTPNRAKAPAVGGDVWNIGGRRVVAQGVHSKTNLYVPDLKRVTGKVYASPKDGVRLFWNSGMVVA

SEQ ID NO: 11554 - protein, 435 aa, unidentified
  REGION 1..435: note = Fermentation metagenome
MVFVLNKNKKPLSPCSNAVARKLLKQGKAVIHKRYPFTIRLKELKTEPTKNEEYHKQEYRLKIDYGSRYTGLAILNKNNVLWLAQLHHKTDIKSKLDARRGHRRFRRNKLRYRKPRFLNRKRKEGWIPPSLQSRVDNIQSWVNKLQKLIPLTDISYENCKFDTQLLNNPDINSVEYQQGTLYGYEVREYLLEKFNRKCIYCGKDNVPLEIEHIIPKSRGGTNRIDNLGIACHECNQRKDNMTAEEFGYPNIQKQVKQSLKDSSIINSTRWKVYDVLCNTGLNVECGTGARTKMNRINLGLSKDHHYDACCIGQSTPKELYFKTNEVLYIKNIGRGLYQRTNLDKYGFPRGYLPRQKYFFGFMSGDIIKAVVPKGKKKGVYFGSAACRSTGSFNINLLKRRIQGINYKYMKIIQKSDGYKYNLGRREIQSQNSSHS

SEQ ID NO: 11555 - protein, 566 aa, Parasutterella sp.
  SITE 122: note = misc_feature - Xaa can be any naturally occurring amino acid
MPCSPAKARLLLKEKKAIVVRRTPFTIQLTIATGESKQPVSLGVDAGYKHVGLSASTEKAELYESEVELRQDVSDLLSARRALRQSRRNRKTRYRAPRFDNRIRTKRKGWLAPSVENRINAXFQHWRRITTGRKTEETNLRVFVRNKRGKPLMPCSPAKARLLLKEKKAIVVRRTPFTIQLTIATGETKQPVSLGVDAGYKHVGLSASTENAELYASEVELRQDVSDLLSARRTLRQSRRNRNTRYRAPRFDNRIRTKRKGWLAPSVENRINAHLSRIETVIRLLPVTKITVETTSFDMQLLKNSDIAGKKYQEGEQLGFWNVREYVLFRDGHVCQHCHGRSKDPVLNVHHLESRRTGGDSPGNLITLCETCHKALHRGEITLKAKRGQSFRAETFMGIMRWEVLDRLKASHSKLEVQNTYGYRTKHARISNGIAKSHCADAFCIAGNLGAERLGEFFFQKQTRRNNRQIHKLSILKGGIRKRNQAPYEIKGFRLFDKVACQGEEGFIFGRRSSGYFDVRKLNGTHISAGISCKKLRLLEKRQTYLTEIRKEKALPPLPEGRGLRA

SEQ ID NO: 11556 - protein, 310 aa, unidentified
  REGION 1..310: note = Human gut metagenome
PRFDNRVHSKHKGWLAPSVEVKIQEHITIIKRICKILPISLVRVETAEFDTQRLKAMLAGKPLPVGTDYQLGEMYDEYNVRQYVLKRDNYTCQCCGAHTTAKKLVKLHVHHLESRKTGGNAPSNLVTLCTTCHKNLHKGKVTLDGKERGKPLRDAAFMGIMRKTLMARLKEELPIPVQGTYGYITKMRREQNDIKKGHTNDARCISKHPLAEPCSVCYRTKAIRHHNRQTHKANFSKKGIRKRSQMPYLAEGYRLWDKVLYKEQECFVSGRRSSGSFTLKKLDGTSVSKGMTFKKLRLLEPATNYLIERM

SEQ ID NO: 11557 - protein, 443 aa, unidentified; identical to SEQ ID NO: 4257
  REGION 1..443: note = Human gut metagenome

SEQ ID NO: 11558 - protein, 469 aa, unidentified
  REGION 1..469: note = Candidatus Dependentiae bacterium
MPLINISEAHVTPEMGEGKNMVLVIDNNKKPVNPCRPADARLLLKGGKAAVFRRFPFTIILNEDSLQKVRPLRLKIDPGSTTTGMALVDDKTGKVISALEISHRSKTISRSMISRASSRKSRRYRNTRYREARYNNRKTASGWLPPSFGSRIANDETWIKRFMRYSPISHISVEIAKFDTQLMQNAEISGIEYQQGALQGYEVREYLLEKFGRKCCYCGGKDRPLEIDHIVPKSRGGSNRVSNLAISCKSCNQMKSNQNAHEFGYPEVQKYAQSSLKDAAAMNITRIILLKRIETNGLPLETGTGALTKLHRMEQGLEKAHWIDAACVGISTPKKLLINDLQPLLVKATGHGSRQMCKVDKYGFPRTQSKKNKKKFGFQTGDMIKAIVKDGKKKGTHLGKVAVRSSGYFDILRPQGIVTGIKHTACRIIHKSDGYSYSYLPIIREKNRLVELMGLEPITSWMPSMRSTR

SEQ ID NO: 11559 - protein, 450 aa, Moorena sp.; identical to SEQ ID NO: 2935

SEQ ID NO: 11560 - protein, 502 aa, unidentified
  REGION 1..502: note = Human gut metagenome
MSIIYVQDRHGKPLAPTTRGGHVRRLLDSKQARVVCGNPFTIRLMYGVDPCTQGFILGIDPGRTNIGVTVAAADGTCVFSAKAETNNKDVPKRMKERKAHRQASRQGERKRRQRRARKNGTCFGERKRILPGCKEPITNHYITNTEARFMNRARTKGWLTPTANQLLQSTISLVRKVCKFLPVTDVVLELNEFAFLAMDDPGIQRWEYQKGPLYGYGSVEAAVYTQQDGHCIFCEQAIAHCHHVIPASKGGSDTLENRAGLCGGHHDLVHKEQSWTDKLAELKAGMNKRYAALSVVNQIIPRLADELGKMFPGHAFATNGWSTKQFRDAHGIPKDHNTDADCIACSILENPTIKLPEKVYELRKFRRHDRAQISRMEDRNYYLPGADPKTGKPKKVLAAKNRHKRTEQKTDSLEEFRAAHPNDVGRLMVARGGPKHKDPNRVLPGAIFQVETRSGNVEQLVLQGSHGRDKNGQPLYLEFVGQGNFRPNRCKYVARGRGWQFV

SEQ ID NO: 11561 - protein, 451 aa, Moorena sp.; identical to SEQ ID NO: 5203

SEQ ID NO: 11562 - protein, 456 aa, unidentified
  REGION 1..456: note = Human gut metagenome
MSTCVCVLSNSGERLMPTIRLGKVRRLLKDGKAKIVKHHPFTIQLLYDSKTNTQPIEICEDVGYNYIGISVKSESHEYVSAQYDTLQDEKACHDSCRKLRRTRRNRLRYRKPRFDNRKRGEGWLAPSLEHKKQLNIRLIERYVSVIPITHATVEVGSFDTMLLQAIQKGKSKPEGVDYQKGPRYNLATLREAVFYRDNYTCQVCGRKIADGAILHMHHMFYWKGRHGYQLDELVTACEKCHTPANHQKGGKLFGFGEDKEFANLSGAAFMNAVCWQIVDALHATYGKEFVTITYGAMTKEKRIILGIEKTHNNDAYAMGDYHPAHRCVFRHYQKRRRNNRVLEKFYDATYIDARTGNKAKGKELFNGRINRNHKKDSEDLHKYRSKKVSKGRRSIRRQRYAIQPYDTVRLESKTYITSGCHNKGTRLLIPVNGKSKSVAISKVQVVCHAGAWIQII

SEQ ID NO: 11563 - protein, 440 aa, unidentified
  REGION 1..440: note = Human gut metagenome
MSVFVLDKKHEPLMPCHPARARKLLKAGRARVVKTYPFTIRLVDRLLENSAVQPVAVKVDPGSEQSGMAVVRDDGKAHHHALFFINLVHRGKVIRDRLTGRRAFRHRRRSANLRYRAPRFLNRKRRKGWLPPSLQHRVDTTMSWVKKLRKLVPVTALWVENVKFDTQKLQNPEVSGVEYQQGTLFGFEVREYLLEKFERRCVYCGAENTPLNIDHVVPRAKGGSDRVSNLVLACTECNQKKGAQPLEVFLKGKPEQFERIRRQLKAPLRDAAAVNATRWALFNALKQTGLPVATGTGAQTKFNRKAFGIPKEHWLDALCVGRINGADHPEGMGVLQVRCTGRGSYQRTRLNKYGFPRGHLMRQKRVHGFATGDMVKAVVPSGKKAGIHQGRVAVRVTGSFAIQKADGKVDGIHWRHCRLISHNDGYGYAWLRPAPHSSLV

SEQ ID NO: 11564 - protein, 442 aa, Streptomyces sp.
MPCHPARARELLHKGRAVVVRQVPFTIRLKDRPLAESEVDGVQLRIDPGSKGTGLSLTDEKKETDEHGTAVTVRRGLVSVELQHRGDQIHLCMQQRAGYRRRRRSANCRYRASRSDNRTRPGAWLPPSLRHRVDTTVSRATRLCRYAPVTEIHVERVAFDTHSMSAGRDLTEAEYQQGTLAGTEARAYLHARWNRACAYCDATDVPLNIDHLRPRSRGGSNRISNLVLACVACNQAKGSTSVHVFLAHQPDRLSKILRQAKTPLHDAAAMNATRWRLTEALSALGKPVHAWSGGRTKWNRTAMGLDKTHTLDALCVGRLDHETGDTITRLPKQILIAKATGRGSYTRTTPDRFGFPRLRRVRAKQHFGYVTGDLVRATIPTGKWAGTWTGRVSVRARGQHSLATPEGRINVSHWNLRLLQRGDGYGYSAQPESVASPSRKIG

SEQ ID NO: 11565 - protein, 413 aa, unidentified; identical to SEQ ID NO: 10655
  REGION 1..413: note = Human gut metagenome

SEQ ID NO: 11566 - protein, 430 aa, Desulfobacter sp.
LNVFVLDTNKKSQNPVHPAKARLLLTEGKAAVFRQFPFTIILKETVLDVASNPLRIKIDPGSKDTGIAVINDDTGEIVFAMELRHRGQQIKNNLESRRAIRRSRRNRKTRYRKPRFDNRTRAEGWLPPSLKSRVYNIETWVNRLCRFCNIQAISMELVRFDMQKIQNPEISGVAYQQGELMGYEVREYLLEKWDRTCAYCGKTDIPLEIEHIVPKSKGGSNRVSNLTLACTACNRKKGNKSLEHFLSRKPRLLKRIQKQSKVPLKDAGAVNTTRWDLFRTLKKTGLPVETGSGGLTKFNRTTRGLHKTHWLDAACVGKSTPEKIFQIDKTVLIVKADGHGSRQMCRVNKFGFPRTTAKSTEKKVKGFQTGDIVKAVVNSGKKVGTYIGRVAVRKSGSFNIKTVDKTVQGISWKYCRLLHASDGYSYNTTC

SEQ ID NO: 11567 - protein, 465 aa, unidentified; identical to SEQ ID NO: 4783
  REGION 1..465: note = Human gut metagenome

SEQ ID NO: 11568 - protein, 512 aa, unidentified; identical to SEQ ID NO: 11330
  REGION 1..512: note = Human gut metagenome

SEQ ID NO: 11569 - protein, 413 aa, unidentified; identical to SEQ ID NO: 2636
  REGION 1..413: note = Human gut metagenome

SEQ ID NO: 11570 - protein, 427 aa, Enterococcus sp.; identical to SEQ ID NO: 2410

SEQ ID NO: 11571 - protein, 426 aa, unidentified
  REGION 1..426: note = Human gut metagenome
MVYVQDIDGKPMMPTTRYGKVRRLLKNKKAVVVNLCPFTIRLTYVTSDYKQEIVLGVDAGTKHVGLSATTKSKELYSSEVILRNDIVDLLSTRRELRRARRNRLRYRKPRFDNRIKSKRPGWIAPSVKYKIDAHIRVVENVCSILPISRIVIEVAQFDTQKIKNPNISGKEYQEGDQLGFWNTREYVLARDGHKCQYCKGKSKDKILNVHHIESRKTGGDSPSNLITLCETCHKEYHKGNIDLKIKRGKSLRDAAVMGIMKWKLYEELKSRYPNVSMTFGYITKYNRIKYGIEKYHISDAFVISKNFNALRLEYHYKVRLVRRHNRQIHKQKVLKGGAKKPNQSPFEVFGFRLFDRVMFENSYYFIFGRRKTGSFDIRYIDGKNQKNVTYKKLKLSRCKRFMIQMELNKKTRTCFENERNSDRDAA

SEQ ID NO: 11572 - protein, 431 aa, unidentified; identical to SEQ ID NO: 9032
  REGION 1..431: note = Human gut metagenome

SEQ ID NO: 11573 - protein, 420 aa, unidentified; identical to SEQ ID NO: 11172
  REGION 1..420: note = Human gut metagenome

SEQ ID NO: 11574 - protein, 407 aa, unidentified
  REGION 1..407: note = Human gut metagenome
LMPCSPGKARLLLKQQKAHVVKRTPFTIKLLYGGAGYKQPITLGVDAGSKHVGLSASTEKRELYREEFTPRNDVVDLLSTRKQNRRSRRNRKTRYRASRFDNRVHGKHKGWLAPSVEVKIQEHITVIKRTCRILPVALVRVETAEFDTQRLKAMLEGKPLPVGTDYQLGEMCDEYNVRQYVLNRDHYTCQCCGAHTTTKKTVKLHVHHLESRKVGGNAPSNLITLCTTCHDALHKGKVSLDNKKRGKPMRDAVFMGIMRKTLMARLREELPIPVQGTYGYITKMWREQNDIKKSHVNDARCISKHPLAEPCSVCYRTKAIRHHNRQTHKANFSKGGIRKRSQMPYVVGGYRLWDKVLYKGQECFVSGRRTSGSFTLKKLDGTRISKGVTFKKLRLLEPATNYLIERM

SEQ ID NO: 11575 - protein, 430 aa, Desulfobacter sp.
LSVFVLDTNKKPQNPVHPAKARLLLTEGKAAVFRQFPFTIILKETVLDVASNPLRIKIDPGSRETGIAVINDDSGEIIFAMELRHRGQQIKNNLESRRAIRRSRRNRKTRYRKPRFDNRTRAEGWLPPSLKSRVHNIETWVNRLCRFCNIQAISMELVRFDMQKIQNPEISGVEYQQGELMGYEVREYLLEKWDRTCAYCGKTDIPLEIEHIVPRSKGGSNRVSNLTLACTACNRKKGNKPLEQFLSRKPGLLKRIQKQSKVPLKDAGAVNTTRWDLFRTLKKTGLPVETGSGGLTKFNRTTRGLHKTHWLDAACVGKSTPEKIFQIDKAVLIVKADGHGSRQMCRVNKFGFPRTTAKSTEKKVKGFQTGDIVKAVVTSGKKVGTYTGRVAVRKSGSFNIKTVDKTVQGISWKYCRLLHASDGYSYNTTC

SEQ ID NO: 11576 - protein, 427 aa, unidentified; identical to SEQ ID NO: 4977
  REGION 1..427: note = Human gut metagenome

SEQ ID NO: 11577 - protein, 430 aa, Moorena sp.; identical to SEQ ID NO: 9911

SEQ ID NO: 11578 - protein, 465 aa, unidentified; identical to SEQ ID NO: 3856
  REGION 1..465: note = Human gut metagenome

SEQ ID NO: 11579 - protein, 429 aa, Parasutterella sp.
LRVFVRNKRGKPLMPCSPAKARLLLKEKKAIVVRRTPFTIQLTIATGESKQPVSLDVDAGYKHVGLSASTEKAELYASEVELRQDITDLLSARRALRESRRNRKTRYRAPRFDNRIRTKRKGWLAPSVENRINAHLSRIESVLRLLPVTKITVETASFDTQLLKNPDISGKEYQEGEQLGFWNIREYVLCRDRHVCQHCYGRSKDPVLNVHHLESRRTGGDSPGNLITLCETCHKALHRGEITLKAKRGQSFRAEAFMGIMRSEVPNRLKASHPELEVNNTYGYRTKHARIANDIAKSHCADAFCIAGNLGAERLCEFFFQKQTRRNNRQIHKLSILKGGIRKRNQAPFEVKGFRLFDKVACQGEEGFIFGRRSSGFFDVRKLDGTRISAGISCKKLHLLEKRRTYLTEIRKEEALPPLPEGRGLRAKM

SEQ ID NO: 11580 - protein, 443 aa, Anoxybacillus sp.
MVEENMTCFMQRKGENPMVFVLDTNKRPLAPCHEAVARKLLKQGKAAIYRRFPFTIILKKSVDESEIKATYRLKIDYGSRHTGLAILRGQEVVWLGQLDHRTDIKERIDKRRAFRRARRNRKTRYRKPRFLNRKRKEGWLPSSLESRVQNIQTWVNRLKKLCPIGYISYENAKFDTQLMRNPEINGVEYQQGTLQGYEVREYLLEKFGRKCCYCGKENVPLEVEHIIPKSRGGTDRVDNLCLACHDCNQRKGSKTAEEFGYPHIQKQVKESLKDASAINSTRWKVYEVLKQTGLDVECGTGARTKMNRIRLDLPKTHYFDACCVGESTTNHLYFKTKEVLFIKAKGRGSRSRTNLDRYGFPRGYLARQKFFFGFQTGDMVKAVVPRGKYQGVWFGEVACRKTGSFDIKGKDGKRIAQGINYRYVQVIQRFDGYAYGKGVAELA

SEQ ID NO: 11581 - protein, 512 aa, unidentified; identical to SEQ ID NO: 3057
  REGION 1..512: note = Human gut metagenome

SEQ ID NO: 11582 - protein, 453 aa, Moorena sp.
VVFVLDKRKRPLMPCSEKQARKLLKEGRAVVHRLVPFVIRLKDRVVEQSVLQSLRLKIDPGYEVTGISVVRVAEGKETVIFFAEIHHRTDITEKLLSRRQVRRSRRNRKTRYRAPRFSNRRRPEGWLPPGAEARVNQVLSVVRKLLRWLPITEIVVESARFDTQKLQNPEISGVEYQRGELFGYEVREYLLEKFGRKCAYCGKENVPLEIEHVVPKSRGGTDRVSNLTLACRECNRAKGNKLPQEWMEELKKSGRSVDRKRAENIPEVLSRLRKPLKGAAFMNATRYALVDRLKGFGLPVLTATSAQTKYNRTRFGLPKTHYYDAGCVGEMPDGLEIATEYVQVFRAVGRGTRRMCNPDKYGFPRGHREARKRYFGFSTGDLVRAVVPNGKYAGVWTGSVVVRASGFFDLKDVAGKRIAQGIHYRSIRLIQRGDGWRYDRFRREGGKAHSSSQ

SEQ ID NO: 11583 - protein, 408 aa, unidentified
  REGION 1..408: note = Human gut metagenome
MVYVQDINGKPLMPTTRHGKVRRLLKDKKAVVVNLCPFTIKLTYVTSDYKQEIVLGVDAGTKHVGLSATTKSKELYSSEVILRSDIVDLLSTRRELRRTRRNRLRYRKPRFDNRIKSKRPGWVAPSVKYKIDAHIRVIDNVCSILPISSIVIEVAQFDTQKIKNPNISGKEYQEGDQLGFWNVREYVLARDGHKCQYCKGKSKDSILNVHHIESRKTGGSSPSNLITLCETCHKEYHKGNIDLKIRRGKSLRDAAVMGIMKWRLYEELKYKYGCVSMTFGYVTKYNRIKYGIEKSHVSDAFVISKNFNAIRLGYYYKVKLVRRHNRQIHKQKIPKGGIKRLNQSPFEVFGFRLFDRVMFENSYYFIFGRRKTGRFNIRDIDGKNQRDITYKKLKLSRCKCFMVQNEMN

SEQ ID NO: 11584 - protein, 415 aa, unidentified
  REGION 1..415: note = Human oral metagenome
MANNIKYCFVIDKDNQPLAPTKVNKGWYLIRKNRAKLKSKYPMVIQLEKKVKFDENDKSYMVCGIDDGSAHIGLAVVQKCPTKNKVVFKGTIEQRQDVKHLMDVRRGYRRYHRYHKRYRPMRFNNRASSKRIGRLAPSIKQKKDAILRVLYQLNKWINIKEYYLENVCIDIRAMTDDYKPYKWQYQKSNRLDENLRKATIIRDNYKCQECGKSNCKLEVHHIQARKYHGADTIGNLITLCSKCHDKTKGKEKDFEDKYFKIINSKPKRFDYAMHVMQGKNYLRNKISELGLLHLTNGGETANKRIEWNIEKSHSNDAICIADGIPDNCNIKEWIIKPMRRKSKAKTNNVLGIKHKDLVSYAYKNGEIHTGYVTALYPEQLALNFQSRTKHCKKVNARKCKLLWKFNKIYWLEQCI

SEQ ID NO: 11585 - protein, 421 aa, unidentified; identical to SEQ ID NO: 4235
  REGION 1..421: note = Human gut metagenome

SEQ ID NO: 11586 - protein, 568 aa, Streptomyces sp.; identical to SEQ ID NO: 2953

SEQ ID NO: 11587 - protein, 420 aa, Petrotoga sp.; identical to SEQ ID NO: 11467

SEQ ID NO: 11588 - protein, 427 aa, Moorena sp.; identical to SEQ ID NO: 7675

SEQ ID NO: 11589 - protein, 415 aa, Bacillus sp.; identical to SEQ ID NO: 2431

SEQ ID NO: 11590 - protein, 435 aa, Moorena sp.; identical to SEQ ID NO: 2260

SEQ ID NO: 11591 - protein, 419 aa, Anaerostipes sp.; identical to SEQ ID NO: 4877

SEQ ID NO: 11592 - protein, 431 aa, Petrotoga sp.
MEKRSVQRVFVLDKNKQPLMPCHPARARELLKKGKAAVFRYHPFTIILKDREGGDTQPIQVKIDPGSKYTGVALVADFKRGKKVIWASVIYHRGHVIKKNLDTRRGVRRFRRNRKTRYRKPRFLNRKRKEGWLPPSLISRAENILTWVKRIRRFSPVTSISMELVRFDTQKLQNPEIKGVEYQRGTLYGYEVKEYLLEKWGRKCAYCGKENVPLEIEHIVPKSKGGSDRISNLTLACHECNQKKNNQSIDEFLANNPKKLNQIKARAKGPLKDVASVNATRWYLFNQLKKEGLPIEVGTGGQTKYNREMQNYSKKHWIDAACVGESGYNVQLEPDMQVLEITAMGHGMRRICFVDKYGFPKSYRPKERTYMGYKTGDIVLANVPKGKNKGIHIGRIAIRHRPSFLLNGVGDVHPKYLTLLQKNDGYGYQIS

SEQ ID NO: 11593 - protein, 297 aa, unidentified; identical to SEQ ID NO: 5896
  REGION 1..297: note = Human gut metagenome

SEQ ID NO: 11594 - protein, 436 aa, unidentified
  REGION 1..436: note = Human metagenome
MAKTLTTQTMQACVLDQNGKPLMPTTRLGKVYRLLKTQKAHIVSYEPFTIQLDYEPDTQVIQPMTLGVDSGAIHSGYSVANEHREYYNAEVIARNDISNRLSDRHMYRQHRRYRKTRYRQPRFNNRKNKKKGWLPPSLEQKVAVQVNEIDHIHRYFPIETIIVETAEFDIQKIKNPDISGVEYQQGTLQGYNIRNYLLEKHGRKCFYCGKAVSDFEVEHMFPKSKGGSNRIDNLTLSCHDCNEKKGTLTAEEFIQQTLPAKKAVAKLKQLPNEKRLFKYMAYMNATRWALYDAIKERYPNVKMTYGYITKYNRIQAGLPKAHHVDAKCITSFATVPFMSQTVVKVKMRRHNRQLHRATFSKGHVRKVACLPTVTFGFQLYDLVLFDNHRYYIKSRRSSGIFALASVEGLKNEERTYKKLTLLAHTNAYLTNRYVNV

SEQ ID NO: 11595 - protein, 420 aa, unidentified; identical to SEQ ID NO: 2681
  REGION 1..420: note = Human gut metagenome

SEQ ID NO: 11596 - protein, 440 aa, unidentified
  REGION 1..440: note = Human gut metagenome
MSTSVFVLDKKHRPLMPCRPARARRLLRAGRARVVKRFPFVIRLVDRTVEQSEVQPVLIKLDPGSRETGAAVVRDDEKKRHHALAFFVIKHRGGAIRDALKARSAFRRRRRSQNFRCRSPRFLNRVKPKGWLPPSLRHRVETTLSFVRRMCRYLPVSGIATELVKFDSQKLQNPEVSGVKYQQGTLFEYEVREYLLEKFGRKCVYCGAEGVPLNIDHVVPRAKGGSNRVSNLVLACVSCNQKKGARSLEDFLKGKPEVLARVRRELKTPLRDAAAVNATRWVLFNELKATGLPVETGSGALTKLNRHAFGVEKEHWLDALCVGRLNGAVTRKGLNVLEIRCMGRGSRQRTRLTKYGFPRGYLMRQKCVHGFATGDMVEANVPKGKKAGLWRGRVAVRVSGSFNIQTPKGVIQGVGWKHCRLISHNDGYGYAWLGHAPHSS

SEQ ID NO: 11597 - protein, 428 aa, unidentified
  REGION 1..428: note = Human gut metagenome
LKVFVLNMRGQPLMPCSPAKARHLLKAGKAVVRRRTPFTIQLRIATGETKQSVTLGVDAGAKHVGLSAATEKEEVFASEVELRQDITGLLAARLSLRRERRQRKTRYRAPRFLNRVRSKHKGWLAPSVENRIQAHMSRIDAICELLPVTKIVIETASFDIQKIKHPDVEGTDYQQGDQLGFWNVREYVLFRDGHVCQHCHGHAKDKILNVHHLESRQTGGDAPNNLITLCETCHKAYHAGKIKLKVKRGQSFRAEAFMGIMRWTLLDRVRKAHPGLPVENTYGYLTKHTRITHGLPKTHCVDAYCIAGNLKAVRRGVYLHQRQMRKHNRQIHKFTVLSKRLEDGTKIGYRKLNQSPYLVHGFRLFDKVRCLGQIGFIFGRRSSGYFDVRRLDGVKLSPSISWRKLTLLEKRSTYLTELRKQDGASSPV

SEQ ID NO: 11598 - protein, 389 aa, unidentified
  REGION 1..389: note = Human gut metagenome
MVYVQDIYGRPLMPTTRHGKVRRLLKSKKATVVNLCPFTIRLLYDTTGYKQEITLGVDTGTKHVGLSATTKSKELYASEVILRSDVVDLLSTRRELRKIRRYRLRYRKPRFMNRIKSKKRGWIAPSIRQKIDSHIRIIGFVYSILPVSKLIIEVAQFDTQKIKNPEISGKEYQEGEQLGFWNVREYVLARDEHKCQHCKGKSKDPVLNVHHIESRKTGGDSPSNLITLCKTCHKEFHKGNIKLKVNRGESLRDAAVMSIMKWELYDELKSLYPNVKMTFGYITKYNRINHGIEKSHVSDAFVISRNFDSERLGYYYKRKLVRRHNRQIHKMKAPKGGNKRMNQSPFKVFGFRLFDKVMFQGKERFIYARRLRGIFNIRDINGENKKDIS

SEQ ID NO: 11599 - protein, 396 aa, unidentified; identical to SEQ ID NO: 4508
  REGION 1..396: note = Human gut metagenome

SEQ ID NO: 11600 - protein, 442 aa, unidentified; identical to SEQ ID NO: 2903
  REGION 1..442: note = Human gut metagenome

SEQ ID NO: 11601 - protein, 430 aa, unidentified; identical to SEQ ID NO: 7986
  REGION 1..430: note = gut metagenome

SEQ ID NO: 11602 - protein, 195 aa, unidentified
  REGION 1..195: note = Human gut metagenome
GTLCDDCHKKFHLGIITDVKLKTRRRQSTRDAAFMGIMRKTLMWRLRTELFIPVAETKGYITKATREKLLVLPKSHTRDALAIAQGRHGFGIKEYAYVEPANHIYTVRPVRHHNRQLHKASILKGGIRKRNQASKYVFGFRLYDKVLYQGKACFVWGRRTSGTFLLRTIDGIKVKDGVSYRNLTLLERSSNYLIA

SEQ ID NO: 11603 - protein, 512 aa, unidentified
  REGION 1..512: note = Human gut metagenome
MSTVYVLNKDGKPLMPTTRCGHVRYLLKEKKARVVASKPFTIQLLYETDDVVQPLYLGIDPGRSNIGVAVVKTDGMAVFTAHLETRNKEIPKLMKKRKDSRRARRTNGRRCRRQRRAKANGTISKKCVKQTTAQNGSVSKRAKEIGVIKRHLPGCEKDVLCIGIKNKEAKFNNRTRPTGWLTPTANQLLQTHINLVKKIQKFLPISDVVLEVNKFAFMQLDNPNIQKWQYQKGPLYQKESLKSAVSEMQEHHCLFCKKKIDHYHHVVPQHKNGSNTIDNIVGLCTQHHDLVHKDATWQKRLAKKKTGLNKKYGALSVLNQIIPALTKELSSLFPKHFFATNGKSTNDYRIAHGVSKDHWLDAYCIACSVLPNDTCDRTINSRVPYELKQFRRHDRRALHKENMSRVYTLNGKSVATNRHKATEQTTDSLEEFRQCQPDDVCKLKVKEHYPEYRNPKRNFPGCVFLVGKHTHVMQGTSGSHNGKADGYYDTNGNSYPSGKCKFVAKNKGIVFA

SEQ ID NO: 11604 - protein, 460 aa, unidentified
  REGION 1..460: note = Human gut metagenome
VQLRQSDAGQSHVLCCLSDKKKGRHNHMYVYVINKHGQPVMPCRPRMARVLLQEGKAAVVKQVPFTIRLLYGSSGYKQPVSLGMDAGSRHIGIAATTGKKVLYAEELSPRNDVVKLLSVRRQRRRARRSRRTRYRQARFDNRVSSKPKGWIAPSVEVKIQEHISAILRIQKMLPVSEIHVETAEFDTQRLKALEEGRPVPVGTDYQKGEMYNQYNVRQYVLFRDGYKCKCCGKHGDGVKLHVHHIESRQTGGNAPNNLITLCEDCHKALHAGTMQLPDGRAKRGRSHRDAAFMGIMRKAMVSQLRDIVDIPVTETYGYITKYYRELHHVEKSHISDAIIISRNFKAEPDDTYYASKAVRHHNRQLHKNTILKGGVRKRNQAPHVVKGFRLFDLVRYENSVYYVFGRRKSGFMDIRTLDGRKINKGSISSKKLKFVSTSKGTLVERRKAIPLADKSASFLA

SEQ ID NO: 11605 - protein, 421 aa, unidentified
  REGION 1..421: note = Human oral metagenome
MVVYVLNQNGQPLMPISRCGKVRRLLKSKRAKVVRRCPFTIKLLFEPENDFVRECYCGVDTGSKHVGVAVVGNDRVLYQSQTELRSGIKKKIDRRRGFRRLRRSRKIRYRKPRFLNRRNSIRTGRLSPSVKHKVQAHIDEIEFCKKILPVSDLILEVSQFDTALMKNPSLISEKVKHWGYQQGLNYGYSSRRSAILHRDGYTCQCCGKKNCRLEVHHIIFRSNGGTDDENNLITLCADCHKKVHKGEIVLEKKPKKMNLKHATHMSIIRSWLLKKYPNAIETFGFVTSENRNHLGLEKSHYIDACVVASGGLEFEELDVIFYKRRVSKGDYKLTRGARGEQKLHTGKVHGLRKFDKVKYLNQEYFVESRINTGFAKLMDVFGNQADFSFALRGHKTPKLSNCKRINARRSTLCTWLANTIN

SEQ ID NO: 11606 - protein, 451 aa, unidentified; identical to SEQ ID NO: 6972
  REGION 1..451: note = Human gut metagenome

SEQ ID NO: 11607 - protein, 514 aa, unidentified
  REGION 1..514: note = Human gut metagenome
MSTVYVLNKNGKPLMPTTRCGRVRHLLKEQKARVVTSNPFTIQLLYETDDVVQPLYLGIDPGRTNIGVAVVKTDGTAVFTAHLETRNKEIPKLMQGRKKARRARRTNGRRCRRQRRAKANDTISKKCVKQDTAQSVSASKRAKKIGVIKRHLPGCEKGVLCIGIKNKEAKFSNRTRPEGWLTPTANQLLQTHINLVKKIRKFLPISDVVLEINKFAFMQLDNPNIQKWQYQQGPLYQKASLEEAVSEMQEHHCLFCKKPIAHYHHVVPQSENGSDTIGNIIGLCTKHHDLVHKDTAWQKKLAKKKTGLNKKYGALSVLNQIIPALTKGLGSRFQGYFYVTTGKSTYDYREVHGVSKDHWLDAYCIACSVLPNDVCDSDINNRVPYELKQFRRHDRRALHKANINRVYTLNGKSVATNRHKAIKQTTDSLEEFRQCQPDDVCKLKVKEHHPEYRNPERNFPGCVFLVGKHTHVMQGTSGSHNGQADGYYDTNGNSYSSGKCKFVAKNEGVVFTLN

SEQ ID NO: 11608 - protein, 431 aa, unidentified; identical to SEQ ID NO: 3235
  REGION 1..431: note = Human gut metagenome

SEQ ID NO: 11609 - protein, 420 aa, unidentified; identical to SEQ ID NO: 11070
  REGION 1..420: note = Human gut metagenome

SEQ ID NO: 11610 - protein, 476 aa, Ferroplasma sp.; identical to SEQ ID NO: 8620

SEQ ID NO: 11611 - protein, 426 aa, Moorena sp.; identical to SEQ ID NO: 4097

SEQ ID NO: 11612 - protein, 413 aa, unidentified; identical to SEQ ID NO: 2636
  REGION 1..413: note = Human gut metagenome

SEQ ID NO: 11613 - protein, 372 aa, Clostridium sp.
MVEYSFVVDLSGNRLSPCNKNKAYYLIRKNKAKMLNKFPMVIQLQKIVEDDNIDDVKNYLGIDDGSKNVGLGIIQQCNTKVKTVFKGTIELRQDVSTKMTVRKGHRTYHRYHKRYREKRFDNRRASKRKNRLAPTILQKKQSILRVVSKLLKWTKIDAIYLEDVLIDIRAMIEGKKLYKWQYQKSNRLDNNIRLAVFMRDNFKCVDCNSNMMDRYLTKIKGKNLYIRHPMHVMQGKKYLQVELGKIAPLSLTTGADTANHRIDWNIEKSHSNDALVVCGTEIKTKDINIKEWHIKPLRRKSKGDIDKIVDGFRLRDYVKYTKRNGLCYIGYITALYPDKKQFNMTTKDDIVLKRYGLKSLNLISRPNSIRFL

SEQ ID NO: 11614 - protein, 414 aa, unidentified
  REGION 1..414: note = Human gut metagenome
MVYVINKQGQALMPTERFGKVRRLLKNSLAHVVCRIPFTIQLDYDTTDYTQPVSLGVDAGSKHIGISATTSEKELYAADVELRNDIVDKLSTRRELRRTRRSRLRYRKARFNNRVSSKRKGWIAPSIENKIQTHLTIVEKIHKFLPITNIVVETAAFDIQKINNPSISGSEYQQGEQLDFFNVREYVLFRDNHICQHCKGKSKDKVLNVHHIESRKTGGDSPNNLITLCETCHKAYHRGEFELNVKRGKSFRNAAFMGIMRWSFYDRLKNIYPNVSMTFGYITKNTRITNNLPKEHYVDARCISDNPVAKPLGYYFYQKKVRCQNRQIHKANFLKGGRKKLNQAPFLVKGFRLFDLVEYQKELYYIFSRRNSGYFDIRKLDGTKVNKGSINCKHLRLIDTRKSILIEKRTKVNL

SEQ ID NO: 11615 - protein, 406 aa, unidentified
  REGION 1..406: note = Human gut metagenome
VPVMVYVLNFDGQPLMPTDKHGKVRHLLKDGRAEVVKRCPFTIRLLYDSTHYTQDIVLGVDAGSKHIGLSATTETKELYASDVELRNDIVDLISTRRQNRRSRRNRKIRYRKARFQNRVSGKKNWLAPSIRQKVDTHMTVVSRVCMILPVTKIIVETASFDIQKIKDPDISGTGYQQGEQLDFWNVREYVLFRDGHTCQCCKGKSKDLVLNVHHIESRKTGGDAPNNLITLCETCHKGYHSGAVQLPKAIHRGMRFKDAAFMGVMRWNFYNKLKEIYELQGIEIRMTFGYLTKNSRIRHHLPKEHYIDARCISGHPEAIPNNEVFYQKKVRCHNRQIHKNTILKGGIRKRNQTGYLVKGFRLFDKVAYEGREYFIFGRRQSGFFDLRDLSGCKVNKGSLSYRKIRF

SEQ ID NO: 11616 - protein, 471 aa, unidentified
  REGION 1..471: note = Candidatus Poribacteria bacterium
MSKVPVLDTHKRRLEPCHPAVARRLLRNGQAAVYKRYPFTIILKREASSPKTTDYMLSIDPGSKCTGFAITDSENNIIACFELHHRGAAIKKGLSNRAGYRRSRRTRKRRHRPARWQNRSRKAPVLTTDGWKYKSFGQSSKDWIAPSLMSRVFNIHTWVNRLSKIYPISRLAVEHVKFDTQLMENPEISGVAYQRGTLFEAEVWEYLLEKFGRKCFYCGTKNVPLEKEHILPKAKGGTNRVSNLTVSCRDCNIKKGNCHPDEIEGELGKRVQSALRAAKKPLKDAQTVNTIRWKIVETLKATGLPIIHGTGGKTKWHRKQAGLPKTHYYDAACVASVPKLPAPPSVLAIHAVGYGHRRDLGGFQTVQTAPGFKRPYTRVENANGFQKLETVAMQTKKGRVVGCINSFDKTVAGKPQKLRIKTDWTAGDGRVSGNVTQLTRVQKRDGYAYQIVSSEKQEIRSTEKAAQLLLF

SEQ ID NO: 11617 - protein, 475 aa, unidentified
  REGION 1..475: note = Human gut metagenome
MVITLDKNKRPLGFMSERRCRILLEKKRAVLYRYFPTIVILKDVDARKLSGLSSYRIKIDPGAKYTGIAIVMDDTNEFMYAMQIEHRGEQIKKNLDTRRGARRNRRSRETGYRKPKWENRCTAKGQRQSYDSRRDENWLPPSVKSTADNIISWIRRLCRWINITNCSIESVRFDTQLMENPEIEGVEYQQGTLYGYEVKEYLLEKYGHTCQYCGGKSNDPILEWEHMIPRSRGGSDRLKNASLACHNCNQDKGNHTLEEWQTILQDRIPKERGKQKELDQIRQKFVQQVMEGKTPVKGLRYAAWVNSSRRYSQRHLYLRFPELECSSGGRTKYNRNAHEYPKEHHYDALCVGEIPEDGFVDRTNGYYLYAKATGRGTRLRGQINQCGVIIRKWMDRSKTAFGFQTGDLVVADVPKDTKYKYKGHFSGRVMIRKSGSFDIRTLSGELVTVNAKFCRLLQNNSGYQMMIKRAIPLGN

SEQ ID NO: 11618 - protein, 442 aa, unidentified
  REGION 1..442: note = Human gut metagenome
MSTSVFVLDKKHRPLMPCRPARARRLLRAGRARVVKRFPFVIRLVDRTVEQSEVQPVLIKLDPGSRETGAAVVRDDEKKRHHALAFFVIEHRGGAIRDALKARSAFRRRRRSQNLRCRSPRFLNRVKPKGWLPPSLRHRVETTLSFVRRMCRYLPVSGIAAELVKFDSQKLQTPEVSGIEYQQGTLFEYEVREYLLEKFGRKCVYCGAEGVPLNIDHVVPRAKGGSNRVSNLVLACVSCNQKKGARSLEDFLKGKPEVLARVRRELKTPLRDAAAVNATRWVLFNELKATGLPVETGSGALTKFNRHAFGVEKEHWLDALCVGRLNGAVTRKGLNVLEIRCMGRGSRQRTRLTKYGFPRGYLMRQKCVHGFATGDMVEANVPKGKKAGLWRGRVAVRVSGSFNIQTPKGVIQGVGWKHCRLISHNDGYGYAWLGHAPHSSPA

SEQ ID NO: 11619 - protein, 396 aa, Geobacillus sp.
MPCSPRKARLLLKQKKAKVVRRTPFTIQLLYGSSGYKQPVSLGVDMGTRHVGISATTKKDVLFEAEAQLRTDIVELLAIRRQFRRSRRNRKTRYREARFLNRRKPEGWLPPSIQHKINSHIKLIDLVHNILPATSVTIEVAAFDTQKLKNLNIRGVEYQQGEQMGFWNVREYVLYRDNHTCQYCKGKKKDPVLQVHHIESRKTGGDSPDNLITLCKTCHHEIHEKGLEHIFQRKRPPMRDASQMTAMRWAMFSRIREKYSHANITYGYITKCIRIANGLSKSHMVDARCISGNPLAKPSGTVYLLKFVRKNNRQLHKATILKGGKRKSNKAPRFVKGFQLFDKVVYERKECFIFGLTFRTLTRSKQRIFYLVFQNNFLTNTTSDGYPFFTIAGRSV

SEQ ID NO: 11620 - protein, 423 aa, unidentified; identical to SEQ ID NO: 3951
  REGION 1..423: note = Human gut metagenome

SEQ ID NO: 11621 - protein, 532 aa, unidentified; identical to SEQ ID NO: 3169
  REGION 1..532: note = Human gut metagenome

SEQ ID NO: 11622 - protein, 594 aa, unidentified; identical to SEQ ID NO: 4104
  REGION 1..594: note = Human gut metagenome

SEQ ID NO: 11623 - protein, 412 aa, unidentified; identical to SEQ ID NO: 4932
  REGION 1..412: note = Human gut metagenome

SEQ ID NO: 11624 - protein, 470 aa, unidentified; identical to SEQ ID NO: 2949
  REGION 1..470: note = Human gut metagenome

SEQ ID NO: 11625 - protein, 404 aa, unidentified
  REGION 1..404: note = Human gut metagenome
MPNKVYVINKHGRPLMPCSPAKARHLLDAGKAKVKKRTPFTIQLVYGSSGYTQEVILGVDAGSKTIGMSASTKKEEVFAADVTPRNDVVDLMSTRREFRRARRNRKTRYRKPRFDNRVRSKRKGWLAPSVEVKIQEHITSIKRVCRILPVSKVVVETAEFDLQLLKAIADGKPVPQGEDYQKGEMYGHYNVRQYVLWRDDYTCQCCGAHATKKKEVRLHVHHLESRKVGGDAPDNQVTLCESCHEKLHKGLITAKDFKKRKRRSTRDATFMGIMRKTLMQMLCSELPIPVVKTRGYITKATREKLLVLPKSHTNDALAIAQGKQGFNVGYLPGIEQIDKIYTIRPVRHHNRQLHKAAILKGGIRKSNQVGKYVFGYRLFDKVQFNEQDCFIWGRRTTGIFTIKT

SEQ ID NO: 11626 - protein, 411 aa, unidentified; identical to SEQ ID NO: 3762
  REGION 1..411: note = Human gut metagenome

SEQ ID NO: 11627 - protein, 494 aa, unidentified
  REGION 1..494: note = Human gut metagenome
MTMVYVQNKDGKPLMPTTRYCYVRLLLKEKKARVVSRTPFTIQLNYDTPDITQDLILGIDPGRTNIGVAVVKEDGQCVFSAHLETRNKEVPLLMKKRAAFRRQHRTQDRRRKRQRRAIAAGTTVESNTIERLLPGYEKPVVCHYIRNKEARFNNRSRPQRWLTPTANHLLQTHINLIAKIAKFLPITKVVVELNRFAFMAMDNPNIRRWEYQQGPLYGLGSVEDAVYAQQDGHCLFCKKPIDHYHHVVPRHKGGSETLANRCGLCEKHHDLVHKDKAWAEKLVTRKGGMNKKYHALSVLNQIIPHLMEYLGGETPYDVYATDGKSTKGFRVAKYVPKEHYTDAYCVACAILDADTKVSAPVEPFELKQFRRHDRQACIRQMVDRKYLLDGKVVATNRHKAIEQKSDSLEEFREAYGDAAVSQLAVRPHSPQYKDMTRIMPGAVMDFDGVVGVFQGSSGRNNGTPNYYNSTKGARVLTKRCALLAKNVGMVFIPA

SEQ ID NO: 11628 - protein, 414 aa, unidentified
  REGION 1..414: note = Human gut metagenome
MPCSPAKARLLLKEKKAIVKRRTPFTIQLTIATGEAKQPVSLGIDAGYKHVGLSASTEKAELYASEVELRQDITDLLSARRALRQSRRNRKTRYRAPRFDNRISTKRKGWLAPSVENRINAHLSRIEAVLRLLPVTKITVETASFDLQLLKNPDISGKEYQEGEQLGFWNIREYVLCRDGHVCQHCYGRSKDPVLNVHHLESRRTGGDSPGNLITLCETCHKALHRGEITLKAKRGQSFRAEAFVGIMRWEVHNRLRALHPGIEVSNTYGYRTKHARIANGIAKSHCADAFCIAGNLGAERLCEFFFQKQTRRNHRQIHKLSILKGGIRKRNQAPFEVKGFRLFDKVACQGEEGFIFGRRSSGFFDVRKLDGTRISAGISCKKLHLLEKRRTYLTEIRKEEALPPLPEGRGLRA

SEQ ID NO: 11629 - protein, 428 aa, unidentified; identical to SEQ ID NO: 7377
  REGION 1..428: note = Human gut metagenome

SEQ ID NO: 11630 - protein, 364 aa, unidentified
  REGION 1..364: note = Human gut metagenome
GTIGTAVSKDNGDIVYMSEVIVRNDITDKMTQRVKYRRNRRNRKIRYRKARWLNRANSIKNDRFSPTMQSKLHSHVKEIEYIKSILPITEMVFETGQFDTHFMKNPSLANPKVKHWGYQKGTNYGFENTKAMVLNRDSYTCQCCKGKHKDSKLEVHHIVFRSQGGSDEESNLITLCHTCHKDLHSGKINPKLSGKVKGNLKYATQMNSIRKQLFRLYPNAIETFGYVTKANRLHLGVNKEHYYDACTIATQGNAFNVKSNLYKKKCVSDGDFQKTKGVCSEQPIVTDKICGFRKFDKVRYFGNDYFIKGRMSTGYAILMDIDGDKVDFSAMPKGYKTPKMVNLKRLEARSTWMITTVEVTPNIA

SEQ ID NO: 11631 - protein, 423 aa, unidentified; identical to SEQ ID NO: 3538
  REGION 1..423: note = metagenome

SEQ ID NO: 11632 - protein, 393 aa, unidentified
  REGION 1..393: note = Human gut metagenome
SKSHEYVSAQYDTLQDEKEHHDDCRMHRRTRRNRLRYRKPRFDNRKRGEGWLAPSLMHKKELNVNVVKMYCAVMSITHATVEVGSFDTMLVKAIQEGKVIPEGADYQKGPRYNLATLREAVFYRDNYVCKICGRKATEGAILHMHHMFYWKGRHGNSLDELLTVCEKCHTPANHQKGGKLYGFGEDVKFADLSGAAFMNTVRWQIVNELYVAFGKPFVTITYGAMTKEKRIALQLEKSHNNDACAMGEFHPNLRCMFEHYEKARRNNRILEKFYDSRYIDIRTGEIATGKELFNGRINRNHKKDSENLHKYRGKRTYAGHRALLRKKVNLNPGDLVSLNGENLIVHSTHTKKNGAVNVEFETPAKSGQKSASLKKLKIVKAANSIHPAWKKIS

SEQ ID NO: 11633 - protein, 424 aa, unidentified; identical to SEQ ID NO: 3351
  REGION 1..424: note = Human gut metagenome

SEQ ID NO: 11634 - protein, 431 aa, Calothrix sp.; identical to SEQ ID NO: 5518

SEQ ID NO: 11635 - protein, 421 aa, Sutterella sp.; identical to SEQ ID NO: 8559

SEQ ID NO: 11636 - protein, 424 aa, unidentified
  REGION 1..424: note = metagenome
MRVFVFNMRGEPLMPCTQRKARVLLKENKAIIYKYNPFTIQLTYTTGETTQDCHIGVDTGSKHIGIAVTSKDKLLFKGEVELRQDVKSNIDTKRIYRRSRRNRKTRYRKARFLNRKKANKWLPPSLQNRINHTFHWIDTFISLIPNPTLHVEVGKFDTAKMINPEINGVDYQHGQTYGFFDERYFVFARDNYTCQCCGKSKNKILQIHHIIYRSNGGTNRVDNLITVCTDCHTSKNHKKGEILYKWQEQHKKVKRYKEPPFMNILRQRIFVTYPNAEITYGSETTPKRNIMGLSKTHYNDAIVISGINEINENCEDWLLIKQFRKKKRSLHEATARKGRKNPNRNQIRNNKNTPYYKGLYLNDKVSILGISGYVTGFTNGGAYIKDDNDNYITLPNKTYKQININKIKRKCHNNNWQYIVKNVA

SEQ ID NO: 11637 - protein, 310 aa, Moorena sp.
MERLLRKEVGYMLVYVISKHGKPLMPCNPQKARRLLKEQKAKVVKRTPFTIQLLYGSSGYKQDVILGVDAKSKTIGVSASTENKELFSAEVELRTDIVDLLSTRRTLRRSRRNRKTRYGQSRFLNRRKPEGWVAPSVQNKIDTHIKVVKLVHAILPITRVVVEVAQFDVQKIKNPDILGEDYQQGEQLGFYNVREYVLFRDKHTCQHCNGKSRDPILNVHHIESRKTGGNSPDNLITLCETCHKRYHKGGIELKVKRNSSFRDAAFMGIMRWASYNKLKEQYSNVHLTFGYITKNVRIKHNLEKSHRILP

SEQ ID NO: 11638 - protein, 430 aa, unidentified
  REGION 1..430: note = Human gut metagenome
MPKVYVLNRHGRPLMPCTPAKARHLLDAGKAKVRHRTPFTIQLLYGSTGYTQEVILGVDAGSKTIGLSAATETEELFSAEVKPRNDVVELMSARRQFRCARRNRTTRYRKPRFDNRVRSKHKGWLAPSVEVKIQEHMTAIRRACAILPVSKVVVETAEFDLQLLKAVAEGKPVPQGEDYQKGEMYGHYNVRQYVLWRDSYTCRICGMHGSVRKGVPLHVHHLESRRVGGDAPDNLVTLCTACHDKLHKGIIMAADIKKRKRRSTRDATFMGIMRMTLLRRLREQLPVPVVETRGYITKATRENLLVLPKSHTNDALAIAHGPQGFRAEYLPNIRQADRLYTIRPVRHHNRQLHKATILKGGVRKANQAEKYICGFRLYDKVLYNGIECFVWGRRTSGSFLLRQLNGEKVKDGVSYKHLKLLERSQSYLVA

SEQ ID NO: 11639 - protein, 446 aa, unidentified; identical to SEQ ID NO: 11087
  REGION 1..446: note = Ga0373628_0008773

SEQ ID NO: 11640 - protein, 333 aa, Bacillus sp.; identical to SEQ ID NO: 5532

SEQ ID NO: 11641 - protein, 424 aa, Caldicoprobacter sp.; identical to SEQ ID NO: 6395

SEQ ID NO: 11642 - protein, 428 aa, Moorena sp.
RLGMVRRWLKTGQAKWFGNSRNTIQFVRLVTTNTQELTLGVDAGFHLGLSVVGNNREYYVSESLRKSEKDRITSRRELRRTRRNRLRYRKARFNNRRRKDGWLAPSIQHRLDFTIKEIKRLYKFLPITNLVVEVTPFDNQKLLNPDIQGWQYQEGKMYGFKTIKDYLLARDNYRDALDGKQYPASQLRVHHLVQRKDGGSNQPDNLVLLSDINHNQANHNNGILAKLKENRQKTLDYRGAYFMSILATRLSNYFDNYTITQGYLTANLRQKYEIKKSHLNDAFIIAGGTDTTLRTNNVYSRQKLRNNNRVLQKFYDAKYIDSRDGKKKTGKELSSGRTRRSQELNYDNLRQFRKEKVKKGRVSIRRGHYQLRPHDVVLNTRTNRIETVKGVQNSGTVIKFQTGKTCSIKSVVSLYHVNGILEKKMENI

SEQ ID NO: 11643 - protein, 424 aa, Petrotoga sp.; identical to SEQ ID NO: 8893

SEQ ID NO: 11644 - protein, 443 aa, Anoxybacillus sp.; identical to SEQ ID NO: 7070

SEQ ID NO: 11645 - protein, 465 aa, unidentified
  REGION 1..465: note = Human gut metagenome
MSTCVCVLSNNGERLMPTIRLGKVRHLLKDGKAKIIKHHPFTIQLLYDSKTNTQPIEICEDVGYNYIGISMKSEFHEYVSVQYDTLQDEKDCHDGCRRVRRSRRNRLRYRQARFDNRKRDDGWLAPSFEHKKELNVNVIKMYCKVMPITHAIVEVGSFDTMLVKAIEEGKATPESADYQKGPRYKLATLREAVFYRDNYTCQVCGRKANEGAILHVHHMFYWKGRHGNSLSELITVCEKCHTPANHQKGGKLYGFGEDIKFTNLSGAAFMNTVRWQIVNVLYAAFGKPFVTFTYGAMTKEKRIALHLEKSHNNDAYAMGSFHPVNRCAFEHYEKVKRNNRILEKFYDSQYIDTRTGELTNGKSLFNGRISRSHKKDSENLHKYRGKRICKGHRALRRKKVALNPGDLVSLNGEILVVHGTHTKKNGSVNVEFKTPSRGGKKSASLKKLKIVKTSNLMHSAWTKVS

SEQ ID NO: 11646 - protein, 442 aa, Moorena sp.; identical to SEQ ID NO: 7482

SEQ ID NO: 11647 - protein, 413 aa, unidentified; identical to SEQ ID NO: 2636
  REGION 1..413: note = Human gut metagenome

SEQ ID NO: 11648 - protein, 422 aa, unidentified
  REGION 1..422: note = Human gut metagenome
MSVFVLAKDGRPLMPCSPAKAKHLLKKGLAKVRRRTPFTIQMLVVTKHCTQEVILGVDAGSKTVGLSCGTADKELFAGEMIPRNDVVEKLSARREFRRARRNRKTRYRQPRFNNRVKSKHKGWLAPSVEVKIQEHITVIRRICRLLPVSKVIIEGVEFDLQLIKAVAEGKPVPQGEDYQKGEMLGYYNVRQYVLWRDGYKCRNCGAHKDVKLRTHHLESRKIGGDAPNNLVTLCGKCHDLFHKGTIQLKARRGSSYRDAAFMGIMRKALISRLRVELNIPAYETRGYITKHTREYQMHLTKSHVNDALAICHGPHGFNDGEKAVVERAAHVYLIKPVRHNNRQLHRATILKGGIRKANQSPKYVKGFRLFDKVRYNGHDCFIWGRRTSGYFAVKTIDGKVIHNSASFKKLNLVERASNYLIA

SEQ ID NO: 11649 - protein, 431 aa, unidentified
  REGION 1..431: note = Human gut metagenome
MPNKVHVINKHGCPLMPCSPAKARHLLDAGKAKVKKRTPFTIQLVYGSSGYTQEVILGVDAGSKTIGMSASTTKEELLSAEVKPRNDVVDLLSARREFRRARRNRKTRYRKPRFDNRVRSKHKGWLAPSVEVKIQEHITAIRRVCGILPVSKVVVETAEFDLQLLKAIEEGKPVPQGEDYQQGEMYGHYNVRQYVLWRDNYTCQCCGAHATKKKEVRLHVHHLESRKVGGDAPDNQVTLCDRCHEKLHKGLITEKDLKKRKRRSTRDATFMGIMRKTLMQRLCSELPIPVVKTRGYITKATREKLLVLPKSHTNDALAIAQGKRGFNVGYLPEIAQIDKIYTIRPVRHHNRQLHKATILKGGIRKSNQTEKYVFGYRLFDKVQFNGQDCFIWGRRTTGIFTIKTINGKMIKDGISFKKLKLVEKSTNYLIV

SEQ ID NO: 11650 - protein, 421 aa, unidentified
  REGION 1..421: note = Human gut metagenome
MQYVYVLSKHGEPLMPCSPGKARLLLKEKKARVVRRTPFTIKLLYGSAGYKQPITLGVDAGSKHVGLSASTEKRELYREEFTPRNDVVKLLSKRKQYRRSRRNRKTRYRAPRFNNRVHSKHKGWLAPSVEVKIQEHITVIKRICRIIPISLVRVETAEFDTQRLKAMLEGKSLPVGTDYQLGEMYDEYNVRQYVLKRDNYTCQCCGAHPTEKKPVRLHVHHLESRHVGGNAPNNLITLCVACHKALHEGKITLDKGKKRGKPLRDAAFMGIMRNTLLARLKDELNIPVKQTYGYITKLLREKNKIPKSHVNDARCIAKAPNAKPCDTMLYTRALRHHNRQIHKAKILNGGIRKKNQAPYLVKGFRLWDKVRYNGEECFITGRRSSGYFALKKYDGTVISNSASYKKLMLLEAATNYITERS

SEQ ID NO: 11651 - protein, 408 aa, unidentified
  REGION 1..408: note = Human gut metagenome
MVYVQDINGKPMMPTTRHGKVRRLLKDKKAVVVNLCLFTIKLMYVTSDYKQEIVLGVDAGTKHVGLSATTKSKELYSSEVILRNDIVDLLSTRRELRRSRRNRLRYRKPRFDNRIKSKRPGWVAPSVKYKVDAHIRVIDNVCSILPISRIVIEVAQFDTQKINNPNISGKEYQEGDQLGFWNVREYVLARDGHKCQHCKGKSKDPVLNVHHIESRKTGGDFPSNLITLCETCHKEYHKGNIDLKIKRGSSLRDAAVMGIMKWRLYEELKSKYDNISMTFGYVTKYNRIKHGIEKSHVFDAFVISKNFDAIRLGYYYKVRLVRRHNRQIHKQKIPKGGIKRPNQSPFEVFGFRLFDRVMFENSYYFIFARRKTGSFNIRDIDGKNQRDITYKKLKLSRCKRFMVQKEMD

SEQ ID NO: 11652 - protein, 414 aa, unidentified; identical to SEQ ID NO: 2588
  REGION 1..414: note = Human gut metagenome

SEQ ID NO: 11653 - protein, 456 aa, unidentified; identical to SEQ ID NO: 6594
  REGION 1..456: note = Human gut metagenome

SEQ ID NO: 11654 - protein, 408 aa, Bacillus sp.; identical to SEQ ID NO: 9968

SEQ ID NO: 11655 - protein, 480 aa, unidentified
  REGION 1..480: note = Human gut metagenome
LYTKPLDNIGEGSLPPSGEINLKGMTFMVYVKSIDGKVLMPTSNAKARKLLKQKKAKVVSLRPFVVKLTYKTKTEYIQKLNLGVDSGYSNIGFSVIDAKQEYIAGEVKLLEGMKKRLLEKASYRRIRRSRLRYRKARWNNRVKSKKKGWLAPSLKHKLDTHIKFIDYLKNILPIEKITIEVANFDIQKMKDDLISGIDYQNGDMFGFWNVREFVLHRDGHKCQNPNCKHKDKKEQILKVHHIRYRSEGGSDRPENLITLCSKCHTPANHKKGKFLYDWCVNGKKVRGFKDATFMSMIRWYLVNELKSKHNNVSITYGYITKNHRIQNGIEKSHLNDAFAIAKGTNQARTKDRFLVIQDRLKNRSLEKFYDSKIIDIRTGKKVSGGDLSCGRSTRNKNLNTENLRKYRGAKISKGQRRIRKQKYFYQSNDLVKYDGKVYTVKGTQNEGKYIALKEIKKVPKVELLIPYVFKKGLNWSYGLC

SEQ ID NO: 11656 - protein, 413 aa, unidentified; identical to SEQ ID NO: 2636
  REGION 1..413: note = Human gut metagenome

SEQ ID NO: 11657 - protein, 427 aa, Nostoc sp.; identical to SEQ ID NO: 2670

SEQ ID NO: 11658 - protein, 442 aa, unidentified
  REGION 1..442: note = Human gut metagenome
MVTVQQSTHHLPFGRVFIRRNLFMVYVISQDGKPLMPCSDPIARLLLKQGKAKVKKREPFTIKLTYETTNYTQGLTLGVDTGSGTIGTAVSKDNGDIVYMSEVVVRNDITDKMTQRAKYRRNRRNRKTRYRKARWLNRASSIKKDRFSPTMQSKLHSHVREIEYIQSILPVTEMVFETGQFDMHLMKNPSLANPKVRPWGYQKGANYGFENTKAMVLNRDNYTCQCCKGKHKDSKLEVHHIVFRSQGSSDEESNLLTLCHTCHKDLHSGKINPKLSGKVKGNLKYATQMNSIRKQLFRFYPNAIETFGYVTKVNRLHLGVAKEHYYDACTIATQGNAFNVKSNLYKKKCVSDGDFQKTKGIRSEQPIVTDKICGFRKFDKVRYFGNDYFIKGRMSTGYAILMDIDGNKIDFSTMPRGYKTPKLSNCKRITARSTVMTQVKVV

SEQ ID NO: 11659 - protein, 454 aa, unidentified; identical to SEQ ID NO: 8421
  REGION 1..454: note = Human gut metagenome

SEQ ID NO: 11660 - protein, 422 aa, Petrotoga sp.; identical to SEQ ID NO: 6564

SEQ ID NO: 11661 - protein, 465 aa, unidentified; identical to SEQ ID NO: 3603
  REGION 1..465: note = Human gut metagenome

SEQ ID NO: 11662 - protein, 427 aa, Calothrix sp.; identical to SEQ ID NO: 9900

SEQ ID NO: 11663 - protein, 408 aa, Petrotoga sp.
LKKGKAAVFRYHPFTIILKEREGGDTQPIQVKIDPGSKITGVTLVGDFKNGKKVIWGAEIHHRGQSIKKALDTRRGVRRSRRNRKIRYRIARFDNRKRSKGWLPPSLISRVENILTWIKRIRRFSPITGISLELVRFDTQKLQDPEINGIEYQRGTLYGYEIKEYLLEKWGRKCVYCGKENVPLEIEHIVPKSKGGSDRISNLTLACHECNQKKGNQSIEEFLTNNPERLKQIKSESKRPLKDTAALNATRWYIFNQLRGNSLTAGKEELPIEVGTGGRTKYNRETQNYPKKHWIDAACVGESGQNVQIEPDMQVLEIKAMGHGMRRMCFVDKYGFPKSYRPKERTYMGYKTGDIVLAVIPKGKNMGIHIGRIAIRHRPSFLLNGVGDVHPKYLTLLQKNDGYGYQIS

SEQ ID NO: 11664 - protein, 413 aa, Blautia sp.; identical to SEQ ID NO: 3290

SEQ ID NO: 11665 - protein, 422 aa, unidentified; identical to SEQ ID NO: 4124
  REGION 1..422: note = Human gut metagenome

SEQ ID NO: 11666 - protein, 406 aa, Moorena sp.
  SITE 406: note = misc_feature - Xaa can be any naturally occurring amino acid
MVYVINFEGKPLMPTTNAKARKLLKQKKATVKRVNPFIIQLLYKTDTEYIQTITLGIDSGYLNIGFSAITDSKELIVGEVKLLQGIKDRLLEKSQYRRIRRQRLRYRKPRWNNRKIKQGWLAPSLQHKLNTHLKFIDYLNSILPIRNIVIEVANFDIQKIKNPDISGVEYQQGEQMGFWNVREYVFHRDGHKCQNPNCKNKSKEQILEIHHIKYKSEGGSDAPSNLITLCNKCHTSPNHKKGKFLYDWCENGKKVRGFRDATFMSMIRWYLLEQLKEKYTNIKATYGYLTKNHRIEHGIEKSHFNDAFAIAKGVNQVRNLEVFKVEQSRLNNRSLEKFYDAKYIDNRTGEKVSASELNCGRRTRNKNLNSENLRMFRGQKISKGQRRIRKQKSLYQPNDLIKYNGX

SEQ ID NO: 11667 - protein, 423 aa, Moorena sp.; identical to SEQ ID NO: 7848

SEQ ID NO: 11668 - protein, 442 aa, Moorena sp.; identical to SEQ ID NO: 3161

SEQ ID NO: 11669 - protein, 442 aa, unidentified; identical to SEQ ID NO: 3234
  REGION 1..442: note = Human metagenome

SEQ ID NO: 11670 - protein, 237 aa, unidentified
  REGION 1..237: note = Human gut metagenome
MYDEYNVRQYVLKRDNYTCQCCGAHTTKKKTVKLHVHHLEGRQVGGNAPNNLITLCVDCHKALHAGKVKLDGKKRGKSFKDAAFMGIMRKTLMARLRDELPIPVQGTYGYITKMRREQNDIKKSHVNDARCISKHPLAEPCSVCYRTKAIRHHNRQTHKANFSKGGTRQRSQMPYVVEGYRLWDKVLYKGQECFVSGRRASGSFTLKKLDGTRISKGVTFKKLRLLETATNYLIERM

SEQ ID NO: 11671 - protein, 413 aa, Clostridium sp.; identical to SEQ ID NO: 4134

SEQ ID NO: 11672 - protein, 443 aa, unidentified
  REGION 1..443: note = Human gut metagenome
LTKDENRPSGRTTGLRAEQAEPAGIRKGDTLKVFVLNMRGKPLMPCSPAKARHMLKAGKAVVVRRTPFTIKLTIATGETKQDVTLGVDAGARHVGISATTEKEEVFASEVALRQDITGLLADRLAFRRARRNRKTRYRAPRFNNRVRSKHKGWLAPSVENRIQAHISRIEAVCRLLPVTKIVIETASFDIQKIRNPEVEGTGYQQGDQLGFWNVREYVLFRDGHICQHCRGRSKDPILNVHHLESRKTGGDAPNNLITLCETCHKAYHAGKIKLKVKRGQSFRAEAFMGIMRWTLLDRVRKTHPKLPVENTYGYLTKHKRIALGLPKTHCADAFCIAGNLKALRRGDFLFQQQTRKHNRQIHKCSILKGGVRKLNQAPFLVKGFRLFDKVRIGGQIGFVFGRRVRGTFNIRRLDKTVIGTDINCKKLSLLETRKTFLTELRKE

SEQ ID NO: 11673 - protein, 412 aa, unidentified; identical to SEQ ID NO: 6751
  REGION 1..412: note = Human gut metagenome

SEQ ID NO: 11674 - protein, 416 aa, unidentified; identical to SEQ ID NO: 5948
  REGION 1..416: note = Human gut metagenome

SEQ ID NO: 11675 - protein, 414 aa, unidentified
  REGION 1..414: note = gut metagenome
MPCSPAKARLLLKEKKAIVKRRTPFTIQLTIATGEAKQPVSLGIDAGYKHVGLSASTEKAELYASEVELRQDITDLLSARRALRQSRRNRKTRYRAPRFDNRISTKRKGWLAPSVENRINAHLSRIEAVLRLLPVTKITVETASFDLQLLKNPDISGKEYQEGEQLGFWNIREYVLCRDGHVCQHCYGRSKDPVLNVHHLESRRTGGDSPGNLITLCETCHKALHRGEITLKPKRGQSFRAEAFMGIMRWEVLGRLKASHPELEVNNTYGYRTKHARIANDIAKSHCADAFCIAGNLGAERLGEFFFQKQTRRNNRQIHKLSILKGGIRKRNQAPYEIKGFRLFDKVACQGEEGFIFGRRSSGFFDVRKVDGTRISAGISYKKLHLLEKRRTYLTEIRKEEVLPPLPEGRGLRA

SEQ ID NO: 11676 - protein, 231 aa, unidentified
  REGION 1..231: note = Human gut metagenome
LGKDSHSLRRGQFCQSLTVTTTRKETTSMYVYVLNQHGEPLMPCSPRKARTMLRDHKATVVRRTPFTIRLLHGCSGYTQRITLGVDAGSKFIGLSACTESKELFAAEVKPRNDVVDLLSTRRELRRSRRNRKTRYRVARFDNRVHSKHKGWLAPSVEVKIQEHITAIKRTCAILPISMVIVETAEFDTQRLKAMLEGKPLPVGTDYQLGEMYDEYNVRQYVLKRDNYTCQC

SEQ ID NO: 11677 - protein, 431 aa, unidentified
  REGION 1..431: note = Human gut metagenome
MNRVFVLSKTGKTLMPCHPARARQLLHSKKARVKRLYPFTIQLTHRSDGYIQPVELKFDPGSKQTGIGLVLHGKNRLSAIYAAVLTHRGQEIKSNLDSRRMIRRARRNRKTRYRQARFLNRVRSKHKGWLAPSIQSRVNNIVEWSKRFIRLSPVGFITVESVKFDMQKMENAAVEGLEYQRGTLFDYEVKEYLLEKYNYSCVYCGAKNVPFEKEHVIPRSRGGSNRISNLVLSCHDCNQKKDNLPIEVFLKDNPALLKKIKAQLKSPLKDASAVNITRKQIVKELGNLNVPVLTGTGAETKYNRVSQKYPKEHYIDALCAGATGAKVYISSKLKPLLIKKERRNNRQMCLVDKYGFPRGKAKGSKIVKGFKTGDIVKAVVLKGKKKGTYKGKVAVRSSGSFNIKVKQGVVEGIGWKNCVMLYRFDGYSYTY

SEQ ID NO: 11678 - protein, 430 aa, unidentified
  REGION 1..430: note = Wastewater metagenome
MNSVFVLSNTKKPLMPCRPARARQLLTAGKAAVYRLHPFTIILKDRADGDVQDVEVKVDPGSKTTGVALVGHFEQQGAVVLFGANLSHRGQAIRNNLESRRSLRRGRRGRNTRYRPARFLNRTRKAGWLPPSVESRVMNTESVINKLANRCPITSATVELVKFDMQQMVNPEVSGVEYQQGELAGYEVREYLLEKWNRTCAYCGTQNVPLQVEHIQPKAHGGSNRVSNLTLACQPCNQRKGSQPVAEFLKGQPDVLKRIQAQAKAPLKDAAAVNASRWVLVNRLKAWLPVTTGSGGRTKFNRTRQGFEKDHWIDAVCVAESGERVSIRDGMKPLVITAKGRGTHQVVRTDRFGFPRGKAGRIKRAFGFSTGDIVKLHMPKGKYAGSYVARLAGIRATGTLDIKTAAGTVGASYKHFQLIQRNDGFDYATA

SEQ ID NO: 11679 - protein, 509 aa, unidentified; identical to SEQ ID NO: 5057
  REGION 1..509: note = Human gut metagenome

SEQ ID NO: 11680 - protein, 461 aa, unidentified
  REGION 1..461: note = Human gut metagenome
VQPLYLGIDPGRTNIGVAAVKANGTAVFTAHLESRNKEILKLMQDRKKARRARRTNGRRHRRQRRAKANGTISKKCVKQDTAQSKNPSKRAKEIGVIKRRLPGHKKDLLCIGIKNKEAKYTNRARPEGWLTPTAIQLLQTHINLVKKIQKFLPISDVVLEVNKFAFMRLDNPDIQKWQYQQGPLYQKGSLESAVSEIQEHHCLFCKKPIDHYHHVVPQHKNGSNTIGNIVGLCAKHHDLVHKDSAWEKKLAKKSTGLYKKYGALGVLNQIIPTLTNELSSLFPKHSFVTNGKSTYDYRAAHGVSKDHWLDAYCIACSVLPSNVCDSNINNHMPYELKQFRRHDRRVLNNENMNRVYTLNNKAVAINRHKAKDQKTVSLEEFRKEHPDDVCKLKVKEHHPTYRNMNRNFPGSVFLVGKQIHVMQGIASSKDGKATKYNDTSATAIAAGKCKFVAKNTGILFV

SEQ ID NO: 11681 - protein, 414 aa, unidentified; identical to SEQ ID NO: 4492
  REGION 1..414: note = Human gut metagenome

SEQ ID NO: 11682 - protein, 479 aa, Streptomyces sp.
METAENGSGDVPTHDHAYAGGIGASRVFVLSKDGQPLMPCHPARARELLGKGRAVVARQVPFTIRLKDRTLAESEVDGVRLRIDPGSKGTGLALTDEKKEADEHGATVTVRRGLIAVELQHRGDQIRMCMQQRAGYRHRRRSANCRYRAPRSDNRARPEGWLPPSLRHRVDTTVSLARRMCRYAPITEIHIERVAFDTHAMTAGSPLAGTEYQQGTLAGTEARAYLHAKWNRACAYCDAAGVPLNIDHLRPRSRGGSDRVSNLVLACVPCNQAKGSTPVDVFLAHRPDRLAEILQQVKTPLHDAAAMNATHWRLTEALESLGRPILAWSGGRTKWNRTAMGLDKTHTVDALCVGGLDHEDGDAIVRLPEQVLIAKATGRGSYARTTPDRFGFPRLRRARAKQHFGYVTGDLVRATIPTGKWAGTWTGRISVRARGQHSLATPRGRINVSHWNLRLVQRGDGYGYATRRELVQSPSRKTG

SEQ ID NO: 11683 - protein, 422 aa, unidentified
  REGION 1..422: note = Human gut metagenome
LRVFVINQRGKPLMPCSPAKARVLLREKKARVKRRTPFTIQLTTATGEARQDVSLGVDAGYRHVGLSASTEKAELYASEAVLRDDITDLLSARLALRRARRSRKTRYRAPRFLNRVHSKNKGWLAPSVEQRIASHLKLVENVCRLLPVTKITVETASFDMQAIKNPDIKGAEYQQGEQLGFWNVREYVLWRDGHQCQHCRGKSGDPILNMHHLESRRTGGDAPNNLVTLCETCHKAYHAGRIDLKLKRGRSMRAEAFMGIMRWTFFNRLKEIYSGKTVENTYGYLTKHTRITHGIEKSHCADAYCIAGNLRAERLPDYLWQKQVRKHNRQIHKLTIGKGGIRKRQQTPFEVKGFRLFDKVRLGDEEGFIFGRRSSGYFDVRRLDGQKLSAGVSFRKLHLLEKRTTYLTVLLPRLKTRVSAPE

SEQ ID NO: 11684 - protein, 434 aa, unidentified
  REGION 1..434: note = Human oral metagenome
MTTQKVIQVCVLDQNGTPLMPTQRLGKVYRLLKTKKAHIVNYEPFTIKLDYEPKTHIIQPMTLGVDSGAIHSGYSLANEHREYYNTEVIARDNISKNLSDRRMYRRNRRSRKTRYRKPRFSNRKNKGEGWIPPSLEQKVYVQVKEIEHLHKYFPINNIIIEVAEFDTQKIENPDISGNEYQQGTLHGYNIRNYLLEKYHHKCFYCDKEVSAFEVEHMIPRARSGSNRIDNLTLSCHDCNQKKGTLTAEEFIKQTLSSQKAAQKLRQIPKTKQLLKYMAHMNATRWALYNTIKETYESVSLTYGYITKYNRINAGLPKAHHIDAKCITGFSTVPSFDVTVVKTKMRRHNRQLHRATFSKGHVRRAATLPRLVHGFQLYDIVLFNKHRYYIKSRRSSGSFSLVSLEGLKDENRTYKKLTFLTHTNAYLTNHYINGK

SEQ ID NO: 11685 - protein, 406 aa, unidentified; identical to SEQ ID NO: 9317
  REGION 1..406: note = Human gut metagenome

SEQ ID NO: 11686 - protein, 447 aa, unidentified; identical to SEQ ID NO: 3915
  REGION 1..447: note = Human gut metagenome

SEQ ID NO: 11687 - protein, 446 aa, unidentified
  REGION 1..446: note = Human gut metagenome
VAFSLATIQKKEEGIMPNKVYVINKHGRPLMPCSPAKARHLLDDGKAKVKKRTPFTIQLVYGSSGYTQEVILGVDAGSKTIGMSASTTKEELLSAEVKPRNDVVDLLSTRREFRRARRNRKTRYRKPRFDNRVRSKHKEWLAPSVEVKIQEHITSIKRVCRILPVSKVVVETAEFDLQLLKAIADGKPVPQGEDYQQGEMYGHYNVRQYVLWRDGYTCKCCGAHTTKKKEVRLHVHHLESRKVGGDAPDNQVTLCESCHEKLHKGLIAEKDFKKRKRKSTRDATFMGIMRKTLMQRLCSELPIPVIETRGYITKATREKLLVLPKSHTNDALAIAQGKQGFNVGYLPGIEQIDKIYTIRPVRHHNRQLHKAAILKGGIRKSNQTGKYVFGYRLFDKVQFNGQDCFIWGRRTTGIFTIKTINGKMIKDGISFKKLKLVEKSTSYLIA

SEQ ID NO: 11688 - protein, 420 aa, unidentified
  REGION 1..420: note = Human oral metagenome
MLVYVLKQNGQPFMPTERFGKVRRLLKEGKAKVVRREPFTIRLLYEPETDVVQECYCGVDTGSRHIGVAVVGNDKVLYQSQTELRSDIKKKMDARRQARRSRRLRKIRYRKSRFLNRKNSIKKDRLPPSVRHKVQAHIDEIEFCKKILPIADLILEVSQFDTALMKNPSLVNEKIKKWGYQQGFNYGYSCRRKAILHRDGYTCQRCGKKNCRLEVHHIVFRRDGGTDDEENLITLCKDCHDGVHAGTVVLDKKPNKSNGLKHATHMSIIRSWLLKEYPDAIETFGFVTSENRNRLKLEKDHYIDACVIASGGLEFKELDVIYRKRRAPKQGRVLTKGIRGEQKLPTGKIFGFKKFDKVEYLGVTCFIKGRRSSGAFVLMDIDNNSIDFRDSGGKQNPSYRALKRVSARKSVLCIKERLER

SEQ ID NO: 11689 - protein, 420 aa, unidentified; identical to SEQ ID NO: 10448
  REGION 1..420: note = Human gut metagenome

SEQ ID NO: 11690 - protein, 509 aa, unidentified; identical to SEQ ID NO: 5585
  REGION 1..509: note = metagenome

SEQ ID NO: 11691 - protein, 424 aa, unidentified; identical to SEQ ID NO: 11636
  REGION 1..424: note = Human gut metagenome

SEQ ID NO: 11692 - protein, 492 aa, unidentified; identical to SEQ ID NO: 4486
  REGION 1..492: note = Human gut metagenome

SEQ ID NO: 11693 - protein, 428 aa, unidentified
  REGION 1..428: note = Human gut metagenome
LKVFVLNMRGQPLMPCSPAKARHLLKAGKAVVRRRTPFTIQLRIATGETKQNVTLGVDAGAKHVGLSAATEKEEVFASEVELRQDITGLLAARLSLRRERRQRKTRYRAPRFLNRVRSKHNGWLPPSVENRIQAHLSRIDAICGLLPVTKIVIETASFDIQKIKHPDVEGTDYQQGDQLGFWNVREYVLFRDGHVCQHCHGYSKDKILNVHHLESRQTGGDAPNNLITLCETCHKACHAGKIKLKVKRGQSFRAEAFMGIMRWTLLDRVRKAHPGLPVENTYGYLTKNTRITLGLPKTHCVDAYCIAGNLKAVRRGVCLHQRQVRKHNRQIHKCTVLSKTLKDGTKIGYRKLNQTPHLVKNFRLFDKVRCLGQTGFIFGRRSSGYFDVRRLDGVKLSSGISYRKLTLLEKRSTYLTELRKEDGASSPV

SEQ ID NO: 11694 - protein, 430 aa, Desulfobacter sp.
LSVFVLDTNKKPQNPVHPAKARLLLTEGKAAVFRQFPFTIILKEKALDVASNPLRIKIDPGSRETGIAVINDDSGEIIFAMELRHRGQQIKNNLESRRAIRRSRRNRKTRYRKPRFDNRTRAEGWLPPSLKSRVHNIETWVNRLCRFCNIQAISMELVRFDMQKIQNPEISGVAYQQGELMGYEVREYLLEKWDRTCAYCGKTDIPLEIEHIVPKSKGGSNRVSNLTLACTACNRKKGNKPLEQFLSRKPGLLKRIQKQSKVPLKDAGAVNTTRWDLFRTLKKTGLPVETGSGGLTKFNRTTRGLHKTHWLDAACVGKSTPEKIFQIDKTVLIVKADGHGSRQMCRVNKFGFPRTTAKSTEKKVKGFQTGDIVKAVVTSGKKVGTYIGRVAVRKSGSFNIKTVDKTVQGISWKYCRLLHASDGYSYNTTC

SEQ ID NO: 11695 - protein, 419 aa, unidentified; identical to SEQ ID NO: 3670
  REGION 1..419: note = Human gut metagenome

SEQ ID NO: 11696 - protein, 620 aa, Streptomyces sp.
MSSGRSFAMTSTSGSRPRSRRRRSSTSLRNASGRHDQASGSRSIAPWTLWPGPRPPWNRRARLTSSSHPRMEVPWMTTFHAGEKTHPAVLPQRRALESVGADTPGSRDETAHGHPAVAQGTDMEHERGEISGSGTRRQWRHPVAPATAEAAGETRNDDVLVKSSTNRGNTGDGRVFVLAKDGSPLMPCHPARARALLSEGRAVVARHSPFTIRLKDRTREQSEVEGVQVRIDPGSRATGIAITDEKKKLDQHGNCVNVRRGLVSVELQHRGQQISKALKQRSGYRRRRRSDNLRYRATRFDNRTRPSGWLAPSLQHRIDTTVATVDRLRRFAPVREVHLERVSFDVHAMSAGRELNAAEYQRGTLAGTEVREYLLAKWNRTCAYCGATGVPLNIDHIQPRSRGGSDRISNLTLACVPCNQAKGSDRIEVFLSDDSRRLAKILGQAKTTLRDSAAMNATNRQLAEALKTHGAPVYCWSGGRTKWNRTAMGLPKTHTLDALAVGSLDHEQGDAIVRIPNQVLVMKATGRGSYARTRPDKYGFPRLKLTRTKRHYGFQTGDLVQATVSTKKRRGTWTGRVVVRATGSHTVTTQHERLYTSYKNLRLLQRSDGYAYVVRKEAEV

SEQ ID NO: 11697 - protein, 413 aa, unidentified; identical to SEQ ID NO: 2636
  REGION 1..413: note = Human gut metagenome

SEQ ID NO: 11698 - protein, 396 aa, unidentified; identical to SEQ ID NO: 4508
  REGION 1..396: note = Human gut metagenome

SEQ ID NO: 11699 - protein, 419 aa, unidentified; identical to SEQ ID NO: 6671
  REGION 1..419: note = Human gut metagenome

SEQ ID NO: 11700 - protein, 538 aa, Streptomyces sp.; identical to SEQ ID NO: 9608

SEQ ID NO: 11701 - protein, 459 aa, Halomonas sp.
MAVFVLDRQKRPLMPCSEKRARLMLARGRAVVHKRYPFTIRLKDRVDGETQPLRLGIDPGSRITGLALMRENSEEREVGKRHVLCLFELVHRGFQIREALDQRRAFRRRRRTKNLRHRAPRFDNRTRRDGWLAPSLQHRVDTLSAWVDRLCRLAPITSLSQELVRFDTQKLDNPEISGVEYQQGTLLGYEIREYLLEKWRRECAYCGARNTPLEIEHIEPRRRGGSNRIGNLTLACHDCNQEKSADTLDAFFATARGLKKRLRQHRQSADARYRRVIQQHDRPLRDASAVNTTRWALNRNLKRKGLPVAVGTGGLTKYNRQRLGIPKTHALDAACVGQVEALHGWQVPTLTLRAMGRGSYQRTRLDKFGFPRGTLMRRKQVHGFQTGDMVKAVVPNGKKAGTHVGRVAIRQTGSFNIQTEHGVVQGISYRHCTVIQRGDGYRYHLTPFTHDRGEGRAVA

SEQ ID NO: 11702 - protein, 428 aa, unidentified
  REGION 1..428: note = Human gut metagenome
LKVFVLNMRGQPLMPCSPAKARHLLKAGKAVVKRRTPFTIQLRIATGETKQNVTLGVDAGAKHVGLSAATEKEEVFASEVELRQDITGLLAARLSLRRERRQRKTRYRAPRFLNRVRSKHKGWLAPSVENRIQAHMSRIDAVCRLLPVTKIVIETASFDIQKIKDPSVEGTDYQQGDQLGFWNVREYVLFRDGHVCQHCHGHAKDKILNVHHLESRQTGGDAPNNLITLCERCHKACHAGKIKLKVKRGQSFREEAFMGIMRWTLLDRVRKAHPGLPVENTYGYLTKNTRITQGLPKAHCVDAYCIAGNLKAVRRGVHLYQRQVRKHNRQIHKCTVLSKTLKDGTKIGYRKLNQTPHLVKNFRLFDKVRCLGQIGFIFGRRSSGYFDVRRLDGVKLSPSISWRKLTLLEKRSTYLTELRKQDGASSPV

SEQ ID NO: 11703 - protein, 344 aa, unidentified
  REGION 1..344: note = Human gut metagenome
VVDLLSTRREFRRAQRNRKTRYRKPRFDNRVRSKHKGWLAPSVEVKIQEHITSIKRVCRILPVSKVVIETAEFDLQLLKAIADGKPVPQGEDYQQGEMYGHYNVRQYVLWRDGYTCQCCGAHATKKKEVRLHVHHLESRKVGGDAPDNQVTLCESCHEKLHKGLIAEKDFKKRKRKSTRDATFMGIMRKTLMQRLCSELPIPVIETRGYITKATREKLLVLPKSHTNDALAIAQGKQGFNVGYLPEIAQIDKIYTIRPVRHHNRQLYKATILKGGIRKSNQTKKYVFGYRLFDKVQFNEQDCFIWGRRTTGIFTIKTINGKMIKDGISFKKLKLAEKSTSYLIA

SEQ ID NO: 11704 - protein, 328 aa, unidentified
  REGION 1..328: note = Human gut metagenome
RAPARRIPIRRQSGGVVQGYDSPEEYIHDVQNGKCLVCGKPHIDYLHHIIPRSKGGSDKVSNIAGLCYDCHYGPMGVHNCQNTQDRLPELKSEANKQYKVSLLNSVMPVLIEEMDKFCKANSIMFSICEGHDTAKVRDMYDLQKDHCIDGFAISLVDRNVKSVDVMPDRIYQKQRYKKKSKNIIQKRNCREYYDDKKLVAVNRHKGTDQKADSLEEYMNTYAETHTTDECKKHFDSLGVKPARRTYTFHKEWRICPFHIGDKVRYEKKNKIKGNTKVDTFICEGIRFVKDENKAEVKHNKTKSKKMKFCRVLESGCTPYVDYRKLALM

SEQ ID NO: 11705 - protein, 473 aa, unidentified; identical to SEQ ID NO: 3562
  REGION 1..473: note = uncultured beta proteobacterium

SEQ ID NO: 11706 - protein, 456 aa, unidentified
  REGION 1..456: note = Human gut metagenome
MSTCVCVLSNSGERLMPTFRLGKVRRLLKDGKAKIVKHHPFTIQLLYDSKANTQPIEICEDVGYNYIGISVKSQSHEYVSAQYDTLQDEKACHDSCRKLRRTRRNRLRYRKPRFDNRKRGEGWLAPSLRHKKELNVNVVKMYCAVMPITHATIEVGSFDTMLVKAIQEGKAIPEGADYQKGPRYNLATLREAVFYRDNYVCKVCGRKATEGAILHVHHMFYWKGRHGNSLSELITVCEKCHTPANHQKGGKLFGFGEDKEFANLSGAAFMNAVRWQIVNALYATYGKEFVTITYGAMTKEKRIILGIEKTHNNDAYAMGDYHPAHRCVFRHYQKRRRNNRVLEKFYDATYIDARTGNKAKGKELFNGRINRNHKKDSEDLHKYRSKKVSKGRRSIRRQRYAIQPYDTVRLEGKTYITSGCHNKGTRLLIPVNGKSKSVAISKVQVVCHAGAWIQII

SEQ ID NO: 11707 - protein, 494 aa, unidentified
  REGION 1..494: note = gut metagenome
MAMVYVQNKDGKPLMPTTRYCYVRLLLKENKARVVSTTPFTIQLNYDTPNITQDLILGIDPGRTNIGVAVVKEDGQCVFSAHLETRNKDVPLLMQKRAGFRKQHRTLDRRRKRQRRAKVAGTTVEGETIERLLPGCEKPVVCHYIRNKEARFNNRSRPAGWLTPTANHLLQTHINLIAKVAKFLPITKVVVELNRFAFMAMDNPNIRRWEYQQGPLYGLGSVEDAVYAQQNGHCLFCKKPIDHYHHVVPRHKGGSETLANRCGLCAKHHDLVHKDKAWAEKLVTRKGGMNKKYHALSVLNQIIPHLMEYLGNETLYDVYATDGRSTKGFRIAKNVPKEHYTDAYCIACSILDTDIEVSTPFEPFELKQFRRHDRQACHQQRVDRKYYLNGKQVATNRHKAIEQKSNSLEEFREAYGDAAVSQLTVKPHPPQYKDMTRIMPGAVMDFDGNVGVLQGADGFHNGKPDYYSSTKGEKVRARRCTLLARNAGTVFIPA

SEQ ID NO: 11708 - protein, 338 aa, Moorena sp.
LSARRALRQSRRNRKTRYRAPRFDNRIRTKRKGWLAPSVENRIDAHLSRIEAVLRLLPVTKITVETASFDLQLLKNPDISGKEYQEGEQLGFWNIREYVLCRDGHVCQHCYGRSKDPVLNVHHLESRRTGGDSPGNLITLCETCHKALHRGEITLKAKRGQSFRAEAFMGIMRSEVLNRLKASHPELEVNNTYGYRTKHARIANDIAKSHCADAFCIAGNLGAERLGEFLFQKQTRRNNRQIHKLSILKGGIRKRNQAPFEVNGFRLFDKVACKGEEGFIFGRRSSGFFDVRKLDGTRISAGISCKKLHLLEKRRTYLTEIRKEEALPALPEGRGLRA

SEQ ID NO: 11709 - protein, 461 aa, Parasutterella sp.; identical to SEQ ID NO: 3646

SEQ ID NO: 11710 - protein, 326 aa, unidentified
  REGION 1..326: note = Human oral metagenome
MDSRRGFRRNRRYRKTRHRKARFLNRANSKKKDRLPPSVKSKVQSHVDEIEFCKKILPVRKIVLEVSQFDTALMKNPALINEKIKRWGYQKGFNYGYSSRREAVIHRDNYTCRCCGKRHTRLEVHHIVFRSQGGTDDEKNLITLCKDCHDAIHNGTLVLTKKPRRLSLKHATHMSIIRSRLLKIYPDAIETFGFVTKENRNNLNLQKGHFIDACVIASGGKEFKQSDLLFKKRRVPRQNRQLCKGIRGEKKIHTGKLFRFKRFDKVRYLNEICFIKGRRSSGAFVLMDIDNNSIDFRDRGGKQNPSYKLLERLNTRRSTLCIGQII

SEQ ID NO: 11711 - protein, 410 aa, unidentified
  REGION 1..410: note = Human gut metagenome
MFVDMVYVQDIDGKPMMPTTRHGKVRRLLKDKKAVVVNLCPFTIRLTYVTSDYKQEIVLGVDAGTKHVGLSATTKSKELYSSEVILRNDIVDLLSTRRELRRTRRNRLRYRKPRFDNRIKSKRPGWVAPSVKYKIDAHIRVIDNVCSILPISSIVIEVAQFDTQKIKNPEILGKEYQEGDQLGFWNTREYVLARDGHKCQYCKGKSKDKILNVHHLESRKTGGDSPSNLITLCETCHKEYHKGNIDLKIKRGSSLRDAAVMGIMKWKLYEELRSRYDRVSMTFGYITKHNRIKYGIEKSHTSDAFVISMNINAKRIERQYLKRLIRRHNRQIHKMKILKGGKKKNNQAPFEVFGFRLFDKVLYNNKILFVYGRRKSGSFNIRDFNGENSKDVSRKKFKLIRGKRHPIILK

SEQ ID NO: 11712 - protein, 420 aa, unidentified; identical to SEQ ID NO: 3504
  REGION 1..420: note = Human gut metagenome

SEQ ID NO: 11713 - protein, 451 aa, Blautia sp.; identical to SEQ ID NO: 5203

SEQ ID NO: 11714 - protein, 443 aa, Anoxybacillus sp.
MVEENMTCFMQRKGENPMVFVLDTNKRPLAPCHEAVARKLLKQGKAAIYRRFPFTIILKKSVDESEIKATYRLKIDYGSRHTGLAILRGQEVVWLGQLDHRTDIKERIDKRRAFRRARRNRKTRYRKPRFLNRKRKEGWLPSSLESRVQNIQTWVNRLKKLCPIGYISYENAKFDTQLMRNPEINGVEYQQGTLQGYEVREYLLEKFGRKCCYCGKENVPLEVEHIIPKSRGGTDRVDNLCLACHDCNQRKGSKTAEEFGYPHIQKQVKETLKDTSAINSTRWKVYEVLKQTGLDVECGTGARTKMNRIRLDLPKTHYFDACCVGESTTNHLYFKTKEVLFIKAKGRGSRSRTNLDRYGFPRGYLARQKFFFGFQTGDMVKAVVPRGKYQGVWFGEVACRKTGSFDIKGKDGKRIAQGINYRYVQVIQRFDGYAYGKGVAELA

SEQ ID NO: 11715 - protein, 420 aa, unidentified
  REGION 1..420: note = Human gut metagenome
MQYAYVLNKRGEPLMPCSPGKARILLKQQKACVVKRTPFTIKLLHGSAGYKQPITLGVDAGSKHVGLSASTEKRELYSEEFTPRNDVVELLSTRRQNRRSRRNRKTRYRAPRFNNRVHSKHKGWLAPSVEVKIQEHITVIKRICRILPITLVRVETAEFDTQRLKAMLAGKPLPVGTDYQLGEMYDEYNVRQYVLKRDNYTCQCCGAHTTAKKTVKLHVHHLESRKVGGNAPSNLITLCTTCHNNLHKGKITLDGKKRSKTLRDAAFMGIMRNTLLTRLRNELNIPVQNTYGYITKLLREQNDIKKSHVNDARCISKHPLAKPCSVCYRTKAIRHHNRQIHKAKILKGGIRKANQAPYIVKGFRLWDKVLYNEQECFISGRRSSGYFALRKFDGTTITNSISFKKLRLLEPATNYLIERK

SEQ ID NO: 11716 - protein, 449 aa, unidentified
  REGION 1..449: note = Human gut metagenome
VTTILKTCFAAFNLAKVVVLMDAWDIIVVLNKRGKPLMPCSPAKARLLLKEKKAIVVRRTPFTIQLTIATGETKQPVSLGVDAGYKHVGLSASTEKAELYASEVELRQDVSDLLSARRALRQSRRNRKTRYRAPRFDNRIRTKRKGWLAPSVENRINAHLSRIETVLRLLPVTKITVETASFDMQLLKNPDIAEKEYQEGEQLGFWNVREYVLFRDRHVCQHCYGRSKDPVLNVHHLESRRTGGDSPGNLITLCETCHKALHRGEITLKAKRGQSFRAEAFMGIMRWEVHSRLRALHPGIEVSNTYGYRTKHARIANGIAKSHCADAFAGNLGAERLGEFFFQKQTRRNNRQIHKLSILKGGIRKRNQAPFEVKGFRLFDKVACQGEEGFIFGRRSSGFFDVRKLDGTRISAGISCKKLHLLEKRRTYLTEIRKEEALPPLPEGRGLRA

SEQ ID NO: 11717 - protein, 413 aa, unidentified
  REGION 1..413: note = Human gut metagenome
MTSYSFVLDANGKQLAPTKEPKAWFLIRKKRAALVSKYPMVIQLKKKIQENEICKDEIRCGIDDGGLHVGIALVQKCKSKNKVVFKGTIEQRNDVKHLMEVRRNYRRYHRYHKRYRQARFDNRKSSKRKGRIAPSILQKRQATIRVINRLNKWINITNYWLEDVSIDIRVLTDGYKSYSWQYQKSNRLDENIRKATILRDGGKCMECGKSNCRLEVHHIKPRRRNGSNTLENLITLCESCHQKTEGQEELYMDRYFSLLKSSDNKNLNYAQHVMIGKMWLRKQLSGLGVLYLTSGGDTANKRIDWNIEKSHTNDAVCITDLQPDTCDIKEWAIKPMRRQSKAKTDHVLGIHHRDLVEYTFKNGETHRGYVTALYPDQKAINFQSQTKHCKKVNARKCKLLWNYSKIYWFENAS

SEQ ID NO: 11718 - protein, 296 aa, unidentified
  REGION 1..296: note = Human gut metagenome
INAHLSRIEAVLRLLPVTKITVETASFDMQLLKNPDISGKEYQEGEQLGFWNIREYVLCRDGHVCQHCYGRSKDPVLNVHHLESRRTGGDSPGNLITLCETCHKALHRGEITLKAKRGQSFRAEAFMGIMRWEVLNRLKASHPELEVNNTYGYRTKHARIANDIAKSHCADAFCIAGNLGAERLGEFFFQKQTRRNNRQIHKLSILKGGIRKRNQAPFEVNGFRLFDKVACKGEEGFIFGRRSSGFFDVRKLDGTCISAGISYKKLHLLEKRRTYLTEIRKEEALPPPPEGRGLRA

SEQ ID NO: 11719 - protein, 399 aa, Moorena sp.; identical to SEQ ID NO: 3828

SEQ ID NO: 11720 - protein, 537 aa, Moorena sp.
VTDAPAGFPGSQLCQAYAEARETLPPLWGVPYRKKLRKEITLNMDMVYVLNKDGKPLMATTRGGRVRYLLKEKKARVVSSTPFTIQLNYDTPDITQDLILGIDPGRTNIGVAAVKEDGQCVFSAHLETRNKDVPLLMKKRAGFRKQHRTLDRRRKRQRRAKVAGTTVEGETIERLLPGYEKPVVCHYIRNKEARFNNRSRPAGWLTPTANHLLQTHINLIAKVAKFLPITKVVVELNRFAFMAMDNPNIRRWEYQQGPLYGLGSVEDAVYAQQDGHCLFCKKPIDHYHHVVPRHKGGSETLANRCGLCERHHALVHKDKAWAEKLVTRKGGMNKKYHALSVLNQIIPHLMEYLGSETPYDVYATDGKSTKGFRIAKNVPKEHYTDAYCIACSILDADTKVSTPAEPFKLKQFRRHDRQSCHQQRVDRKYYLDGKQVATNRHKAIEQKSNSLEEFRETYGDAAVSQLTVKPHPPQYKDMTRIMPGAVMNFCGAVGILLGSDGFHNGKPDYYKSTKEEKVRMRRCALLAQNAGMVFIPA

SEQ ID NO: 11721 - protein, 431 aa, unidentified
  REGION 1..431: note = Human gut metagenome
MPNKVYIINKHGRPLMPCSPAKARHLLDEGKAKVKKRTPFTIQLIYGSSGYTQEVILGVDAGSKTIGMSVSTTKEELLSAEVKPRNDVVDLLSTRREFRRARRNRKTRYRKPRFDNRVRSKHKGWLAPSVEVKIQEHITAIRRVCGILPVSKVVVETAEFDLQLLKAIADGKPVPQGEDYQQGEMYGHYNVRQYVLWRDGYTCQCCGAHATKKKEVRLHVHHLESRKVGGDAPDNQVTLCESCHEKLHKGLIAEKDFKKRKRRSTRDATFMGIMRKTLMQRLCSELPIPVVKTRGYITKATREKLLVLPKSHTNDALAIAQGKQGFNVGYLPGIVQINKIYTIRPVRHHNRQLHKATILKGGIRKSNQTEKYVFGYRLFDKVQFNGQDCFIWGRRTTGIFTIKTINGKMIKDGISFKKLKLAEKSTSYLIA

SEQ ID NO: 11722 - protein, 515 aa, unidentified
  REGION 1..515: note = Human gut metagenome
MTALEERLSKTEYIYVLGFDGKPQMPTRRKRHVLKLLKTGRARIAEDIPFTIRLTYRNAPVLQPVTLAEDPGRTNIGAAVLSPLGDLLFAAVIETRNKEIKKLMADRKKSRQASRRGERKARQRLAKRYGSMVKSGMIIRKLPMYAADKFVTCKFIRNTQARFCNRKRCPDWITPTVQHLVQTHLNIIRKISRYLPVTDIAFEVSRFAFMHMENPEAIGVDFQNGPLKGYGDVKEAIRTQQHGKCLMCKKPIAHFHHIVPRSRGGSDTIQNLAGLCPECHTKVHTDTAFRKDFDEKKSGQLKKYGALSALNQAVPFICKKLLEEYGEEHVHFCGGLDTSLIRTALGFEKTKKNQMHEVDAYCIGLAALEVNEVETPAFDHTFQIRQFRRQDRSIIHHQTGRSYYQGKEKVAQNRKPGFEQKTTALSQWYEEQVRIHGEKEAEKLRSQLRVEKSCRHYNDMDRFLPGAVFLYEGKRYVLSGRITNGKYLRACGQGMKNFPAAECTFIRHNAGLVFI

SEQ ID NO: 11723 - protein, 512 aa, unidentified; identical to SEQ ID NO: 3971
  REGION 1..512: note = Human gut metagenome

SEQ ID NO: 11724 - protein, 434 aa, unidentified
  REGION 1..434: note = Selenomonadales bacterium
MGFLTTWARRKILPKGKVAEMPIFKKYAFVMDAEGKRLDPTIEQNAWRLVRQHKARLVSKFPIVIQLNKVVDNPNNDEIRCGIDDGANHIGLALAQKCQTRNKVLFKGTIEQRKDVKHLLTVRRGYRRYHRYHKQYRPARCLNRASSRRSGRLMPSIIQRKQAILRVIDRLCQWINIDGYWLEDVKIDIRALTDGYKPYRWQYQKPNRVDNNLRLAAIHRDGCKCVECGKTKTRFEVHHITPREVGGADTISNLITLCPKCHAKTFGRESQFADRYYALIGSTGHVEGLADAQRVMQGKHWFREQLQQRGSLVLTTGGNTANKREDWDIAKTHSNDAVCITDLKPENIDIEEWTIKPMRRKNKAGVDEVCGFHHRDYVTYTYRNGETHTGYVTAMYPELHALNFQSPTKHCKKANALKCKLVWRYSKIYWLKCV

SEQ ID NO: 11725 - protein, 495 aa, unidentified
  REGION 1..495: note = Human gut metagenome
MAVVYVISKSGKPLMPTTRCGHVRILLKEGKARVVERKPFTIQLTYESTEETQPLVLGIDPGRTNIGMSVVTESGESVFNAQIETRNKDVPKLMKDRKQYRMAHRRLKRRCKRQRRAKAAGTVFEEGAKQRLLPGCSKPITCKSIRNKEARFNNRKRPAGWLTPTANHLLVTHLNAVRKVQKILPVTKVVLELNQFAFMAMDNPKVQRWQYQRGPLYGKGSVEEAVSMQQDGHCLFCKHGIDHYHHVVPRRKNGSETLENRVGLCEEHHRLVHTDKEWEAKLSSKKAGMNKKYHALSVLNQIIPYLADQLADMFPGSFCVTSGQDTYMFREKHGIPKDHYLDAYCIACSALTDANKVSVPKGKPYMVRQFRRHDRQVCHKANLNRSYYSDGKLVATNRHKAMEQKTDSLEEYRAAHSTTDISKLTVKHPPAQYKDMSRVMPGSILMSDDGKLFTLVRSDGRKKGQVNYFVDTQGEKHWARKCLYLRNNGGLQIYV

SEQ ID NO: 11726 - protein, 414 aa, unidentified
  REGION 1..414: note = Human gut metagenome
MPCSPAKARLLLKEKKAIVKRRTPFTIQLTIATGEAKQPVSLGIDAGYKHVGLSASTEKAELYASEVELRQDITDLLSARRALRQSRRNRKTRYRAPRFDNRISTKRKGWLAPSVENRINAHLSRIEAVLRLLPVTKITVETASFDLQLLKNPDISGKEYQEGEQLGFWNVREYVLFRDGHVCRHCHGRSKDPVLNVHHLESRRTGGDSPGNLITLCETCHEALHRGEIALKTKRGHSFRAEAFMGMMRWEVLNRLKASHSELEVNNTYGYRTKHARIVNGIDKSHCADAFCIAGNLGAERLCEFFFQKQTRRNNRQIHKLSILKGGIRKRNQAPYEIKGFRLFDKVACQGEEGFIFGRRSSGSFDVRKLDGTRISVGISCKKLRLLEKRRTYLTEIRKEEALPPLPEGRGLRA

SEQ ID NO: 11727 - protein, 416 aa, unidentified
  REGION 1..416: note = Human gut metagenome
LLFYRKEHGIMQYVYVLNKHGEPLMPCSPGKARLLLKQQKACVVRRTPFTIKLLYGSAGYKQPITLGVDAGSKHVGLSASTEKRELYSEEFTPRSDVVKLLSTRKQNRRSRRYRKTRYRAPRFDNRVHSKHKGWLAPSVEVKIQEHITVIKRICKILPISLVRVETAEFDTQRLKAMLAGKPLPVGTDYQLGEMYDEYNVRQYVLKRDHYTCQCCGAHNTAKKVVKLHVHHLESRKTGGNAPSNLVTLCTTCHKNLHKGKVTLDGKERGKPLRDAAFMGIMRKTLMARLKEELPIPVQGTYGYITKMRREQNDIKKSHTNDARCISKHPLAEPCSVCYRTKAIRHHNRQTHKANFSKKGIRKRSQMPYLVEGFRLWDKVLYKGQECFVSGRRSSGSFALKKLDGTSISKGVTFKKL

SEQ ID NO: 11728 - protein, 416 aa, unidentified
  REGION 1..416: note = Human gut metagenome
MTNCENYAFVLDAESKQLSPTKEKKAWYLIRKKRAILVSKYPMVIQLNKIVSNDNICKDEIRCGIDDGGLHVGIALVQKCQTKNKTLFKGTIEQRNDVKHLMKVRWDYRRCRRYHKRYRPKRINNRSSSKRTDRIAPSILQKRQATLRVITQLNKWINITSYWLEDVAIDVRVLTDGFSSYGWQYQKSNRLDENIRKAVILRDGCRCMECGQSNCRLEVHHIKPRRLNGSNTLGNLITLCESCHQKTEGKEEQYMQHYFNILESSDNKNLNYASYVMIGKTWLRKQLSQLGVLNLTTGGNTANKRIDWNIEKSHSNDAVCIIDLQPDSCNVKDWIIKPMRRQSKAKTDNVLGIKHRDLVSYVYKNGELHTGYVTALYPELNALNFQSPTKHCKKVNVRKCRVLWKYNKIYWLDSVS

SEQ ID NO: 11729 - protein, 515 aa, Blautia sp.; identical to SEQ ID NO: 9146

SEQ ID NO: 11730 - protein, 496 aa, Streptomyces sp.; identical to SEQ ID NO: 4777

SEQ ID NO: 11731 - protein, 424 aa, unidentified
  REGION 1..424: note = Human gut metagenome
MVYVIAKDGSPLMPCSNVIARLLLKQQKAKVKRKTPFTIKLTYETTKYTQNLTLGVDTGSGTIGTAVCRDNGEVVYMSETEIRNDIADRMKQRRSYRRTRRNRKTRYRKPRFDNRGNSIKKGRFSPTIRSKLHSHVKEIEYIKSILPITQVVLETGQFDPHLLKNPALASEKVKHWGYQKGPNYGFENTRAMVLERDNHVCQHCKGKRKDNRLEVHHIVFRSHGGSDRADNLITLCHTCHKKLHAGKIRLKLDEKPKDTLKHATQMNSIRKQLLKIYPDAKETFGYITKTNRLLLGVEKEHFYDACVIARQGDPFVIKCDLVKKKCIAKGDFQKTKGPCSDQRIETGKIGGFRKFDKVRYLGKDYFIKGRMSTGFAILMDVNGKKADFSFMPRGSKTPKMEKLRRLEARSSWMVMTVAVTQNIA

SEQ ID NO: 11732 - protein, 404 aa, unidentified
  REGION 1..404: note = Human gut metagenome
MPNKVYVINKHGRPLMPCSPAKARHLLDAGKAKVKKRTPFTIQLVYGSSGYTQEVILGVDAGSKTIGISASTKKEEVFAADVTPRNDVVDLMSTRREFRRARRNRKTRYRKPRFDNRVRSKHKGWLAPSVEVKIQEHITAIRRVCGILPVSKVVVETAEFDLQLLKAIADGKPVPQGEDYQKGEMYGHYNVRQYVLWRDDYTCQCCGAHATKKKEVRLHVHHLESRKVGGDAPDNQVTLCESCHEKLHKGLIAEKDFKKRKRRSTRDATFMGIMRKTLMQMLCSELPIPVVKTRGYITKATREKLLVLPKSHTNDALAIAQGKRGFNVGYLPEIAQIDKIYTIRPVRHHNRQLHKAAILKGGIRKSNQAGKYVFGYRLFDKVQFNGQDCFISVSYTHLRAHETC

SEQ ID NO: 11733 - protein, 493 aa, unidentified
  REGION 1..493: note = Human gut metagenome
MAAVYVISASGKPLMPTTRCGHIRGLLNAGKARVVEREPFTIQLKYETPDVTQPLYLGIDPGRTNVGSAVVREDGECVFTVQLTTRNKDVPKLMKARKQFRMAHRRLKRRCKRQRRAKAAETLSQKGEFQRLLPGYEEPILCKCIRNKEARFNNRQRPAGWLTPTANHLLLTHLNMVKKLQKLLPITDVVLEVNRFAFMAMENPSIRRWQYQQGPLYGKGSVEDAVYAQQDGHCLFCGKPIAHYHHVVPQHKNGSETLENRVGLCNEHHDLVHKDRAWDAKMKETKAGLNKKYHALSVLNQIIPALTEQLTAMFPQHAFVTTGKDTADFREDYGIAKEHHLDAYCIACSVLAEPTKVAAPTGKPHRLMQFRRHDRQVCHKENIKRVYLSEGKAVATNRHKAIEQKDDSLEEFRKTHTQQEVSALTVKDHQPVYKDMRRFMPGGVFLFNGKVHTLQRSHGRYKGMPFYYIDTDGSKNHAKGCIFLQQNCGLRWV

SEQ ID NO: 11734 - protein, 450 aa, Moorena sp.; identical to SEQ ID NO: 2935

SEQ ID NO: 11735 - protein, 426 aa, Lactobacillus sp.; identical to SEQ ID NO: 3294

SEQ ID NO: 11736 - protein, 474 aa, unidentified
  REGION 1..474: note = Human gut metagenome
RIFRQVPFTIQLTYKNEPVLQPVTIAEDPGRSNIGMAVVSLSGELLSAAIVQTRNKEIVKLMEKRKQHRRASRNGERKARQRLAKKCHTMIKTGFLMRKLPMYGKDKRVRCNVIKNTEAKFCNRKREDGWLTPSAEHLVRTHINLIHKMQKFLPISDVAIEINRFAFLSLEDPSISGVDFQNGPLKGYDDLNAAIEDLQDGHCLMCNSPIEHRHHIVPRNMQGSNTIGNIAGLCCKCHERVHKDARFEDRLKKKKAGLNKRYAAISTLNQAIPFICKRLEQEFGKEHVHYCSGRDTSMVRRSLGYHKTKEKQLHEVDAWCIAVLALQHVPEKAPEFDHVHEILQFRRQDRSRIKAQTSRAYYHEGKKIAKNRKKAEGQREDSLQEWRKRQVERYGKEQTRKMISQLEVKESIRRYNRLDRLMPGAVFYYRGNRYVMRGQHSNGQYLQAVGMGKKDFPVKDCMIVAHNEGLIFVS

SEQ ID NO: 11737 - protein, 377 aa, unidentified
  REGION 1..377: note = Human gut metagenome
LSKVKTMRVFVFNMRGRPLMPCSQRKARLLLRENKAMIYKYHPFTIQLTYTTGETKQDCHIGIDTGSKYIGAAVRSEDKVFWKGEIELRQDIRSNLDTKRIYRRSRRNRKTRYRKPRFLNRKRRDEWLPPSLQSRINHTFHWIDTLSSLVPNPILHIEVGKFDVAKMINPEIHGVDYQHGQTYGFFDERYFVFARDNYTCQCCGKSKNKILNTHHIIYRSNGGTNRVDNLITVCTDCHTSQNHRKGGIFYQWQEQHKKVKQYKEPPFMNTLRKRIFVAYPDAEITYGSETTPKRKAMKLDKTHYNDAIVISGINEIKENPEEWLLIKQFRKKKRSLHEATARKGRKKPNRNQTRNSKNTPYYKGFYLNDKVSVFGKS

SEQ ID NO: 11738 - protein, 415 aa, Bacillus sp.; identical to SEQ ID NO: 2431

SEQ ID NO: 11739 - protein, 465 aa, unidentified
  REGION 1..465: note = Human gut metagenome
MSTCVCVLSNSGERLMPTFRLGKVRHLLKDGKAKIIKHHPFTIQLLYDSKMNTQPIEICEDVGYNYIGISVKSQSHEYVSAQYDTLQDEKACHDSCRKLRRTRRNRLRYRKPRFDNRKRGEGWLAPSLRHKKELNVNVVKMYCAVMPITHATVEVGSFDTMLVKAIQEGKAIPEGADYQKGPRYNLATLREAVFYRDNYVCKVCGRKATEGAILHVHHMFYWKGRHGNSLDELLTVCEKCHTPANHQKGGKLYGFGENVKFADLSGAAFMNAVRWQIVNELYAAFGKDFVTVTYGAMTKEKRIALRLEKSHNNDAYAMGEFHPNCRCTFEHYEKVRRNNRTLEKFYDSRYIDIRTGEIATGKELFNGRINRNHKKDSENLHKYRGKRTYAGHRALLRKKVNLNPGDLVSLNGEVLIVHGTHTNKKGAVNVEFKVPAKNGQKSANLKKLKIVKAAGSIHPAWEKVS

SEQ ID NO: 11740 - protein, 418 aa, unidentified
  REGION 1..418: note = Human oral metagenome
MLNNQKEYSFVLDAEGKKLDPTIVQNAWRLVRQKKATLIAKRPMTIQLKKVIDNPNDDEIRMGIDDGAKHVGLALVQKCKTKNKVIFIATMEQRNDVHKLMEQRKNYRRYRRYWKRYRKARFSNRVSVRRKGRIAPTILQKRQAVVRIFDRLNKYIRINSIYLEDVAIDVRVLTDEKRLYSWQYQQSNRLDENLRKATILRDRCQCQMCGKRNCRLEVHHITPRRMNGANTIGNLITLCADCHSKVTGCEMEFAEQLYSKIGKKKNNAGLQYSSHVMVGKTWLREELSKRAPIFITTGGDTANKRIDWSLEKSHEIDAVCITNLKPESVGVKPLKVKPLRHQRKVMQVEEVLGFRHRDVVCYTFKNGEYHEGYVTALYPSNGKQKEGLNFLSLTKHCKRVNPKKCQRLDRPNKFLWLV

SEQ ID NO: 11741 - protein, 532 aa, unidentified; identical to SEQ ID NO: 3169
  REGION 1..532: note = Human gut metagenome

SEQ ID NO: 11742 - protein, 419 aa, unidentified; identical to SEQ ID NO: 8452
  REGION 1..419: note = Human gut metagenome

SEQ ID NO: 11743 - protein, 544 aa, unidentified
  REGION 1..544: note = Human gut metagenome
MKQKKQKVIIYILNKKGEPLMPTTRCRHVRILLDNKKAVVVSSNPFTIRLKYDTPNGVQNVFAGIDSGRENIGSGASNEGGDCLYLGELKTSNKSIKMKMTERAGFRRERRRHDRQNKQRKARKDHTEIQNGDDDVCRTTISCKSVQISYPTAEESVTHKIIRGKEGKFANRHRDEGWITPSARQLIQMHMNDLKSMCRILPISHVTLERVAFDFQKLENENIKAWEYGKGKLYGYNSPEEYIRDVQDGKCLVCGKPHIDYLHHIIPRSKGGSDKVSNLVGLCYDCHYGPTGVHKCQDTQDRLPELKNKANKQYKVSLLNSVMPVLIEEMDKFCKANSIIFSICEGHDTAKVRDMYDLQKDHCLDGFAISLVGRDVESVDVMPDRIYQKQRYKKKSKNIIQKRNHREYYAGKKLVAVNRHKGTDQKTDSLEEYMNTYAESHTADECKKHFESLTVKPARRTYTFHKEWRICPFHIGDKVRYEKKNKVKGNTKVETFICESIYFSKDENKAKVEHNKTKSKKMKFCRVLESGCIPYIDYRKLALI

SEQ ID NO: 11744 - protein, 414 aa, unidentified
  REGION 1..414: note = Human gut metagenome
MPCSPAKARLLLKEKKAIVVRRTPFTIQLTIATGEAKQPVSLGVDAGYKHVGLSASTENAELYASEVELRQDVSDLLSARRALRQSRRSRNTRYRAPRFDNRIRTKRKGWLAPSVENRINAHLSRIETVIRLLPVTKITVETTSFDMQLLKNSDIAGKKYQEGEQLGFWNVREYVLFRDGHVCQHCHGRSKDPVLNVHHLESRRTGGDSPGNLITLCETCHKALHRGEITLKAKRGQSFRAEAFMGIMRWEVLDRLKASHPKLEVQNTYGYRTKHARISNGIAKSHCADAFCIAGNLGAERLGEFFFQKQTRRNNRQIHKLSILKGGIRKRNQAPYEIKGFRLFDKVACQGEEGFIFGRRSSGYFDVRKLDGTCISAGISYKKLHLLEKRRTYLTEIRKEEALPPLPEGRGLRA

SEQ ID NO: 11745 - protein, 426 aa, Parasutterella sp.; identical to SEQ ID NO: 3045

SEQ ID NO: 11746 - protein, 404 aa, unidentified
  REGION 1..404: note = Human gut metagenome
MPNKVYVINKHGRPLMPCSPAKARHLLDEGKAKIKKRTPFTIQLVYGSSGYTQEVILGVDAGSKTIGVSALTKKEELFAANVIPRNDVVDLLSTRREFRRARRNCKTRYRKPRFDNRVRSKHKGWLAPSVEVKIQEHITTIRRVYGILPVSKVVVETAEFDLQLLKAIADGKPVPQGEDYQKGEMYGHYNVRQYVLWRDDYTCQCCGAHATKKKEVRLHVHHLESRKVGGDAPDNQVTLCESCHEKLHKGLIAEKDFKKRKRRSTRDATFMGIMRKTLMQRLYSELPIPVIETRGYITKATREKLLVLPKSHTNDALAIAQGKRGFNVGYLPEIAQIDKIYTIRPVRHHNRQLHKAAILKGGIRKSNQAGKYVFGYRLFDKVQFNGQDCFIWGRRTTGIFTIKT

SEQ ID NO: 11747 - protein, 395 aa, Pseudomonas sp.; identical to SEQ ID NO: 11253

SEQ ID NO: 11748 - protein, 442 aa, unidentified; identical to SEQ ID NO: 8056
  REGION 1..442: note = Human gut metagenome

SEQ ID NO: 11749 - protein, 439 aa, unidentified; identical to SEQ ID NO: 3652
  REGION 1..439: note = Human gut metagenome

SEQ ID NO: 11750 - protein, 413 aa, unidentified; identical to SEQ ID NO: 2636
  REGION 1..413: note = Human gut metagenome

SEQ ID NO: 11751 - protein, 468 aa, Fervidicola sp.; identical to SEQ ID NO: 9528

SEQ ID NO: 11752 - protein, 431 aa, Petrotoga sp.; identical to SEQ ID NO: 5928

SEQ ID NO: 11753 - protein, 431 aa, unidentified
  REGION 1..431: note = Human gut metagenome
MPDKVYVISRLGHPLMPCSPAKARHLLDDKKAKVVKRTPFTIRLLYGSTKYIQPVILGVDAGSKTIGLSASTVKEELFAAEVMPRNDVVENLSTRRAFRRARRNRTTRYREPRSDNRVRSNHECWLAPSVKVKIQEHITSIKRVCTILPVSKVAIETAEFDLQLLKAIQDGKPIPEGEDYQKGEMYGSYNVRQYVLWRDNYTCTCCGVKGTDKKPVKLHVHHFESRKHGGNAPDNYGTLCEDCHKKFHLGIIIDEILKTRKRRSTRDAAFMGIMRKTLMQRLRTELSIPVAETKGYITKATREKLLVLPKSHTSDALAIAQGRHGFGIKAHTYVEPANHIYTVRPVRHHNRQLHKASILKSGIRKRNQASKYVFGFRLYDKVLYQGKECFVWGRRTSGSFLLRTIDGIKVKDGVSCRNLTLLERSSNYLIA

SEQ ID NO: 11754 - protein, 469 aa, Burkholderia sp.; identical to SEQ ID NO: 9410

SEQ ID NO: 11755 - protein, 415 aa, Bacillus sp.; identical to SEQ ID NO: 2431

SEQ ID NO: 11756 - protein, 417 aa, unidentified
  REGION 1..417: note = Human gut metagenome
MPCSPAKARLLLKEKKAIVKRRTPFTIQLTIATGEARQPVTLGVDSGYKHIGLSATTEKAELYASEVELRQDITDLLSARLALRRSRRSRKTRYRAPRFDNRVASKREGWLAPSVENRIAAHMSRVEAVMQVLPVTAITVETAAFDTQLLKNPDIAGEAYQQGEQLGFWNVREYVLFRDGHVCQHCRGKSKDPILNVHHIESRRTGGDAPNNLITLCETCHKAFHRGEIELKVRRGKSFKAETFMGIMRWTLFERLKKAHPELRVRNTYGYLTKHKRISHGIAKSHCADAYCIADNLGAKRLEGFFFQKQTRKHNRQLHKLSILKGGLRKKNQAPYEVKGFRLFDKVICKGEEAFIFGRRTSGSFDVRRLDGTRISAGINYKKLRLLEPRTTYLTEFRKEAALPPLHECSGSRAEFR

SEQ ID NO: 11757 - protein, 413 aa, unidentified
  REGION 1..413: note = Human gut metagenome
MTSYAFVLDANGKQLAPAKEQKAWFLIRKKRAALVSKYPMVIQLKKKIQENEICKDEIRCGIDDGGLHVGIALVQKCKSKNKVVFKGTIEQRNDVKHLMEVRRNYRRYHRYHKRYRQARFDNRKSSKRKGRIAPSILQKRQATIRVINRLNKWINITNYWLEDVSIDIRVLTDGYKSYSWQYQKSNRLDENIRKATILRDGGKCMECGKSNCRLEVHHIKPRRRNGSNTLDNLITLCESCHQKTEGQEELYMDRYFSLLKSSDNKNLNYAQHVMIGKMWLRKQLSGLGVLYLTSGGDTANKRIDWNIEKSHTNDAVCITDLQPDTCDIKEWAIKPMRRQSKAKTDHVLGIHHRDLVEYTFKNGETHRGYVTALYPDQKAINFQSQTKHCKKVNARKCKLLWKYSKIYWFENAS

SEQ ID NO: 11758 - protein, 423 aa, unidentified
  REGION 1..423: note = Archaeon sp.
VRYYKPERKLPSVPYKVLADNSSAQDLHSGKSGQDLRVPVINMHKQPLMPTTPRKASVIQRTPFTIQLKYPTGEAKQDITLGIDAGYSTIGFSIITEKSELLSGELTLRKRISKLIEQKSNYRRARRNRLWHRKPRFNNRSIANGWFAPSIQHKLETHFRLINKLTKILPITKIIVEVASFDTHKLQNPEIKGVEYQQGELQGCEVREYLLEKWVHKCAYCGESNTPLEIEHIIPKIRGGTDRVSNLTLACHKCNQKKGNQTAAEFGYPEIQQKANQTLKSVAFMNIVRWKLVNTLKCDWTYGYITKYNRVKLNMEKSHVNDAFVIAGGTTQSRTIPYMATQTRRNNRSIQTNRKGYKPSIRKQRYKLQPGDLVKYIKSLFRVKGVFNYGKWVRLISLTKANKIINVNIKKVELVKYGKGIQF

SEQ ID NO: 11759 - protein, 421 aa, unidentified
  REGION 1..421: note = Fermentation metagenome
MEVYVISQDGKPLMPTTPARARKKLRDKKAKCIRKTPFTIKLLYKTTTYTQPITLGIDTGSSHIGSAAVDDRGNVLYLSEVEIRNDIADKMKRRAKYRRNRRNRKTRYRQARWLNRKNSIKSDRFSPTMVSKVNSHLKEVKFVKSLLPITHVILETGTFDPHALKNPDVLKNKWLYQRGANYGFANTRAFVLDRDSYICQYCKGKSKDRRLEVHHIIFRSNGGSDEAENLITLCKTCHDKVHANKIKLKGGKVKGQLKHATQMNSIRKRLLRLLPEAEETFGYITKEHRYLMSLPKEHYFDAVAIASLDNIRNEGLVSVNFKTCLLRKKCISKGDYQQTKGIRSEQLIQTGKIMGFRKFDKVRYMNKEYFIKGRMSTGYAVLMDIVGNKVSLKPIPKFCKMERLSARKSWIIQQEIIQNIA

SEQ ID NO: 11760 - protein, 499 aa, Acidithiobacillus sp.
MLSYLGVRRRRATEQAPWTWARHTLLAPEKAKTEKGSDMQNRVLVLDKNKQPLMPCHPARARALLKAGKAAVFRRFPFTLILKDREGGATQHITTKTDPGSKTTGIAVVAEFARRGPTVIWAAELAHRGQVIHQALEKRRTLRHSRRSRKTRYRAPRYDHRTRAKGWLAPSITHRVRTVITWFQRLLRWVPITDVSMERVRFDMQALENPEISGIEYQQGTLFGYEVRAYLLEKWGRKCAYCDTADAPLEVDHIQPRSKGGSNRVRNLAIACHACNQAKGHAPLSVFLQTDNDRMKRRQIAAAQVAGNDPKKRAERERHEQNRLERVREQAKTPLNDAAAVNTTRHILFERLQALGLPVETGTGGRTKFNRVQQGYPKAHWIDAACVGASGGKVRLDSALRPLQITATGYGNRRMCNVDRFGFRRGKPKSRQKVYFGFQTGDMVRAVVTEGKRTGVHQGRVACRKTGSFKMVTPSGKVDGIHYRFCKPIHRQDGYNYAA

SEQ ID NO: 11761 - protein, 533 aa, unidentified
  REGION 1..533: note = Human gut metagenome
MSTVYVLNKDGKPLMPTTRGGHVRHLLKEQKARVVQSNPFTIQLLYETNDAVQPLYLGIDPGRTNIGVAVVKADGTAVFTAHLKSRNKEIPKLMQDRKRARRARRTNGRRHRRQRRAKANGTISKKCVKQTTTQNGSVSKRAKEIGIIKRHLPGCEKDVLCIGIKNKETKYTNRERPEGWLTPTANQLLQTHVNLVKKVQKLLPISDVVLEVNKFAFMRLDNPNIQKWQYQQGPLYKKESLESAVSEIQEHHCLFCKKPIDHYHHVVPKSENGSNTIANIVGLCAEHHNLVHKDVAWQEKLAEEKTGLNKKYGALSVLNQIIPALTNKLSVLFPKHFFVTAGKSTHDYRAAHGVSKDHWLDAYCIACSVLPSNVCDSNINNHVPYELKQFRRHDRRVLHKANMSRVYTLNGKAVATNRHKAIKQTTDSLEEFRQNYPDDVYKLKVKEHHPAYRNLNRNYPGSVFLVGKQAHVMQGIASSKDGKTTKYNDTNATTITAGKCKFVAKNSGILFVQCKFRKALSDGTTKKLQYPVR

SEQ ID NO: 11762 - protein, 195 aa, unidentified
  REGION 1..195: note = Human gut metagenome
MICIVLCIIANARTKHVGLSATTKSKELYSSEVLLRNDIVDLLSTRRELRKTRRNRLRYRKPRFNNRIKSKRSGWIAPSVKYKVDAHIRVIDNVCSILPIFRIVIEVAQFDTQKIKNPNISGKEYQEGDQLGFWNTREYVLARDGHKCQYCKGKSKDKILNVHHIESRKTGGNSPSNLITLCETCHKEYHKGNYF

SEQ ID NO: 11763 - protein, 570 aa, Streptomyces sp.; identical to SEQ ID NO: 5250

SEQ ID NO: 11764 - protein, 425 aa, Microcoleus sp.
  SITE 425: note = misc_feature - Xaa can be any naturally occurring amino acid
MQNYVFVIDQNKQALNPIPPARARELLTKQKAAVFRMYPFTIILKHVVGNPSPKPLIIKLDPGSKFTGIAILDGENVIWAAQWEHRAWQIKNALESRRLLRRSRPNRKTRYRQSRFDNRKRPTGWLPPSLIHRVLTIETWVKRLCRYAPIAQIAMELVKFDTQKLQNPEVNGVEYQQGELAGYEVREYLVEKWGRKCSYGDSEGLPLQVEHIHPRSKGASNRVSNLTLSCERCNIKKGTKPVKEFLTKNPARLEKILQQAKQQLKDAGAVNSTGWALFRTLKNILPITTGTGGQTKYNRTRVKLPQQHWIDATCVGEIETIKLVTQQPLRIKPTGWGTRQMCATDRYGFPSRHRERNQIHFGFRTDDIASSVVTKGKKVGEDVGVYCVAKQAVLILPRDSAGYPALATDFVRQFIKRMVTPMRFX

SEQ ID NO: 11765 - protein, 427 aa, Nostoc sp.
MSKVFVLDTEKRPLIPIHSAQARQLLRNKKAAIYRRFPFTIILKEVYPDSVVMPLRLKLDPGAKTTGIALVNDSTGVVVFAAELKHRGFAIREALTSRRQLRRGRRARKTRYRQARFLNRTRPEGWLAPSLQSRVDNIKTWVEKLRKLAPIEAMSQELVRFDMQLIRNPKIQGKEYQQGTLAGYETREYLLEKWGRQCAYCGIKDVQLQIEHIHPRARGGSNSITNLTLSCEKCNTKKGTKDIKDFLKKDPSKLTKILAQAKRPLADAAAVNTTRWALFRALKETELPVETGSGGLTKFNRCQQKLEKTHWLDATCVGQSTPKLIVKAVKPLLITANGHGSRQSCRTDKFGFPSRHVPREKIHFNFQTGDIVKASVATGKKIGNYAGKVAIRSSGSFNISTKNGLIQGILHKFCKRIHAKDGYSYAQ

SEQ ID NO: 11766 - protein, 429 aa, Parasutterella sp.; identical to SEQ ID NO: 4241

SEQ ID NO: 11767 - protein, 442 aa, unidentified; identical to SEQ ID NO: 2903
  REGION 1..442: note = Human gut metagenome

SEQ ID NO: 11768 - protein, 406 aa, unidentified
  REGION 1..406: note = hot springs metagenome
MPCSPRKARLLLKQKKAKVVRRTPFTIQLLYGSSGYKQPVSLGVDMGTRHVGISATTKKDVLFEAEAQLRTDIVELLAIRRQFRRSRRNRKTRYREARFLNRRKPEGWLPPSIQHKINSHIKLIDLVHNILPATSVTIEVAAFDTQKLKNLNIRGVEYQQGEQMGFWNVREYVLYRDNHTCQYCKGKKKDPVLQVHHIESRKTGGDSPDNLITLCKTCHHEIHEKGLEHIFQRKRPPMRDASQMTAMRWAMFSRIREKYSHANITYGYITKCIRIANGLSKSHMVDARCISGNPLAKPSGTVYLLKFVRKNNRQLHKATILKGGKRKSNKAPRFVKGFQLFDKVVYERKECFIFGRRSSGYFDLRLLDGTKVHASASWKKLKRVEHASTLLIERRKGDSSPTFALA

SEQ ID NO: 11769 - protein, 472 aa, unidentified
  REGION 1..472: note = Human gut metagenome
VVGNRLLSIKPLINIGEGVIYSSICTGLSLQTYQKRKEVPCMVYVLDINGQPLMPTTRHGKVRRLLNSHLAKVVKRCPFTIQLLYQSTKEIQPVSLGVDAGSKHIGMAATTEKKVVYQEELSARNDVVKLLSARRTLRRTRRNRKTRYRKPRFNNCVHSKHKGWLAPSVEVKIQEHITTIKRICQILPISEIQVETAEFDLQRLKAMEEGRTPPVGTDYQLGEQYDFYNTRQYGLHRDGYTCQCCGTHDNNIKLHVHHIESRQTGGDAPNNLIILCEHCHKALHEGKLELPKGKKRGKSYRDATFMGVMRKTLLERLKKEIDVPVEGTYGYITKYWRERAGLEKSHIHDAVCISQYPYAKPLDIYYLTKTVRHHNRQIHKSNFSKGGIRKRNQAPYLVKGFRLFDKVLYQGKEYSIFGRRATGYFDIRTLDGTKVNKGSISYKKLRIQDTAKAYLKEARAIPHMNKFTCVLA

SEQ ID NO: 11770 - protein, 465 aa, unidentified; identical to SEQ ID NO: 10623
  REGION 1..465: note = Human gut metagenome

SEQ ID NO: 11771 - protein, 470 aa, unidentified
  REGION 1..470: note = Human gut metagenome
MSVFVVGLNGCRLMPVSERKARLLLKGGKASVYRKVPFTIKLNYKTGSTVQPGYLGIDTGSQHIGVSVVRQDGTVLHKEEIGLRDSMSKRKLLESRASLRRGRRYRKTRYRHPKWKPKTKRIYSEKADRKGRHWKKQKNMFTSKRQAGWLPPSLQSKTDHHIQWIRKLLHLLPEGYRLSIELGRFDPARMKDPGIHGELYQKGPQYDYENVRAYVLARDGYTCRVCKKKGGKLHVHHILYRSRGASDDPKYMAAVCSNCHTTENHLPGGILYQWMQDQKKFTRGLRDATFMNILKKRLRRAFPDAVFTYGNITKADREKLGLPKSHGNDATAIALVKTGVTSVKDEEPVIHIQQVRRKKRSLHEETPRKGRKEPNRTASRNDKNTRSVTVSKGSGKKKVSMTACLFDRVELDGKKGWITGFTGTSCYVKDKEDNYICTSPKYKQVSISKLRILHHCGNWVIGAEKPLGKG

SEQ ID NO: 11772 - protein, 411 aa, unidentified
  REGION 1..411: note = Ga0307928_10015040
MVYVIGQDGKTLMPCTNVIARLLLKQGNAKVKRVTPFTIKLLYRTETTYTQTLTLGVDTGSSKIGSAVINKNGDVLYLSEIEIRNDITKKMKQRSKYRRSRRNRKTRYRKARWLNRGNSTKLGRFSPTMTSKINSHLKEIRFVKSILPITKLILETATFDPHALKNPEVLKNKWLYQKGINYGFANTKAYVLTRDKYKCQNCKGKSKDKKLEVHHIIFKSNDGSDDETNLITLCKTCHDKVHKGSLEIKGGKRKSQLKFATQMNSIRIQLLKLLPEAEEAFGFVTKEHRQTLGLGKEHYFDAVAIASQGVPVQFKTNKVLFKKCVSDGDYQQAKGVRGEQKIPTGKIQGFRKFDKVRYLGKEYFIKGRMSTGYAVLMDITGSKVNLKPIPKFSKMIRGSARKSLLLQEMAI

SEQ ID NO: 11773 - protein, 458 aa, Scytonema sp.; identical to SEQ ID NO: 10402

SEQ ID NO: 11774 - protein, 465 aa, unidentified
  REGION 1..465: note = Human gut metagenome
MSTCVCVLSNSGERLMPTFRLGKVRHLLKDGKAKIVKHHPFTIQLLYDSKTNTQPIEICEDVGYNYIGISVKSQSHEYVSAQYDTLQDEKACHDSCRKYRRTRRNRLRYRKPRFDNRKRGEGWLAPSLRHKKELNVNVVKMYCAVMPITHATVEVGSFDTMLVKAIQEGKAIPEGADYHKGPRYNLATLREAVFYRDNYTCQVCGRKVADGAILHMHHMFYWKGRHGDSLNELLTVCEKCHTPANHQKSGKLYGFGENVKFADLSGAAFMNAVRWQIVNELYTAFGKPFVTITYGTMTKEKRIALRLEKSHNNDAYAMGEFHPNHRCTFEHYEKVRRNNRTLEKFYDSRYIDIRTGEIATGKELFNGRINRNHKKDSENLHRYRGKRTYAGHRALLRKKVNLNPGDLVSLNGEVLVVHSTHTNKKGAVNVEFKTPGKSGQKSASLKKLKIVKAADSMHSAWEKIS

SEQ ID NO: 11775 - protein, 442 aa, unidentified; identical to SEQ ID NO: 10884
  REGION 1..442: note = Human gut metagenome

SEQ ID NO: 11776 - protein, 408 aa, unidentified; identical to SEQ ID NO: 5302
  REGION 1..408: note = metagenome

SEQ ID NO: 11777 - protein, 470 aa, unidentified; identical to SEQ ID NO: 5326
  REGION 1..470: note = Human gut metagenome

SEQ ID NO: 11778 - protein, 411 aa, unidentified
  REGION 1..411: note = Mouse gut metagenome
MPCSQRKARLLLKNKKAKIYAYHPFTIQLFYASGETIQMCHIGVDTGSRHIGLAITSENKVLLKGEIDLRQDVKSNLDTRRIYRRNRRNRKTRYRKARFFNRVTSKQKNWLPPSIESKIHHTFHWMNKLENLVADSNLHIEVGKFDMAKMIRPDIQGKEYSQGQCYGYFDTRYFVFARDDYTCQCCKKKNKILKTHHILYRSNGGTDRADNLITVCTDCHTSKNHKKGGILYEWQQRHKKGKPYKEPPFMNIIRKRIYQKYPDAVISYGSQTTPKRKERNLDKTHYNDAIIISGIEDIKENPKEWLRIKQFRKKKRSLHEAAARKGRKEHNRTQKRNRKNTPYDKGWYLNDYVEVFGKKGYISGFTNSGVYIKNTNDDYITMPDKKYKQVSHHNLVRICHNNNWQYEIQKI

SEQ ID NO: 11779 - protein, 490 aa, Anaerostipes sp.; identical to SEQ ID NO: 6170

SEQ ID NO: 11780 - protein, 415 aa, unidentified
  REGION 1..415: note = Human gut metagenome
MIYVRNKEGKALMPTEREGRIGYLLRHGKAHVVSRVPFVVQLDYESTIYTQEVSLGIDAGSKHIGVSASSEKKELLAAQVELRSDVVNLLSTRRELRRTRRNRKTRYRKVRFDNRKRKDGWLAPSIEQKVESHLKVIRLVHKLLPITKTTIEVAQFDAQKIKNSDIKGEEYQQGEQMGFWNVREYVLARDGHKCVHCKGKSKDPILNVHHLESRKVGGNSPSNLVVLCETCHKAYHRGEFDLKIKRGTTLRDAAVMNIMRWSVYERAKAEFGNVYLTYGYITKHTRIENDIEKTHAADAFCIAKNVHARRSRTFFMCRCVPRHTRALHVANPKKGGIRRSCIASHKIGKSRFQRFDMVRWKGKECFIFGSTHGNVVLRKIDGVKVHETQAVSAKTIKFLKRIRNNILMEERTSES

SEQ ID NO: 11781 - protein, 414 aa, unidentified
  REGION 1..414: note = Human gut metagenome
MPCSPAKARLLLKEKKAIVKRRTPFAIQLTIATGETKQPVSLGVDAGYKHVGLSASTEKAELYASEVELRQDITDLLSARRALRQSRRNRKTRYRAPRFDNRIRTKRKGWLAPSVENRINAHLSRIEAVLRLLPVTRITVETASFDLQLLKNPDISGKEYQEGEQLGFWNVREYVLFRDGHVCQYCHGRSKDPVLNVHHLESRRTGGDSPGNLITLCETCHKALHHGEITLKTKRGQSFRAEAFMGIMRWEVLNRLKVSHPELEVNNTYGYRTKHVRIANGIAKSHCADAFCIAGNLGAKRLGEFFFQKQTRRNNRQIHKLSILKGSLRKRNQAPFEVKGFRLFDKVACKGEEGFIFGRRSSGFFDVRKLDGTRISAGISYKTLHLLEKRQTYLTEIRKEEALPSLREGRGLRA

SEQ ID NO: 11782 - protein, 424 aa, unidentified; identical to SEQ ID NO: 8578
  REGION 1..424: note = Human gut metagenome

SEQ ID NO: 11783 - protein, 512 aa, unidentified; identical to SEQ ID NO: 7017
  REGION 1..512: note = Human gut metagenome

SEQ ID NO: 11784 - protein, 413 aa, unidentified
  REGION 1..413: note = Human gut metagenome
MTSYAFVLDANGKQLAPAKEQKAWFLIRKKRAALVSKYPMVIQLKKEIPENEICKDEIRCGIDDGGLHVGIALVQKCKTKNKVVFKGTIEQRNDVKHLMEVRRSYRHYHCYHKRYRPARFDNRKSSKRKKRIAPSILQKRQAIIRVIHWLNKWINITNYWLEDVSIDIRALTDGYKPYRWQYQKSNRLDENIRKAAILRDGGKCMECGKLNCRLEVHHIKPRRRNGSDTLDNLITLCKSCHQKTEGQEELYMDRYFSLLKSSDHKNLNYAQHVMIGKEWLRKQLSSLGVLYLTNGGDTANKRIDWNIEKSHANDAVCITNLQPDTYDMKEWTVKPMRRQSKAKTDNVLGIKHRDLVEYTLKNGETHRGYVTALYPEQKAINFQSPTKHCKKVNARKCKLLWKYSKIYWFENAS

SEQ ID NO: 11785 - protein, 458 aa, Lactobacillus sp.; identical to SEQ ID NO: 4474

SEQ ID NO: 11786 - protein, 414 aa, unidentified
  REGION 1..414: note = Human gut metagenome
MVYVINKQGQALMPTERFGKVRRLLKNSLAHVVCRIPFTIQLDYDTTDYTQPVSLGVDAGSKHIGISATTSEKELYAADVELRNDIVDRLSTRRELRRTRRSRLRYRKARFNNRVSSKRKGWLAPSVENKIQTHLTVVEKINKFLPITNIVVEIASFDIQKINNPIISGSEYQQGEQLDFFNVREYVLFRDNHICQHCKGKSKDKVLNVHHIESRKAGGDSPNNLITLCETCHKAYHRGEFELNVKRGKSFRDSAFMGIMRWSFYDRLKNIYPNVSMTFGYITKNTRITNNLPKDHYVDARCISGNPTAKPLGYYFYQKKVRCRNRQIHKANFLKGGRKKLNQAPFLVKGFRLFDLVEYQKELYYIFGRRSSGSFDIRKLDGTKVNKGSINCKYLRLIATRKSILTEKRMQVNL

SEQ ID NO: 11787 - protein, 413 aa, unidentified; identical to SEQ ID NO: 2636
  REGION 1..413: note = Human gut metagenome

SEQ ID NO: 11788 - protein, 420 aa, Petrotoga sp.; identical to SEQ ID NO: 5114

SEQ ID NO: 11789 - protein, 422 aa, unidentified; identical to SEQ ID NO: 5457
  REGION 1..422: note = Human gut metagenome

SEQ ID NO: 11790 - protein, 456 aa, Moorena sp.; identical to SEQ ID NO: 2773

SEQ ID NO: 11791 - protein, 420 aa, unidentified
  REGION 1..420: note = Human gut metagenome
MQYVYVLNKHGEPLMPCSPRKARLLLKQKKACVVKRTPFTVKLLYGSTGYKQPVTLGVDAGSKHIGISATTEKHELYREEATPRNDVVDLLSARRAFRRSRRNRKTRYRAPRFDNRVHSKHEGWLAPSVEVKIREHITLIKRVCRILPITLVRVETAEFDTQRLKAMLEGKPLPVGTDYQLGEMYDEYNVRQYVLKRDNYTCQCCGAHPTKTKAVKLHVHHIETRKTGGNAPNNLITLCTVCHKALHAGKVTLDGKKRGKPLKDAAFMGIMRKALLERLRKELKIPVQGTYGYITKYLREKHGIPKSHTNDARCISKNPLAIPCDTCYYTKAVRHHNRQLHKATILKGGIHKANQAPYTVKGYRLWDKVSYNGKECFITGRRTSGYFALKKLDGTVISNSISYKKLRLLEVATNYITERK

SEQ ID NO: 11792 - protein, 399 aa, unidentified
  REGION 1..399: note = Human gut metagenome
MVYVQDINGKPMMPTTRHGKVRRLLKENKAVVVSLCPFTIKLTYVTSDYKQEIVLGVDAGTKHVGLSATTKSKELYSSEVILRNDIVDLLSTRRELRKTRRNRLRYRKPRFNNRIKSKRSGWIAPSVKYKVDAHIRVIDNVCSILPIFRIGIEVAQFDTQKIKNPNISGKEYQEGDQLGFWNTREYVLARDGHKCQYCKGKSKDKILNVHHIESRKTGGNSPSNLITLCETCHKEYHKGNIDLKIRRGKSLRDAAVMGIMKWRLYEELKSKYDNISMTFGYVTKYNRINHDIEKSHVSDAFVISKNFNAIRLGYYYKVRLVRRHNRQIHKQKIQKGGIKRLNQSPFEVFGFRLFDRVMFENSYYFIFGRRKTGSFNIRDIDGKRISRTRNLNYQGVSVL

SEQ ID NO: 11793 - protein, 456 aa, unidentified
  REGION 1..456: note = Human gut metagenome
MTNIYILDINGKPLMPCHNGAFVRCRLKNKEAKVVKRKPFTVQLMYEVKNNYKQDIYLGVDAGYKYIGFSASTSNQELFSGELEQDCGMVERNKERRMYRRQRRSRLRYRKARFNNRKAAKPQGWTAPSLQRKRDTHLRFIMMLSSIMPITYINVEIGLFDPALMKATAEGRTIKGTDYQHGEAEGFENMKSYIRYRDSFTCQNPDCKCHKMKKEDREKLKLHVHHIGYYKHDRSNRPGNLITLCELSHTPETHQPGNLLYGWKPKMKSLRETAFMNTVRKEIVDTLKVIYPDKTVRYTYGYKTNLTRRDWHVPKNHHNDAFCIAGQYNLKRAETVYFNQQRRNNRSLEIFHDAKYIDSRDGKRKTGKELYCGRNTRNKNFNKENLHPYRSKKVSKGKRNIRKQRHKYQPNDIVVFEGQKYKIRGSHCKGSRVILDTKKSVSVKKIHILKHCSGIC

SEQ ID NO: 11794 - protein, 492 aa, unidentified; identical to SEQ ID NO: 4486
  REGION 1..492: note = Human gut metagenome

SEQ ID NO: 11795 - protein, 416 aa, unidentified
  REGION 1..416: note = Human gut metagenome
MVYVLDKNGQPLMPTDRHRKVRLMLQSGQAKVIKRCPFTIQLNYDSGHQTQEISLGIDAGSKDIGVSATTKIKVLYEVDVELRNDIVDLLSSRRELRRGRRNRKTRYRQAKFNNRRRGNGWLAPSIRQKIGTHLTVVENICKMLPISRIMVETASFDIQKIKNPDIQGAEYQQGDQLEFWNVREYVLFRDGHTCQCCKGKSKDKILNVHHIESRKTGGNAPNNLITLCETCHTGYHKDTVQLPKAIKRGMRFKDAAFMGIMRWAFYEALKQQYEPVGTPVHNTYGYITKHTRIAYNLPKEHYVDARCISGNPEASSNGEYYYQKKVRCHNRQIHKLTILKGGIRKQNQATYLVKGYRLFDKVSYQGKGYFVFGRRQSGFFDIRTLSGEKVNKGSLSCKKLKFIATRTYYLTERRAV

SEQ ID NO: 11796 - protein, 413 aa, unidentified
  REGION 1..413: note = Human gut metagenome
MTSYVFVLDANGKKLAPTKKQKAWFLIRKKRATLVSKYPMVIQLKKKIPDKEICKDEIRCGIDDGSLHVGIALVQKCQTRNKVVFKGIIEQRNDVKHLMDVRRGYRRYHRYHKRYRPARFNNRFSSKREGRIAPSILQKRQAIIRVINRLNKWINITNYWLEDVAIDIRALTGGYKSYSWQYQRSNRLDENIRKAVILRDNCRCKECGKSNCRLEVHHIKPRRLNGPNTLDNLITLCENCHQKTEGKEELYMSRYFGLLKSSDSKRLNYAQHAMIGKKWLREELSNLGMLYLTNGGNTANKRIDWSIEKSHSNDAICITDLQPDTCNIKEWTIKPMRRQSKAKTDNVLGIKHRDLVEYTFRNGETYKGYVTALYPEQKAINFQSSTKHCKKVNARKCKLLWKYSKIYWLENAG

SEQ ID NO: 11797 - protein, 423 aa, unidentified; identical to SEQ ID NO: 2998
  REGION 1..423: note = coral metagenome

SEQ ID NO: 11798 - protein, 431 aa, unidentified; identical to SEQ ID NO: 3801
  REGION 1..431: note = Human gut metagenome

SEQ ID NO: 11799 - protein, 396 aa, unidentified; identical to SEQ ID NO: 4508
  REGION 1..396: note = Human gut metagenome

SEQ ID NO: 11800 - protein, 413 aa, Blautia sp.; identical to SEQ ID NO: 3119

SEQ ID NO: 11801 - protein, 413 aa, unidentified; identical to SEQ ID NO: 4651
  REGION 1..413: note = Human gut metagenome

SEQ ID NO: 11802 - protein, 509 aa, unidentified; identical to SEQ ID NO: 7892
  REGION 1..509: note = Human gut metagenome

SEQ ID NO: 11803 - protein, 428 aa, Lactobacillus sp.; identical to SEQ ID NO: 11642

SEQ ID NO: 11804 - protein, 407 aa, unidentified
  REGION 1..407: note = Human gut metagenome
MPCSPAKARLLLKEKKAIVVRRTPFTIQLTIATGEAKQPVSLGVDAGYKHVGLSASTEKAELYASEVELRQDVSDLLSARRALRQSRRSRNTRYRAPRFDNRIRTKRKGWLAPTVENRINVHLSRIETVLRLLPVTKITVETASFDTQLLKNPEISGKEYQEGEQLGFWNVREYVLFRDGHVCQHCHGRSKDPVLNVHHLESRRTGGDSPGNLITLCETCHKALHRGEIKLRAKRGQSFRAETFMGIMRWGVLNRLKASHPKLEVNNTYGYRTKHARIANGIAKSHCADAFCIAGNFGAKRLGEFFFQKQTRRNNRQIHKLSILKGGIRKRNQAPFEVKGFRLFDKVACQGEEGFIFGRRSTGYFDVRKLDGTCISAGISYKKLHLLEKEKNLFNRNSKGGGASSPA

SEQ ID NO: 11805 - protein, 442 aa, Lactobacillus sp.; identical to SEQ ID NO: 5262

SEQ ID NO: 11806 - protein, 431 aa, unidentified; identical to SEQ ID NO: 4804
  REGION 1..431: note = Human gut metagenome

SEQ ID NO: 11807 - protein, 406 aa, unidentified; identical to SEQ ID NO: 4082
  REGION 1..406: note = Human gut metagenome

SEQ ID NO: 11808 - protein, 431 aa, Aphanizomenon sp.
MSKVFVLDTEKRPLDPINPAQARQLLRNKKAAIFRQFPFTIILKKSCPDSPVSSLRLKIDPGAKFTGMALINDSTGEVVFAAELKHRGFAIRDALTSRSQLRRSRRARKTRYRQPRFLNRTHPEGWLAPSLQSRVENIKTWVERLRKLAPIEAISQELVRFNMQLMANPDIQGKEYQQGTLAGYESREYLLEKWGRQCAYCGVKDVPFQVEHIHPRAKGGSNSITNLTLSCEKCNTKKGTKDIKDFLKKDPSKLEKILEQAKRPLADAAAVNTTRLALLFVFKATGLPVETGSGGLTKFNRSQQNLEKTHWIDAACVGQSTPILNIKGVKPLLITANGHGTRQSCRTDKYGFPSRYVPRFKFVNGFQTGDIVKAVVTKGKKIGAYIGRVAVRTSGSFNISTISGLIQGISYKYCKSIHKKDGYEYGKSKIC

SEQ ID NO: 11809 - protein, 431 aa, unidentified
  REGION 1..431: note = gut metagenome
MPNKVYVINKHGRPLMPCSPAKARHLLDDGKAKVKKRTPFTIQLVYGSSGYTQEVILGVDDGSKTIGISASTKKEEVFAADVTPRNDVVNLLSARREFRRARRNRKTRYRKSRFDNRVRSKRKGWLAPSVEVKIQEHITAIKMVCRILPVSKVVIETAEFDLQLLKAIEEGKPVPQGEDYQQGEMYGHYNVRQYVLWRDNYTCQCCGAHATKKKEVRLHVHHLESRKVGGDAPDNQVTPCESCHEKLHKGLITEGDFKKRKRRSTRDATFMGIMRKTLMQMLCSELPIPVVETRGYITKTTREKLLVLPKSHTNDALAIAQGKRGFNVGYLPGIIQTDKIYTIRPVRHHNRQLHKAAILKGGIRKSNQAGKYVFGYRLFDKVQFNEQDCFIWGRRTTGIFTIKTINGKMIKDGISFKKLKLAEKSTSYLIA

SEQ ID NO: 11810 - protein, 454 aa, Halomonas sp.; identical to SEQ ID NO: 8111

SEQ ID NO: 11811 - protein, 442 aa, unidentified; identical to SEQ ID NO: 3161
  REGION 1..442: note = Human gut metagenome

SEQ ID NO: 11812 - protein, 303 aa, unidentified
  REGION 1..303: note = Human gut metagenome
VETTLSFVRRMCRYLPVSGIATELVKFDSQKLQNPEVSGVKYQQGTLFEYEVREYLLEKFGRKCVYCGAEGVPLNIDHVVPRAKGGSNRVSNLVLACVSCNQKKGARSLEDFLKGKPEVLARVRRELKTPLRDAAAVNATRWVLFNELKATGLPVETGSGALTKLNRHAFGVEKEHWLDALCVGRLNGVVTRKGLNVLEIRCMGRGSRQRTRLTKYGFPRGYLMRQKCVHGFATGDMVEANVPKGKKAGLWRGRVAVRVSGSFNIQTPKGVIQGVGWKHCRLISHNDGYGYAWLGHAPHSSPA

SEQ ID NO: 11813 - protein, 416 aa, unidentified
  REGION 1..416: note = metagenome
VPEMTNYAFVLDADGKPLSPTKEQKAWFLIRKKRATLNSKYPMVIQLNRVIPEEDICKDEIRCGIDDGGLHVGVALVQKCRNKNKVLFKGTIEQRDDVKHLMEVRKGYRKYHRSHKRYRPARFNNRSSSKRTNRIAPSILQKRQATWRVVIRLSKWIPVTSYWLEDVSMDIRVLTDGFQSYGWQYQKSNRLDENIRKAVILRGGCKCMECGKSNCRLEVHHIRPRRLDGTNTMANLITLCDGCHQKTEGKEEQYMQHYFTMLNSSDMKGLNHVSHVMIGKTWLRKQLSQLGPLHLTTGGDTANKRIDWEIAKSHSNDAICITDLRPDTCEIKDWTIKPIRRQSKAKTDNVLGIQHRDLVSYTYKNGETHTGYVTALYPELYALNFQSPTKHCKKVNARQCRLLWKYNKIYWLDDVV

SEQ ID NO: 11814 - protein, 320 aa, unidentified
  REGION 1..320: note = Human gut metagenome
RAPRFDNRIRTKRKGWLAPSVENRINAHLSRIGAILRLLPVTKITVETASFDTQLLKNPDISGKEYQEGEQLGFWNVREYVLFRDGHACQHCHGRSKDPVLNVHHLESRRTGGDSPGNLLTLCETCHKALHRREIKLKTKRGQSFRAEAFMGIMRWEVLNRLKASHPEQEVQNTYGYRTKHARIENGIAKSHCADAFCIAGNLGAERLGEFFFQKQTRRNNRQIHKLSILKGGIRKRNQAPFEIKGFRLFDKVACKGEEGFIFGRRSSGYFDVRKLDGTHISAGISYKKLRLLEKRQTYITEIRKEEALPPLSEGRGLRA

SEQ ID NO: 11815 - protein, 419 aa, Lyngbya sp.; identical to SEQ ID NO: 2999

SEQ ID NO: 11816 - protein, 419 aa, Moorena sp.; identical to SEQ ID NO: 2828

SEQ ID NO: 11817 - protein, 423 aa, unidentified; identical to SEQ ID NO: 3951
  REGION 1..423: note = Human gut metagenome

SEQ ID NO: 11818 - protein, 413 aa, unidentified; identical to SEQ ID NO: 2636
  REGION 1..413: note = Human gut metagenome

SEQ ID NO: 11819 - protein, 672 aa, unidentified
  REGION 1..672: note = Ga0315277_10040887
VNTETREQVLGIDFGPKHVGIALVARGASSEEVLFVAEVRLRDRKSLLADRRALRRGRRGRKRYRQPKIPQRGGGATSQSGEESERGRAAAPEYRRATGLNTGRRRCKFVDPQTGEICGWNTPRKANVRDLLLWNICRHLPVSVSEQAGFLAYVNQTNLHRAEILGALPAEEQAPLEAVFSQQRRPKDERLKDRLRRLGVDRHLRSQVTDIVGITSRRPLSGRLSFCREHFLRHHEQSRVPRPSVWLPNTVEMKQADVLKVCRQEVAPRWRVDCIVLERANFDLQLLRQQTAIEWSVEDWQRGPRWGYRNTFEAKKQEQGNRCAYCGSKPTAKNRLRLELEHVIPGGGDTWENLVLSCRKCNEGKGNRSPAQAGMRFWTDTETGETLSPAPLGAAHVSRYMTQTDQGWRRLQAALQQVFPQAAVEHTWGYVTSFYRNRWNLPKKHFVDAAVIASSHELERPVSVPEQPQRFAPTSGGKQLFDTNPLSKRPEGRFAQSKAIVCEQGTLAFKDVAKVENPRKRATLQRVADEATAAAKARGETPPTAFTAEMLPKIPFKSVRLAKQDASDTNTRRLGRHWFKVASAVNIATIVYQLDGKVCMQLQRNPAVFRHDPGLPQGARVVATFRKGDLVECDAGRGRVTKNHSNCTLTVELLDSGKEVTRLAKSFRPRHG

SEQ ID NO: 11820 - protein, 443 aa, Anoxybacillus sp.; identical to SEQ ID NO: 4769

SEQ ID NO: 11821 - protein, 414 aa, unidentified
  REGION 1..414: note = Human gut metagenome
MPCSPAKARLLLKEKKAIVKRRTPFTIQLTIATGETKQPVGLGVDAGYKHVGLSASTDKAELYASQVELRQDITDLLSARRALRRARRNRKTRYRAPRFNNRIRTKRKGWLAPSVENRINAHLSRIEAVLRLLPVTKITVETASFDMLLLKNLDIAGKEYQEGEQLGFWNVREYVLFRDGHVCQHCYGRSKDPVLNVHHLESRRTGGDSPGNLITLCETCHEALHRGEIALKTKRGHSFRAEAFMGMMRWEVLNRLKASHSELEVNNTYGYRTKHARIVNGIDKSHCADAFCIAGNLGAERLCEFFFQKQTRRNNRQIHKLSILKGGIRKRNQAPFEIKGFRLFDKVACKGEESFIFGRRSSGYFDVRKLDGTRISAGISYKKLRLLEKRRTYLTEIRKEEALPPLPEGRGLRA

SEQ ID NO: 11822 - protein, 515 aa, Ruminococcus sp.; identical to SEQ ID NO: 2456

SEQ ID NO: 11823 - protein, 420 aa, unidentified
  REGION 1..420: note = Human gut metagenome
MQYVYVLNKHSEPLMPCSPGKARLLLKRQKACVVKRTPFTIKLLHGSAGYKQPVTLGVDAGSKHVGLSASTETHELYCEEFTPRNDVVELLSTRRQNRRSRRYRKTRYRAPRFNNRVHSKHKGWFAPSVEVKIQEHITVIKRICRILPVTLVRVETAEFDTQRLKAMLAGKPLPVGTDYQLGEMYDEYNVRQYVLKRDNYTCQCCGTHTTTKKAVKLHVHHLESRKVGGNAPSNLITLCVTCHNSLHKGKITLDGKRRGKTLRDAAFMGIMRNTLLTRLRNELNIPVQNTYGYITKLLREQNDIKKSHVNDARCISKHPLAEPCSVCYRTKAIRHHNRQIHKAKILKGGIRKANQAPYIVKGFRLWDKVLYNGQECFISGRRSLGYFALRKLDGTAITNSISFKKLRLLEPATNYLIERK

SEQ ID NO: 11824 - protein, 304 aa, unidentified
  REGION 1..304: note = Human gut metagenome
LAGAICGGQDPGAYHQYQAGFELLPIGKVVVETAEFDLQLLKSIADGMPVPQGEDYQKGEMYGFYNVRQYVFFRDGYTCQCCGAHGKGIKFHTHHLESRKTGGNAPDDLVTVCDKCHKAFHAGLITDAKLKKRRRKSTRDAAFMGIMRKTLLQRLRAELPIPVVETRGYITKATRERLLKLPKSHTNDALAIAMGRHGFGIEEVTYMPQSDRIYQIKPVRHHNRQLHKALPKKGGRRQRSQGPKYVQGFRRFDKVLYRGQECFIWGLRTRGYFQLKLLNGTKVHESAKASELILLEHSSGYLIA

SEQ ID NO: 11825 - protein, 442 aa, unidentified; identical to SEQ ID NO: 4418
  REGION 1..442: note = Human gut metagenome

SEQ ID NO: 11826 - protein, 512 aa, unidentified; identical to SEQ ID NO: 7636
  REGION 1..512: note = Human gut metagenome

SEQ ID NO: 11827 - protein, 426 aa, unidentified; identical to SEQ ID NO: 3614
  REGION 1..426: note = Human gut metagenome

SEQ ID NO: 11828 - protein, 406 aa, unidentified; identical to SEQ ID NO: 7944
  REGION 1..406: note = Human gut metagenome

SEQ ID NO: 11829 - protein, 406 aa, unidentified; identical to SEQ ID NO: 3157
  REGION 1..406: note = Human gut metagenome

SEQ ID NO: 11830 - protein, 376 aa, unidentified; identical to SEQ ID NO: 6265
  REGION 1..376: note = Human gut metagenome

SEQ ID NO: 11831 - protein, 406 aa, unidentified; identical to SEQ ID NO: 2703
  REGION 1..406: note = Human gut metagenome

SEQ ID NO: 11832 - protein, 446 aa, Actinomadura sp.
MPRERHAMVFVLDKHGMPLQPCHPARARYLLRRGRAVVHRHTPFVIRLKDREIAGSEVDGVEVGIDPGSKHTGVSVFTAQTGERRARFAVQLNHRGATIGKRMRQRAAYRRRRRSANLRYRKARFSNRTRPQGWLAPSLRHRADTTTSWVDRLTRWAPVQAVHVERASFDTHLLAAGKPLEGTEYQHGTLHGFEVREYLLTKWGRACAYCGATGTPLNIDHIRPSSRSGSDRVSNLTLACIPCNQVKSNRLVTEFLAGRPDVLAKVLAQATKPLADAAAVNSTRWALWRALDARLPTHTATGGRTKWNRTCNGLPKSHALDALAVGTLDSITETVRRVLVVGCAGRGAHQRTTPNQHGFPRLTRPRKKTFYTFATGDLVRAVVPTGKKAGTHTGRIAVRERGYFDIHTRHGRVAGIGHRHVRLLQRADGYAYTTQLEVTPEHHKDG

SEQ ID NO: 11833 - protein, 442 aa, Lactobacillus sp.; identical to SEQ ID NO: 9492

SEQ ID NO: 11834 - protein, 418 aa, unidentified
  REGION 1..418: note = metagenome
MPCSPAKARLLLKEKKAIVKRRTPFTIQLTIATGESKQPVTLGVDAGYKHVGLSASTEKAELYASEVELRQDITDLLSARRALRQSRRNRKTRYRAPRFDNRISTKRKGWLAPSVENRINAHLSRIEAVLRLLPVTKITVETASFDLQLLKNPDISGKEYQEGEQLGFWNIREYVLCRDGHVCQHCYGRSKDPVLNVHHLESRRTGGDSPGNLITLCETCHKALHRGEITLKAKRGQSFRAEAFMGIMRWEVHNRLRALHPGIEVSNTYGYRTKHARIANGIAKSHCADAFCIAGNLGAERLGEFFFQKQTRRNNRQIHKLSILKGGIRKRNQAPFEVKGFRLFDKVACQGEEGFIFGRRSSGFFDVRKLDGTRISAGISCKKLHLLEKRRTYLTEIRKEEALPPLPEGRGSAPKCDE

SEQ ID NO: 11835 - protein, 420 aa, unidentified
  REGION 1..420: note = Human gut metagenome
MQYVYVINKHGKPLMPCSPGKARLLLKQQKARVVKRTPFTIKLLYGSAGYKQPITLGVDAGSKHVGLSASTEKRELYSEEFTPRNDVVELLSTRRQNRRSRRNRKTRYRAPRFDNRVHSKHKGWLAPSVEVKIQEHITVIKRICRILPITLVRVETAEFDTQRLKAMLAGKPLPVGTDYQLGEMYDEYNARQYVLKRDHYTCQCCGAHTTTMKSVKLHVHHLESRKVGGNAPSNLITLCTTCHDALHKGKVSLDNKKRGKPMRDTAFMGIMRKTLMARLSEELPIPVQGTYGYITKMRREQNDIKKSHVNDARCISKHPLAEPCSVCYRTKAIRHHNRQIHKANFSKGGYRKRSQMSYIVEGYRLWDKVLYKGQECFISGRRASGRFALKKLDGTSISKSVTFKKLRLLEPATNYLIERM

SEQ ID NO: 11836 - protein, 495 aa, unidentified
  REGION 1..495: note = Human gut metagenome
MAVVYVLSASGKPLMPTTRCGHVRILLKEGKARVVERIPFTIQLTYQSEEETQPLYLGIDPGRTNIGTAVIRENGECVFTAQLTTRNKDVPKLMKARKQFRMAHRRLKRRCKRQRRAKANGTTSPKEEFQRLLPGCEEPITCKGIRNKEARFNNRKRLVGWLTPTATHLLLTHINLIQKLKKFLPITDVVLEVNQFAFMAMDNPHIQRWQYQRGPLFGQGSVEDAVYAAQDGHCLFCKKGIDHYHHVIPRRKNGSETLENRVGLCEEHHRLVHTEASWENKLASKKAGINKKFHALSVLNQIIPQLTEQLTELFPQHAFVTTGQDTCSFREDHSIPKDHYLDAYCIACSVLTDTSRVAIPKAAPHDIRQFRRHDRQACHKANIERKYIDAGGKVVASNRNKAIEQKTDSLREYRVSHSESEVSQLTVRPHFPQYKDMGRPMPGSLVLHNGNVFVLTSSDGRHNGFVDYYIDEYGEKHKARKCNILTNNSGLQFCG

SEQ ID NO: 11837 - protein, 440 aa, Clostridium sp.; identical to SEQ ID NO: 5468

SEQ ID NO: 11838 - protein, 375 aa, unidentified
  REGION 1..375: note = uncultured Candidatus Competibacteraceae bacterium
MNKVFVLSSTKEPLMPTRPARARQLLTRGRAAVYRMQPFTIILKDRETGDTQPVEVKVDPGSKATGIALVGHFEQQGAVVLWGANVNHRGQTMKNNLESRASLRRGRRGRKTRYRQARFLNRTRNAGWLPPSVESRVGNTESVINRLATRCPITEVSIEIVKFDMQAMVNPEISGTEYQQGTLAGYELREYLLEKWHRTCAYCGAKDVPLQIEHIQPKALGGSNRVSNLTLACKPCNQKKGSQPITVFLKTKPELIKKIQAQAKAPLKDAAAVNASRWALKNRLEKRWPVSCGTGGRTKFNRTKQGYEKDHWRDAACVGESGERVLIREGMKPLIITAKGRGSHQVVRTDKFGFPQGKAGRIKRVHGFSTGDIVK

SEQ ID NO: 11839 - protein, 434 aa, Lactobacillus sp.; identical to SEQ ID NO: 6197

SEQ ID NO: 11840 - protein, 414 aa, unidentified; identical to SEQ ID NO: 2588
  REGION 1..414: note = Human gut metagenome

SEQ ID NO: 11841 - protein, 344 aa, unidentified
  REGION 1..344: note = Human gut metagenome
MSVYQLQQKSKELYASEVILRSDVVDLLSTRRELRKIRRYRLRYRKPRFMNRIKSKKRGWIAPSIRQKIDSHIRIIGFVYSILPVSKLIIEVAQFDTQKIKNPEISGKEYQEGEQLGFWNVREYVLARDEHKCQHCKGKSKDPVLNVHHIESRKTGGDSPSNLITLCKTCHKEFHKGNIKLKVNRGESLRDAAVMSIMKWELYDELKSLYPNVKMTFGYITKYNRINHGIEKSHVSDAFVISRNFDSERLGYYYKRKLVRRHNRQIHKMKAPKGGNKRMNQSPFKVFGFRLFDKVMFQGKERFIYARRLRGIFNIRDINGENKKDISYKKLEYVSHGLISIVAG

SEQ ID NO: 11842 - protein, 414 aa, unidentified; identical to SEQ ID NO: 4492
  REGION 1..414: note = Human gut metagenome

SEQ ID NO: 11843 - protein, 427 aa, Enterococcus sp.; identical to SEQ ID NO: 5630

SEQ ID NO: 11844 - protein, 450 aa, Moorena sp.
MSYMAVFVLDKHQKSLMPCSEKRARLLLNRRRARVHSIAPFTIRLVDRTIEKSSLQPIRCKIDPGSKTTGVAIARENGDQQIVLFLFELTHRGANIRDALQSRSVKRRRRRSQLRYRPKRFENRRRPRGWLAPSLYHRIETTLTWIERFQKRAPIAAITCERVRFDTQKLLNPEIEGIEYARGSLLGYEVREYLLEKWGRKCAYCDASNTPLQVDHITPQSRGGSDRIDNLTLACSSCNQKKNNQSVEAFHPQKAKIIRSKSSLRGAAAVNSTRSALWDQLTRLSLPCEEGTGGQTKYNRVRLAVPKMHALDAACTGVVSDLQNWQIPIQPILSTGRGSYQRTLLDRFGFPRGFLLRQKQVHGFQTGDMVIASVPSGKKQGRHAGRVAIRASGNFNIQTAEGVIQGINSKHCHLVQRSNGYHYPSRPLTFQYQGCNTQIITQRSGNSSRP

SEQ ID NO: 11845 - protein, 420 aa, unidentified
  REGION 1..420: note = Human gut metagenome
MQYVYVLNKHGEPLMPCSPRKARLLLKQKKACVVKRTPFTIKLLYGSTGYKQPITLGVDAGSKHIGISATTEKCELYREEATPRNDVVDLLSARRAFRRNRRNRKTSYRAPRFNNRVHSKHKGWLAPSVEVKIQEHITLIKRVCRILPVTLVRVETAEFDTQRLKAMLEGKPLPVGTDYQLGEMYDEYNVRQYVLKRDKYTCQCCGAHPTKTKAVKLHVHHIETRRTGGNAPNNLITLCTACHKALHAGKVTLNGKKRGKPLKDAAFMGIMRKTLMERLLKELKIPVQGTYGYITKYLREKNGIPKSHTNDARCISKNPLAIPCDTCYYTKAVRHHNRQLHKATILKGGIRKANQAPYIVKGYRLWDKVSCNGTECFITGRRTSGYFALKKLDGTVISNSISYKKLRLLEVATNYITERK

SEQ ID NO: 11846 - protein, 420 aa, unidentified
  REGION 1..420: note = Human gut metagenome
MQYVYVLNKHGEPLMPCSPRKARLLLKQKKACVVKRTPFTIKLLYGSTGYKQPITLGVDAGSKHIGISAATEKYELYREEATPRNDVVDLLSARRAFRRSRRNRKTRYRAPHFNNRVHSKHEGWLAPSVEVKIREHITLIKRVCRILPVTLVRVETAEFDTQRLKAMLEGKPLPVGTDYQLGEMYDEYNVRQYVLKRDNYTCQCCGAHPAKIKAVKLHVHHIETRRTGGNAPNNLITLCTACHKALHAGKVTLDGKKRGKPLKDAAFMGVMRKTLMERLLKELKIPVQGTYGYITKYLREKHSIPKSHTNDARCISKNPLAIPCDTCYHTKAIRHHNRQLHKATILKGGIRKANQAPYTVKGYRLWDKVSYNGSECFITGRRTSGYFALKKLDGTVVSNSASYKKMRLLEVATNYITERR

SEQ ID NO: 11847 - protein, 430 aa, unidentified
  REGION 1..430: note = Human gut metagenome
MPKVYVLNRHGRPLMPCTPAKARHLLDAGKAKVRHRTPFTIQLLYGSTGYTQEVILGVDAGSKTIGLSAATETEELFSAEVKPRNDVVELMSARRQFRRARRNRTTRYRKPRFDNCVRSKHKGWLAPSVEVKIQEHMTAIRRACAILPVSKVVVETAEFDLQLLKAVAEGKPVPQGEDYQKGEMYGHYNVRQYVLWRDSYTCCICGVHGSVRKGVPLHVHHLESRRVGGDAPDNLVTLCTACHDKLHKGIIMAADIKKRKRRSTRDATFMGIMRMTLLRRLREQIPVPVVETRGYITKATRENLLVLPKSHANDALAIAHGPQGFRAEHLPNIRQADRLYTIRPVRHHNRQLHKATILKGGVRKTNQAEKYICGFRLYDKVLYNGIECFVWGRRTSGSFLLRQLNGEKVKDGVSYKHLKLLERSQSYLVA

SEQ ID NO: 11848 - protein, 413 aa, unidentified; identical to SEQ ID NO: 2636
  REGION 1..413: note = Human gut metagenome

SEQ ID NO: 11849 - protein, 263 aa, Moorena sp.
MINPDIHGVDYQLGQTYGFFDERYFVFARDNYTCQVCGKSKGKILQTHHIIYRSNGGTDRVDNLITVCTDCHTSANHKKGGILYKWQAEHKKVKQYKEPPFMNTLRRRIFDKYPNAIITYGSETTLKRKEIGLEKTHYNDAIVISSITAIKANPNEWLLIRQFRKKKRSLHESTARKGRKEPNRTQKRNRKNTPYYKGFWLNDKVSVLDQVGYITGFTSGGAYIKNKNDEYITLPGKSYKQVGISNLRLLSHNNNWQYIRNAV

SEQ ID NO: 11850 - protein, 536 aa, unidentified; identical to SEQ ID NO: 4526
  REGION 1..536: note = Human gut metagenome

SEQ ID NO: 11851 - protein, 431 aa, Calothrix sp.; identical to SEQ ID NO: 3120

SEQ ID NO: 11852 - protein, 429 aa, Beggiatoa sp.
MQRVFVLDTKKKPLMPCHPARARKLLKKGKAAVYRRYPFTIILKERVDGQLQPVEIKFDPGSRTTGIALVGHFERGSEVIWAGNLNHRGLQIKSNLVSRRAIRRSRRNRKTRYRPARFLNRRRPKSWLPPSLRSRVDNVKNWALKLSRLAPITQIAVETVRFDTQKMQNPEVSGMEYQQGELAGYEFREYLLEKWGRQCAYCGVQNVPLEVEHIQPRSKEGSNRVSNLTLACTKCNQKKGNKDVKDFLKGKPDRLKKIQAQAKASLRDTAAVNATRYAIGEALKTFGFVISFSSGGRTKFNRTQQGYPKEHWVDAACVGENGNPVAIPKAITPLIITAKGRGSRQKCRMNKYGFPRTGPKKHKRVKGFQTGDIVKAIVTKGKKIGTYVGRVAVRATGSFDIGSGIEAVGSISYKYCQLLQRSDGYDYLK

SEQ ID NO: 11853 - protein, 415 aa, unidentified
  REGION 1..415: note = Human gut metagenome
MENEMAYCFVVDKNNRPLAPTKVNKGWYLVRKGRAKIKSRYPMVIQLEKEVEPDKYDESRVVVGIDDGSAHVGLAIVQKCPTKNKVVFKGTIEQRQDVKHLMDVRRGYRRYHRYHKRYRQARFNNRHSSKRSGRLAPSIKQKKDAVLRVLYQLNRWINIQEYYLEDVCMDIRAMTDGYKPYRWQYQKSSRLDENLRKAAIIRDGCKCQECGRSNCVLEVHHIKARKYGGADTIGNLITLCSGCHQKTEGREREFEDRYFKIIGSKPKRFDYAMHVMQGKNYLRERISELGPLHLTNGGETANKRIEWNIVKSHSNDAICITDCISDTCDVKEWIIKPMRRKSKAKTDNVLGIRHRDLVSYTYKNGEIHTGYVTALYPELLALNFQSKTKHCKKVNAQKCRLLWKFDKIYWLEQCV

SEQ ID NO: 11854 - protein, 406 aa, unidentified; identical to SEQ ID NO: 2752
  REGION 1..406: note = Human gut metagenome

SEQ ID NO: 11855 - protein, 456 aa, unidentified
  REGION 1..456: note = Human gut metagenome
MSTCVCVLSNSGERLMPTFRLGKVRRLLKDGKAKIVKHHPFTIQLLYDSKTNTQPIEICEDVGYNYIGISVKSESHEYVSAQYDTLQDEKACHDSCRKLRRTRRNRLRYRKPRFDNRKRSEGWLAPSLRHKKELNVNVVKMYCAVMPITHATIEVGSFDTMLVKAIREGKAIPEGADYQKGPRYNLATLREAVFYRDNYVCKVCGRKATEGAILHMHHMFYWKGRHGNSLNELLTVCEKCHTPANHQKSGKLYGFGENVKFADLSGAAFMNTVRWQIVNELYAAFGKDFVTVTYGAMTKEKRIALQLEKAHSNDAYAMGNCHPAHRCEFGHYQKRCRNNRVLEKFYDATYIDTRTGNKAKGKELFNGRISRNHKKDSENLHKYRSKKVSKGRRSIRRQRYAIQPYDTVRLESKTYITSGCHNKGTRLLIPANGKSKSVAISKVQVVCHAGAWIQII

SEQ ID NO: 11856 - protein, 430 aa, unidentified
  REGION 1..430: note = Cyanobacteria bacterium UBA11153
MSNFIFVLDTNYQQLNPIPPGQARRLLKQGQAAIYRHYPFTIILKHKVSNPKTQPHQLKIDPGSQVSGLAIIQDDKVIWGAQLTHRGEQIKHDLESRRAIRRHRRNRKTRYRQPRFFNRTRKPGWLPPSLESRIKNILTWVKRITRYVPITGISQELVKFDTQAMSNPEISGIEYQQGELAGYEIKEYLLSKWGRKCAYCGVENLPLEIEHIQPKSTGGSNRVSNLTLACSRCNQAKGSRDIRDFLSHKPQVLSGILKQAKQPLKDAAAVNATRWALFNRLKAIALPVETGTGGRTKYNRNRLELPKTHWLDAACVGVVSSLKILTSKPLLITAKGWGSRMMSTSNKYGFPIKHKTRCQTFFGFKTGDIVQATLPTGKFAGIHVGRLIVRASGVFELISAKGKVSPVRHKYCKTIHRKDGYMYALSTFVQ

SEQ ID NO: 11857 - protein, 464 aa, unidentified; identical to SEQ ID NO: 6330
  REGION 1..464: note = Human gut metagenome

SEQ ID NO: 11858 - protein, 414 aa, Parasutterella sp.
MPCSPAKARLLLKEKKAIVVRRTPFTIQLTIATGETKQPVSLGVDAGYKHVGLSASTENAELYASEVELRQDVSDLLSARRTLRQSRRNRNTRYRAPRFDNRIRTKRKGWLAPSVENRINAHLSRIETVIRLLPVTKITVETTSFDMQLLKNSDIAGKKYQEGEQLGFWNVREYVLFRDGHVCQHCHGRSKDPVLNVHHLESRRTGGDSPGNLITLCETCHKALHRGEITLKAKRGQSFRAETFMGIMRWEVLDRLKASHSKLEVQNTYGYRTKHARISNGIAKSHCADAFCIAGNLGAERLGEFFFQKQTRRNNRQIHKLSILKGGIRKRNQAPYEIKGFRLFDKVACQGEEGFIFGRRSSGYFDVRKLNGTHISAGISCKKLRLLEKRQTYLTEIRKEKALPPLPEGRGLRA

SEQ ID NO: 11859 - protein, 470 aa, unidentified; identical to SEQ ID NO: 5320
  REGION 1..470: note = Human gut metagenome

SEQ ID NO: 11860 - protein, 470 aa, unidentified
  REGION 1..470: note = Human gut metagenome
MSVFVVGLNGCRLMPVSERKARLLLKGGKASVYRKVPFTIKLNYKTGSTVQPGYLGIDTGSQHIGASVVQKDGTVLHKEEIGLRDSMSKRKLLESRASSRRGRRYRKTRYRHPKWKPKTKRIYNEKADRKGRHWKKQKNTFTSKRQAGWLPPSLQSKTDHHIQWIRKLLDLLPEGYRLSIELGRFDPARMKDPGIHGELYQKGPQYDYENVRAYVLARDGYTCRVCKKKGGKLHVHHILYRSRGASDDPKYMAAVCSNCHTTENHLPGGILYQWMQDQKKFTRGLRDATFMNILKKRLRKAFPDAVFTYGNITKADREKLELPKSHGNDATAIALVKTEVTSVKDEEPVIHIQQVRRKKRSLHEETPRKGRKEPNRTASRIDKNTKSVTVTKGSGEKKASMTACLFDRVELDGKKGWITGFTGTSCYVKDKEDSYICTSPKYKQVSISRLRILHHCGNWAIGAEKPLGKR

SEQ ID NO: 11861 - protein, 422 aa, unidentified
  REGION 1..422: note = Human gut metagenome
IVKHHPFTIQLLYDSKTNKQPIEICEDVGYNYIGISVKSESHEYVSAQYDTLQDEKEHHDDCRKMRRARRNRLRYRKPRFDNRKRSEGWLAPSLEHKKQLNISLVERYVSVIPITHATVEVGSFDTMLLQAIQKGETKPEGADYQEGPRYNLATLREAVFYRDNYTCQVCGRKITDGAILHMHHMFYWKGRHGYKLDELVTACEKCHTPANHQKGGKLFGFGEDKEFADLSGAAFMNAVRWQIVNALHTTYSKEFVTITYGAMTKEKRIALQLEKSHNNDAYAMGDFHPVHRCGFRHYQKRRRNNRVLEKFYDATYIDARTGNKAKGKELFNGRISRNHKKDSENLHKYRSEKVSKGRRSIRKRRYAIQPYDTVRLKGKTYITSGCHNKGTRLLIPVNGKSKSVTISKVQVVCHAGPWIQII

SEQ ID NO: 11862 - protein, 451 aa, unidentified; identical to SEQ ID NO: 9425
  REGION 1..451: note = Human gut metagenome

SEQ ID NO: 11863 - protein, 442 aa, unidentified; identical to SEQ ID NO: 4418
  REGION 1..442: note = Human gut metagenome

SEQ ID NO: 11864 - protein, 413 aa, unidentified; identical to SEQ ID NO: 3220
  REGION 1..413: note = Human gut metagenome

SEQ ID NO: 11865 - protein, 462 aa, unidentified
  REGION 1..462: note = Human gut metagenome
MSVLVIGRNGRALMPTNPRKARLLLKKKTASVVCRHPFTIQLLYKTGCATQEGCIGIDTGSQHIGVGITCGDRVILKDEHALRSSMEKRSLLATRAVMRRGRRYRKVRYRKPKWRHHTKRMYFEKANRRGQHWRKVKTTTQSPRLKGWLPPSLQSKCAHHFRIIDRYLKYLPDPITRNLVIEAGRFDMARMNDPTIHGEMYQRGPMYDAENLRAYIFARDNYQCACCKAKAGTTRKADGTTVKLVAHHILFRSRGATDNPKYIISVCDHCHTTKAHQPGGILYSWMENNKKVARGLRDATFMNILRKRLFARYPQAAFTYGNITAADRKQLRLPKSHANDAVAISLFGKEASTVKNICQTMHYKQIRKSKRSLHEAIPRKGRKNPNTKAVRNKKNTTQVNGFKLWDSVLADGKKLFICSFTGTSAYLIDKNGCYISQPGKTYKQWPLSKLKRLHPNGNWLMA

SEQ ID NO: 11866 - protein, 497 aa, Moorena sp.
MVEGRPRVRVTAPRGVTGERLRLNLSYPVGVIPPHPQLNSPRIHRTFPSGRCSFSTSAASRSCLATPARARQLLGKGRARVHKLYPFTIRLTDRLAETSEIDGMAVKIDPGSKATGIAVTRTDENGDLHGLVAVEVRHRGGQISKKLTARGAYRRRRRSANLRYRAPRFNNRTKPKGWLAPSLQHRVDNVIAWVTRLRKLAPVTSIAMETVRFDTQLLQNPEVSGVEYQQGTLAEYELREYLLEKYHRACVYCDATGVPLNLDHLVPRAHGGSDRAANRVLACVACNQAKGASAVEQFVTDPNRLAKILADVKKPLRDAAGVNSTRNALLRGLEATGMPVEAGTGGRTKWNRHHFSVPKSHTLDGLCVGEVSGIAKVSRDVLIASSTGRGTYQRTLPDKFGFPRLHRSRIRQHHGFQTGDLVRATVPSGKKAGTHTGRVAVRATGSFNITTGEGTVQGVHHRHCRLLQRADGFSYQTGKETALLPALTDGVSAREER

SEQ ID NO: 11867 - protein, 414 aa, unidentified; identical to SEQ ID NO: 11675
  REGION 1..414: note = Human gut metagenome

SEQ ID NO: 11868 - protein, 436 aa, unidentified
  REGION 1..436: note = Human gut metagenome
VSSFFLAAILSKEHGIMQYVYVLNKHGEPLMPCSPGKARLLLKQQKACVVKRTPFTIKLLFGSAGYKQPITLGVDAGSKHVGLSASTEKRELYSEEFTPRSDVVELLSTRRQNRRSRRNRKTRYRVPRFDNRVHSKHKGWLAPSVEVKIQEHITVIKHICKILPISLVRVETAEFDTQRLKAMLAGKPLPVGTDYQHGEMYDEYNVRQYVLKRDHNTCQCCGTHNTAKKVVKLHVHHLESRKTGGNAPSNLVTLCTTCHKNLHKGRVTLDGKERGKPLRDAAFMGIMRKTLMVRLKEELPIPVQGTYGYITKMRREQNDIKKSHTNDARCISKHPLAEPCSVCYRTKAIRHHNRQTHKANFSKKGIRKRSQMPYLVEEFRLWDKVLYKGQECFVSGRRSSGSFALKKLDGTSISKGVTFKKLRLLEPATNYLIERM

SEQ ID NO: 11869 - protein, 493 aa, unidentified; identical to SEQ ID NO: 2644
  REGION 1..493: note = Human gut metagenome

SEQ ID NO: 11870 - protein, 442 aa, Anaerostipes sp.; identical to SEQ ID NO: 2903

SEQ ID NO: 11871 - protein, 424 aa, unidentified
  REGION 1..424: note = Human gut metagenome
MVTVQQSTHHLPFGRVFIRRNLFMVYVISQDGKPLMPCSDPIARLLLKQGKAKVKKREPFTIKLTYETTNYTQGLTLGVDTGSGTIGTAVSKDNGDIVYMSEVVVRNDITDKMTQRAKYRRNRRNRKTRYRKARWLNRASSIKKDRFSPTMQSKLHSHVREIEYIQSILPVTEMVFETGQFDMHLMKNPSLANPKVRPWGYQKGANYGFENTKAMVLNRDNYTCQCCKGKHKDSKLEVHHIVFRSQGGSDEESNLLTLCHTCHKDLHSGKINPKLSGKVKGNLKYATQMNSIRKQLFRCYPNAIETFGYVTKVNRLHLGVAKEHYYDACTIATQGNAFNVKSNLYKKKCVSDGDFQKTKGIHSEQPIVTDKICGFRKFDKVRYFGNDYFIKGRMSTGYAILMDIDGNKIDFSTMPRGYKTPKLS

SEQ ID NO: 11872 - protein, 422 aa, unidentified; identical to SEQ ID NO: 5333
  REGION 1..422: note = Human gut metagenome

SEQ ID NO: 11873 - protein, 420 aa, unidentified
  REGION 1..420: note = metagenome
MQYVYVLNKHGEPLMPCSTRKARLLLKQKKACVVKRTPFTIKLLYGSTGYKQPITLGVDAGSKHIGISAATEKYELYCEEATPRNDVVDLLSARRAFRRSRRNRKTRYRAPRFNNRVHSKHKGWLAPSVEVKIQEHITLIKRVCRILPVTFVRVETAEFDTQRLKAMLEGKPLPVGTDYQLGEMYDEYNVRQYVLKRDNYTCQCCGAHPTKTKAVKLHVHHIETRRTGGNAPNNLITLCTACHKALHAGKVTLDGKKRGRSLKDAAFMGVMRKTLMERLLKELKIPVQGTYGYITKYLREKHSIPKSHTNDARCISKNPLAIPCDTCYYTKAIRHHNRQLHKATILKGGIRKANQAPYTVKGYRLWDKVSYNGSECFITGRRTSGYFALKKLDGTVVSNSASYKKMRLLEVATNYITERR

SEQ ID NO: 11874 - protein, 418 aa, unidentified; identical to SEQ ID NO: 2710
  REGION 1..418: note = Human gut metagenome

SEQ ID NO: 11875 - protein, 512 aa, unidentified; identical to SEQ ID NO: 9077
  REGION 1..512: note = Human gut metagenome

SEQ ID NO: 11876 - protein, 415 aa, unidentified
  REGION 1..415: note = Human gut metagenome
MENKIEYCFVVDKNNRPLAPTKVNKGWYLIRKGRAKLKSKYPMVIQLEKEVEPDDEDESHMVCGIDDGSSHVGIAIVQKCPSKNKVVFKGTIKQRQDVKHLMDVRRGYRQYRRYHKRYRKPRFNNRASSKKTNRLAPSIKQKKDSILRVLYQLNKWINIKEYYLEDVAIDIRAMTDGYKPYNWQYQKNNRLDENLRKATILRDSCKCQECGKTNTVLEVHHIRAKRFGGANTIGNLITLCSSCHQKTEGKEREFEERYFTKIKSKPKRFDYAMHVMQGKNYLRENIKQLGILHLTTGGDTANKRIEWNIEKSHSNDAICITNCFPDTCNIKEWMIKPMRRKSKAKTDNVLGIKHRDLVEYTYRNGETHKGYVTALYPHLNALNFQSPTKHCKKVNVRKCRLLWKYNKIYWLDSVI

SEQ ID NO: 11877 - protein, 512 aa, unidentified; identical to SEQ ID NO: 5238
  REGION 1..512: note = Human gut metagenome

SEQ ID NO: 11878 - protein, 630 aa, Nocardiopsis sp.
MTRAPSSARSSLGGASSTFPMGTPASVRVPVPPLVPAPPSTTVIPVLSRYGWLVTPSETWFRGPSAKDNHLRPQPTSRGNAFPARRRGFRPPGRGPGVTSTSQHQGGDQLATFHTGEKTHQAVLPQRPALESASADIPRNGNETGRGSHVRGAPGVEHVRGETTGGSPTAGGVAPVPPGAGEQAREDRPPKTTPREGHPYVFVPDRHGTPLQPTHPARARRLLARGRAIAARHTPFVIRLKDRTTAESGVDGVETGIGPGSKRTGTAVFTDRRGERRGRCAIRPDHRGGQIAKRMRQRAAYRKGRRSRNLRYRTARFDNRTRPRGWPPPSLRHRVDTTLAWVGRPARWAPVLERVAFDVHALGAGRPAEGVEYRHGTLHGYEVREYLLAKWGRACAYCGATGTPLNVDHVRPRSRGGSDRVADLALACVPCNRAKADQPVEEFVTNPRALAGISAQTKAPLRDAAAVDATRWALWRSLDECPPTRVGSGGRTKWNRTRDHLPESHTLDALAVGRVETVTTAVSTVLVVGAAGRGPYARTRADRHGFPRLRLPRRKRFFGFQTGDLARAAVPSDMNAGTHTGRVAVRSSGSHTLQTSYGPIKTSWKNLCLLQRADGYGYTTQKEAGAPSTA

SEQ ID NO: 11879 - protein, 413 aa, unidentified; identical to SEQ ID NO: 4790
  REGION 1..413: note = Human gut metagenome

SEQ ID NO: 11880 - protein, 279 aa, unidentified
  REGION 1..279: note = Human gut metagenome
VVVETAEFDLQLLKAIADGKPVPQGEDYQKGEMYGHYNVRQYVLWRDNYTCQCCGAHATKKKEVRLHVHHLESRKVDGDAPDNQVTLCESCHEKLHKGLIAEKDFKKRKRRSTRDATFMGIMRKTLMQRLCSELPIPVVETRGYITKATREKLLVLPKSHTNDALAIAQGKRGFNVGYLPGILQIDKIYTIRPVRHHNRQLHKAAILKGGIRKSNQAGKYVFGYRLFDKVQFNGQDCFIWGRRTTGIFTIKTINGKMIKDGISFKKLKLVEKSTSYLIA

SEQ ID NO: 11881 - protein, 543 aa, unidentified
  REGION 1..543: note = Human gut metagenome
LTFVSIYVQRVYGRTRRFFQSAALHSGRQARGNIYPAGQTAGVLQKEVRTMAAVYVISASGKPLMPTTRCGHIRGLLNAGKARVVEREPFTIQLKYETPDVTQPLYLGIDPGRTNVGSAVVREDGECVFTAQLTTRNKDVPKLMKARKQFRMAHRRLKRRCKRQRRAKAAETLSQKGEFQRLLPGYEEPILCKGIRNKEARFNNRQRPAGWLTPTANHLLLTHLNMVKKLQKLLPITDVVLEVNRFAFMAMENPSIRRWQYQQGPLYGKGSVEDAVYAQQDGHCLFCGKPIAHYHHVVPQHKNGSETLENRVGLCNEHHDLVHKDRAWDAKMKETKAGLNKKYHALSVLNQIIPALTEQLTAMFPQHAFVTTGKDTADFREDYGIAKEHHLDAYCIACSVLAEPTKVAAPTGKPHRLMQFRRHDRQVCHKENIKRVYLSEGKAVATNRHKAIEQKDDSLEEFRKTHTQQEVSALTVKDHQPVYKDMRRFMPGGVFLFNGKVHTLQRSHGRYKGMPFYYIDTDGSKNHAKGCIFLQQNCGLRWV

SEQ ID NO: 11882 - protein, 518 aa, unidentified; identical to SEQ ID NO: 7282
  REGION 1..518: note = Human gut metagenome

SEQ ID NO: 11883 - protein, 448 aa, unidentified
  REGION 1..448: note = Human gut metagenome
ILKTCFAAFNLAKVVVLMDAWDIIVVLNKRGKPLMPCSPAKARHLLKEKKAIVVRRTPFTIQLTIATGESKQAVNLGVDAGYKHVGLSASTEKAELYASEVELRQDITDLLSARRGLRRARRNRKTRYRAPRLDNRIRTKRKGWLAPSVENRINAHLSRIETVLRLLPVTKITVETASFDLQLLKNPDISGKEYQEGEQLGFWNIREYVLCRDGHVCQHCYGRSKDPVLNVHHLESRRTGGDSPGNLITLCETCHKALHRSEITLKAKRGQSFRAEAFMGIMRWEVLNRLKASHSELEVHNTYGYRTKHARIANGIDKSHCADAFCIAGNLGAKRPGEFLFQKQTRRNNRQIHKLSILKHGLRKRNQAPFEIKGFCLFDKVVCKGEEGFIFGRRSSGYFDVRKLDGTRISAGISYKKLRLLEKRRTYLTEIRKEEALPPLPEGRGLRA

SEQ ID NO: 11884 - protein, 424 aa, unidentified
  REGION 1..424: note = Human gut metagenome
MRVFVFNMRGRPLMPCSQRKARLLLRENKAMIYKYHPFTIQLTYTTGETKQDCHIGIDTGSKYIGAAVRSEDKVFWKGEIELRQDIRSNLDTKRIYRRSRRNRKTRYRKPRFLNRKRRDEWLPPSLQSRINHTFHWIDTLSSLVPNPILHIEVGKFDVAKMINPEIHGVDYQHGQTYGFFDERYFVFARDNYTCQCCGKSKNKILNTHHIIYRSNGGTNRVDNLITVCTDCHTSQNHRKGGIFYQWQEQHKKVKQYKEPPFMNTLRKRIFVAYPDAEITYGSETTPKRKAMKLDKTHYNDVIVISGINEIKENPEEWLLIKQFRKKKRSLHEATARKGRKNPNRNQTRNSKNTPYYKGFYLNDKVSVFGKSGYITGFTSNAAYIKDENNDYITLPNKTYKQVSINKMKLECHNNNWQYIIKNAV

SEQ ID NO: 11885 - protein, 511 aa, unidentified
  REGION 1..511: note = Human gut metagenome
LVSGQLIMAWEAIQTRRIKPHDIGEGTLRRHAAGTVSFPVLCKNRKETLMSVLVIGRNGRALMPTNPRKARLLLKKKTASVVCRHPFTIQLLYKTGCATQEGCIGIDTGSQHIGVGITCGDRVILKDEHALRSSMEKRSLLATRTVMRRGRRYRKVRYRKPKWRHHTKRMYFEKANRRGQHWRKVKTTTQSPRLKGWLPPSLQSKCDHHFRIIDRYLKYLPDPITRNLVIEAGRFDMARMNDPTIHGEMYQRGPMYDAENLRAYIFARDNYQCACCKAKAGTTRKADGTTVKLVAHHILFRSRGATDNPKYIISVCDHCHTTKAHQPGGILYSWMENNKKVARGLRDATFMNILRKRLFARYPQAAFTYGNITAADRKQLRLPKSHANDAVAISLFGKEASTVKNICQTMHYKQIRKSKRSLHEAIPRKGRKNPNTKAVRNKKNTTQANGFKLWDSVLADGKKLFICSFTGTSAYLIDKNGCYISQPGKTYKQWPLSKLKRLHPNGNWLMA

SEQ ID NO: 11886 - protein, 450 aa, Moorena sp.; identical to SEQ ID NO: 2935

SEQ ID NO: 11887 - protein, 288 aa, unidentified
  REGION 1..288: note = Human gut metagenome
LLFYRKEHGIMQYVYVLNKHGEPLMPCSPGKARLLLKQQKACVVRRTPFTIKLLYGSAGYKQPITLGVDAGSKHVGLSASTEKRELYSEEFTPRSDVVKLLSTRKQNRRSRRYRKTRYRAPRFDNRVHSKHKGWLAPSVEVKIQEHITVIKRICKILPISLVRVETAEFDTQRLKAMLAGKPLPVGTDYQLGEMYDEYNVRQYVLKRDHYTCQCCGAHNTAEKVVKLHVHHLESRKTGGNAPSNLVTLCTTCHKNLHKGKVTLDGKERGKPLRDAAFMGIMRKTLMAR

SEQ ID NO: 11888 - protein, 272 aa, unidentified
  REGION 1..272: note = metagenome
VVRRTPFTIQLTIATGESKQPVSLGVDAGYKHVGLSASTEKAELYASEVELRKDITDLLSARRALRRARRNRKTRYRAPRFNNRIRTKRKGWLAPSVENRINAHLSRIEAVLRLLPITKITVETASFDMQRLKNPDISGKEYQEGEQLGFWNVREYVLFRDGHVCRHCHGRSKDPVLNVHHLESRRTGSDSPDNLITLCETCHKALHRGEITLKAKRGQSFRAETFMGIMRREVLDRLKASHPKLEVQNTYGYWTKHARMLSASPAILAPKG

SEQ ID NO: 11889 - protein, 426 aa, unidentified
  REGION 1..426: note = Human gut metagenome
LAKDLYRSIDREETNLRVYVLNKRGEPLMPCSSAKARILLKEKKAVVKRRTPFTIQLTIATGETTQPVTLGVDAGYKHVGLSASTKKAELYASEIELRQDVSELLAGRSALRHARRSRKTRHRAPRFDNRKRDKGWLAPSVENRIGAHVSRVEAVLRILPVTKIIVETASFDVQRLKNPDIQGVEYQQGEQLGFWNVREYVLFRDGHECQHCHGKSKDKVLNVHHIESRRTGGDAPNNLITLCEACHKAFHRGEIELRVKRGRSFQAETFMGVMRWTFFERLRARHSEIEVRNTFGYLTKNTRITHGIEKTHCADAFCIAGNLKAKRLGYYFFQKQTRRHNRQIHKLTILKGGARKRHQTPYEIKGFRLYDKVLFQGKTAFIFGRRSSGYFDIRTLDGERISASVSYKKLRLLEKRRTYLIELRRN

SEQ ID NO: 11890 - protein, 416 aa, unidentified
  REGION 1..416: note = Human gut metagenome
MVYVLDKNGQPLMPTDRHRKVRLMLQSGQAKVIKRCPFTIQLNYDSGHQTQEISLGIDAGSKHIGVSATTKIKVLYEADVELRNDIVDLLSSRRELRRGRRNRKTRYRQAKFNNRRRGNGWLAPSIRQKIGTHLTVVENICKILPISRIMVETASFDIQKIKNPDIQGAEYQQGDQLEFWNVREYVLFRDGHTCQCCKGKSKDKILNVHHIESRKTGGNAPNNLITLCETCHTGYYKGTVQLPKAIKRGMRFKDAAFMGIMRWAFYEALKQQYEPVGTPVHNTYGYITKHTRIAYNLPKEHYVDARCISGNPEASSNGEYYYQKKVRCHNRQIHKLTVLKGGIRKQNQATYLVKGYRLFDKVSYQRKEYFVFGRRQSGFFDIRTLSGEKVNKGSLSCKKLKFIATRTYYLTERRAV

SEQ ID NO: 11891 - protein, 512 aa, unidentified
  REGION 1..512: note = Human gut metagenome
MSTVYVLNKDGKPLMPTTRGGHVRHLLKEQKARVVRTNPFTIQLLYETDNLVQPLYLGIDPGRTNIGVAVVKTDGTAVFTAHLETRNKEIPKLMQGRKKARRARRTNGRRCRRQRRAKANGTISKKCVKQATAQNGSVSKRANEIGVIKRHLPGCEKNVLCIGIKNKEAKFSNRTRPEGWLTPTANQLLQTHVNLVKKIQKFLPISDVVLEVNKFAFMRLDNPNVQKWQYQQGPLYQKASLEEAVSEMQEHHCLFCKNTIDHYHHVVPQHKNGSNTIGNIVGLCAKHHDLVHKDTSWQEKLAKKKTGLNKRYGALSVLNQIIPALTKELSSLFPKHFFATNGKSTYDYRAAHGVSKDHWLDAYCIAGSVLPNDACDNNINNRVPYELKQFRRHDRRALHKENMSRVYTLNGKSVATNRHKAIKQTTDSLEEFRQRQPNDVCKLKVKEHHPEYRNPKRNFPGCVFLVGKHTHVMQGTSGSHNGKADGYYDTNGNSYSSGKCKFVVKNEGIVFT

SEQ ID NO: 11892 - protein, 464 aa, unidentified; identical to SEQ ID NO: 6574
  REGION 1..464: note = Human gut metagenome

SEQ ID NO: 11893 - protein, 456 aa, unidentified
  REGION 1..456: note = Human gut metagenome
MSTCVCVLSNSGERLMPTFRLGRVRHLLKDGKAKIIKHHPFTIQLLYDSKTNTQPIEICEDVGYNYIGISVKSQSHEYVSAQYDTLQDEKACHDSCRKLRRTRRNRLRYRKPRFDNRKRGEGWLAPSLRHKKELNVNVVKMYCAVMPITHATVEVGSFDTMLLQAIQKGESKPEGVDYQKGPRYNLATLREAVFYRDNYTCQVCGRKIADGAILHMHHMFYWKGRHGYQLDELVTACEKCHMPANHQKGGKLFGFGEDKEFANLSGAAFMNAVRWQIVNALYATYGKEFVTITYGAMTKEKRIALQLEKTHSNDAYAMGNCHPAHCCEFRHYQKRCRNNRVLEKFYDATYIDTRTGNKAKGKELFNGRISRNHKKDSEDLHKYRSKKVSKGRRSIRRQRYAIQPYDTVRLEGKTYITSGCHNKGTRLLISANGKSKSVAISKVQVVCHAGAWIQII

SEQ ID NO: 11894 - protein, 453 aa, Lactobacillus sp.
MMSEVQKVDYIYVVDSNGTPLMPTSRLGMVRRWLKTGQARWFGNSRKIIQFVRPVTTNTQELTLGVDAGFHLGLSVVGNKREYYASESLRKSEKDRITSRRELRRTRRNRLRYRQARFDNRRRKESWLAPSVQHRLDFTIREIKRLYTFLPIAKLVVEVTPFDNQKLVNPNIKPWEYTQGKLHGFKTIKDYLLARDNYRDALDGKQYPANQLRIHHLVQRKDGGTNQPDNLVLLSDINHSQANHNNGILAKLRENRQKVLDYRGAYFMSILATRLGDYFDEYTTTQGYLTANLRQKYQLEKSHLNDAFIIAGGTDTTLRTNNVYSRQKLRNNNRVLQKFYDAKYIDNRDNKTKTGKELSSGRTRRSRELNYINLRQFRKTKIKKGRVSIRRKHYQLRPHDVVLNTKTNKIEIVKGVQNSGTVIKFQTGKTCSIKNVVSLYHVNGMLEKKIEAI

SEQ ID NO: 11895 - protein, 317 aa, unidentified
  REGION 1..317: note = Human gut metagenome
LAKRTTDSAVCETGASPAERAVDRDPARDIRKDVWCGRRKPHPALPEKKGGMLMAVAVVSRTGVPLMPTSPYRARKLLASGKAEKYGYDPFTIRLTERETGDTQPVELCMDTGYIHIGVSVKSEKHEYLALQIDTLTDEKKKHEKCREKRRNRRSRKRYRKPRFDNRKRDKGWLAPSLEHKKEIHVQAAERICRVIPVTDITMEMGNFDTQVLKAKEEGRPLPQGTDYQQGERYGTATLREAVFSRDNYTCLCCGRTMKDGAYFHVHHIRYRSQGGTDRMANLATVCEKCHTPANHQPGGKLYNWKPEIKSFKVRPL

SEQ ID NO: 11896 - protein, 424 aa, Moorena sp.; identical to SEQ ID NO: 2430

SEQ ID NO: 11897 - protein, 408 aa, unidentified; identical to SEQ ID NO: 11651
  REGION 1..408: note = Human gut metagenome

SEQ ID NO: 11898 - protein, 512 aa, unidentified
  REGION 1..512: note = Human gut metagenome
MSTVYVLNKDGKPLMPTTRCGHVRHLLKEQKARVVTLKPFTIQLLYEADDVVQSLYLGIDPGRTNIGVAVVKADGTAVFTAHLETRNKEIPKLMKKRKESRRARRTNGRRCRRQRRAKANGTISKKCVKHDTAQNGSVSKRAKEIGVIKRHLPGCEKDVLCIGIKNKEAKFSNRTRPEGWLTPTANQLLQTHINLVKKIQKFLPISDVVLEINKFAFMRLDNPNVQKWQYQQGPLYQKANLEETVSEMQEHHCLFCKKKIDHYHHVVPQHKNGSNTIDNIIGLCTQHHDLVHKDATWQKRLAKKKTGLNKKYGALSVLNQIIPALTKELSSLFPKHFFVTNGKSTYDYRAAHGVSKDHWLDAYCIACSVLPNDTCDKTINSRVPYELKQFRRHDRRALNNENMSRVYTFNGKMVATNRHKATEQTTDSLEEFRQRQPNDVCNLKVKEHHPTYRNMNRNYPGSVFLVGNQVHVMQGIAGSKDGEATTYKDTNANSIAAGKCKFVAKNSGILFV

SEQ ID NO: 11899 - protein, 442 aa, Virgibacillus sp.; identical to SEQ ID NO: 6559

SEQ ID NO: 11900 - protein, 414 aa, unidentified
  REGION 1..414: note = Human gut metagenome
MPCSPAKARLLLKEKKAIVVRRTPFTIQLTIATGETKQPVSLGVDAGYKHVGLSASTEKAELYASEIELRQDITDLLSARRALRQSRRNRKTRYRAPRFDNRIRTKRKGWLAPSVENRINSHLSRIEAVLRLLPVTKITVETASFDLQLLKNPNISGKEYQEGEQLGFWNIREYVLCRDGHVCQHCYGRSKDPVLNVHHLESRRTGGDSPGNLITLCETCHKALHRGELTLKAKRGQSFRAEAFMGIMRWEVLNRLKASHPELEVNNTYGYRTKHARISNGIAKSHCADAFCVAGNLGAKRLGEFFFQKQTRRNNRQIHKLSVLKHGLRKRNQVPFEVNGFRLFDKVACKGEEGFIFGRRSSGFFDVRKLDGTRISAGISYKKLHLLEKRQTYITEIRKEEALPPLPEGRGLRA

SEQ ID NO: 11901 - protein, 453 aa, Cupriavidus sp.; identical to SEQ ID NO: 9578

SEQ ID NO: 11902 - protein, 465 aa, unidentified; identical to SEQ ID NO: 5888
  REGION 1..465: note = Human gut metagenome

SEQ ID NO: 11903 - protein, 415 aa, unidentified
  REGION 1..415: note = Human gut metagenome
MVYVVANDGQPLMPTERHGKVCRMLKSGMAKVVKKCPFTIQLQYESERNVQPVSLGVDAGSKHIGISATTKTKVLYESDVELRDDIVKLLATRRQLRLSRRSRKTRYRPVRFDNRKRKEGWLAPSIRQKIGSHLTVVANVCKILPINQIIVETASFDIQKIKDPEIQGIEYQQGEQMDFWNIREYVLFRDGHTCQCCKGRSKDKILNVHHIESRKTGGNAPNNLITLCETCHKGYHNGTVILPKNIKHGMQFKDAAFMGIMRWTFYNTLKEQYEPDIPVHYTYGYITKNTRINHNLPKGHCIDARCISGNPDAVSDGTYYYQKKVRCHNRQIHKQTILKGGIRKSNQAEYLVRGFRLFDKVRYQDREYFIFGRRKSGFFDIRTLSGEKVNKGSISVKKLTFVDTRKNYFIERRTV

SEQ ID NO: 11904 - protein, 472 aa, Cupriavidus sp.
MAVCVLDRQGRPLMPCSEKRARLLLARGRARVHRVVPFVIRIVDRRQADGHLQSLRVKLDPGSKVTGIALVRELPVADDGNGDSAPGAVVLSLIELVHRGRSISEALTARRMFRRRRRGANLRFRAPRFHNRVRAPRWLPPSLEHRVKTTLTWVARLRRWAPVTALSCELVRFDPQALEQPEIAGVEYQQGTLFGYELREYLLEKWSRRCAYCDRENLPLQIEHIQARAKGGTDRASNLTLACATCNQAKGALPIERFLARQPARLTKILAQTKRPLKDATAVNATRWALLNALKHTGLTVDVGSGGRTKFNRSRLGIPKTHALDAVCVGSLALVKAWRRPTLTITCTGRGSYKRTRLDRYGFPRGYLMRGKSVHGFRTGDAVRAKVPTGKKTGEYFGRVAVRASGRFNIQTSATLVQGIGHRHCCLVQRADGYGYQFQTTDSLTRERAGSGRAAHAALSLPGQTAEVSRAA

SEQ ID NO: 11905 - protein, 418 aa, Moorena sp.
MVYVLNQNSQPLMPTERYGKVRRLLKEKKAVVVSKTPFTIRLTYISTEYVHGLTLGVDAGSKNIGISVSSEEKEYYSSEVILRSDIVNLLSTRRQNRKKRRNRLRYRKARFLNRVSSKNKGWLAPSIEHKIQTHLKVIEKTLKLLPVRRIVVETASFDIQKIKNPNISDAQYQQGAQLDFWNVREYVFFRDGHTCQHCKGKSKDKILNVHHIESRKIGGDSPNNLITLCETCHKAHHKGKITVKVKRGQRFRDAAFMGIMRWTFYNRLREKYEPLDVTNTYGYITKNTRISEGLEKTHAIDALCISGHPKANQLEHFYLQKKIRCHNRQIHKANILKGGKKKLNQAQYLVKGFRLFDKVHYKRQEGFITGRRTTGYFAIKDISGVKIHDSAKWKDLELLEAKKSYIIQTKGRRFLPPL

SEQ ID NO: 11906 - protein, 502 aa, unidentified
  REGION 1..502: note = Human gut metagenome
MYRLITEAGIPLIPERLHDTKKRKEASRMSEYIYVIGVDGDPQMPTKRKRHVEQLLQTGRARIFRQIPFTIQLTYENKPVLQPVTIAEDPGRSNIGMAVVSLSGELLSAAVVQTRNKEIVKLMEKRKQHRRASRNGERKARQRLAKKCHTMVKAGSLMRKLPMYGKDKRVRCNMIKNTEARFCNRKREDGWLTPSAEHLVRTHINLMHKMQKFLPITDVAIEINRFAFLSLEDPSISGVDFQNGPLKGYDDLNAAVEALQDGHCLMCNSPIEHRHHIVPRSMQGSNTIGNIAGLCCKCHERVHKDSAFEDSLKKKKAGLNKRYAAVSALNQAIPFICKRLEQEFGKEHVHYCSGRDTSMVRRSLGYHKTKEEQLHEVDAWCIAVLSLQQIPEKAPSFDHVHEILQFRRQDRSRIKAQTSRAYYHERKKIAKNRKKAEGQREDSLQEWRKRQVERYGKEQTRKMISQLEVKESIRRYNRLDRLMPGAVFYYQGVRYVMRGQHS

SEQ ID NO: 11907 - protein, 536 aa, unidentified; identical to SEQ ID NO: 4526
  REGION 1..536: note = Human gut metagenome

SEQ ID NO: 11908 - protein, 419 aa, Moorella sp.
MLACRQKVYVYVLNKHGKPLMPCSPRKARILLKEGKAKVIKVKPFTIQLLYGSSGYKQKVYAGRGRGLTQGIAAVREDGEVLFLGEVTGRRDISELIYLRASLRRSRRNRKTPYRPCRVDNRKREEGWLPPSVSHLWYEHLKVRSFVESILPIAAWAERISKFDTHKMVNPEVKGKGYQEGPLKDKKNYREYVLERDSYRCVLCGEPEGLEIHHIVWRFRGGSDRPKNLITLCKGCHAKVTKGEIEIKKVVESYRWPARLNALNPQFNALEGIKIPAYEVKEARLKMGLDKTRYSDALALIYAAFGIAPKADLPKVIKGRFVRSNNRQLHRANPTKGGVRPKANANRYLVNKNGVRFQKYDLVSYRTRKSEAITGYVNTLFSRGAVRIAEFSGEELYNGASVNRLHKLQNSDTLIWEVA

SEQ ID NO: 11909 - protein, 406 aa, unidentified; identical to SEQ ID NO: 11380
  REGION 1..406: note = Human gut metagenome

SEQ ID NO: 11910 - protein, 423 aa, unidentified
  REGION 1..423: note = Human oral metagenome
MLVYVLKQNGQPFMPTERFGKVRRLLKEGKAKVVRREPFTIRLLYEPETDIVQECYCGVDTGSKHIGVAVVGNDRVLYQSQTELRSDIKKKMNRKRASRRNRRNRKTRYRKPRFLNRRNSIREDKLPPSVQHKVQTHIDEIEFCKKILPVSDLILEVSQFDTALMKNPGLMNEKVKHWGYQKGFNYGYSSRREAILHRDNYTCQCCGKKNCRLEVHHIKFKSNGGTDDEENLITLCEDCHKGVHAGTIVLNKKPKKSKGLKHATHMSIIRSRLLREYPDAIETFGFVTSENRNHLKLKKDHYIDACVIAGGGLEFKELDVIFYKRRVSKGDYRLTRGIRGEQKLPTGKLCGFRKFDKVKYFGEKYFIKGRVSCGSVLLMDIFGNKVDFSSMPRGYKTPKMSNCERISARRSILCITKELENEE

SEQ ID NO: 11911 - protein, 442 aa, unidentified; identical to SEQ ID NO: 2903
  REGION 1..442: note = Human gut metagenome

SEQ ID NO: 11912 - protein, 406 aa, unidentified
  REGION 1..406: note = Human gut metagenome
VVYVQDIDGNPLMPTTRHGKVRRLLKAKKAIVINLCPFTIQLTYATSGYKQEVVLGVDAGTKHVGLSATTKSKELYASEVILRSDVIDLLSTRRELRMERRSRLRYRKPRFMNRVKTKKKGWIAPSVRQRIDSHIRVIKFVYSILPVSKLIIEVAQFDTQKIKNPEISGKEYQEGDQLGFWNVREYVLARDNHKCQHCKGKSKDPILNVHHIESRKTGGDSPSNLITLCKTCHKEFHKGNIKLKVKRSASLRDAAVMSIMKWRLYDKLKSLYPNVKMTFGYMTKHDRINHGIEKSHVSDAFVISRNFDSYRLGYYYKRKLVRRHNRQIHKMKILKGGIKKPNQAPFKVFGFRLFDKVRYQDNVYFVYGRRLRGSFSIRDINGENKKDISYKKLKYINHGLISVETG

SEQ ID NO: 11913 - protein, 430 aa, unidentified
  REGION 1..430: note = Human gut metagenome
MVYVLDISGNPLTPTKRHGKVRHLLETGKAVCVKRCPFTIRLTYQNAGPEPEGLSLGVDCGSKHIGLSVSSEEQEYYSSEVELRQDIPANLSTRREFRRARRHRKTRYRKPRFLNRIASKKKGWLAPSVRQKVESHLNRIDKAVKMLPIREIKVEVAAFDLQKLQADLKGLKRSKGEEYQQGPQLDFWNVREYVLFRDHHECQCCHGKSGDKVLNVHHLRSRKVGGDAPDNLITLCEYCHGQYHKGELELPESTKKPKPLRDAVFMGIMRWTLYSRLKEIYEPQGIKVKLTYGYITKHTRIENGLEEKSHRLDALCIAGHPKAKRCREWFLQKKVRCHNRQLHKATIQKGGVRKANQLPAVIKGFRLYDKVLFQNRECFIWGRRKTGYFTLKTLDGIMICDGVSSKKLTLLEKRKSYLTERRKQELCNSF

SEQ ID NO: 11914 - protein, 405 aa, unidentified; identical to SEQ ID NO: 7624
  REGION 1..405: note = Human gut metagenome

SEQ ID NO: 11915 - protein, 430 aa, Moorena sp.
MQIQANYVFLLNHDRTFLNMVHPARARELLTKQKAAVYRSYPFAIVLKQQILNPTLKPYRLKIDPGSKWTGFAIQCGEDIVFGMELKHRGLQISADLKQRASVRGSRRSRNLRYRAKRFNRKQPTGWLAPSLRHRIQTVETWIKRFMRYSPITEIEIEQVRFDTQLMQNPEISGVQYQAGELAGYEVKQYLLEKWEQKCSYCGATDTPLEVEHIQAKSKGRSNRVSNLALSCVPCNQKKGNRDIQDFLSGKPDLLQRILAQAKQPLKDAAAVNSTRFAIVRMAKELCDTVKCWTGGRTKFNRTQQGLEKSHSIDAACVGKSGRSIQLRTTQPLIVTCFGHGTRQEIRVNKHGFPAVKNTRVRYKHVKTGDTVKFTLDTDRKNSRAGTYTARVKTPTAKGFEVLINQFRIGVSTIKNVKFIHRQDGYSYRF

SEQ ID NO: 11916 - protein, 416 aa, unidentified
  REGION 1..416: note = Human gut metagenome
MVYVLDKNGQPLMPTDRHRKVRLMLQSGQAKVIKRCPFTIQLNYDSGHQTQEISLGIDAGSKHIGVSTTTKIKVLYEADVELRNDIVDLLSSRRELRRGRRNRKTRYRQAKFNNRRRGNGWLAPSIRQKIGTHLTVVENICKILPISRIMVETASFDIQKIKNPDIQGAEYQQGDQLGFWNIREYVLFRDNHTCQCCKGKSKDKILNVHHIESRKTGGNAPNNLITLCETCHTGYHKGTVQLPKAIKRGMRFKDAAFMGIMRWAFYEALKQQYEPVGTPVHNTYGYITKHTRIAYNLPKEHYVDARCISGNPEASSNGEYYYQKKVRCHNRQIHKLTVLKGGIRKQNQATYLVKGYRLFDKVSYQGKGYFVFGRRQSGFFDIRTLSGEKVNKGSLSCKKLKFIATRTYYLTERRAV

SEQ ID NO: 11917 - protein, 470 aa, unidentified; identical to SEQ ID NO: 2825
  REGION 1..470: note = Human gut metagenome

SEQ ID NO: 11918 - protein, 431 aa, unidentified
  REGION 1..431: note = Human oral metagenome
MLVYVLKQNGQPFMPTARFGKIRRLLKAKKAKVVRREPFTIKLLYEPETDVVQECYCGVDTGSRHISVAVVSNDKVLYQSQTELRSDIKRKMDARRMHRRNRRSRKTRYRKPRFLNRGNSTKSDRLPPSVKHKVQAHIDEIEFCKKILPISNSNLIIEVSQFDTALMKDPSLISEKAKHWGYQQGFNYGYSSRREAILHRDNYTCQCCGKKNCRLEVHHVKFRSNGGTDDEENLITLCEDCHKGVHAGTVVLDKRPKKSKNLKYATHMSVIRSCLLKKYPDAIETFGFVTSENRNHLQLKKDHYIDACVIASGGLEFKKLDVIYKKRRVSVQDRVLTKGVRGEKKIPTGKVHGFKRYDRVKYLGEICFVKGRRIKDGFVLMDIDNNAIDFRDIGGRQNPSYKSIERLNTRRSILCITKKIEREERLIPILS

SEQ ID NO: 11919 - protein, 413 aa, unidentified; identical to SEQ ID NO: 2815
  REGION 1..413: note = Human gut metagenome

SEQ ID NO: 11920 - protein, 419 aa, Anoxybacillus sp.; identical to SEQ ID NO: 5328

SEQ ID NO: 11921 - protein, 408 aa, unidentified; identical to SEQ ID NO: 6795
  REGION 1..408: note = Human gut metagenome

SEQ ID NO: 11922 - protein, 427 aa, unidentified
  REGION 1..427: note = Human gut metagenome
MSTCACVFSKSGKRLMPTIRLGKVRHLLKDGKAKIIKHHPFTIQLLYDSETNIQPIEICEDVGYNYIGISVKSQSHEYVSVQYDTLQDEKDCHDSCRKMRRMYCKVVPITHVTVEVGSFDTMLVKAIQEGKAIPEGADYQKGPRYNLATLREAVFYRDNYTCQVCGREVQKDGAILHVHHMFYWKGRHGNSLSELLTVCEKCHTPANHQKGGKLYGFGEDIKFANLSGAAFMNTVRWQIVNELYAVFGKPFVTFTYGAMTKEKRIAFHLEKCHNNDAYAMGNFHPVDRCAFEHYKKVKRNNRILEKFHDSQYIDIRTGKVANGRSLFNGRINRSHKKNSENLHKYRGKRTRKGYRALRRKKVALNPGDLVSLNGEILVVHSTHAGKNGYVGVEFKAPSKSGKKSASLKKLKIVKTSNSMRSAWTKVS

SEQ ID NO: 11923 - protein, 473 aa, unidentified; identical to SEQ ID NO: 3510
  REGION 1..473: note = Synthetic metagenome

SEQ ID NO: 11924 - protein, 453 aa, unidentified; identical to SEQ ID NO: 5967
  REGION 1..453: note = Human gut metagenome

SEQ ID NO: 11925 - protein, 423 aa, Moorena sp.; identical to SEQ ID NO: 2845

SEQ ID NO: 11926 - protein, 424 aa, unidentified; identical to SEQ ID NO: 3434
  REGION 1..424: note = Human gut metagenome

SEQ ID NO: 11927 - protein, 442 aa, unidentified; identical to SEQ ID NO: 2903
  REGION 1..442: note = Human gut metagenome

SEQ ID NO: 11928 - protein, 415 aa, Bacillus sp.; identical to SEQ ID NO: 2431

SEQ ID NO: 11929 - protein, 371 aa, unidentified
  REGION 1..371: note = Human gut metagenome
VRSSFVIKRHLPGCEKEVLCIGIKNKEAKFSNRVKPEGWLTPTANQLLQTHINLVKKIQKFLPISDVVLEVNKFAFMQLDNPNIQKWQYQQGPLYQKASLEEAVSEMQEHHCLFCKKPIDHYHHVVPQHKNGSNTIGNIVGLCAKHHDLVHKDATWQKKLAKKKTGLNKKYGALSVLNQIIPTLTKELSSLFLKHFFVTNGKSTYDYRAAHGVSKDHWLDAYCIACSVLPNDTCDKTINSRVPYEFKQFRRHDRRALNNENMSRVYTFNGKMVATNRHKATEQTTDSLEEFRQRQPNDVCNLKVKEHHPTYRNMNRNYPGSVFLIGKQVHVMQGIAGSKDGEATTYKDTNANSIAAGKCKFVAKNSGILFV

SEQ ID NO: 11930 - protein, 512 aa, unidentified; identical to SEQ ID NO: 2745
  REGION 1..512: note = Human gut metagenome

SEQ ID NO: 11931 - protein, 430 aa, unidentified; identical to SEQ ID NO: 5985
  REGION 1..430: note = Human gut metagenome

SEQ ID NO: 11932 - protein, 412 aa, unidentified
  REGION 1..412: note = Human oral metagenome
MENKIEYCFVVDKDNRPLAPTKVKKGWYLIRKNRAKLKSKYPMIIQLNKKINIDKNDKSYMVCGIDDGSLHVGLAIVQKCPTKNKVIFKGTIEQRQDVKHKMDTRRRYRRYHRYHKRYRPARFNNRSSSKRIGRLAPSIKQKKYAILRVLYQLNKWIYIKEYYLEDVCIDIRAMTDDYKPYKWQYQKSNRLDENLRKATIIRDNYKCQECGKFNCKLEVHHIRARKYHGADTIGNLITLCSKCHDRTKGKEKDFEDKYFKKINSKPKRFDYAMHVMQGKNYLRSKISELGLLHLTNGGETANKRIEWNIEKSHSNDAICITDSIPDSCNIKEWTVKPMRRKSKAKTNNVLGIKHRDLVSYTYKNGEIHTGYVTALYPEQLALNFQSKTKHCKKVNARKCRLLWKFNRIYWLK

SEQ ID NO: 11933 - protein, 431 aa, unidentified; identical to SEQ ID NO: 6055
  REGION 1..431: note = Human gut metagenome

SEQ ID NO: 11934 - protein, 544 aa, unidentified
  REGION 1..544: note = Human gut metagenome
MKQKKQKVMVYILNKKGKPLMPTTRCGHVRKLLDSKKAVVVSSNPFTIRLKYDTPNGVQDVFAGIDSGRENIGSGASNEDGDCLYLGELKTSNKSIKMKMTERAGFRKERRSHDRQNKQRKARKDHTEIQNGNADICRTTISCKSVQISYPAAEKSVTHKIIRGKEGKFANRHRDEGWITPSARQLVQMHMNDLKSMCRILPISHVTLERVAFDFQKLENENIKAWEYGKGKLYGYNSPEEYIHDVQGGKCLICGKPHIDYLHHIIPRSKGGSNKVSNLAGLCYDCHYGPMGVHNCQDTQDRLPELKNEANKQYKVSLLNSVMPVLIEEMDKFCKANSIIFSICGGHDTAKVRDMYDLQKDHCIDGFAISLAGRNVKSVDVMPDRIHQKQRYKKKSKNIIQKRNCREYYDGKKLAAVNRHKGTDQKADSLEEYMNTYAETHTADECKKHFESLTVKPARRTYTFHKEGRICPFHIGDKVRYEKKNKIKGNTKVETFICEGIRFPKDENKAKVEHNKTKSKKMKFCRVLEPGCTPYIDYRKLVLI

SEQ ID NO: 11935 - protein, 453 aa, Lactobacillus sp.; identical to SEQ ID NO: 4050

SEQ ID NO: 11936 - protein, 442 aa, unidentified; identical to SEQ ID NO: 3218
  REGION 1..442: note = Human gut metagenome

SEQ ID NO: 11937 - protein, 424 aa, unidentified; identical to SEQ ID NO: 9714
  REGION 1..424: note = Human gut metagenome

SEQ ID NO: 11938 - protein, 493 aa, unidentified; identical to SEQ ID NO: 3154
  REGION 1..493: note = Human gut metagenome

SEQ ID NO: 11939 - protein, 427 aa, Mastigocladus sp.; identical to SEQ ID NO: 3596

SEQ ID NO: 11940 - protein, 413 aa, unidentified
  REGION 1..413: note = Human gut metagenome
MTSYSFVLDANGKPLAPTKEQKAWFLIRKKRAALVSKYPMVIQLMKEIPENEICQDEIRCGIDDGGLHVGIALVQKCKTKNKVVFKGTMEQRNDVKHLMEVRRGYRRYHRYHKRYRQARFDNRKSSKREGRIAPSILQKRQATIRVIHWLNKWINITNYWLEDVSIDIRALTDGYKPYRWQYQKSNRLDENIRKAAILRDGGKCMECGKLNCRLEVHHIKPRRRNGSDTLDNLITLCESCHQKTEGQEELYMDRYFSLLKSSDNKNLNYAQHVMIGKMWLRKQLSGLGVLYLTSGGDTANKRIDWNIEKSHANDAVCITDLQPDTCDMKEWTMKPMRRQSKAKTDHVLGIHHRDLVEYTFKNGETHRGYVTALYPEQKAINFQSPTKHCKKVNARKCKLLWNYSKIYWFENAS

SEQ ID NO: 11941 - protein, 465 aa, unidentified; identical to SEQ ID NO: 3603
  REGION 1..465: note = Human gut metagenome

SEQ ID NO: 11942 - protein, 405 aa, unidentified
  REGION 1..405: note = Human gut metagenome
MDTGYIHIGISAKSERHEYLGMQIDTLTDEKLKRDDKRQYRRQRRNRKRYRAPRFDNRRRKEGWIAPSLEHKKEIHIDAIQRICKVMPITDITLEMGNFDTHVLKAVEEGKPLPQGSDYQHGERYGIATLREAVFLRDGYKCQCCEKSVKDGAILHVHHIKYRSQGGTNRMSNLITVCDKCHTPKNHKPGGKLWNWKPKLAEFKGASYMTSIRWTLYNEVTALLPNSSVHITYGAKTKESRRKLDIKKSHVNDAYVMGLFCPKHRTKPVYFKKKRRNNRVLEKFYDAKYIDSRDGKKQSGQELFNGRINRNHRKDSENLHLYRKQKVTKGKRSIRNKHYPIQPHDILLYQKKKYENAGCHNNGSRVILLPEKKSVALKQLTIYQYAGGYYRVPYESNKKEERTGS

SEQ ID NO: 11943 - protein, 492 aa, Selenomonas sp.
MYVVYVLNKDSSPLMPTKRFGHVRRMLKSGQAKAVSTKPFVIQLLYESTEYTQPLYGGTDPGRTNIGEAVINEKGEVVYEAHVISRNKKIPRLMAKRKAYRQASRRGERLRRKRRAKKCGTTTIFPEGRKLPGYQEGVLALKDIINTEAKFNNRKRPAGWLTPTARQCVQTNVNAVKQILKILPVKYWTLEYNRFAFQNMGDGSIQGIDYQNNKMNRFDNVNDYIDYLQEGRCILCGCNSIEHHHHVIPRHKGGSDGPENIVGLCDDCHTKVHTNKAELDCIGKRKKYVGASIVNIAMPHIFDGLKEIFDKNLYVCKGRNTAKLRSEYGISKEHCSDAVCVASLGGNIPLSNVNDSSAFTIIQFRNHDRAIIKTQYERKYKLDGVVIAKNRKPRFEQDKKIPALSDWYKNLCEEVGASKARALLSKLKVAKSIRGYNDTNRIMDGAIFLYKGKRYVLKAYKYRRKFLEAYGQEKLFLAKECVFVQRKSLVYV

SEQ ID NO: 11944 - protein, 515 aa, unidentified; identical to SEQ ID NO: 11372
  REGION 1..515: note = Human gut metagenome

SEQ ID NO: 11945 - protein, 442 aa, unidentified
  REGION 1..442: note = Human gut metagenome
MSVSVFVLDKRKKPLMPCRPARARKLLNAGRARVVKTYPFTIRLVDRLLENSAVQPVAVKVDPGSEQSGMAVVRDDGKAHHHALFFINLVHRGKVIRDRLTGRRAFRHRRRSANLRYRAPRFDNRKRPEGWLPPSLQHRVDTTMSWVKKLRKLVPVTALWVENVKFDTQKLQNPEVSGVEYQQGTLFGFEVREYLLEKFGRRCVYCGAENTPLNIDHVVPRAKGGSDRVSNLVLACTDCNQKKGAQPLEAFLKDKPQQFERIRRQLKAPLRDAAAVNATRWALFNALKQTGLPVATGTGAQTKFNRKAFGIPKGHWLDALCVGRINGADYPEGMGILQVRCTGRGSYQRTRLNKYGFPRGHLMRQKRVHGFATGDMVKAVVPSGKKAGIHQGRVAVRVTGSFAIQKADGKVDGIHWRHCRLISHNDGYGYAWLRPAPHSSLV

SEQ ID NO: 11946 - protein, 444 aa, Calothrix sp.
MTTNLIFVLDSDKKPLTMCTAGLARKLLDSQKAALFKWFPATIILKKSVAELPLPYLELRIDPGSKFTGIALVEIATETIVWAMELEHRGLSISENLTARSNVRRARRNRNTRYRKERSNRKKQPGWLPPSLQHRVDTTMTWIRRIIKLAPIKSIAVERVKFDMQKIENPEIEGIEYQQGTLHGYTLREALLEHWGRKCAYCDAVNVPLEIEHIRPKSKGGSDRFNNLTLSCRQCNQNKNNQSIEEFLKNDPIRLDHIKKYQKESLRDAACVNSTRNKLFESLTHFDIPVHTGSGAHTKMMRIKSNLPKTHFIDAGCVNASREVTLKTLQPLRVKCNGHGNRQFMTMDKHGFPRKDYAPKHVRKDWKAGDIIKVKKKDGTSVLGRVKKAAKTLAFISFEGKETSFSPKNTKPIHRSCGYRYSFTTIDSVNEVCPKDELLKKTAT

SEQ ID NO: 11947 - protein, 413 aa, Clostridium sp.; identical to SEQ ID NO: 4134

SEQ ID NO: 11948 - protein, 518 aa, Nocardiopsis sp.; identical to SEQ ID NO: 3757

SEQ ID NO: 11949 - protein, 456 aa, Nitrincola sp.
VIKSGESSMAVFVLDKRKKPLMPCSEKRARQLVERGRAVVHKMRPFSIRLKDRLAGESSFQPLHVKIDPGSKTTGLAVVREDEQKPENQSVLSLFELIHRGFQIKQALEQRRAFRRRRRSQLRYRPARFNNRTKPTGWLPPSLQHRVDTTVAWVKRLIKLAPISGIQKELVRFDTQMLENPEISGVEYQQGTLLGYEVREYLLEKWGRECAYCGEQNVPLEIEHIYPRSKGGSSRVSNLTLSCHACNQGKDNMPIEAFFEQDKGLKTRLKKNGKSSGKQLERVLKQCKKPLCDAAAVNVTRWCLFTRLKQTGLPVKTSTGGKTKFNRQRLGIPKTHALDAACVGPVDLIQNWKQPTLQIKASGRGSYQRTRLDRFGFPRGYLMRQKSVKGFQTGDLVKAEVPSGKKEGTHTGRIAIRKTGSFNIQTGSQIIQGINWKYCTLIQRGDGYGYHNISTN

SEQ ID NO: 11950 - protein, 419 aa, unidentified; identical to SEQ ID NO: 6355
  REGION 1..419: note = Human gut metagenome

SEQ ID NO: 11951 - protein, 518 aa, unidentified
  REGION 1..518: note = Human gut metagenome
MTPKKRKEASRMSEYIYVLGMDGDPQMPTKRKRHVEKLLQVGRARVFRQVPYTIQLTYKNQPVLQPVTIAEDPGRSNIGMAVVSLSGELLSAAVVQTRNKEIVKLMEKRKLHRRASRNGERKARQRLAKMCHTMLKAGFLMRKLPMYGKDKRVRCNVIKNTEAKFCNRKREDGWLTPSAEHLVRTHINLIHKMQKFLPITDVAIEINRFAFLSLEDQSISGVDFQKGPLKGYDDLNAAVEDLQDGHCLMCDSPIEHRHHIVPRSMQGSNTIGNIAGLCCKCHERVHKDARFEDRLKKKKAGLDKRYAAVSTLNQAIPFICKRLVQEFGKEHVHYCSGRDTAMVRRSFGYHKTKEEQLHVVDAWCIAVLSLRQIPEKAPEFDHVHEILQFRRQDRSRIKAQTSRAYYHEGKKIAKNRKKTEGQREDSLQEWRKRQVERYGEEQTRKMISQLKVKKSIRRYNRLDRLMPGAVFYYQGVRYVMRGQHSNGQYLQAVGMGDKDFPAKKCKIVANNEGLVFVS

SEQ ID NO: 11952 - protein, 428 aa, Enterococcus sp.; identical to SEQ ID NO: 4335

SEQ ID NO: 11953 - protein, 431 aa, unidentified
  REGION 1..431: note = Human gut metagenome
MVYVLDIDGQPLMPTTRHGKVRRLLNSHLAKVVKRCSFTIQLLYQSTKETQPVSLGVDAGSKHIGLAATTDKKVVYQEELVSRNDVVKLISARRILRRSRRNRKTRYRKARFNNRVHSKHKGWLAPSVEVKIQEHITTIKRICQILPISEIQVETAEFDLQRLKAMKEGKPLPVGTDYQLGEQYDFYNTRQYVLHRDGYTCQCCGTHDNNIKLHVHHIESRQTGGDAPNNLIILCEHCHKALHEGKLELPKGKKRGKSYRDATFMGVMRKTLLERLKKEIDVPVEGTYGYITKCWREKTGLEKSHINDAICISKHPYAKPLDTYYLTKAVRHHNRQIHKSNFSKGGIRKRNQAPYLVKGFRLFDKVLYQGKEYFIFGRRATGYFDIRTLDGTKVNKGSIKYKKLRIQDTAKAYLKEARAIPHVNKFTCVLA

SEQ ID NO: 11954 - protein, 431 aa, unidentified
  REGION 1..431: note = Human gut metagenome
MPNKVYVINKHGRPLMPCSPAKARHLLDEGKAKIKKRTPFTIQLVYGSSGYTQEVILGVDDGSKTIGISVSTKKEEVFAADVTPRNDVVNLLSACREFRRARRNRKTRYRKSRFDNRVRSKRKGWLAPSVEVKIQEHITAIKMVCRILPVSKVVIETAEFDLQLLKAIADGKSVPQGEDYQKGEMYGHYNVRQYVLWRDDYTCQCCGAHATKKKEVRLHVHHLESRKVGGNAPDNQVTLCESCHEKLHKGLITEKDFKKRKRRSTRDATFMGIMRKTLMQMLCSELPIPVVETRGYITKATREKLLVLPKSHTNDALAIAQGKQGFNVGYLPGILQIDKIYTIRPVRHHNRQLHKAAILKGGIRKSNQAGKYVFGYRLFDKVQFNEQDCFIWGRRTTGIFTIKTINGKMIKDGISFKKLKLAEKSTSYLIA

SEQ ID NO: 11955 - protein, 335 aa, unidentified
  REGION 1..335: note = Human gut metagenome
KQKITFASKRPQGWLPPSLQSKTDHHIQWIKKLQDLLPDGYRLSIELGRFDPARMKDTEIHGDLYQKGPQYDYENVRAYVLDRDRYTCQVCGKKGGKLHIHHILYRSHGATDNPQYMATICSDCHSTENHQPGGILYQWMQEQKKFTRGLRDATFMNILRKRLMKAFPKATFTYGNITKADREKLKIPKSHGNDATAIAIVKTGIMTVKDNEPVIYIQQVRRKKRSLHEETPRKGRKEPNRKASRYNKNTKAVTVTKRKNKKRISITGCLFDRVELNGKKGWISGFTDKSCYIKDENDQYIRISPKYKQVSLSKLKILHHCGNWVIGARRSLGKG

SEQ ID NO: 11956 - protein, 458 aa, Lactobacillus sp.; identical to SEQ ID NO: 4474

SEQ ID NO: 11957 - protein, 442 aa, unidentified; identical to SEQ ID NO: 2903
  REGION 1..442: note = Human gut metagenome

SEQ ID NO: 11958 - protein, 413 aa, unidentified
  REGION 1..413: note = Human gut metagenome
LKVFVLNMRGKPLMPCSPAKARHMLKAGKAFVVRRTPFTIKLTIATGETKQDVTLGVDAGARHVGISATTEKEEVFASEVALRQDITGLLADRLAFRRARRNRKTRYRAPRFNNRVRSKHKGWLAPSVENRIQAHISRIEAVCRLLPVTKIVIETASFDIQKIRNPEVEGTGYQQGDQLGFWNVREYVLFRDGHICQHCRGRSKDPILNVHHLESRKTGGDAPNNLITLCETCHKAYHAGKIKLKVKRGQSFRAEAFMGIMRWTLLNRMRKAHPSLPVENTYGYLTKHKRIALGLPKTHCADAFCIAGNLKALRRGDFLFQQQTRKHNRQIHKCSILKGGVRKLNQAPFLVKGFRLFDKVRIGGQIGFVFGRRVRGTFNIRRLDKTVIGTDINCKKLSLLETRKTFLTELRKE

SEQ ID NO: 11959 - protein, 416 aa, unidentified
  REGION 1..416: note = Human gut metagenome
MVYVLSQNGQPLMPTGNHAKVRVLLNQRKAKVIKRCPFTIQLQYESTTHTQKINLGIDAGSKTIGVSATTETKVLYESEVALRNDIVELISGRRALRSSRRNRKTRYRKPRFDNRKRPDGWLAPSVRQKIETHITVVENVMKILPVTKIIVETASFDIQKIKNPEIEGVGYQHGEQLDFWNVREYVLFRDGHTCQCCKGKSKDNILNVHHIESRKTGGNAPNNLITLCETCHKAYHKGIITLPKEIHRGVRFRDAAFMGIMRWAFYDRLKELYTPFGVTVVNTYGYITKNTRIEYGLPKEHYVDARCISGNPAAKPLDHYYFQKKVRCHNRQIHKNTILKGGYRKRNQVEYEVKGFRLYDQVLWKGQKCFIFGRRSTGRMDLRLLDGTHVNASVGYKNLKLLSMRKNYLIEQRKAG

SEQ ID NO: 11960 - protein, 451 aa, unidentified
  REGION 1..451: note = Human gut metagenome
VTTILKTCFAAFNLAKVVVLMDAWDIIVILNKRGKPLMPCSPAKARLLLKEKKAIVKRRTPFTIQLTIATGETKQPVSLGVDAGYKHVGLSASTEKAELYASEIELRQDITDLLSARRELRRARRNRKTRYRGPRFDNRIRTKRKGRLALSLENRINAHLSRIEAVLRLLPVTKITVETASFDTQLLKNPDISGKEYQEGEQLGFWNIREYVLCRDGHVCQHCYGRSKDPVLNVHHLESRRTGGNSPGNLITLCETCHKALHRGEITLKAKRGQSFRAETFMGIMRWEVLNRLKASHPELEVNNTYGYRTKHARIANDIAKSHCADAFCIAGNLGAERLGEFFFQKQTRRNNRQIHKLSILKGGIRKRNQAPFEVKGFRLFDKVACQGEEGFIFGRRSSGFFDVRKLDGTRISAGISCKKLHLLEKRRTYLTEIRKEEALPPLPEGRGLRA

SEQ ID NO: 11961 - protein, 237 aa, unidentified
  REGION 1..237: note = Human gut metagenome
MYDEYNVRQYVLKRDHYTCQCCGAHTTTKKTVKLHVHHLESRKVGGNAPSNLITLCTTCHDALHKGKVSLDGKERGKPLRDAAFMGIMRKTLMARLRDELSIPVQGTYGYITKMRREQNDIKKSHVNDARCISKHPLAEPCSVCYRTKAIRYHNRQTHKANFSKGSIRKRSQMPYVVEGYRLWDKVLYKGQECFVSGRRASGSFTLKKLDGTRISKGVTFKKLRLLEPATNYLIERM

SEQ ID NO: 11962 - protein, 558 aa, unidentified; identical to SEQ ID NO: 5272
  REGION 1..558: note = Human gut metagenome

SEQ ID NO: 11963 - protein, 415 aa, unidentified
  REGION 1..415: note = Human gut metagenome
MENRIEYCFVVDKNNRPLTPTKVNKGWYLVRKSRAKLKSKYPMVIQLEKEVKSDEDDESHIVCGIDDGSAHVGLAIVQKCPTKNKVVFKGTIEQRQDVKHLMDVRRGHRRYHRYHKRYRQARFNNRSSSKRTCRLAPSIKQKKDAILRVLYQLNKWVNIQEYHLEDVCIDIRALTDDYKPYRWQYQKSNRLDENLRKATILRDECRCQECGKSNCVLEVHHIRARKYGGADTIGNLITLCSGCHQKTEGRERDFEDRYFNMIKSKPKRFDYAMYVMQGKTYLREKISELGSLHLTNGGETANKRIEWNMEKSHGNDAICVTDCIPDNCDVKEWIIKPMRRKSKAKTNNLLGIRHRDLVSYTYKNGETHTGYVTALYPEQLVLNFQSKTKHCKKVNARKCRLLWKFNKIYWLEQCV

SEQ ID NO: 11964 - protein, 420 aa, unidentified; identical to SEQ ID NO: 6017
  REGION 1..420: note = Human gut metagenome

SEQ ID NO: 11965 - protein, 448 aa, unidentified
  REGION 1..448: note = Human gut metagenome
MSTGLRAVQAEPAGIRKGDALKVFVLNMRGRPLMPCSPARARHLLKAGKAVVRRRTPFTIQLRIATGETKQSVTLGVDAGAKHVGLSAATEKEEVFASEVELRQDITGLLAARLSLRRDRRHRKTRYRAPRFLNRVRSKHKGWLAPSVENRIQAHMSRIDAVCRLLPVTKIVIETASFDIQKIKDPSVEGTDYQQGDQLGFWNVREYVLFRDGHVCQHCHGRSKDKILNVHHLESRKTGGDAPNNLITLCETCHKAYHAGKIKLKVKRGQSFRAEAFMGIMRWTLLDRVRKAHPGLPVENTYGYLTKHTRITYGLPKTHCVDAYCIAGNLKAVRRGVYLHQRQMRKHNRQIHKFTVLSKRLEDGTKIGYRKLNQSPYLVHGFRLFDKVRCLGQIGFIFGRRSSGYFDVRRLDGVKLSPSISWRKLTLLEKRSTYLTELRKQDGASSPV

SEQ ID NO: 11966 - protein, 413 aa, unidentified; identical to SEQ ID NO: 3023
  REGION 1..413: note = Human gut metagenome

SEQ ID NO: 11967 - protein, 462 aa, unidentified
  REGION 1..462: note = Human gut metagenome
MSVLVIGRNGRALMPTNPRKARLLLKKKTASVVCRHPFTIQLLYKTGCATQEGCIGIDTGSQHIGVGITCGDRVILRDEHALRSSMEKRSLLATRAVMRRGRRYRKVRYRKPKWRHHTKRMYFEKANRRGRHWRKVKTTTQSPRPKGWLPPSLQSKCDHHFRIIDRYLKYLPDPITRNLVIEAGRFDMARMNDPTIHGEMYQRGPMYDAENLRAYIFARDNYQCACCKAKAGTTRKADGTTVKLVAHHILFRSRGATDNPKYIISVCDHCHTTKAHQPGGILYSWMENNKKVARGLRDAVFMNILRKRLFARYPQSAFTYGNITATDRKQLRLPKSHANDAVAISLFGKEASTVKNICQTMHYKQIRKSKRSLHEAIPRKGRKNPNTKAVRNKKNTTQVNGFKLWDSVLADGKKLFICSFTGTSAYLIDKNGCYISQPGKTYKQWPLSKLKRLHPNGNWLMA

SEQ ID NO: 11968 - protein, 421 aa, unidentified; identical to SEQ ID NO: 2846
  REGION 1..421: note = Human gut metagenome

SEQ ID NO: 11969 - protein, 447 aa, unidentified; identical to SEQ ID NO: 11178
  REGION 1..447: note = Human gut metagenome

SEQ ID NO: 11970 - protein, 560 aa, unidentified
  REGION 1..560: note = Human gut metagenome
TKRKGWLAPSVENRINAHLSRIEAVLRLLPVTKITVETASFDLQLLKNPDISGKEYQEGEQLGFWNIREYVLCRDGHVCQHCYGRSKDPVLNVHHLESRRTGGDSPGNLITLCETCHKALHRGEITLKAKRGQSFRAEAFMGIMHWEVHNRLRALHPGIEVSNTYGYRTKHARIANGIAKSHCADAFCIAGNLGAERLCEFFFQKQTRRNNRQIHTLSILKGGIRKRNQAPFEVKGFRLFDKVACQGEEGFIFGRRSSGFFDVRKLDGTRISAGISCKKLHLLEKRRTYLTEIRKEEALPPPCLKAGAPRLNVMNNIDFHGIEEIWSSLSTSSLLWLTVTLAAYLFAQKLYKWSNWNSLLNPVAVSIVTVVLLLMATHTPYQTYFSGAQFIHFLLGPTTVALAVPLYDLRIQLAKNWLPILLGLFAGAVTAITSTVLIAGLLGASPETIISLAPKSVTTPIAMSIAEKLGGLPALSASLVVLTGVLGSICAGPLFLLLKVDSSSAKGFALGLSAHGMGTSRAFQIDSTAGAYGSLAIGLTGLTTALLAPLLTPLLMKLFF

SEQ ID NO: 11971 - protein, 414 aa, unidentified
  REGION 1..414: note = Human gut metagenome
MVYVINKQGQALMPTERFGKVRRLLKNSLAHVVCRIPFTIQLDYDTTDYTQPVSLGIDAGSKHIGISATTSEKELYAADVELRNDIVDKLSTRRELRRTRRSRLRYRKARFNNRVSSKRKGWLAPSVENKIQTHLTVVEKIHKFLPITNIVVETASFDIQKINNPIISGVEYQQGEQLDFFNVREYVLFRDNHTCQHCKGKSKDKVLNAHHIESRKTGGDSPNNLITLCETCHKAYHRGEFELNVKRGKSFRDSAFMGIMRWSFYDRLKNIYPNVSMTFGYITKNTRITNNLPKDHYVDARCISGNPVAKPLGYYFYQKKVRCQNRQIHKANFLKGGRKKLNQAPFLVKGFRLFDLVEYQKDLYYIFGRRDSGFFDIRKLDGTKVNKGSINCKYLRLVDKRKSILTEKRMQVNL

SEQ ID NO: 11972 - protein, 393 aa, unidentified
  REGION 1..393: note = Human gut metagenome
MPCSPAKARLLLKEKKAIVVRRTPFTIQLTIATGESKQPVSLGVDAGYKHVGLSASTEKAELYASEVELRKDITDLLSARRALRQSRRNRKTRYRAPRFDNRIRTKRKGWLAPSVENRINAHLSRIEAVLRLLPITKITVETASFDMQRLKNPDISGKEYQEGEQLGFWNVREYVLFRDGHVCRHCHGRSKDPVLNVHHLESRRTGSDSPDNLITLCETCHKALHRGEITLKAKRGQSFRAQAFMGIMRREVLNRLKASYPELKVHETYGYLTKHARIANGIVKSHGADAFCIAGNLGAESSANSSSRSRLAETTGRFTNFPSSKGAFESAIRHPLRPKASVFLIRLPAREKKASFSAVDHPGTLMFESLMEPAFQPASAARSCVCWKRDEPI

SEQ ID NO: 11973 - protein, 415 aa, unidentified
  REGION 1..415: note = Human metagenome
MENKIEYCFVVDKDNQPLAPTKVNKGWYLIRKGRAILKSKYPMIIQLEKKINIDKNDKSYMICGIDDGSSYVGLAIIQKCPTKNKVVFKGTIEQRQDVKRLMDIRRGYRQYHRYHKRHRPARFNNRASSKRIGKLAPSIKQKKDAILRVLYQLNKWINIKEYYLEDVCIDIRAMTDDYKPYKWQYQKSNRLDENLRKAAIIRDKCKCQECGKTNCKLEVHHIRARKYNGSDTIGNLITLCSKCHQKTEGKEKDFEDKYFRIIKSKPKRFDYAMHVMQGKNYLRNKISELGLLHLTNGGETANKRIEWNIDKSHSNDAICITDSIPDSCNIKEWIIKPMRRKSKAKTNNVLGIKHRDLVSYTYKNGETHIGYVTALCPEQLALSFQSRTKHCKKVNAQKCKLLWNFNKIYWLKQYV

SEQ ID NO: 11974 - protein, 329 aa, unidentified
  REGION 1..329: note = Human gut metagenome
TQRAKYRRNRRNRKTRYRKARWLNRASSIKKDRFSPTMQSKLHSHVREIEYIQSILPVTEMVFETGQFDMQLMKNPSLANPKVRPWGYQKGANYGFENTKAMVLNRDNYTCQCCKGKHKDSKLEVHHIVFRSQGGSDEESNLLTLCHTCHKDLHSGKINPKLSGKLKGNLKYATQMNSIRKQLFRFYPNAIETFGYVTKANRLHLGVDKEHYYDACTIATQGNAFNVKSNLYKKKCVSDGDFQKTKGIRSEQPIVTDKICGFRKFDKVRYFGNDYFIKGRMSTGYAILMDIDGNKIDFSTMPRGYKTPKLSNCKRITARSTVMTQVKVV

SEQ ID NO: 11975 - protein, 408 aa, unidentified
  REGION 1..408: note = Human gut metagenome
MVYVQDINGKPMMPTTRHGKVRRLLKDKKAIVVNLCPFTIKLMYVTSDYKQEIVLGVDAGTRHVGLSATTKSKELYSSEVILRNDIVDLLSTRRELRRSRRNRLRYRKPRFDNRIKSKRPGWVAPSVKYKVDAHIRVIDNVCSILPISRIVIEVAQFDTQKINNPNISGKEYQEGDQLGFWNVREYVLARDGHKCQHCKGKSKDPVLNVHHIESRKTGGDSPSNLITLCETCHKEYHKGNIDLKIKRGSSLRDAAVMGIMKWRLYEELRSKYNRVSMTFGYVTKYNRIKHGIEKSHVFDAFVISKNFDAIRLGYYYKVRLVRRHNRQIHKQKIPKGGIKRPNQSPFEVFGFRLFDRVMFENSYYFIFARRKTGSFNIRDIDGKNQRDITYKKLKLSRCKRFMVQKEMD

SEQ ID NO: 11976 - protein, 383 aa, unidentified
  REGION 1..383: note = Human gut metagenome
MRVFVFNMRGRPLMPCSQRKARLLLRENKAKIYKYHPFTIQLTYTTGETKQDCHIGIDTGSKYIGAAVRSEDKVFWKGEIELRQDIRSNLDTKRIYRRSRRNRKTRYRKPRFLNRKRRDEWLPPSLQSRINHTFHWIDTLSSLVPNPILHIEVGKFDVAKMINPEIHGVDYQHGQTYGFFDERYFVFARDNYTCQCCGKSKNKILNTHHIIYRSNGGTNRVDNLITVCTDCHTSQNHRKGGIFYQWQEQHKKVKQYKEPPFMNTLRKRIFVAYPDAEITYGSETTPKRKAMKLDKTHYNDAIVISGINEIKENPEEWLLIKQFRKKKRSLHELPPVREEKSQTEIRRVTVRIRLIIKDFILTIRFQFLERVDILQDLRAMRHI

SEQ ID NO: 11977 - protein, 423 aa, Moorena sp.
MRVFVLNKNRQPLDPCRPARARILLSTGKAKVYRRYPFTIILTEEIKEPITHGSQIKIDPGAKTSGLAIVQGNRVVWGAELTHRGFQIRDALTSRRQLRRARRNRKTRYRKPRFLNRTRSKGWLAPSLMSRVKNILTWVEKLTRVCPVTGISQELVRFDTQKLQNPEISGIEYQQGTLYGYELREYLLEKWNRKCAYCGATGTQLEIEHIKPKSKGGSDRVSNLAIACHPCNQAKSNQDIELFLSNKPSVLKRVLSQARRPLADAASVNTTRWKLYHDLKSTGIPVEVGSGGLTKFNRCRQNLPKTHWLDAANVGKVETLIIEVTHPLLITAKGHGTRQLCRTNKYGFPVRHCSRTKIHKGFQTGDIVRAVVTKGKKIGTYVGRVATRKSGYFNISTKSGLVQGISHKYCQFIHRKDGYAYTN

SEQ ID NO: 11978 - protein, 413 aa, unidentified
  REGION 1..413: note = Human gut metagenome
MTSYSFVLDANGKQLAPTKEPKAWFLIRKKRAALVSKYPMVIQLKKKIQENEICKDEIRCGIDDGGLHVGIALVQKCKSKNKVVFKGTIEQRNDVKHLMEVRRNYRRYHRYHKRYRQARFDNRKSSKRKGRIAPSILQKRQATIRVINRLNKWINITNYWLEDVSIDIRVLTDGYKSYSWQYQKSNRLDENIRKATILRDGGKCMECGKSNCRLEVHHIKPRRRNGSNTLDNLITLCESCHQKTEGQEELYMDQYFSLLKSSDNKNLNYAQHVMIGKMWLRKQLSGLGVLYLTSGGDTANKRIDWNIEKSHTNDAVCITDLQPDTCDIKEWAIKPMRRQSKAKTDHVLGIHHRDLVEYTFKNGETHRGYVTALYPDQKAINFQSQTKHCKKVNARKCKLLWNYSKIYWFENAS

SEQ ID NO: 11979 - protein, 441 aa, unidentified; identical to SEQ ID NO: 4242
  REGION 1..441: note = Synthetic metagenome

SEQ ID NO: 11980 - protein, 430 aa, unidentified
  REGION 1..430: note = Human gut metagenome
LETRNKEIPKLMQGRKKARRARRTNGRRCRRQRRAKANGTISKKCVKQTTAQNGSVSKRAKEIGVIKRHLPGCEKDVLCIGIKNKEAKFNNRTRPTGWLTPTANQLLQTHVNLVKKIQKFLPISDVVLEVNKFAFMQLDNPNIQKWQYQQGPLYRKANLEKAVSEMQEHHCLFCKKKIDHYHHVVPQHKNGSNTIDNIVGLCTEHHDLVHKETAWQEKLAKKKTGLNKKYGALSALNQIVPVLTKELGSLFLKHFYVTTGKSTYDYRAAHGVSKDHWLDAYCIACSVLANDVCDSNINSRVPYELKQFRRHDRRALNNENMSRVYTLNGKVVATNRHKATKQTTDSLEEFRQRQPNDVCNLKVKEHHPTYRNMNRNYPGSVFLVGNQVHVMQGIASSKDGEATTYKDTNANSIATGKCKFVAKNSGILFV

SEQ ID NO: 11981 - protein, 495 aa, Nonomuraea sp.
VEHVRGEITGSTPAAGGVTPDRQVREPGREADPAVFVLDKHGTPLQPTTPARARKLLATGRAVVARHTPFVIRLKDRTAAASQIGGVDIGIDPGSKHTGIAVFTTHAGERQGRYSVQLDHRGATIRKKLEQRAAYRRGRRTRNLRYRAPRFLNRTRPKGWLPPALRHRVDTTTSWVDRLARWAPVRAVHVERVAFDTHAISAGRPLEGAEYQHGTLHGTEIREYLLAKFGRACSYCATMGVPLNIDHIRPRSQGGSDRVSNLTLACIPCNQAKGSLPVEEFAPRRAADILKRAKAPLLDAAAVNATRWALWRALNARFPTRTASGGRTKWNRTRCGLPKTHTLDALAVGILDTVTVWPTTVLVVKATGRGTYARTRTDKHGFPRLRLPRTKQFFGYATGDLVRAFVPSGKNAGTHTGRVAVRSSGSFAVRTASGLYTARHTHFRLLQRADGYAYTRRPEGATPLPSGRGSTDGGPPSGESPTPALLRRSFVSSPG

SEQ ID NO: 11982 - protein, 493 aa, unidentified; identical to SEQ ID NO: 3154
  REGION 1..493: note = Human gut metagenome

SEQ ID NO: 11983 - protein, 447 aa, unidentified
  REGION 1..447: note = Human gut metagenome
VPAYRIKHITKKEAPYMVYVLDIDGQPLMPTSRHRKVRKLLNSHLAKVVKRCPFTIQLLYQSTKEIQPVSLGVDAGSRHIGLAATTEQKVVYQEELVPRNDVVKLLSARRTLRRTRRNRKTRYRKPRFNNRVHSKHKVWLAPSVEVKIQEHITAIKRICQILPISDIHVETAEFDLQRLKAMEEGRPLPVGTDYQLGEQYDFYNTRQYVLHRDEYTCQCCGTHDNNVKLHVHHIESRQTGGDAPNNLITLCEHCHKALHEGKLELPKGKKRGKSYRDATFMGVMRKTLLERLKKEIDVPVEGTYGYITKYWREKAGLEKSHIHDAICISKYPYAKPLDTYYLTKAVRHHNRQIHKSNFSKGGIRKRNQAPYLVKGFRLFDKVLYQGKEYFIFGRRATGYFDIRTLDGTKVNKGSISYKKLRIQDTAKAYLKEERAIPHMNKFTCVLA

SEQ ID NO: 11984 - protein, 425 aa, unidentified; identical to SEQ ID NO: 3270
  REGION 1..425: note = Human gut metagenome

SEQ ID NO: 11985 - protein, 428 aa, unidentified
  REGION 1..428: note = Human gut metagenome
LKVFVLNMRGQPLMPCSPAKARHLLKAGKAAVRRRTPFTIQLRIATGETKQNVTLGVDAGAKHVGLSATTEKEEVFASEVELRQDITGLLAARLSLRRDRRHRKTRYRAPRFLNRVRSKHKGWLAPSVENRIQAHMSRIDAICGLLPVTKIVIETASFDIQKIKHPDVEGTDYQQGDQLGFWNVREYVLFRDGHVCQHCHGHAKDKILNVHHLESRQTGGDAPNNLITLCETCHKACHAGKIKLKVKRGQSFRAEAFMGIMRWTLLDRVRKAHPGLPVENTYGYLTKHTRITHGLPKTHCVDAYCIAGNLKAVRRGVYLHQRQMRKHNRQIHKFTVLSKRLEDGTKIGYRKLNQSPYLVHGFRLFDKVRCLGQIGFIFGRRSSGYFDVRRLDGVKLSPSISWRKLTLLEKRSTYLTELRKQDGASSPV

SEQ ID NO: 11986 - protein, 406 aa, unidentified
  REGION 1..406: note = Human gut metagenome
MVYVQDIDGKPMMPTTRHGKVRRLLKSNKAVVVNLCPFTIRLTYISDSYKQEIVLGVDAGTKHVGLSATTKSKELYSSEVILRNDIVDLLSTRRELRKARRNRLRYRKPRFDNRVKSKRPGWIAPSVKYKVDAHIRVVENVCSILPISRIVIEVAQFDTQKIKNPEISGKEYQEGDQLEFWNTREYVLARDGHKCQYCKGKSKDSILNVHHIESRKTGGDSPSNLITLCETCHKEYHKGNIDLKIRRGKSLRDAAVMGIMKWRLYEELKSRYDRVFMTFGYITKHNRIKYGIEKSHTSDAFVISKNINAKRIERQYLKRLIRRHNRQIHKMKILKGGKKKNNQAPFEVFGFRLFDKVLYNNKIFFVYGRRKSGSFNIRDFNGENSKDVSRKKFKLIRGKRHPIILK

SEQ ID NO: 11987 - protein, 407 aa, Succinivibrio sp.
MVYVLNCEGVPIMPTTRHGMVRRLLKEHKAKVVKRCPFTIQLRYECANITQSITLGVDTGYENVGISACTEKKVLFEAKAKIRTDMVKLLSTRRETRRTRRSRKTRYRKARFFNRSIEKGWLPPSIRAKVESHLRLVAKVHEILPIDKIVVEIASFDIQKIKNPDIKSAEYQQGDQLGFKNMKAYVLCRDRCTCRCCKGKSKDKILRVHHLESRLIGGDAPNNLVTLCNSCHTKFHKGLISLDDIKRGKSFKAETFMGLMRNFFFKELCDKYPCVKCTYGYITKHLREKYHLKKDHHADARCICGTPQALPSDVYLMKKVRCHNRQTHKFTTLKGGRRKLNQAPYTVKGFRLFDKVKVGDQIGFIFGRRTSGQFDIRTVYGERINGSISYKRLQLIETRKSWLIEKC

SEQ ID NO: 11988 - protein, 427 aa, Anabaena sp.
MSKVFVIDTDKRPLDPIHSAQARQLLRNKKAAVFRRFPFTIILKESHSDSAVSPLRLKLDPGAKHTGIALINDVTGEVVFAAELKHRGFAIRESLTSRRQLRRSRRGRKTRYRQPRFLNRTRPEGWLAPSLQSRIENIKTWVKKLCNLARIEAISQELVRFDMQLMANPDIQGKEYQQGTLAGYETREYLLEKWDRQCGYCGVKDVPFQVEHIHPRAKGGSNSITNLTLSCEKCNTKKGTKDIKDFLKKDPLKLEKILKQAKRPLADAAAVNTTRFALLEVLKATGLPVETGSGGLTKFNRSKQKLKKTHWIDAACVGQSTPILNIKGVKPLLITANGHGTRQSCRTDKFGFPNRHCSRIKFHFGFQTGDIVKSVVKTGKKVGEYIGRIATRATGSFNISTRNGLVQGLNYKTCKTIHKKDGYGYSN

SEQ ID NO: 11989 - protein, 457 aa, unidentified; identical to SEQ ID NO: 5656
  REGION 1..457: note = Human gut metagenome

SEQ ID NO: 11990 - protein, 424 aa, Moorena sp.; identical to SEQ ID NO: 7441

SEQ ID NO: 11991 - protein, 430 aa, unidentified
  REGION 1..430: note = Human gut metagenome
MPKVYVLNRHGRPLMPCTPAKARHLLDAGKAKVRHRTPFTIQLLYGSTGYTQEVILGVDAGSKTIGLSAATETEELFSAEVKPRNDVVELMSARRQFRRARRNRTTRYRKPRFDNRVQSKHKGWLAPSVEVKIQEHMTAIRRACAILPVSKVVVETAEFDLQLLKAVAEGKPVPQGEDYQKGEMYGHYNVRQYVLWRDSYTCRICGVHGSVRKGVPLHVHHLESRRVGGDAPDNLVTLCTACHDKLHKGIIMAADIKKRKRRSTRDATFMGIMRMTLLRRLREQLPVPVVETRGYITKATREKLLVLPKSHTNDALAIAHGPQGFRAEYLPNIRQADRLYTIRPVRHHNRQLHKATILKGGVRKANQAEKYICGFRLYDKVLYNGIECFVWGRRTSGSFLLRQLNGEKVKDSVSYKHLKLLERSQSYLVA

SEQ ID NO: 11992 - protein, 372 aa, unidentified
  REGION 1..372: note = Human gut metagenome
MPNKVYVINKHGRPLMPCSPAKARHLLDDGKAKVKKRTPFTIQLVYGSSGYTQEVILGVDAGSKTIGMSVSTTKEELLSAEVKPRNDVVDLQSTRREFRRARRNRKTRYRKPRFDNRVRSKRKGWLAPSVEVKIQEHITAIRRVCGILPVSKVVVETAEFDLQLLKAIEEGKPVPQGEDYQKGEMYGYYNVRQYVLWRDNYTCQCCGAHATKKKEVRLHVHHLESRKSGGDAPGNLVTLCDSCHEKLHKGLITEDDFKKRKRKSTRDATFMGIMRKTLIQRLRAELTIPVAETRGYITKATREKLLVLPKSHTNDAQAIAQGKQGFNVGYLPGILQIDKIYTIRPVRHHNRQLHKATILKGGIRKSNQAEKY

SEQ ID NO: 11993 - protein, 431 aa, unidentified
  REGION 1..431: note = Human gut metagenome
MPNKVYVINKHGRPLMPCSPAKARHLLDAGKAKVKKRTPFTIQLVYGSSGYTQEVILGVDAGSKTIGMSASTTKEELLSAEVKPRNDVVDLLSTRREFRRAQRNRKTRYRKPRFDNRVRSKHKGWLAPSVEVKIQEHITSIKRVCRILPVSKVVIETAEFDLQMLKAIADGKPVPQGEDYQQGEMYGHYNVRQYVLWRDGYTCQCCGAHATKKKEVRLHVHHLESRKTGGDAPRNLITLCDSCHKKHHDGLITEDDFKKRKRRSTRDATFMGIMRKTLIQRLRAELTIPVAETRGYITKATREKLLVLPKSHTNDALAIAQGKHGFNVGYLPGILQIDKIYTIRPVRHHNRQLHKATILKGGIRKSNQTEKYVFGYRLFDKVQFNGQDCFIWGRRTTGIFTIKTINGKMIKDGISFKKLKLVEKSTSYLIA

SEQ ID NO: 11994 - protein, 343 aa, unidentified
  REGION 1..343: note = Human gut metagenome
MSEVVVRNDITDKMTQRAKYRRNRRNRKTRYRKARWLNRASSIKKDRFSPTMQSKLHSHVREIEYIQSILPVTEMVFETGQFDMHLMKNPSLANPKVRPWGYQKGANYGFENTKAMVLNRDNYTCQCCKGKHKDSKLEVHHIVFRCQGGSDEESNLLTLCHTCHKDLHSGKINPKLSGKVKGNLKYATQMNSIRKQLFRFYPNAIETFGYVTKVNRLHLGVAKEHYYDACTIATQGNAFNVKSNLYKKKCVSDGDFQKTKGIRSEQPIVTDKICGFRKFDKVRYFGNDYFIKRRMSTGYAILMDIDGNKIDFSTMPRGYKTPKLSNCKRITARSTVMTQVKVV

SEQ ID NO: 11995 - protein, 431 aa, unidentified
  REGION 1..431: note = Human gut metagenome
MPNKVYVINKHGRPLMPCSPAKARHLLDAGKAKVKKRTPFTIQLVYGSSGYTQEVILGVDAGSKTIGMSASTTKEELLSAEVKPRNDVVDLLSTRREFRRVRRNRKTRYRKPRFDNRVRSKHKEWLAPSVEVKIQEHITSIKRVCRILPVSKVVIETAEFDLQLLKAIADGKSVPQGEDYQKGEMYGHYNVRQYVLWRDNYTCQCCGAHATKKKEVRLHVHHLESRKVGGDAPSNLITLCDSCHEKFHKGIITAANLKKRKRRSMRDATFMGIMRKTLIQRLRAELTIPVAETRGYITKTTREKLLVLPKSHTNDALAIALGKHGFNVGYLPEIAQIDKIYTIRPVRHHNRQLHKVTILKGGIRKSNQAEKYVFGYRLFDKVQFNGQDCFIWGRRTTGIFTIKTINGKMIKDGISFKKLKPVEKSTSYLIA

SEQ ID NO: 11996 - protein, 415 aa, unidentified; identical to SEQ ID NO: 3582
  REGION 1..415: note = Human gut metagenome

SEQ ID NO: 11997 - protein, 444 aa, Moorena sp.; identical to SEQ ID NO: 3460

SEQ ID NO: 11998 - protein, 470 aa, unidentified; identical to SEQ ID NO: 2825
  REGION 1..470: note = Human gut metagenome

SEQ ID NO: 11999 - protein, 443 aa, unidentified
  REGION 1..443: note = Human gut metagenome
LTKDENRPSGRTTGLRAEQAEPAGIRKGDTLKVFVLNMRGKPLMPCSPAKARHMLKAGKAFVVRRTPFTIKLTIATGETKQDVTLGVDAGARHVGISATTEKEEVFASEVALRQDITGLLADRLAFRRARRNRKTRYRSPRFNNRVRSKHKGWLAPSVENRIQAHMSRIDAVCRLLPVTKIVIEAASFDVQKIRNLEVEGTGYQQGDQLGFWNVREYVLFRDGHICQHCRGRSKDPILNVHHLESRKTGGDAPNNLITLCETCHKAYHAGKIKLKVKRGQSFRAEAFMGIMRWTLLDRVRKTHPKLPVENTYGYLTKHKRIALGLPKTHCADAFCIAGNLKALRRGDFLFQQQTRKHNRQIHRCSILKGGVRKLNQAPFLVKGFRLFDKVRIGGQIGFVFGRRVRGTFNIRRLDKTVIGTDINCKKLSLLETRKTFLTELRKE

SEQ ID NO: 12000 - protein, 430 aa, unidentified; identical to SEQ ID NO: 3252
  REGION 1..430: note = Human gut metagenome

SEQ ID NO: 12001 - protein, 407 aa, Succinivibrio sp.
MVYVLNCKGVPIMPTSRHGMVRRLLREHKARIIRKCPFTIQLNYECANIIQPISLGVDTGYENVGISACTEKKVLFEAKAKIRTDMVKLLSTRRETRRTRRSKKTRYRKARFLNRGIAKSWLPPSIRAKVESHLRLVAKVHEILPIGKIIVEIASFDIQKIKNPEIKGAEYQQGDQLGFKNMKAYVLARDGYICRCCKGKSKDKVLRVHHLESRLIGGDAPNNLVTLCDSCHTKFHKVLISLDDIKRGKSFKAETFMGLMRNFFLKELCNKYPCVKCTYGYITKHLREKYHLKKDHHVDARCICGTPQALPSDVYLMKKVRCHNRQIHKFTTLKGGRRKLNKAPYTVKGFRLFDKVKVGEQVGFIFGRMSTGYLDIKNLQGDLLYKAISCKKVKFLGTRKSWLIEKC

SEQ ID NO: 12002 - protein, 490 aa, Anaerostipes sp.; identical to SEQ ID NO: 6170

SEQ ID NO: 12003 - protein, 472 aa, Cupriavidus sp.; identical to SEQ ID NO: 4091

SEQ ID NO: 12004 - protein, 460 aa, unidentified
  REGION 1..460: note = Human gut metagenome
MVAVVDLFGKPLMPTNEYRARKLLKQKKAKIFGYRPFTIQLTERKSAEIQPIELCMDTGYIHIGISAKSERHEYLGMQIDTLTDEKLKRDDKRQYRRQRRNRKRYRAPRFDNRSRKEGWIAPSLEHKKEIHIDAIQRICKVMPITDITLEMGNFDTHVLKAVEEGKPLPQGSDYQHGERYGIVTLREAVFLRDGYKCQCCEKSVKDGAILHVHHIKYRSQGGTNRMSNLITVCDKCHTPKNHKPGGKLWNWKPKLAEFKGASYMTSIRWMLYNEVTALLPNSSVHITYGAKTKESRRKLDIKKSHVNDAYVMGLFCPKHRTKPVYFKKKRRNNRVLEKFYDAKYIDSRDGKKQSGQELFNGRINRNHRKDSENLHLYRKQKVTKGKRSIRNKHYPIQPHDILLYQKKKYENAGCHNNGSRVILLPEKKSVALKQLKIYQYAGGYYRVPYESNKKEERTGS

SEQ ID NO: 12005 - protein, 411 aa, Moorena sp.
MRVFVLNSNRQPLDPCKPARARILLSTGKAKVYRRYPFTIILTEEIQEPITHGSQFKIDPGAKTSGLAIVQGNRIVWGAELTHRGFQIRDALTSRRQLRCARRNRKTRYRKPRFLNRSRPEGWLAPSLMSRVHNILTWVKKLTRLCPIAGISQELVRFDTQKLQNPEISGIEYQQGTLYGYELREYLLEKWNRKCAYCGTTGTQLEIEHIKPLSKGGSNRVSNLAIACHSCNQSKSAQEIEQFLSGKPDVLKRVLSQAKRPLTDAAAVNITRWKLYHELKSIGLPVEVGSGGLTKFNRCRQNLPKTHWLDAANVGKVDTLIIEDYQPLLIAAKGHGTRQICRTNKYGFPIRYCSRTKIHKGFQTGDIVRAVVTKGKKIGTYVGRVATRKSGYFNISTKSGLVQGISQCGSF

SEQ ID NO: 12006 - protein, 518 aa, unidentified; identical to SEQ ID NO: 6957
  REGION 1..518: note = Human gut metagenome

SEQ ID NO: 12007 - protein, 406 aa, unidentified; identical to SEQ ID NO: 2703
  REGION 1..406: note = Human gut metagenome

SEQ ID NO: 12008 - protein, 533 aa, Acrocarpospora sp.
LTTFHVSEQTHRQVLPQPAALESVGADNPEGGDETAHGLPALPGAGVEHGRGEIGADGTRLLRRHLKGASASEGAAREGHPVVFVLDKHGQPLDPCHPARARRLLASGRAVVHRHTPFVIRLKDRTAADSTVTGVRVGIDPGSKHTGLAVFTEHGGSRTGVYSLQLGHRGGQIRDKLASRAALRRGRRSRNLRYRAPRFLNRGKPEGRLSPSLLHRVNGTVSWVSRLTRWAPVTAICVERVAFDTHALSAGRPLEGVEYQQGTLAGYEVREYLLAKWGRRCAYCGTSSVPLNIDHIHPRSRGGSDRVSNLTLACITCNQAKNATPIEEFLKTKPALLAKILRQAKAPLRDAAAVNSTRWGLWRALETIGLPVATSSGGRTKWNRSRTGAPKSHTLDALHVGELENVTSWPSVVLAVKATGRGMYCRTRTDAYGFPRLRLPRTKTVRGFQTGDLVRANVPTGKKAGVHAGRVAVRATGSFNVATRHGTVQGIHHRHVRLLQRADGYGYATHSEARHSAASPPPPEGGGIHAGGN

SEQ ID NO: 12009 - protein, 427 aa, Scytonema sp.
MSKIFVLDTEKRPLDPIHPAQARQLLRNKKAAVFRRFPFTIILKESRSDSTISPLRLKIDPGAKHTGIALVNDSTGEVVFAAELKHRGFAIRDALISRRQLRRSRRARTTRYRQPRFLNRTRPDGWLAPSLQSRIDNIKTWVDKFRKFAAIEAISQELVRFDMQLMANPDIQGSYYQQGTLAGYETREYLLEKWDRQCAYCGVKDVTFQVEHIHPRAKGGSNSIANLTLSCEKCNTKKGTKDIKEFLKKDPTRLEKILKQAKRPLADAAAVNTTRFALLEVLKAIGLPVETGSGGLTKFNRSQQNLEKTHWMDAACVGESTPILNIKGCKPLLITANGHGTRQMCGTDKFGFPSRHRSNKQIHFCFQTGDIIKAVVTNGKKTGEYIGRVLCRATGSFDIATKAGRVSGISHKYCSTTHKKDGYSYAF

SEQ ID NO: 12010 - protein, 345 aa, unidentified
  REGION 1..345: note = Human gut metagenome
ETKFTNRTRPEGWLTPTANQLLQTHINLVRKMQKFLPISDVVLEVNKFAFMRLDNPNIQKWQYQQGPLYKKESLESAVSEIQEHHCLFCKKPIDHYHHVVPQHKNGSNTIGNIVGLCAKHHDLVHKDSAWEKKLAKKSTGLYKKYGALGVLNQIIPTLTNELSSLFPKHSFVTNGKSTYDYRAAHGVSKDHWLDAYCIACSVLPSNVCDSNINNHMPYVLKQFRRHDRRVLNNENMNRVYTLNNKAVAINRHKAKDQKTVSLEEFRKEHPDDVCKLKVKEHHPTYRNMNRNFPGSVFLVGKQIHVMQGIASSKDGKATKYNDTSATAIAAGKCKFVAKNTGILFV

SEQ ID NO: 12011 - protein, 434 aa, Escherichia sp.; identical to SEQ ID NO: 5780

SEQ ID NO: 12012 - protein, 584 aa, Moorena sp.
MSRNADLRRAGVKPVYVVAKDHTPLMPTYRRGRVNHLLKEGKAVVINANPFTIRLKFDSKKFTQDLYAGIDTGRENIGSAVSNDDGENVYLADTRSNNRSIKKNMQERAGYRRERRRHDRQSKQRKAKHDDTELKNGDDDVCRSKHECKSVKISYPGAEKPVTHKVIKGKEGKFNNRKRSEGWITPSARQLIQITMAEVKQMCEIMPITHLSIERVCFDFHKMDDATVYGWKYQKGPLYGYKSYKDYIWDQQDGKCALCGKPIEEYHHIIPRSQKGSNQVKNIIGLCKHCHDSVHNDEETQKYLFKLKEGSYVQHEVSLLNSVMPALIDELSVFCAEHGIELIVTDGHTTNDTRDKYGLMKDHSSDAYAISLAGRTPAHVMYAPVIYQKRRFKKKSGGMIAKRNQREYQANEKTVAWNRHKAENQKKPSLEEYIAEYRKTHTAGEADAHFRSLTVKPAKRTYTYHKYGIVSPVHTGDIVRYTKHNKIKGNTKVNTVVATSIELSQAADEPHMYYSNDDKNYKMKFCHTIEGGCLHTVSTSETMKYLLETEAEYQKQKAKKKKSKTANKPVHEELVPQSQAFTFS

SEQ ID NO: 12013 - protein, 477 aa, Azohydromonas sp.; identical to SEQ ID NO: 2409

SEQ ID NO: 12014 - protein, 450 aa, Moorena sp.; identical to SEQ ID NO: 2437

SEQ ID NO: 12015 - protein, 453 aa, unidentified; identical to SEQ ID NO: 10368
  REGION 1..453: note = Human gut metagenome

SEQ ID NO: 12016 - protein, 468 aa, Burkholderia sp.; identical to SEQ ID NO: 2405

SEQ ID NO: 12017 - protein, 430 aa, unidentified; identical to SEQ ID NO: 4504
  REGION 1..430: note = Human gut metagenome

SEQ ID NO: 12018 - protein, 531 aa, unidentified
  REGION 1..531: note = Human gut metagenome
MPMLWKLNRSRQDRISAGPELAVPGLQQKKRTMRYVYVLDMNGKPLMPTCRHGKVRRMLKSGQAKAVDTLPFTIQLLKPTKTRILQPVIAGQDPGRTNIGMAAVRSDGTELYRAHIETRNKEIVSLMNDRRSFRQASRRGERLARKRLAKKLHTTAKHLNGRILPGCKEPLAVKDIINTEARFNNRLRPEGWLTPTATQLLRTHLETFRKLSGILPVTEVVLEVNRFAFMQLDDPDMKKRDIDFCRGPLYGTGGVKAAVSLQQDGLCLLCREREIEHYHHIVPRSRRGSNTISNIAGLCGKCHERIHKDQAAAEKLQSKKDGLSKKYGGTSALNQIIPSLTEELGIRYPGHAHVTNGWSTKEFREKHELEKDHDVDAYCIAASILEDAQPVMQTEPYEIKQFRRHSRALINHQTERTYRYDGKIIAKNRKKRMDQKTDSLEDWVADMTKQYGQGTASRMLSKVTVQKSTRHYNTKGRMMPGAVFIYRGKRFVMTGQLTGGAYYRAYRRDKKNFPAKAVQVVQKNKGLVYVA

SEQ ID NO: 12019 - protein, 410 aa, Tissierella sp.
MVYILNQEGKPLMPTNRHGKVKHLLREGRAKVVKRTPFTIQLLYATTDCVQPIVLGVDAGSKVIGLSATTEKEELFASEVVLRNDIVELLSIRRQNRRTRRNRLRYRKARFLNRVKSKNKGWLAPSIQHKVDSHLKAIANVYKILPISKIIIETASFDIQKIKNPQISGVDYQQGEQEGFWNVREYALWRDGHECQHCHGKSKDKFLNVHHKESRKTGGDSPGNLVTLCETCHTLHHKGKIELNLTKNKSYRDATFMGIMRWQVYNKLKEIYPNISMTYGYITKNNRITNGIEKTHTADAFCIAGSFKAKRSSVVYFQTFKRRHNRQIHKANFLKGGKKKLNQSPYEVKGFRLFDKVLFQEKECFVFGRRATGYFDLRKLDGTVIHRSASVKNIKLLEKKSTLLIERQVA

SEQ ID NO: 12020 - protein, 410 aa, Bacillus sp.
MTHCFVLDAQGNKLSPTRENRAWYLIRKQKATLKSKFPMVIQLKKEISVEEIDTTPILLGIDDGSKFVGIALVQKCKTKNKPVFKGTIEQRTDVKEKIAIRRGYRRYRRQHKRYRPARYDNRSSSNREERIPPSIKQKKDSILRVINPLHKWIRIDGIFLEDVLIDIRALEKGYKPYKWEYQQSNRLDENIRKAVVLRDHNTCQDCGLANARMEVHHITPRRLNGSDSIHNLITLCSTCHQKVTGDELNHCERFYQKVNGRRIYYIDAMHVMQGKTYLQNELKKIAPLSITTGGDTANKRIDWGIEKTHANDAIVICHSKVRPEQCEINNWVIKPMRKHSNKKIESVNGFHHRDYVQYTKRNGESYLAYITALYPEKNQCNMTTIEGKVLKRYGLSRLTLLWRFNKIYWL

SEQ ID NO: 12021 - protein, 535 aa, unidentified
  REGION 1..535: note = Human gut metagenome
VLRPRYQYPTRWYPSREQGSGNGCLSGEENTDLEQEVSGTLSKGDHSHPGEQDFCVPAITIQGGPAMSVFVVGLNGCRLMPTSERKARLLLKHGKASVYRKVPFTIKLNYKTGSTTQSGYLGIDTGSQHIGVSVVREDGTVLHKEEIGLRDSMSKRKLMQSRASSRRGRRHRKTRYRHPKWRPKAKRVYCEIPDRKGRHWKKKEITFASKRAKGWLPPSLQSKTDHHIRWIKKLQDLLPEGYRLSIELGRFDPARLKDPEIHGELYQKGPQYDYENVRAYVLDRDRYTCQVCGKKGGKLHVHHILYRSHGATDDPQYMATVCSDCHNTENHQQGGILYQWMQKQKKFTRGLRDATFMNILQKRLIEAFPGATFTYENITKADRERLRLPKSHGNDATAIAIVKTGIMTVKDKEPVIYIQQVRRKKRSLHEETPRKGRKEPNRKASRYDKNTKAVTVTKRKNKKISITGCLFDRVELNGKKGWISGFTDKSCYVKDENDQYIRTSPKYKQVSLSKLKILHHCGNWVIGARRSLGKG

SEQ ID NO: 12022 - protein, 333 aa, unidentified
  REGION 1..333: note = Human gut metagenome
LLRQGRLIVKEVAYMSTVYVLNKDGKPLMPTTRCGHVRRLLKEQKAQVVTSKPFTIQLLYETDDVVQPLYLGIDPGRTNIGVAVVKTDGTAVFTAHLETRNKEIPKLMQGRKKARHARRTNGRRCRRQRRAKANGTISKKCVKQTTAQNGSVSKRAKKIGVIKRHLPGCEKEVLCIGIKNKEAKFSNRARPEGWLTPTANQLLQTHINLVKKIQKFLPISDVVLEINKFAFMRLDNPNVQKWQYQQGPLYQKASLEEAVSEMQEHHCLFCKKPIAHYHHVVPQSENGSDTIGNIVGLCTKHHDLVHKNTAWQKKLAKKKTGLNKRYGALSVLN

SEQ ID NO: 12023 - protein, 396 aa, unidentified; identical to SEQ ID NO: 4508
  REGION 1..396: note = Human gut metagenome

SEQ ID NO: 12024 - protein, 406 aa, unidentified
  REGION 1..406: note = Human gut metagenome
MPCSPGKARLLLKEKKARVVRRTPFTIKLLYGSAGYKQPITLGVDAGSKHVGLSASTKKRELYREEFTPRNDVVKLLSKRKQYRRSRRNRKTRYRAPRFNNRVHSKHKGWLAPSVEVKIQEHITVIKRICRILPISLVRVETAEFDTQRLKAMLEGKSLPVGTDYQLGEMYDEYSVRQYVLKRDNYTCQCCGAHTTKKKTVKLHVHHLEGRQVGGNAPNNLITLCVDCHKALHAGKVKLDGKKRGKSFKDAAFMGIMRKTLMARLRDELPIPVQGTYGYITKMRREQNDIKKSHVNDARCISKHPLAEPCSVCYRTKAIRHHNRQTHKANFSKGGTRQRSQMPYVVEGYRLWDKVLYKGQECFVSGRRASGSFTLKKLDGTRISKGVTFKKLRLLETATNYLIERM

SEQ ID NO: 12025 - protein, 544 aa, unidentified
  REGION 1..544: note = Human gut metagenome
MKQKKQKVMVYILNKKGKPLMPTTRCGHVRKLLDSKKAVVVSSNPFTIRLKYDTPNGVQDVFAGIDSGRENIGSGASNEDGDCLYLGELKTSNKSIKMKMTERAGFRKERRSHDRQNKQRKARKDHTEIQNGNADICRTTISCKSVQISYPAAEKSVTHKIIRGKEGKFANRHRDEGWITPSARQLVQMHMNDLKSMCRILPISHVTLERVAFDFQKLENENIKAWEYGKGKLYGYDSPEEYIHDVQGGKCLICGKPHIDYLHHIIPRSKGGSNKVNNLAGLCYDCHYGPMGVHNCQDTQDRLPELKNEANKQYKVSLLNSVMPVLIEEMDKFCKANSIIFSICGGHDTAKVRDMYDLQKDHCIDGFAISLAGRNVKSVDVMPDRIHQKQRYKKKSKNIIQKRNCREYYDGKKLAAVNRHKGTDQKADSLEEYMNTYAETHTADECKKHFESLTVKPARRTYTFHKEGRICPFHIGDKVRYEKKNKIKGNTKVETFICEGIRFPKDENKAKVEHNKTKSKKMKFCRVLEPGCTPYIDYRKLVLI

SEQ ID NO: 12026 - protein, 420 aa, Moorena sp.
MQNYVFVIDTNKQPLNPIPPKKARRLLDKGKAAVFRMYPFTIILKTAINNPVVTNCQLKIDPGSKVTGFALVQNNQVIWGMELEHRGGLIKKKLESRSAVRRGRRNRHTRYRKPRFLNRKRPEGWLPPSLEHRILTIKTWIKRLIKFCPVNEIWVERVKFDPQKMQVPEINGVEYQQGELAGYEVREYLLEKWGRECTYCGKQSVPLQIEHIHPKSKGGSDRVSNLCLACEKCNQRKGNKPIEEFLKKKPSLLEKIKTKAKQPLKDAAAVNATRNKLVKVLWNIKPLITGTGAQTKYNRIKLGFPKEHWVDAACVGDIEILELRTNQPLLVTCKGQGGRQKAALNKYGYPIRHNPLKPIKGWCSGDIAKNILTGEFGRVNPRSKSNSFNYTVPGKKAISLHVKNLTRVHKKDGYTYGFCR

SEQ ID NO: 12027 - protein, 431 aa, Klebsiella sp.; identical to SEQ ID NO: 2435

SEQ ID NO: 12028 - protein, 453 aa, unidentified
  REGION 1..453: note = Human gut metagenome
MSTCVCVLSNNGERLMPTFRLGRVRHLLKDGKAKIIKRHPFTIQLLYDSKTNTQPIEICEDVGYNYIGISVKSESHEYVSAQYDTLQDEKKHHDDCRKYRRTRRNRLRYRKPRFDNRKRSEGWLAPSLEHKKQLNIRLIERYVSVIPITRATVEVGSFDTMLLQAIQKGKSKPEGVDYQKGPRYNLATLREAVFYRDNYTCQVCGRKIADGAILHMHHMFYWKGRHGYQLDELVTACEKCHTPANHQKGGKLYGFGEDIKFANLSGAAFMNTVRWQIVNVLYAAFGKPFVTFTYGAMTKEKRIALHLEKSHNNDAYAMGSFHPVNRCAFEHYEKVKRNNRILEKFYDSQYIDTRTGELTNGKSLFNGRISRSHKKDSENLHKYRGKRICKGHRALRRKKLALNPGDLVSLNGEILVVHGTHTKKNGSVNVEFKTPSRGGKKSASLKKLKIVKT

SEQ ID NO: 12029 - protein, 394 aa, Desulfobacterium sp.
MPCKPSKAKRLLKEGKAKVINRMPFTIKLIFGSSGYKQPVIVGMDTGSKVIGCAAIANNQVVYQSEIQIRQDVSKKMQVRKNYRRTRRGRKTRYRPARWANRASMKKKGRLAPSIKSKVESHLREKVFVESLLPVTEWIVETASFDIHKINNPNVNGKSYQDGNQKGFYNIKAYILSRDNYKCQSRQKVEHSKKLNVHHIVFRSKGGTNTPDNLITLCENCHKNLHAGKFKLKTGKSRTKHAAELGIVKSQLKNYWDFKETFGYETKYFREQILKLDKTHYLDAVAICGQADVKLLDKIFHKKHIPSGDYQLTKGKRSEKKIPTGKLFGLRKFDLIRTSKAVGFIKGKRSSGYFALMDIFNNTLTASVNVKKDCQRLTARTTTIIQEMAIPPLP

SEQ ID NO: 12030 - protein, 454 aa, Moorena sp.; identical to SEQ ID NO: 8652

SEQ ID NO: 12031 - protein, 423 aa, unidentified; identical to SEQ ID NO: 3951
  REGION 1..423: note = Human gut metagenome

SEQ ID NO: 12032 - protein, 417 aa, unidentified
  REGION 1..417: note = Human gut metagenome
MPCSPAKARLLLEEKKAIVKRRTPFTIQLTIATGEAKQPVALGVDSGYKHIGLSATTEKAELYASEVELRQDITDLLSARLALRRSRRSRKTRYRAPRFDNRVASKREGWLAPSVENRIAAHMSRVEAVMQVLPVTAITVETAAFDTQLLKNPDITGAAYQQGEQLGFWNVREYVLFRDGHVCQHCRGKSKDPILNVHHIESRRTGGDAPNNLITLCETCHKAFHRGEIKLKVRRGKSFKAETFMGIMRRTLFERLKKAHPELNVRNTYGYLTKHKRISYGIAKSHCADAYCIADNLGAKRLEGFFFQKQTRKHNRQIHKLLILKGGLKKKNQAPYEVKGFRLFDKVICKGEEAFIFGRRTSGSFDVRRLDGTRISAGINYKKLRLLEPRTTYLTEFRKEAALPPLHECRGFRTEFL

SEQ ID NO: 12033 - protein, 413 aa, unidentified; identical to SEQ ID NO: 2636
  REGION 1..413: note = Human gut metagenome

SEQ ID NO: 12034 - protein, 428 aa, Enterococcus sp.; identical to SEQ ID NO: 4335

SEQ ID NO: 12035 - protein, 443 aa, Anoxybacillus sp.; identical to SEQ ID NO: 10273

SEQ ID NO: 12036 - protein, 425 aa, Moorena sp.; identical to SEQ ID NO: 7553

SEQ ID NO: 12037 - protein, 419 aa, unidentified; identical to SEQ ID NO: 10960
  REGION 1..419: note = metagenome

SEQ ID NO: 12038 - protein, 396 aa, unidentified
  REGION 1..396: note = Human gut metagenome
VVRRTPFTIQLTIATGESKQPVSLGVDAGYKHVGLSASTEKAELYASEVELRKDITDLLSARRALRQSRRNRKTRYRAPRFDNRIRTKRKGWLAPSVENRINAHLSRIEAVLRLLPITKITVETASFDMQRLKNPDISGKEYQEGEQLGFWNVREYVLFRDGHVCRHCHGRSKDPVLNVHHLESRRTGGDSPGNLITLCETCHKALHRSEITLKTKRGQSFRAEAYMGLMRWEVLNRLKTSHPGLEVHNTYGYRTKYTRIVNGIDKSHCADAFCIAGNLGAERLGEFFFQKQTRRNNRQIHKLSILKGGIRKRNQAPFEAKGFRLFDKVACQGEEGFIFGRRSSGSFDVRKLDGTRISAGISCKKLRLLEKRRTYLTEIRKEEALPPLPEGRGLRA

SEQ ID NO: 12039 - protein, 413 aa, unidentified
  REGION 1..413: note = Human gut metagenome
MTGYAFVLDAAGKTLSPTKEQKAWFFVRKKRAKLISKYPLVIQLCRIISDDEICTDEIRCGIDDGGLHVGIAVVQRCKKKNKVLFKGTIEQRDDVKHLLCIRRGYRRHRRYQKRYRQVRFNNRIASTRKGRIAPSILQKRQATMRVIYRLQKWIKITSYWLEDVEIDIRALTDGCKLYKWQYQQSNRLDENIRKAVILRDGCKCVECGKEGSGLEVHHIKPKRLNGSNTLGNLVTLCGKCHQKTEGHELEFMDHYFAILKSSDNKYLNYATHVMIGKKWLRAKLSWLGMLHLTSGGDTANKRIDWGINKSHANDAVCITDLKPDVYDMKDWIIKPMRRQSKAKTDNVLGIRHRDLVEYTYRNGEIHQGYVTALYPELKALNFQSATKHCKKVNAYKCKLLWKFSKIYWLDNAG

SEQ ID NO: 12040 - protein, 424 aa, unidentified; identical to SEQ ID NO: 10503
  REGION 1..424: note = Human gut metagenome

SEQ ID NO: 12041 - protein, 460 aa, unidentified
  REGION 1..460: note = Human gut metagenome
MVAVVDLFGKPLMPTNEYRARKLLKQKKAKIFGYRPFTIQLTERKSAEIQPIELCMDTGYIHIGISAKSERHEYLGMQIDTLTDEKLKRDDKRQYRRQRRNRKRYRAPRFDNRRRKEGWIAPSLEHKKEIHIDAIQRICKVMPITDITLEIGNFDTHVLKAVEEGKPLPQGSDYQHGERYGIATLREAVFLRDGYKCQCCEKSVKDGAILHVHHIKYRSQGGTNRMSNLITVCDKCHTQKNHKPGGKLWNWKPKLAEFKGASYMTSIRWTLYNEVTALLPNSSVHITYGAKTKESRRKLDIKKSHVNDAYVMGLFCPNHRTKPVYFKKKRRNNRVLEKFYDAKYIDSRDGKKQSGQELFNGRINRNHRKDSENLHLYRKQKVTKGKRSIRNKHYPIQPHDILLYQKKKYENAGCHNNGSRVILLPEKKSVALKQLTIYQYAGGYYRVPYESNKKEERTGS

SEQ ID NO: 12042 - protein, 442 aa, unidentified; identical to SEQ ID NO: 3791
  REGION 1..442: note = Human gut metagenome

SEQ ID NO: 12043 - protein, 424 aa, unidentified
  REGION 1..424: note = Human gut metagenome
MRVFVFNMRGRPLMPCSQRKARLLLRENKAKIYKYHPFTIQLTYTTGETKQDCHIGIDTGSKYIGAAVRSEDKVFWKGEIELRQDIRSNLDTKRIYRRSRRNRKTRYRKPRFLNRKRRDEWLPPSLQSRINHTFHWIDTLSSLVPNPILHIEVGKFDVAKMINPEIHGVDYQHGQTYGFFDERYFVFARDNYTCQCCGKSKNKILNTHHIIYRSNGGTNRVDNLITVCTDCHTSQNHRKGGIFYQWQEQHKKVKQYKEPPFMNTLRKRIFVAYPDAEITYGSETTPKRKAMKLDKTHYNDAIVISCINEIKENPEEWLLIKQFRKKKRSLHEATARKGRKKPNRNQTRNSKNTPYYKGFYLNDKVSVFGKSGYITGFTSNAAYIKDENNDYITLPNKTYKQVSINKMKLECHNNNWQYIIKNAV

SEQ ID NO: 12044 - protein, 351 aa, unidentified
  REGION 1..351: note = Human gut metagenome
DNRKRSEGWLAPSLKHKKELNVNVVKMYCAVMPITHATVEVGSFDTMLVKAIQEGKAIPEGADYQKGPRYNLATLREAVFYRDNYVCKVCGRKATEGAILHMHHMFYWKGRHGNSLDELLTVCEKCHTPANHQKSGKLYGFGEKIKFADLSGAAFMNTVRWQIVNELYTAFGKPFVTITYGAMTKEKRIALRLEKTHNNDAYAMGEFHPNFRCTFEHYEKVRRNNRILEKFYDSQYIDIRTGEIATGKELFNGRINRNLKKNSESLHKYRGKRTYAGHRALLRKKVNLNPGDLVSFNGEVLIVHGTHTDKKGAINVEFKTPAKNGRKSASLKKLKIVKAAGSIHPAWEKVS

SEQ ID NO: 12045 - protein, 495 aa, unidentified
  REGION 1..495: note = gut metagenome
MAVVYVLSASGKPLMPTTRCGHVRVLLKEGKARVVERIPFTIQLTYQSEEETQPLYLGIDPGRTNIGAAVIREDGECVFTAQLTTRNKDVPKLMKARKLFRMAHRHLKRRCKRQRRAKTNGTTSQKEAFQRLLPGCEEPITCKGIRNKEARFNNRKRPVGWLTPTANHLLLTHINLVKKLQKLLPVTDVVLEVNQFAFMAMDNSNIQRWQYQKGPLFGQGSVEEAVYAAQDGHCLFCKKGIDHYHHVIPRRKNGSETLENRVGLCEEHHRLVHTEASWEKKLAAKKAGMNKKYHALSVLNQIIPQLTEQLTELFPQHAFVTTGQDTYSFREDHSIPKDHYLDAYCIACSVLPDTSGVAIPKVAPYDIRQFRRHDRQACHKANIERKYIDADGNVVASNRNKAIEQKTDSLVEYRVSHSEAEVSQLTVKPHLPQYKDMGRPMPGSLALHNGNVFVLISSDGRHNGFVDYYIDEHGEKHGARKCNILTNNSGLQFCG

SEQ ID NO: 12046 - protein, 465 aa, unidentified; identical to SEQ ID NO: 5914
  REGION 1..465: note = Human gut metagenome

SEQ ID NO: 12047 - protein, 430 aa, unidentified; identical to SEQ ID NO: 6405
  REGION 1..430: note = Human gut metagenome

SEQ ID NO: 12048 - protein, 465 aa, unidentified; identical to SEQ ID NO: 3856
  REGION 1..465: note = Human gut metagenome

SEQ ID NO: 12049 - protein, 418 aa, Bacteroides sp.; identical to SEQ ID NO: 2425

SEQ ID NO: 12050 - protein, 512 aa, unidentified; identical to SEQ ID NO: 3680
  REGION 1..512: note = Human gut metagenome

SEQ ID NO: 12051 - protein, 493 aa, unidentified
  REGION 1..493: note = Human gut metagenome
MAAVYVISASGKPLMPTTRCGHIRGLLNAGKARVVEREPFTIQLKYETPDVTQPLYLGIDPGRTNVGSAVVREDGECVFTAQLTTRNKDVPKLMKARKQFRMAHRRLKRRCKRQRRAKAAETLSQKGEFQRLLPGYEEPILCKGIRNKEARFNNRQRPAGWLTPTANHLLLTHLNMVKKLQKLLPITDVVLEVNRFAFMAMENPSIRRWQYQQGPLYGKGSVEDAVYAQQDGHCLFCGKPIAHYHHVVPQHKNGSETLENRVGLCNEHHDLVHKDRAWDAKMKETKAGLNKKYHALSVLNQIIPALTEQLTAMFPQHAFVTTGKDTADFREDYGIAKEHHLDAYCIACSVLAEPTKVAAPTGKPHRLMQFRRHDRQVCHKENIKRVYLSEGKAVATNRHKAIEQKDDSLEKFRKTHTQQEVSALTVKDHQPVYKDMRRFMPGGVFLFNGKVHTLQRSHGRYKGMPFYYIDTDGSKNHAKGCIFLQQNCGLRWV

SEQ ID NO: 12052 - protein, 420 aa, unidentified; identical to SEQ ID NO: 3685
  REGION 1..420: note = Human gut metagenome

SEQ ID NO: 12053 - protein, 427 aa, Nostoc sp.; identical to SEQ ID NO: 7770

SEQ ID NO: 12054 - protein, 430 aa, unidentified
  REGION 1..430: note = Human gut metagenome
MPKVYVLNRHGRPLMPCTPAKARHLLDAGKAKVRHRTPFTIQLLYGSTGYAQEVILGVDAGSKTIGLSASTETEELFSAEVKPRNDVVELMSARRQFRRARRNRATRYRKPRFDNRVRSKHKGWLAPSVEVKIQEHMTAIRRACAILPVSKVVVETAEFDLQLLKAVAEGKPVPQGEDYQKGEMYGHYNVRQYVLWRDSYTCQCCGAHATQKKEVRLHVHHLESRKVGGDAPDNLVTLCTACHDKLHKGIIMAADIKKRKRRSTRDATFMGIMRMTLLRRLREQLPVPVVETRGYITKATRENLLVLPKSHTNDALAIAHGPQGFRAEYLPNIRQADRLYTIRPVRHHNRQLHKATILKGGVRKANQAEKYICGFRLYDKVLYNGIECFVWGRRTSGSFLLRQLNGEKVKDGVSYKHLKLLERSQSYLVA

SEQ ID NO: 12055 - protein, 512 aa, unidentified
  REGION 1..512: note = Human gut metagenome
MSTVYVLNKNGKPLMPTTRCGRVRHLLKEQKARVVTSNPFTIQLLYETDDVVQPLYLGIDPGRTNIGVAVVKTDGTAVFTAHLETRNKEIPKLMQGRKKARRARRTNGRRCRRQRRAKANDTISKKCVKQDTAQSGSASKRAKKIGVIKRHLPGCEKGVLCIGIKNKEAKFSNRTRPEGWLTPTANQLLQTHINLVKKIRKFLPISDVVLEVNKFAFMRLDNPNVQKWQYQQGPLYQKASLEEAVSEMQERHCLFCKKPIAHYHHVVPQSENGSNTIDNIVGLCTKHHDLVHKDTTWQKKLAKKKTGLNKKYGAQSVLNQIIPALTERLNTLFPKHFFVTTGKSTYDYRAAHGVSKDHWLDAYCIACSVLPNDVCDSGINNRVPYELKQFRRHDRRALHKANMSRVYTLNDKAVATNRHKAIKQTTDSLEEFRQNHPDDVYKLKVKEHHPEYRNPKRNFPGCVFLVGKHTHVMQGTSGSHNGQADGYYDTNGNSYSSGKCKFVAKNEGIVFT

SEQ ID NO: 12056 - protein, 426 aa, unidentified
  REGION 1..426: note = Human gut metagenome
LAKDLYRSIDREETNLRVYVLNKRGEPLMPCSSAKARILLKEKKAVVKRRTPFTIQLTIATGETTQPVTLGVDAGYKHVGLSASTKKAELYASEIELRQDVSELLAGRSALRHARRSRKTRHRAPRFDNRKRDKGWLAPSVENRIGAHVSRVEAVLRILPVTKIIVETASFDVQRLKNPDIQGVEYQQGEQLGFWNVREYVLFRDGHECQHCHGKSKDKVLNVHHIESRRTGGDAPNNLITLCETCHKAFHRGEIELRVKRGRSFQAETFMGVMRWTFFERLRARHSEIEVRNTFGYLTKNTRITHGIEKTHCADASCIAGNLKAKRLGYYFFQKQTRRHNRQIHKLTILKGGARKRHQTPYEIKGFRLYDKVLFQGKTAFIFGRRSSGYFDIRTLDGERISASVSYKKLRLLEKRRTYLIELRRN

SEQ ID NO: 12057 - protein, 500 aa, Moorena sp.
MKNTKQRVYVLDREGKPLMPTTRFGKVRRMLRSGKAKAVRTKPFTIQLQYEPETHIKQRVVLGIDPGRTNIGVCAVREDGISLFAAHVKTRNKDVPEKMKGRKVHRQVSRRGERLARKRLAKKHGTRTDKWNPRSLPGCEEPVSVKDIRNTESRFIDRKRPDGWLTPTATQLLRTHMNVVALVSKILPVAEVAIELNRFAFMKLDDPAIEGVAYQKGPMRGFGSVREAIETIQGERCLLCGKPIEHLHHIVPRSQNGMNTLENLAGLCRKCHERVHKDADVQRAIGGLKKGTKKKHAGASVLNQIMPRLLQNLESQYSLTVTEGWQTKAFRDAHGIGKTHHADAYCIACSALSAQAVFDAPAEPYSVKQYRRHDRARIQAQTNRVYKLDGKAVAWNRHKAMAQDDDSLAEWHEKNVQKYGRRKANSMRSRLLFTKSRRRYNNLNRNLPGSIFLHDGKRRVLRGQQSGGKKYTFEDKRPDEKQANAKDCTLVTPNTGLVFL

SEQ ID NO: 12058 - protein, 426 aa, Calothrix sp.
MSKVFVIDIEKRPLNPIHSAQARQLLRNKKAAIYRRFPFTIIFKELHSSPVQPLRLKLDPGAKTTGIALANDSTGEVIFAAELKHRGFAIRDALIARRQLRRGRRNRKTRYRKPRFINRTKPQGWLAPSLMSRVHNVETWVNRLRKFAPITAISTELVKFDMQLMRNPEIEGKEYQQGALTGYETREYLLEKWNRQCAYCGVKDVPLQIEHIHPRSKGGSNSITNLALSCEKCNIKKGTKDIKDFLKKDPTKLEKILAQAKKPLADAAAVNATRYKLLEVLKSTGLHVECGSGGLTKFNRTSQKLIKTHWIDAACVGKSTPTLNIKGIKPLLVTANGHGTRQMAGTDKFGFPIRHRSNKQIHFEFQTGDIIKAVVTSGKKVGEYVGRVLCRATGSFDIATKTGRISGINHKYCSAIHKKDGYSYAF

SEQ ID NO: 12059 - protein, 431 aa, unidentified
  REGION 1..431: note = Human gut metagenome
MPNKVYVINKHGRPLMPCSPAKARHLLDAGKAKVKKRTPFTIQLVYGSSGYTQEVILGVDAGSKTIGMSASTTKEELLSAEVKPRNDVVDLLSTRREFRRVRRNRKTRYRKPRFDNRVRSKHKGWLAPSVEVKIQEHITSIKRVCRILPVSKVVIETAEFDLQLLKAIADGKSVPQGEDYQKGEMYGHYNVRQYVLWRDNYTCQCCGAHATKKKEVRLHVHHLESRKTGGDAPRNLITLCDSCHKKHHDGLITEDDFKKRKRRSTRDATFMGIMRKTLIQRLRAELTIPVAETRGYITKATREKLLVLPKSHTNDALAIAQGKHGFNVGYLPGILQIDKIYTIRPVRHHNRQLHKATILKGGIRKSNQTGKYVFGYRLFDKVQFNGQDCFIWGRRTTGIFTIKTINGKMIKDGISFKKLKLVEKSTSYLIA

SEQ ID NO: 12060 - protein, 485 aa, unidentified
  REGION 1..485: note = Human gut metagenome
LYIKMTSCTCTVFPACNHAKASSSQGKHNLLLRQERFIVKEVANMSTVYVLNKDGKPLMPTTRGGHVRHLLKEQKARVVRAKPFTIQLLYETNDVVQPLYLGIDPGRTNIGVAVVKANGTAVFTAHLETRNKEVPKLMQDRKKARRARRTNGRRCRRQRRAKANGTISKKCVKQDTAQSKNPSKRAKEIGIIKRRLPGYKKDVLCIGIKNKEAKYTNRTRPEGWLSPTANQLLQTHINLVRKIQKFLPISDVVLEVNKFAFMRLDNPDIQKWQYQQGPLYQKGSLENAVSEMQEHHCLFCDKPIDHYHHVVPQSENGSNTIANIVGLCAEHHNLVHKDAAWQKKLAEEKVGLNKKYGALSVLNQIIPALTNKLSVLFPKHFFVTAGKSTHDYRAAHGVSKDHWLDAYCIACSVLPSNVCDSNINNHMPYELKQFRRHDRRVLNNENMNRVYTLDNKAVAINRHKATEQEAASLEEFRKEHPNDVC

SEQ ID NO: 12061 - protein, 431 aa, unidentified; identical to SEQ ID NO: 4306
  REGION 1..431: note = Human gut metagenome

SEQ ID NO: 12062 - protein, 431 aa, unidentified
  REGION 1..431: note = Human metagenome
MVFVLNKSKKPLDMISNAEARILLRKKLAVIHKVYPFIIRLRDNSRVSKDKSYTVKLDPGSKHTGIAIVDDKNQVVMLAEIEHRGHIIKKNLGSRRAVRQKRRNRKTRYRPARFLNRTKPEGWLAPSVKSRADNVINFIKKYKKLINIDKVMIENVSFDVTQMSSNTKLYGVAYQQGPLYQNKLRSFIFNRSNNKCVYCGAKATEIDHIVPRTKGGTNSVYNLVASCRACNQMKSNKTLEEFGKIMNKNFSHLEPKKLPKDASIVQTARNYMVKEITKLVSDTTLHDACFTKYNRDQLGLPKQHYYDALSVGEIPNSFNFFTDKVLQISAKGRGSRQMCKVNKYGFPRTSAKALKSVRGFQTGDIVKAIVPNGLKQGEYLGRVAIRSRGYFDIKTKNNLVKDIGYKYCHLIQRGDGYSYNYKECDLLSGKK

SEQ ID NO: 12063 - protein, 418 aa, unidentified
  REGION 1..418: note = Human gut metagenome
MVYVLSKTGQPLMPTENHAKVRVLLKQQKAKIVHRCPFTIQLLYDSTDYTQQVSLGIDAGSRHIGVSATTETKVLYEADVTLRNDIVDLLSTRREARRTRRSRKTRYRKPRFNNRTRKDDWLAPSVKQKMDTHLTTLRKVTEILPVNSITVETASFNIQKIKNPNIASTGYQQGEQLDFWNVREYVLFRDGHKCQCCKWKSKDPVLNVHHIESRKTGGNAPNNLITLCETCHKGYHNGTVSLPKNIRRGMKFNDAAFIGAMRWAFFNRVKETYEPLGIMVNMTYGYITKNTRIEHNLPKDHFIDARCISGHPDATSDGTVFYQKKVRCHNRQIHKQKILKGGIRKRNQAPYLVKGFRLFEKVKYHGKQYFIFGRRSSGFFDLRTLDGTKVNKGSVSYKKIRSLDMPRSYLTEERKAIV

SEQ ID NO: 12064 - protein, 433 aa, Burkholderia sp.; identical to SEQ ID NO: 9535

SEQ ID NO: 12065 - protein, 419 aa, unidentified; identical to SEQ ID NO: 3670
  REGION 1..419: note = Human gut metagenome

SEQ ID NO: 12066 - protein, 423 aa, Moorena sp.; identical to SEQ ID NO: 7848

SEQ ID NO: 12067 - protein, 235 aa, unidentified
  REGION 1..235: note = Human gut metagenome
LKVFVLNMRGQPLMPCSPAKARHLLKAGKAVVKRRTPFTIQLRIATGETKQNVTLGVDAGAKHVGLSATTEKEEVFASEVELRQDITGLLAARLSLRRDRRHRKTRYRAPRFLNRVRSKHKGWLAPSVENRIQAHMSRIDAVCRLLPVTRIVIETASFDVQKIRNPEVEGTGYQQGDQLGFWNVREYVLFRDGHVCQHCHGHSKDKILNVHHLESRQTGGDAPNNLITLCETCHK

SEQ ID NO: 12068 - protein, 249 aa, unidentified
  REGION 1..249: note = Human gut metagenome
MVYVQDINGKPMIPTTRHGKVRRLLKDKKAVVVNLCPFTIKLMYVTSDYKQEIVLGVDAGTKHVGLSATTKSKELYSSEVILRNDIVDLLSTRRELRRSRRNRLRYRKPRFDNRIKSKRPGWIAPSVKYKIDAHIRVVENVCSILPISRIVIEVAQFDTQKINNPNISGKEYQEGDQLGFWNVREYVLARDGHKCQHCKGKSKDPVLNVHHIESRKTGGDSPSNLITLCETCHKEYHKGNMMQNNIKNN

SEQ ID NO: 12069 - protein, 512 aa, unidentified
  REGION 1..512: note = Human gut metagenome
MSTVYVLNKNGKPLMPTTRCGHIRYLLKEKKARVVASKPFTIQLLYETNDVVQPLYLGIDPGRTNIGVAVVKTDGTAVFTAHLETRNKEIPKLMKKRKDSRRARRTNGRRCRRQRRAKANDTISKKCVKQATAQNGSVSKRAKEIGVIKRHLPGCEKEVLCIGIKNKEAKFSNRTRPEGWLTPTANQLLQTHINLVKKIRKFLPISDVVLEVNKFAFMRLDNPNVQKWQYQQGPLYQKASLEEAVSEMQERHCLFCKKPIAHYHHVVPQSENGSNTIDNIVGLCTKHHDLVHKDTTWQKKLAKKKTGLNKKYGAQSVLNQIIPALTERLNTLFPKHFFVTTGKSTYDYRAAHGVSKDHWLDAYCIACSVLPNDVCDSGINNRVPYELKQFRRHDRRALHKANMSRVYTLNDKAVATNRHKAIKQTTDSLEEFRQNHPDDVYKLKVKEHHPEYRNPKRNFPGCVFLVGKHTHVMQGTSSSHNGQADGYYDTNGNSYSSGKCKFVAKNEGIVFT

SEQ ID NO: 12070 - protein, 551 aa, unidentified
  REGION 1..551: note = Mouse gut metagenome
MSYKVVIHHRKENFMKQKTFVYVLNKKGKPLMPTTRCGHIRKLLKEKKAVPVCNNPFTIRLKYETPDIVQSLYLGIDTGRENIGIAVSEENGNCIYLAELETRNKSIKKKMTERREFRSERRRYKRISKQRKAIKNGTTIQNGEDAVIRSKKECKSKTVIYPGMEEGITHKIIQGAEAQFNNRKRKENWITPSGRQLIQMHMNAIKLVQKILPISHIIIERVSFDFQKLENQNIHTWQYGRGPLYGFKDYKNYINSEQNGICLLCRKNHIEYYHHIVSKSNGGSDNINNIAGLCYNCHYGNNGVHKNPKASKQLQTLKEGLKQKYKISLLNSVMPVLIEEVSEFCINNNYKFSVTDGYSTSVTRKQMNLPKTHCIDAYCISMTNKLFQCKMLPSVIYEQRRFKKKSGNIISKRNNREYYVKERDKLVLVAKNRHKATEQSFLSLEEYLSEYALTHTEYECIKQARSLLVKPCRRTYTYHKEKKVASIHPGDIVKYEKHNKKGNTKTEVFIAESIKISTNQICYETKSKNLKLCKRIMSTSVPYVSKRTLVI

SEQ ID NO: 12071 - protein, 442 aa, unidentified
  REGION 1..442: note = Human gut metagenome
MVTVQQSTHHLPFGRVFIRRNLFMVYVISQDGKPLMPCSDPIARLLLKQGKAKVKKREPFTIKLTYETTNHTQGLTLGVDTGSGTIGTAVSKDNGDIVYMSEVVVRNDITDKMTQRAKYRRNRRNRKTRYRKARWLNRASSIKKDRFSPTMQSKLHSHVREIEYIQSILPVTEMVFETGQFDMQLMKNPSLANPKVRPWGYQKGANYGFENTKAMVLNRDNYTCQCCKGKHKDSKLEVHHIVFRSQGGSDEESNLLTLCHTCHKDLHSGKINPKLSGKVKGNLKYATQMNSIRKQLFRFYPNAIETFGYVTKANRLHLGVDKEHYYDACIIATQGNAFNVKSNLYKKKCVSDGDFQKTKGIRSEQPIVTDKICGFRKFDKVRYFGNDYFIKGRMSTGYAILMDIDGNKIDFSTMPRGYKTPKLSNCKRITARSTVMTQVKVV

SEQ ID NO: 12072 - protein, 485 aa, unidentified; identical to SEQ ID NO: 7403
  REGION 1..485: note = Human gut metagenome

SEQ ID NO: 12073 - protein, 458 aa, Halomonas sp.; identical to SEQ ID NO: 7364

SEQ ID NO: 12074 - protein, 557 aa, unidentified; identical to SEQ ID NO: 10483
  REGION 1..557: note = Human gut metagenome

SEQ ID NO: 12075 - protein, 512 aa, unidentified
  REGION 1..512: note = Human gut metagenome
MSTVYVLNKDGKPLMPTTRCGHIRYLLKEKKARVVASKPFTIQLLYETSDVVQPLYLGIDPGRTNIGVAVVETDGTAVFTAHLETRNKEIPKLMKKRKDSRRARRTNGRRCRRQRRAKANDTISKKCVKQATAQNGSVSKRAKEIGVIKRHLPGCEKEILCIGIKNKEAKFNNRTRPEGWLTPTANQLLQTHINLVKKIRKFLPISDVVLEINKFAFMQLDNPNIQKWQYQQGPLYQKASLEETVSEMQEHHCLFCKKPIAHYHHVVPQSENGSNTIGNIVGLCTQHHDLVHKDATWQEKLAKKKTGLNKKYGALSVLNQIIPALTKELSSLFPKHFFATNGKSTYDYRAAHGISKDHWLDAYCIACSVLPNDVCDSGINNRMPYELKQFRRHNRRALHKENMSRVYTLNDKAVATNRHKAIKQTTNSLEEFRQNHPDDVCKLKVKEHHPEYRNPKRNFPGCVFLVGKHTHVMQGTSGSHNGKADGYYNTNGNSYSSGKCKFVAKNEGIVFT

SEQ ID NO: 12076 - protein, 417 aa, unidentified
  REGION 1..417: note = Human gut metagenome
MPCSPAKARLLLKEKKAIVKRRTPFTIQLTIATGEAKQPVTLGVDSGYKHIGLSATTEKAELYASQVELRQDITDLLSARLALRRSRRSRKTRYRAPRFNNRVANKREGWLAPSVENRIAAHMSRVEAVMRVLPVTAITVETAAFDTQLLKNPDIAEAAYQQGEQLGFWNVREYVLFRDGHVCQHCRGKSKDPILNVHHIESRRTGGDAPNNLITLCETCHKAFHRGEIELKVRRGKSFKAATFMGIMRWTLFERLKKAHPELRVRNTYGYLTKHKRISHGIAKSHCADAYCIADNLGAKRLEGFFFQKQTRKHNRQIHKLSILKGGLRKKNQAPYEVKGFRLFDKVICKGEEAFIFGRRTSGSFDVRRLDGTRISAGINYKKLRLLEPRTTYLTEFRKEAALPPLHECSGSRAEFR

SEQ ID NO: 12077 - protein, 264 aa, unidentified
  REGION 1..264: note = Mouse gut metagenome
LKAIADGKPVPEGEDYQKGEMYGQYNVRQYVLWRDGYTCQCCGVNEDGIKLHVHHKESRKIGGNAPDNLVTLCDKCHKGFHKGTISLTKLIKRGRKSTRDAAFMGIMRKTLIERMGSILPVPVVETKGYITKATRSELLTLPKSHINDALAIAQGKHGFGITDPTTITRVDMQYSVKPVRHHNRQLHKATILKGGIRKSNQAAKYVKGFRLFDKVLYQDQECFIWGRRTSGSFLLRVLDGTKVKDGVGFKHLKLLERSSNYLIA

SEQ ID NO: 12078 - protein, 428 aa, unidentified; identical to SEQ ID NO: 5055
  REGION 1..428: note = Human gut metagenome

SEQ ID NO: 12079 - protein, 431 aa, unidentified; identical to SEQ ID NO: 3801
  REGION 1..431: note = Human gut metagenome

SEQ ID NO: 12080 - protein, 417 aa, Defluviitoga tunisiensis
LRVFVLNMRGKPLMPCKPRKARLLLKQGKAKVVKRDPFTIQLTIATGEAKQDISLGVDSGSKYIGISATTKKHVLFEAEVELRNDIVKLLADRRQYRRSRRYRKTRYRQARFLNRKKPEGWLAPSIQHKINSHIKIIDMLTKLLPITDITIEVASFDIQKIKNPDIQDKEYQQGDQLGFYNVREYVLWRDNYQCQGRKGCKNKILNVHHIESRKTGGNSPNNLITLCETCHNDYHAGKLKLNLKRGQMFKDATFMGVMRWATYNALKELYPNVKLTYGYITKHKRIKYGLEKSHRMDARCISGNPLVKPLDTYYYFKCVRKQNRQLHKATPSKGGVRKNNKAPRYLHGFQLFDKVSYQNQECFIFGRRTSGYFDLRKLDGTKVTASASVKKLKLIERANTLLCERREGNSSPAYTIF

SEQ ID NO: 12081 - protein, 424 aa, Caldicoprobacter sp.; identical to SEQ ID NO: 2589

SEQ ID NO: 12082 - protein, 465 aa, unidentified
  REGION 1..465: note = Human gut metagenome
MSTCACVLSKNGERLMPTIRLGKVRHLLKDGKAKIIKHHPFTIQLLYDSETNIQPIEICEDVGYNYIGISVKSQSHEYVSAQYDTLQDEKSCHDACRRMRRTRRNRLRYRQKRFDNRKRDKGWLAPSLKHKKELNVNVIKMYCEVVPITHATVEVGSFDTMLVKAIEEGKATPEGADYQKGPRYNLATLREAVFYRDNYTCQVCGREASEGAILHVHHMFYWKGRHDNSLSELITVCEKCHTPANHQKGGKLYGFGEDIKFANLSGAAFMNTVRWQIVNVLYAAFGKPFVTFTYGAMTKEKRIALHLEKSHNNDAYAMGSFHPVNRCAFEHYEKVKRNNRILEKFYDSQYIDTRTGELTNGKSLFNGRINRSHKKDSENLHKYRGKRIRKGYRALRRKKVALNPGDLVSLNGEILTVHGTHTKKNGSVNVEFKTPSKSGKKSTSLKKLKIIKTISPMRSAWDKVS

SEQ ID NO: 12083 - protein, 424 aa, Enterococcus sp.
MRVFVRNMQGKPLMPCSNRKARLLLKEGKAKIYQYNPFTIQLCYASREYVQECHIGIDTGTKHIGMAVTSEDKVLFKGEIELRQDVKSNLDTRRSYRRDRRNRKTRYRKARFLNRKKKESWLPPSIENRINHTFKWINKLVALLPNPKLHIEVGKFDVAKMINPDVQGVDYQHGQTYGFYNVRYFVFARDNYTCQCCKKSKNKILQTHHIIYRSNGGSNRAVNLITVCTDCHTYENHQKGGILYQWQENRKKTKQYKEPPFMNVLRKRIFTQYPNAIITYGFETTPKRKELGLEKTHYNDAIVISGITKIKENPNEWLLIKQFRKKKRSLHEATARKGRKEPNRLQKRNAKNTPYYKGFYLNDKVRVFNQVGHITGFTSSGAYIKNSENEYITLPNKSYKQIGISNIRLLHHNNNWQYIHKHIA

SEQ ID NO: 12084 - protein, 477 aa, Acidithiobacillus sp.; identical to SEQ ID NO: 11553

SEQ ID NO: 12085 - protein, 546 aa, Streptomyces sp.
LIANVLRHTRQEVTRSPTHEDTPGSRDETAHGHPATARGTGGTHGRGETGGPSARVRRRHAEVTAPAVAEAANGDGDVPTGCDTYAGGTGAARVFVLSKDGKPLMPCHPARARELLGKGRAVVARQAPFAIRLKDRTHSESDVDGVQLRVDPGSKGTGFALTDEKMETDSCGRNVVVRRGLVTVELRHRGDQIQRSMQQRAGYRHRRRSANCRYRPRRSQNRARAQGWLPPSLQHRVDTTASLVTRMCRYAPVSEIHLEHVAFDTHSMSAGRALRGADHQHGSLVGTHARAYLRTKWGSACAYCGATDVPLNIDHLQPRSRGGSDRISNLVLACVPCNQAKGSRPVAVFLAHEPERLAKVLKQVRVPLRDAAAMNTTRWGLLGALTALGLPVRCWSGSLTRQNRTATGLPKTHSLYALCVGALGREARNAIVRVPGHLLVLNAVGRGSYARTTPDRFGFPRLRRARGKQHFGFISGDLAQATVPSGKWAGTWVGHIAVRARGQHSLATPVGRINVSHRNLRLLQRGDGYSYARRDVIVEDPCEKSA

SEQ ID NO: 12086 - protein, 408 aa, unidentified; identical to SEQ ID NO: 3192
  REGION 1..408: note = Human gut metagenome

SEQ ID NO: 12087 - protein, 448 aa, unidentified
  REGION 1..448: note = Human gut metagenome
MSTGLRAVQAEPAGIRKGDALKVFVLNMRGRPLMPCSPARARHLLKAGKAVVRRRTPFTIQLRIATGETKQSVTLGVDAGAKHVGLSAATEKEEVFASEVELRQDITGLLAARLSLRRDRRHRKTRYRAPRFLNRVRSKHKGWLAPSVENRIQAHMSRIDAVCRLLPVTRIVIETASFDVQKIRNPEVEGTGYQQGDQLGFWNVREYVLFRDSHVCQHCHGHSKDKILNVHHLESRQTGGDAPNNLITLCETCHKACHAGKIKLKVKRAQSFRAEAFMGIMRWTLLDRMRKAHSGLPVENTYGYLTKNTRITPGLPKTHCVDAYCIAGNLKAVRRGVCLHQRQVRKHNRQIHKCTVLSKTLKDGTKIGYRKLNQTPHLVKSFRLFDKVRCLEQTGFIFGRRSSGYFDVRRLDGVKLSSGISYRKLTLLEKRSTYLTELRKEDGASSPV

SEQ ID NO: 12088 - protein, 460 aa, unidentified
  REGION 1..460: note = Human gut metagenome
MVAVVDLSGRPLMPTNEYRARKLLKQKKAKIFGYRPFTIQLTERKSTEIQPIELCMDTGYIHIGISAKSERHEYLGMQIDTLTDEKLKHDDKRQYRRQRRNRKRYRAPRFDNRRRKEGWIAPSLEHKKEIHIDAIQRICKVMPITDLTLEMGNFDTQVLKAVEEGKTLPQGSDYQHGERYGIATLREAVFLRDGYKCQCCEKTVKDGAILHVHHIKYRSQGGTNRMSNLITVCDKCHTPQNHKPGGKLWNWKTKLAEFKGASYMTSIRWMLYNEVTALLPNSSVHITYGAKTKESRRELDIEKSHVNDAYVMGLFHPKHRTQPVYFKKKRRNNRVLEKFYDAKYIDGRDGKKRSGQELFNGRISRNHKKDSENLHLYRKQKVTKGKRSIRNRHYPIQPHDILLYQKNKYETAGCHNNGTRAILLPEKKSVALRQLTIYQYAGGYYRVPYESNKKEERTGS

SEQ ID NO: 12089 - protein, 420 aa, unidentified
  REGION 1..420: note = metagenome
MFVYVLDMDGQPLMPTSRFGKVRRLLRDKKAKVVSREPFTIKLLYEPETKIVKDIVLGVDTGSKHVGVACVGNSRVLYQAQVELRDDIKRKMDSRRMYRRNRRYRKTRYRKPRFLNRRNSIRKDRYCPTIISKFHGHEREIEFCKKILPIKDIVLETGKFDTQLMEKPWLQEHKWAYQKGVNYGYANAREHALVRDNYTCQCCGKKNCRVEAHHIVFRSKNGSNDLDNYITLCEDCHKAIHLGKIELKLKGKRRGTLRYATQMSVIRCMLLKRYPDATETYGFVTKANRENLGIGKDHYLDACVIASGGLAFRQSDVLYRKRCVSKQSRQLCKGVRGKQWIPTRKVHGFKRYDKVRYLGEVCFVKARRTDGHFVLMGIANNSLDFRDMGGKQNPSYKSIKRISARRSILCISERIERVDM

SEQ ID NO: 12090 - protein, 420 aa, unidentified; identical to SEQ ID NO: 7490
  REGION 1..420: note = Human gut metagenome

SEQ ID NO: 12091 - protein, 512 aa, unidentified; identical to SEQ ID NO: 5549
  REGION 1..512: note = Human gut metagenome

SEQ ID NO: 12092 - protein, 425 aa, Lyngbya sp.; identical to SEQ ID NO: 3008

SEQ ID NO: 12093 - protein, 533 aa, Verrucomicrobium sp.; identical to SEQ ID NO: 5282

SEQ ID NO: 12094 - protein, 427 aa, Anabaena sp.; identical to SEQ ID NO: 3743

SEQ ID NO: 12095 - protein, 406 aa, unidentified
  REGION 1..406: note = Human gut metagenome
MVYVQDINGKSLMPTTRHGKVRRLLKDKKAVVVNLCPFTIKLMYITPDYKQEIVLGVDAGTKHVGLSATTKSKELYASEVILRNDIVDLLSTRRELRRTRRSRLRYRKPRFNNRIKSKRQEWIAHSVKYKIDAHIRVVEKVYSILPVSHIIIEVAQFDTQKIKNPDISGKEYQEGDQLGFWNVREYVLTRDEHKCQHCKGKSKDKILNVHHIESRKTGGNSPSNLITLCKTCHKEYHKGNIKLKVKRGTSLRDAAAMGIMKWKLLDKLKSLFPNVSMTFGYITKYNRIHNNIEKSHFSDAFVISKNFKAKRLGYYFKEKLVRRHNRQIHKTKILKGGKKKMNQAPFKVFGFRLFDKVEFQGNEYFIYARRLSGYFNIRDINSENKKDVTYKKLTYIGHGLVSVETE

SEQ ID NO: 12096 - protein, 470 aa, unidentified; identical to SEQ ID NO: 2825
  REGION 1..470: note = Human gut metagenome

SEQ ID NO: 12097 - protein, 442 aa, unidentified; identical to SEQ ID NO: 3234
  REGION 1..442: note = Human gut metagenome

SEQ ID NO: 12098 - protein, 465 aa, unidentified; identical to SEQ ID NO: 3856
  REGION 1..465: note = Human gut metagenome

SEQ ID NO: 12099 - protein, 515 aa, unidentified; identical to SEQ ID NO: 5111
  REGION 1..515: note = Human gut metagenome

SEQ ID NO: 12100 - protein, 442 aa, unidentified; identical to SEQ ID NO: 2903
  REGION 1..442: note = Human gut metagenome

SEQ ID NO: 12101 - protein, 465 aa, unidentified
  REGION 1..465: note = Human gut metagenome
MSTCVCVLSNSGERLMPTFRLGKVRRLLKDGKAKIVKHHPFTIQLLYDSKTNTQPIEICEDVGYNYIGISVKSQSHEYVSAQYDTLQDEKACHDSCRKLRRTRRNRLRYRKPRFDNRKRGEGWLAPSLRHKKELNVNVVKMYCAVMPITHATVEVGSFDTMLVKAIQEGKAIPEGADYQKGPRYNLATLREAVFYRDNYTCQVCGRKIADGAILHMHHMFYWKGRHGDSLNELLTVCEKCHTPANHQKSGKLYGFGENVKFADLSGAAFMNAVRWQIVNELYTAFGKPFVTITYGTMTKEKRIALRLEKSHNNDAYAMGEFHPNHRCTFEHYEKVRRNNRTLEKFYDSRYIDIRTGEIATGKELFNGRINRNHKKDSENLHRYRGKRTYAGHRALLRKKVNLNPGDLVSLNGEVLVVHSTHTNKKGAVNVEFKTPGKSGQKSASLKKLKIVKAADSMHSAWEKIS

SEQ ID NO: 12102 - protein, 424 aa, Enterococcus sp.; identical to SEQ ID NO: 6210

SEQ ID NO: 12103 - protein, 420 aa, unidentified; identical to SEQ ID NO: 7764
  REGION 1..420: note = Human gut metagenome

SEQ ID NO: 12104 - protein, 415 aa, unidentified
  REGION 1..415: note = gut metagenome
MVYVQDINGKPMMPTTRHGKVRRLLKDKKAVVVNLCPFTIKLTYVTSDYKQEIVLGVDAGTKHVGLSATTKGKELYSSEVILRNDIVDLLSTRRELRRSRRNRLRYRKPRFNNRIKSKRPGWVAPSVKYKVDAHIRVIDNVCSILPVSRIVIEVAQFDTQKIKNPNISGKEYQEGDQLGFWNVREYVLARDGHKCQYCKGKSKDKILNVHHIESRKTGGDSPSNLITLCETCHDDYHKGNIDLKIKRGSSLRDAAVMGIMKWRLYEELRSKHNRVSITFGYVTKYNRINHGIEKSHVSDAFVISKNFNAIRLGCYYKVRLVRRHNRQIHKQKIQKGGIKRLNQSTFEVFGFRLFDRVMFENGYYFIFGRRKIGSFDIRDIDSKRQNNITYKKLKLSRCKRFMIQMELNKKNTDMF

SEQ ID NO: 12105 - protein, 408 aa, unidentified
  REGION 1..408: note = Human gut metagenome
MVYVQDINGKPMMPTTRYGKVRRLLKNKKAAVVNLCPFTIKLMYVTSDYKQKIVLGVDAGTKHVGLSATTKSKELYSSEVILRNDIVDLLSTRRELRRARRDRMRYRKPRFNNRIKSKRPEWVAPSVKYKIDAHIRVIDNVCSILPISRIVIEVAQFDTQKIKNPEISGKEYQEGNKLGFWNIREYVLARDGHKCQYCKGKSKDSILNVHHIESRKTGGDSPSNLITLCETCHKEYHKGNIDLKIRRGKSLRDAAIMGIMKWRLYEELKSKYDRVFMTFGYVTKYNRIHNNIEKSHVSDAFVISKNFDAIRLGYYYKVRLVRRHNRQIHKQKIPKGGIKRLNQSPFEVFGFRLFDRVMFENSYYFIFGRRKTGRFNVRDIDGKNQKDITYKKLKLSRCKRFMIQKEMN

SEQ ID NO: 12106 - protein, 418 aa, unidentified; identical to SEQ ID NO: 2710
  REGION 1..418: note = Human gut metagenome

SEQ ID NO: 12107 - protein, 427 aa, Moorena sp.; identical to SEQ ID NO: 10130

SEQ ID NO: 12108 - protein, 475 aa, Ferroplasma sp.
MEKNMKERQKLDRRDTYTPADAPQVRGNCDHTLNREETLSVHGLKTPSNNPDVKLQSGMTGHDLRVPVINMRNEPLMPTTPGKARKLLKHNRARVISSNPFTIQLLYATGETKQPVTLGIDAGYKHIGFSAVTEKRELISGEAVIRTDIPKLNVEKSMYRRNRRNRLWYRQPRFMNRGNNSKGWFAPSIDHKLQTHIRLIEKLKRILPVSKVIIEVASFDQQKMKNPEISGIEYQQGELQGYEIREYLLEKFHRKCVYCGKTNVPLEIEHLTPKSRGGSNTVDNLAISCHECNQRKNNLTAEEFGYPEVRKTASMPLRDATFMNTVRWKLTQLTEAIHTFGYITKKNRISPGLDKSHANDAFVIAGGTTQARSTVFNVTQRRRNNRSLQINRKGFRPSIRRRRYPLQPGDVVEFGESRYGVVGVHSYGNYVIIRNGEKKMDVNIKKVKLVKYGKGLRFTTQFLHKLLHGISLGGS

SEQ ID NO: 12109 - protein, 420 aa, unidentified
  REGION 1..420: note = Human gut metagenome
MQYVYVLNRHGEPLMPCSPGKARLLLKQQKACVVKRTPFTIKLLYGSAGYKQPITLGADAGSKHVGLSASTEKRELYSEEFTPRGDVVELLSTRRQNRRSRRNRKTRYRAPRFDNRVHSKHKGWLAPSVEVKIQEHITIIKRICKILPISLVRVETAEFDTQRLKAMLAGKPLPVGTDYQLGEMYDEYNVRQYVLKRDHYTCQCCGAHNTAEKVVKLHVHHLESRKTGGNAPSNLVTLCTTCHKNLHKGKVTLDGKERGKSLRDAAFMGIMRKTLMARLKEELPIPVQGTYGYITKMRREQNDIKKSHTNDARCISKHPLAEPCSVCYRTKAIRHHNRQTHKANFSKKGIRKRSQMPYLVEGFRLWDKVLYKGQECFVSGRRSSGSFALKKLDGTSISKGVTFKKLRLLEPATNYLIERM

SEQ ID NO: 12110 - protein, 450 aa, Moorena sp.; identical to SEQ ID NO: 2935

SEQ ID NO: 12111 - protein, 426 aa, unidentified
  REGION 1..426: note = Human gut metagenome
MVYVQNRLGQPLMPTKDHRKVRLLLDGGAAVVVKRTPFTIRLTTKSKTYVQPIILGVDAGSKTIGLSASTEAEELFAAEVTPRNDVVDNLSTRREFRRTRRNRKTRYREPRFNNRVGSKHKGWLAPSVEVKIQEHITAVKRVCALLPVGKVVVETAEFDLQLLKAVEAGLPVPQGENYQKGEMLGHYNVRQYVLWRDGYTCRCCGAHGKGVKFHVHHLESRKTGGDAPDNLVTLCDGCHKKFHKGIITPDILKKRKRRSTRDAAFMGIMRKTLMERLRAEFAIQVIETKGYITKYTRVELLKLDKAHTNDALAIAQGRRGFGVEELAAIPQSDYIFHIRPVRHHNRQLHRATILPGGIRKSNQAPRYVRGFRLFDKVSYLGKECFIWGRRSSGSFLLKLLDGTKVKDGVGCKRISLLERSTNYLIS

SEQ ID NO: 12112 - protein, 346 aa, unidentified
  REGION 1..346: note = Human gut metagenome
MPDKVYVISRLGHPLMPCSPAKARHLLDDKKAKVVKRMPFTIRLLYGSTKYIQPIILGVDAGSKTIGLSASTAKEEVFAAEVMPRNDVVENLSTRREFRRARRNRTTRYRKPRSDNRVRSNHERWLAPSVKVKIQEHITSIKRVCTILPISKVVIETAEFDLQLLKAIQEGKPIPEGEDYQKGEMYGSYNVCQYVLWRDNYTCICCGVRGTPKNPVRLHVHHFESRKYGGNAPDNHGTLCDDCHKKFHLGIITDVKLKTRRRQSTRDAAFMGIMRKTLMWRLRTELFIPVAETKGYITKATREKLLVLPKSHTRDALAIAQGRHGFGIKELSLIHISEPTRQAEIS

SEQ ID NO: 12113 - protein, 443 aa, Anoxybacillus sp.; identical to SEQ ID NO: 4041

SEQ ID NO: 12114 - protein, 413 aa, unidentified; identical to SEQ ID NO: 3220
  REGION 1..413: note = Human gut metagenome

SEQ ID NO: 12115 - protein, 451 aa, unidentified; identical to SEQ ID NO: 10609
  REGION 1..451: note = Human gut metagenome

SEQ ID NO: 12116 - protein, 442 aa, unidentified
  REGION 1..442: note = Human gut metagenome
MVYVLNKDGQPLMPTNRHGKVRRLLKTKKAKVIKRCPFTIQLLYDTANHTQDITLGIDAGSKHIGLSATTKNKVLFEADVELRNDISKLLEARYTFRRSRRNRKTRYRKKRFDNRVSSKHKGWLAPSIEHKIQSHFAMVEKVHRILPVTKIVVETASFDTQLLKAQLEVKPIPQGTDYQNGELAGWNIREYIFHRDNYTCQWCRGKSKDPVLVTHHHAYWKGDHTNKPSSLITLCNTCNDSKYHKKEANRLWGWEPKITNSYKHAVFMGVMRWTFYNRLKEIYPNVSMTYGYITKNARIENNLPKTHYVDARCISGHPEAKSNGEYFYYKKVRCHNRQLHKANTLKGGIRKRNQAEYTVKGFRLFDRVEYKNNEYFVFGRRASGFFDIRTLDGQKVNKGSISFKKLKLKETSKTYLIERRMADTGVSLAPLTTEVTSLRQTG

SEQ ID NO: 12117 - protein, 413 aa, unidentified
  REGION 1..413: note = Termite gut metagenome
LVYVLNIEGKPLMPCKEAKARKLIRDKKAKVVQRTPYTIQLKFECENITQPITLGIDSGSKTVGMSVTTEDEELYSSESILRNGIVKLLSERRQYRKNKRNRLRYRQARFNNRVSTKKKGWLAPSVRHKINAHLKLVREVHKILPISKIIVEVASFDIQKIKNPEISGKEYQQGEQLDFWNVREYVLFRDGHKCQGKKGCDNKILNVHHIETRKVGGNSPNNLIALCEQCHKDYHESKLELKLKRGRSFRDATFMGIMRWALYNELKELYENVSITYGYITKSNRIKHSIEKTHATDAFCITGNLNAKRIDTRYTQKFVRKNNRSLYKANLLKGGKRKANKAPYIVHGFRLFDKVLSEGKEWFVFGRRISGYFDLRDLQGNKLNKGSYNCKKIRLLGKGRTLLTEKGKRIPAL

SEQ ID NO: 12118 - protein, 460 aa, unidentified; identical to SEQ ID NO: 8636
  REGION 1..460: note = Human gut metagenome

SEQ ID NO: 12119 - protein, 456 aa, unidentified; identical to SEQ ID NO: 10647
  REGION 1..456: note = Human gut metagenome

SEQ ID NO: 12120 - protein, 411 aa, unidentified; identical to SEQ ID NO: 6901
  REGION 1..411: note = Human gut metagenome

SEQ ID NO: 12121 - protein, 512 aa, unidentified
  REGION 1..512: note = Human gut metagenome
MSTVYVLNKDGKPLMPTTRCGHVRHLLKEQKARVVTSKPFTIQLLYEADDLVQSLYLGIDPGRTNIGVAVVKADGTAVFTAHLETRNKEIPKLMKKRKESRRARRTNGRRCRRQRRAKANGTISKKCVKHDTAQNGSVSKRAKEIGVIKRHLPGCEKDVLCIGIKNKEAKFSNRTRPEGWLTPTANQLLQTHINLVKKIQKFLPISDVVLEINKFAFMRLDNPHVQKWQYQQGPLYQKANLEETVSEMQEHHCLFCKKKIDHYHHVVPQHKNGSNTIDNIIGLCTQHHDLVHKDATWQKRLAKKKTGLNKKYGALSVLNQIIPALTKELSSLFPKHFFVTNGKSTYDYRAAQGVSKDHWLDAYCIACSVLPNDTCDKTINSRVPYELKQFRRHDRRALNNENMSRVYTFNGKMVATNRHKATEQTTDSLEEFRQRQPNDVCNLKVKEHHPTYRNMNRNYPGSVFLVGNQVHVMQGIAGSKDGEATTYKDTNANSIAAGKCKFVAKNSGILFV

SEQ ID NO: 12122 - protein, 465 aa, unidentified
  REGION 1..465: note = Human gut metagenome
MSTCVCVLSNNGERLMPTIRLGKVRHLLKDGKAKIIKHHPFTIQLLYDSETNIQPIEICEDVGYNYIGISVKSQSHEYVSAQYDTLQDEKSCHDACRRMRRTRRNRLRYRQKRFDNRKRDKGWLAPSLKHKKELNVNVIKMYCEVVPITHATVEVGSFDTMLVKAIEEGKATPEGADYQKGPRYNLATLREAVFYRDNYTCQVCGREASEGAILHVHHMFYWKGRHDNSLSELITVCEKCHTPANHQKGGKLYGFGEDIKFANLSGAAFMNTVRWQIVNELYAAFGKPFVTFTYGAMTKEKRIALHLEKSHNNDAYAMGEFHPNCRCTFEHYEKVRRNNRILEKFYDSRYIDIRTGEIATGKELFNGRINRNHKKDSENLHKYRGKRLYKGHRALVRKKVNFNPGDLVSLNGEVLVVHGTHTNKKGAVNVKFKTPAKNGRKSANLKKLKIVKAAGSIHPAWEKVS

SEQ ID NO: 12123 - protein, 413 aa, Sutterella sp.; identical to SEQ ID NO: 7714

SEQ ID NO: 12124 - protein, 420 aa, unidentified
  REGION 1..420: note = metagenome
MVYVLNKDGQPLMPTNRHGKVKHLLKSGKAKVVKRCPFTIRLLYESTTHTQNLTLGVDTGSGTIGTAVSKDNGDIIYMSEIIVRNDITDKIKQRARYRRNRRIRKTRYRKPRWLNRKNSIRLNRFSPTMISKLHSHVKEIEYIKSILPITTLVLETAQFDTHLMKNPSLANPKIRHWGYQKGTNYGFENTKAMVLNRDNYTCRYCKGKHKDSKLEVHHIIFRSQGGSDEESNLITLCHTCHRDLHNGKINLKLNGKAKGTLKYATQMNSIRKQLFKIYPDAIETFGYVTKANRLAIGIDKKHYYDACTIATHGKPFTVKTKLCKKKCVSEGDFQKTKGVRSEQPIVTDKICGFKKFDKVRYFGNDYFIKGRMSTGYAVLMDIDGYKIDFSMMPKGCKTPKLSNCKRITARTSQMLQAVTI

SEQ ID NO: 12125 - protein, 420 aa, unidentified; identical to SEQ ID NO: 7360
  REGION 1..420: note = Human gut metagenome

SEQ ID NO: 12126 - protein, 421 aa, unidentified; identical to SEQ ID NO: 4235
  REGION 1..421: note = Human gut metagenome

SEQ ID NO: 12127 - protein, 512 aa, unidentified; identical to SEQ ID NO: 3720
  REGION 1..512: note = Human gut metagenome

SEQ ID NO: 12128 - protein, 423 aa, unidentified; identical to SEQ ID NO: 3951
  REGION 1..423: note = Human gut metagenome

SEQ ID NO: 12129 - protein, 527 aa, Streptomyces sp.
VLHQQLALEFESADTPRIGDETGLEDRFQAVPGAEAGRGEIPGGSSAAGGVTPNSAVGEEARECHPFVFVLDRHGHPLQPCTPARARKLLTKGRAVVHRHTPFVIRLKDRAASESAVDGVEVGIDPGSKHTGLAVFTAVAGQRRARYALQLGHRGAQIRKKLQQRADYRRGRRSRNLRYRAPRFFNRRRPEGWLAPSLRHRVETTVSWVGRIARWAPVCAVHVERVAFDTHVISAGRPLQGAEYCRGTLHGYEIREYLLAKWGRTCAYCGSKGVPLNIEHIRPRSRGGSDRVSNLAIACIRCNQAKDNQPIEDFLKGKPKLLARILAQAKAPMRDAAAVQSTRWALWRSLSAMLPTYTASGGRTKWNRTRNKLPKSHTLDALAVGKLDTITETVTTVLVAACTGRGVHQRTSPDKHGFPRRTSPRTKRVHGFATGDLVTATVPAGKYAGTHTGRVMVRTSGLFDIRTPHGLAAAVKHTHVRLIQRSDGYAYTRHPESPQPEVTLRRSAPRDQRIRSFPGLTPWGSGK

SEQ ID NO: 12130 - protein, 442 aa, unidentified; identical to SEQ ID NO: 4522
  REGION 1..442: note = metagenome

SEQ ID NO: 12131 - protein, 406 aa, unidentified
  REGION 1..406: note = Human gut metagenome
MRSKPLMPCSPAKARHMLKAGKAVVVRRTPFTIKLTIATGETKQDVTLGVDAGARHVGISATTEKEEVFASEVALRQDITGLLADRLAFRRARRNRKTRYRAPRFNNRVRSKHKGWLAPSVENRIQAHMSRIEAVCRLLPVTKIVIETASFDIQKIRNPEVEGTGYQQGDQLGFWNVREYVLFRDGHVCQHCHGRSRDRILNVHHLESRKTGGDAPNNLITLCETCHKAYHAGKIKLKVKRGQSFRAEAFMGIMRWTLLDRVRKTHPELPVENTYGYLTKHKRIALGLPKTHCADAFCIAGNLKALRRGDFLFQQQTRKHNRQIHRCSILKGGVRKLNQAPFLVKGFRLFDKVRIGGQIGFVFGRRVRGIFNIRRLDKTVIGTDINCKKLSLLETRKTFLTELRKE

SEQ ID NO: 12132 - protein, 482 aa, unidentified
  REGION 1..482: note = Human gut metagenome
LVWNVQAPWDVYPSPTLCGLCLKVLRGRNGDADKKPIPTLTKDENRPSGRTTGLRAEQAEPAGIRKGDTLKVFVLNMRGKPLMPCSPAKARHMLKAGKAVVVRRTPFTIKLTIATGETKQDVTLGVDAGARHVGISATTEKEEIFASEVKLRQDITGLLADRLAFRRARRNRKTRYRSPRFNNRVRSKHKGWLAPSVENRIQAHMSRIEAVCRLLPVTKIVIETASFDIQKIRNPEVEGTGYQQGDQLGFWNVREYVLFRDGHICQHCRGRSKDPILNVHHLESRKTGGDAPNNLITLCETCHKAYHAGKIKLKVKRGQSFRAEAFMGIMRWTLLDRVRKTHPKLPVENTYGYLTKHKRIALGLPKTHCADAFCIAGNLKALRRGDFLFQQQTRKHNRQIHRCSILKGGVRKLNQAPFLVKGFRLFDKVRIGGQIGFVFGRRVRGTFNIRRLDKTVIGTDINCKKLSLLETRKTFLTELRKE

SEQ ID NO: 12133 - protein, 396 aa, unidentified
  REGION 1..396: note = Human gut metagenome
VVRRTPFTIQLTIATGESKQPVSLGVDAGYKHVGLSASIEKAELYASEVELRKDITDLLSARRALRQSRRNRKTRYRAPRFDNRIRTKRKGWLAPSVENRINAHLSRIEAVLRLLPITKITVETASFDMQRLKNPDISGKEYQEGEQLGFWNVREYVLFRDGHVCRHCHGRSKDPVLNVHHLESRRTGSDSPDNLITLCETCHKALHRGEITLKAKRGQSFRAQAFMGIMRREVLNRLKASYPELKVHETYGYLTKHARIANGIVKSHGADAFCIAGNLGAERLGEFFFQKQTRRNNRQIHKLSILKGGIRKRNQAPFEAKGFRLFDKVACQGEEGFIFGRRSSGSFDVRKLDGTRISAGISCKKLRLLEKRRTYLTEIRKEEALPPLPEGRGLRA

SEQ ID NO: 12134 - protein, 406 aa, unidentified; identical to SEQ ID NO: 8999
  REGION 1..406: note = Human gut metagenome

SEQ ID NO: 12135 - protein, 442 aa, unidentified; identical to SEQ ID NO: 2834
  REGION 1..442: note = gut metagenome

SEQ ID NO: 12136 - protein, 509 aa, unidentified
  REGION 1..509: note = Human gut metagenome
MSTCVCVLSNSGERLMPTFRLGKVRRLLKDGKAKIVKHHPFTIQLLYDSKTNTQPIEICEDVGYNYIGISVKSEFHEYVSVQYDTLQDEKEHHDDCRKYRRTRRNRLRYRQARFDNRKRDDGWLAPSLEHKKELNVNVIKMYCEVMPITHAIVEVGSFDTMLVKAIEEGKATPESTDYQKGPRYNLASLREAVFYRDNYTCQVCGRKANEGAILHVHHMFYWKGRHGNSLNELVTVCEKCHTPANHQKGGKLYGFGENIKFANLSGAAFMNTVRWQIVNELYAAFGKPFVTFTYGAMTKEKRIALHLDKSHSNDAYAMGNFHPVDRCAFEHYEKVKRNNRILEKFHDSRYIDIRTGKEAKGKELFNGRISRSHKKDSENLHKYRGKRIRKGYRALRRKKVALNSGDLVSLNGETLIVHGTHTNKKGNVRVEFKVAALNGKKSASLKKLKIVKTSTPMHSAWAKVSQTPKKENAEYLHLLSVPQKYSWSMHSSPPKSQTTIDGVPYAQIL

SEQ ID NO: 12137 - protein, 451 aa, unidentified
  REGION 1..451: note = Human gut metagenome
MSVAVISKTGERLMPTSEYRARKLLKSGKAIKYSYHPFTIQLTERKTGNIQPIELCMDTGYIHIGISVKSEKHEYLTEQIDTLTDERSRHNARRMYRSQRRNRKRYRQPRFNNRKKDKGWIAPSLEHKKNIHVQAISRINNVMPLTDITMEMGNFDTQVLKAKEEGRPLPQGVDYQHGERYSIATLREAVFARDGYKCQCCGRTIKDGAILHVHHIKYRSQGGTNSISNLATVCDKCHTPKNHKPGGKLYGWKPKLPSFKGATFMTTIRWQLYNEAKALFPDIDIHITYGAATKERRRELNIDKSHINDAFVMGQFHPRHRIKAVLYKKKRRNNRCLEKFYDAKYIDSRDGKKRSGQELFNGRINRNHKKNSENLHQYRLQKVTAGKRTVRKQHYSVQPHDIIIYESRKRETTGCHCNGARVMLLPDKKSVSIKKIKIYRYAGGYFKSTFN

SEQ ID NO: 12138 - protein, 408 aa, unidentified; identical to SEQ ID NO: 3192
  REGION 1..408: note = Human gut metagenome

SEQ ID NO: 12139 - protein, 417 aa, unidentified
  REGION 1..417: note = Human gut metagenome
MPCSPAKARLLLKERKAIVKRRTPFTIQLTIATGEAKQPVALGVDSGYKHIGLSATTEKAELYASEVELRQDITDLLSARLALRRSRCSRKTRYRAPRFNNRVASKHKGWLAPSVENRIAAHLSRVEAVMRVLPVTAITVETAAFDTQLLKNPDITGAAYQQGEQLGFWNVREYVLFRDEHVCQHCRGKSKDSILNVHHIESRRTGGDAPNNLITLCETCHKAFHRGKIKLKVRRGKSFKAETFMGIMRWTLFERLKKAHPELNVRNTYGYLTKHKRISYGIAKSHCADAYCIADNLGAKRLEGFFFQKQTRKHNRQIHKLLILKGGLKKKNQAPYEVKGFRLFDKVICKGEEAFIFGRRTSGSFDVRRLDGTRISAGINYKKLRLLEPRTTYLTEFRKEAALPPLHECRGFRAEFL

SEQ ID NO: 12140 - protein, 406 aa, unidentified; identical to SEQ ID NO: 10859
  REGION 1..406: note = Human gut metagenome

SEQ ID NO: 12141 - protein, 424 aa, Xenococcus sp.
MQNYVFVLDTVKNPLNPVHPGQARRLLTEGKAAVFRRYPFTIILKEEAKETQKNVKLKLDPGSQKTGIALLQNNRVIWGAELQHRGQHIKDKLTSRRQLRKGRRGRKTRYRQPRFLNRTRPKGWLPPSLQHRVDTTLTWVKRLIRYCPVDSISVELVKFDLQKQENPEISGVEYQHGTLYGWEVREYLLNKFNRTCQYCGAQNVPFEVDHIKARSKGGSDRVSNLTLACHDCNQSKGNQDIKDFLKEKPDLINRILKQAKTPLKDAAAVNSTRWKLFNSLKEFGFPVETGSGGLTKFNRKQLKVPKTHWQDAACVGQLSKDLIFKTNQPLLIKATGHGTRQRCRPNKFGFPKSHASKAKFFRGFQTGDLVSASILKGKFTGQYLGRIAIRFRPSFVLQLPDKKFDVHPKYLTHVHKNDGYNYVY

SEQ ID NO: 12142 - protein, 428 aa, unidentified
  REGION 1..428: note = Human gut metagenome
LKVFVLNMRGQPLMPCSPAKARHLLKAGKAAVRRRTPFTIQLRIATGETKQSVTLGVDAGAKHVGLSATTEKEEVFASEVELRQDITGLLAARLSLRRDRRHRKTRYRAPRFLNRVRSKHKGWLAPSVDNRIQAHMSRIDAVCRLLPVTKIVIETASFDIQKIKDPSVEGTDYQQGNQLGFWNVREYVLFRDGHVCQHCHGRSKDKILNVHHLESRQTGGDAPNNLITLCETCHKAYHAGKIKLKVKRGQSFRAEAFMGIMRWTLLDRVRKAHPGLPVENTYGYLTKHTRITHGLPKTHCVDAYCIAGNLKAVRRGVYLHQRQMRKHNRQIHKFTVLSKRLEDGTKIGYRKLNQSPYLVHGFRLFDKVRCLGQIGFIFGRRSSGYFDVRRLDGVKLSPSISWRKLTLLEKRSTYLTELRKQDGASSPV

SEQ ID NO: 12143 - protein, 442 aa, Lactobacillus sp.
MKHENANRVFLLNKDGKPLMPCRPRKARLLLKSGKAFVVKKYPFTIQLKYGSYGYKQKVSLGVDTGQRHIGFAVVSQDKVLHQSEVELRQDVHTNLYTRKIYRRGRRTRKTRYRQARFLNRVHGKRDGLWLPPSVKSKVSHNIAWIKRYLAVLPNPDLHIEVGKFDMAKIVNPDISGKQYQEGSLKDWKNYEYYVLARDEYTCQLCYKHGEGVKLVVHHIVYRSQGGTDRVDNLITLCTNCHTTKNHQPGGKLYKWMKAKKKVTKQLKGATFMNILHKRIMTTFPEASFQYGSQTYVDRKNLLLPKGHFMDAIAISGIKPVGQMPETVTMISQFRKKKRSLHEATARKGRKQPNTSSKRNEKNTKYACGLWLNDYVRVIGNHVKGYVKGLKSNGYYVYLTDGLGNYVLNNGKNYINGQQCRLIMHNGNWQKAEQKLSLYEFK

SEQ ID NO: 12144 - protein, 443 aa, Anoxybacillus sp.
MVEENMTCFMQRKGENPMVFVLDTNKRPLAPCHEAVARKLLKQGKAAIYRRFPFTIILKKSVDESEIKATYRLKIDYGSRHTGLAILRGQEVVWLGQLDHRTDIKERMDKRRAFRRARRNRKTRYRKPRFLNRRRKDGWLPPSLESRVQNIQTWVNRLKKLCPIGYISYENAKFDTQLMRNPEINGVEYQQGTLQGYEVREYLLEKFGRKCCYCGKENVPLEVEHIIPKSRGGTDRVDNLCLACHDCNQRKGSKTAEEFGYPHIQKQVKETLKDTSAINSTRWKVYEVLKQSGCEVECGTGARTKMNRIRLDLPKTHYFDACCVGESTPNHLYFKTKEVLFIRAKGRGSRSRTNLDRYGFPRGYLARQKFFFGFQTGDMVKAVVPRGKYQGVWFGEVACRKTGSFDIKGKDGKRIAQGINYRYVQVIQRFDGYAYGKGVAELA

SEQ ID NO: 12145 - protein, 689 aa, Acrocarpospora sp.
MLRDLAERATVVGAGSGRLVLALDVRHPVGGPESSESVRYARPLRQPRVICHIGQHMTRPYSDGRPPNVSDPCPVGTTFTEEYGQPSGTSTGTCSLSADKAPDLPAEFQPDSRGDDPRQRPRLEGRSLRCGSCCIDWLHVDQTSHHHWRCSQMASLNTRSQTRQWMLPQSAALESAPAENAHGVSTERGSDVADYSVAPGVQHGRGEIGQSAPAVRRHPKAGSPVAGDRGGNAPVVFVLDKHGTPVQPTSPARARRLLDSGRAVVARHTPFVIRLKDRIIAESTVQGVQVGIDPGSKHTGIAVFTGDGATRTGKYSVRLDHRGGLIRDRLASRANYRRRRRSANLRYRAPRFANRAKPKGWLAPSLRHRVDTTMSWVSRLTRWAPVRVIHFERVSFDTHALSAGRPLDGVEYQQGTLAGYEVRQYLLEKWGRACVYCGRENLPLQVDHLHPRVRGGSDWVSNLTLACRRCNRAKNATPVEEFLQDRPALLARVVKKAKLPLRDAAAVNATRWALWRALEATGLPVVTGSGGRTKWNRSRTGAPKSHTLDALHVGELDTVTGWPSQVLLVKATGRGRYCRTRTDAYGFPRLRLPRIKQVRGFVTGDLVRANVPKGKNAGVHTGRVAVRSTGRFNITTVHGTVQGINHRHVRLLQRADGYGYTTTKESTVETSSGYARASDGLPTPAAAAA

SEQ ID NO: 12146 - protein, 326 aa, Moorena sp.
MDTGSKHIGSAAVANGQVVYQTQIEIRNDVSGKMEQRAMYRRTRRSRKTRYRPARFDNRGKVGKIAPSIKSKVDSHLREKKFVESILPISEWKVELASFDIHKISNPSVSKLQSVKLHVHHIKFRSQGGSDTPGNLITLCEDCHDSLHAGKLGDRVHEKLTKKTASKTKHATEMGIVKSQLKKSEWVFTETFGYETKFKRETCLNLPKTHFFDAIAICLGEGEIVNGSSFVYLKRHIANGDFQQTSGRRSEEKIPTGKIQGFKKFDKVLWEGKEFFIKGRMSTGYAILMGIDNKKVTLKPIPKFLFMKRLTAIKSCLSMSRGLENS

SEQ ID NO: 12147 - protein, 493 aa, unidentified; identical to SEQ ID NO: 2644
  REGION 1..493: note = Human gut metagenome

SEQ ID NO: 12148 - protein, 445 aa, Scytonema sp.; identical to SEQ ID NO: 2723

SEQ ID NO: 12149 - protein, 442 aa, unidentified; identical to SEQ ID NO: 3218
  REGION 1..442: note = Human gut metagenome

SEQ ID NO: 12150 - protein, 413 aa, unidentified; identical to SEQ ID NO: 3616
  REGION 1..413: note = Human gut metagenome

SEQ ID NO: 12151 - protein, 412 aa, unidentified; identical to SEQ ID NO: 8978
  REGION 1..412: note = Human gut metagenome

SEQ ID NO: 12152 - protein, 514 aa, unidentified
  REGION 1..514: note = Human gut metagenome
MSTVYVLNKDGKPLMPTTRCGHVRHLLKEQKARVVTSKPFTIQLLYEADDLVQSLYLGIDPGRTNIGVAVVKADGTAVFTAHLETRNKEIPKLMKKRKESRRARRTNGRRCRRQRRAKANDTISKKCVKQDTAQSGSASKRAKKIGVIKRHLPGCEKGVLCIGIKNKEAKFSNRTRPEGWLTPTANQLLQTHINLVKKIRKFLPISDVVLEINKFAFMQLDNPNIQKWQYQQGPLYQKASLEEAVSEMQEHHCLFCKKPIAHYHHVVPQSENGSDTIGNIIGLCTKHHDLVHKDTAWQKKLAKKKTGLNKKYGALSVLNQIIPALTKGLGSRFQGYFYVTTGKSTYDYREVHGVSKDHWLDAYCIACSVLPNDVCDSDINNRVPYELKQFRRHDRRALHKANINRVYTLNGKSVATNRHKAIKQTTDSLEEFRQCQPDDVCKLKVKEHHPEYRNPERNFPGCVFLVGKHTHVMQGTSGSHNGQADGYYDTNGNSYSSGKCKFVAKNEGIVFTLN

SEQ ID NO: 12153 - protein, 456 aa, Moorena sp.
MAVLVLDRHKNPLMPCSEKRARKLLERGRARIHRLMPFSIRLVDRTVNESMLQPVKIKLDPGSKTTGIAVVRHSETMDDATGEIHVTVHVLNLFELHHRGQQISESLTARRQMRRRRRGNLRYRKPRFLNCGNKGKGWLAPSLQHRVDTTGAWVHRLQRLAPVTGIAQELVRFDLQQMENPEISGVEYQQGTLAGYETREYLLNKWNRECAYCGTRNVPLQIEHITPKAKGGSPRISNLTLACRSCNQQKGAQEINVFLAKDPQRLARIQAQAKRPLKDAAAVNTTRWVLFNTLKITGLPVTTGSGGLTKFNRTRLDIPKTHALDAACVGDMDEIRDWNKPTLAIKATGRGSYQRTRLNAYGFPRGYLTRQKRIKGFQTGDRVKAEVTQGKKIGSYLGRVAVRASGSFNLQTAQGVIRGMGYRYCKVIQRADGYGYSQPLNPKEAELRSARYPSPA

SEQ ID NO: 12154 - protein, 442 aa, unidentified; identical to SEQ ID NO: 2834
  REGION 1..442: note = Human gut metagenome

SEQ ID NO: 12155 - protein, 515 aa, Streptomyces sp.; identical to SEQ ID NO: 6191

SEQ ID NO: 12156 - protein, 437 aa, Moorena sp.
  SITE 437: note = misc_feature - Xaa can be any naturally occurring amino acid
MNKVFVLDTTKQPLAPCHPAKARKLLRDGQAALYRAYPFTIILLRAVEEPVAPPLRLKIDPGSKVSGLAIVHDASGEIVWAAEVAHRGEPIRAALVQRASVRGNRRSRKTRYRKPRFLNRRRRAGWLPPSVASRVENIMIWVRRLCQLCPIQALALELARFDTQALQNPEISGVEYQQGELAGYEVKQYVLEKWGRQCAYCAATQVPLEIDHIVARDRGGSHRVSNLTLACVPCNQKKSNHNVRDFLAHDPARLARIVAQAKTPLKDAAVVNSTRWALYEALLALGLPLEVGTGGRTKWNRSMRGLPKTHWLDAACVGASTPEVLWTSGTLRPLQIRATGHGSRQMCAMDKYGFPRTRAKQAKRVQGFQTGDIVKAVVPSGKPTVGALGEAGHLCRARRRARFRQFQYPHRQWFGGGHQLSLLPPSPPRRWLCLFLX

SEQ ID NO: 12157 - protein, 456 aa, Halomonas sp.; identical to SEQ ID NO: 9152

SEQ ID NO: 12158 - protein, 475 aa, Blautia sp.; identical to SEQ ID NO: 4128

SEQ ID NO: 12159 - protein, 218 aa, unidentified
  REGION 1..218: note = metagenome
MSVAVMSKTGMRLMPTSEYRARKLLKSKKATVYRYNPFTIQLTERETGDVQTVELCMDTGYLHIGTSVKSEKHEYLGVQIDTLTDEKQKHDACRMYRRQRRSRKRYRQSRFNNRKRSDGWIAPSLEHKKDIHIQTISRICNAMPITNITLEMGNFDTQVLKALEENRPLPQGTDYQHGERYGIATLREAVFARDKYTCQCCRKTIADGAILHVHHIIN

SEQ ID NO: 12160 - protein, 414 aa, unidentified
  REGION 1..414: note = Human gut metagenome
MPCSPAKARLLLKEKKAIVVRRTPFTIQLTIATGETKQPVSLGVDAGYKHVGLSASTEKAELYASEVELRQDITDLLSARRALRQSRRNRKTRYRAPRFDNRIRTKRKGWLAPSVENRINAHLSRIEAVLRLLPVTKITVETASFDLQLLKNPDISGKEYQEGEQLGFWNIREYVLCRDGHVCQHCYGRSKDPVLNVHHLESRRTGGDSPGNLITLCETCHKALHRGEITLKAKRGQSFRAEAFMGIMRWEVLNRLKASHPELEVNNTYGYRTKHARIANDIAKSHCADAFCIAGNLGAERLGEFFFQKQTRRNNRQIHKLSILKGGIRKRNQAPFEVNGFRLFDKVACKGEEGFIFGRRSSGFFDVRKLDGTRISAGISYKKLHLLEKRRTYLTEIRKEEALPPLPEGRGLRA

SEQ ID NO: 12161 - protein, 200 aa, unidentified
  REGION 1..200: note = Human gut metagenome
LGKDSHSLRRGQFCQSLTVTTTRKETTSMYVYVLNQHGEPLMPCSPRKARTMLRDHKATVVRRTPFTIRLLHGCSGYTQRITLGVDAGSKFIGLSACTESKELFAAEVKPRNDVVDLLSTRRELRRSRRNRKTRYRVARFDNRVHSKHKGWLAPSVEVKIQEHITAIKRTCAILPISMVIVETAEFDTQRLKAMLEGKPL

SEQ ID NO: 12162 - protein, 544 aa, unidentified
  REGION 1..544: note = Human gut metagenome
MKQKKQKVMVYILNKKGKPLMPTTRCGHVRKLLDSKKAVVVNSNPFTIRLKYDTPNGVQDVFAGIDSGRENIGSGASNEDGDCLYLGELRTSNKSIKMKMTERVGFRRERRKHDRQNKQRKARKDHTEIQNGNADICRTTISCKSVQISYPAAEKSVTHKIIRGKEGKFANRHRDGDWITPSARQLVQMHMNDLKSMCKILPISHVTLERVAFDFQKLENENIKVWEYGKGKLYGYDSPEEYIHDVQNGKCLVCGKPHIDYLHHIIPRSKGGSDKVSNIAGLCYDCHYGPMGVHNCQNTQDRLPELKSEANKQYKVSLLNSVMPVLIEEMDKFCKANSIMFSICEGHDTAKVRDMYDLQKDHCLDGFAISLVGRNVKSVDVMPDRIHQKQRYKKKSKNIIQKRNCREYYDDKKLVAVNRHKGTDQKADSLEEYMNTYAETHTTDECKKHFDSLVVKPARRTYTFHKEWRICPFHIGDKVRYEKKNKIKGNTKVDTFICEGIRFVKDENKAEVKHNKTKSKKMKFCRVLESGCTPYVDYRKLALM

SEQ ID NO: 12163 - protein, 493 aa, unidentified
  REGION 1..493: note = Human gut metagenome
MAAVYVISASGKPLMPTTRCGHVRGLLNAGKARVVEREPFTIQLKYETPDVTQPLYLGIDPGRTNVGSAVVREDGECVFTAQLTTRNKDVPKLMKARKQFRMAHRRLKRRCKRQRRAKAAETLSQKGEFQRLLPGYEEPIICKGIRNKEARFNNRQRPAGWLTPTANHLLLTHLNMVKKLQKLLPITDVVLEVNRFAFMAMENPSIRRWQYQQGPLYGKGSVEDAVYAQQDGHCLFCGKPIAHYHHVVPQHKNGSETLENRVGLCNEHHDLVHKDRAWDAKMKETKAGLNKKYHALSVLNQIIPALTEQLTAMFPQHAFVTTGKDTADFREDYGIAKEHHLDAYCIACSVLAEPTKVAAPTGKPHRLMQFRRHDRQGCHKENIKRVYLSEGKAVATNRHKAIEQKDDSLEEFRKTHTQQEVSALTVKDHQPVYKDMRRFMPGGVFLFNGKVHTLQRSHGRYKEMPFYYIDTDGSKNHAKGCIFLQQNCGMRWA

SEQ ID NO: 12164 - protein, 355 aa, unidentified
  REGION 1..355: note = Human gut metagenome
LSASTEKRELYREEFTPRNDVVELLSTRRQNRRSRRNRKTRYHAPRFDNRVHSKHKGWLAPSVEVKIQEHITVIKRICRILPITLVRVETAEFDTQRLKAMLKGKPLPVGTDYQLGEMYDEYNVRQYVLKRDNYTCQCCGAHPTEKKPIRLHVHHIESRHVGGNAPNNLITLCVACHKALHEGKITLDKGKKRGKPLRDAAFMGIMRNTLLARLKDELNIPVKQTYGYITKLLREKNKIPKSHVNDARCIAKAPNAKPCDTMLYTRALRHHNRQIHKAKILNGGIRKKNQAPYLVKGFRLWDKVRYNGEECFITGRRSSGYFALKKYDGTVISNSASYKKLMLLEAATNYITERS

SEQ ID NO: 12165 - protein, 436 aa, unidentified
  REGION 1..436: note = Human oral metagenome
MTKTLTKQTTQACVLDQQGKPLMPTTRLGKVYRLLKTQKAHIVSYEPFTIQLDYEPDTHIIQPMTLGVDSGAIHSGYSVANEHREYYNAEVIARDDISKRLSDRRMYRQNRRSRKIRHRKPRFNNRKNKKKGWLPPSLEQKVAVQLNEIDHLHRYFPIKTIIVEVAEFDIQKIKNPDISGVEYQQGTLQGYNIRNYLLEKHGRKCFYCGKSVSKFEIEHMLPKSRGGSNRIDNLTLSCHDCNQKKDTLTAEEFIRQTLPAKKAAAKLKQLPNEKRLFKYMAHMNATRWALYNAIDKKYANVKMTYGYITKYNRIQADLPKAHHIDAKCITSFVTVPSMKQTIVKIKMRRHNRQLHRATFSKGHVRKAACLPTVTFGFQLYDLVCFNNHHYYIKGRRSSGYFKLTSVESLKDEERSYKKLTLLAHTNAYLINHYADL

SEQ ID NO: 12166 - protein, 512 aa, unidentified; identical to SEQ ID NO: 8071
  REGION 1..512: note = Human gut metagenome

SEQ ID NO: 12167 - protein, 451 aa, unidentified
  REGION 1..451: note = Human gut metagenome
MSVAVISKTGERLMPTSEYRARKLLKSGKAIKYSYHPFTIQLIEREAGDIQPIELCMDTGYIHIGISVKSEKHEYLAEQIDTLTDERCRHDACRMYRRQRRGRRRYRQVRFNNRKRDQGWIAPSLEHKKKIHIQAISRINKVMPITDITLEMGNFDTQVLKAKEEDKPLPQGADYQHGGRYGIATLREAVFSRDGYKCQCCGRTIKDGAIFHVHHIKYRSQGGTNSMLNLATVCDKCHTPKNHKPGGKLYDWKPKLSSFKGATFMTTIRWQLYSEVKALFSDIDIYITYGAATKERRRELDIDKSHVNDAFVMGQFHPKHRIKAVLYKKKRRNNRCLEKFYDTKYIDSRDGKKRSGQELFNGRINRNHKKDSENLRQYRLQKVTAGKRTVRKQHYKIQPHDIVIYENRKRETAGCHCNGTRMILLHDKKSASIKKVKIYRYAGGYFKSAFN

SEQ ID NO: 12168 - protein, 458 aa, Lactobacillus sp.; identical to SEQ ID NO: 5912

SEQ ID NO: 12169 - protein, 431 aa, unidentified
  REGION 1..431: note = Human gut metagenome
MPNKVYIINKHGRPLMPCSPAKARHLLDAGKAKVKKRTPFTIQLVYGSSGYTQEVILGVDAGSKTIGMSVSTTKEELLSAEVKPRNDVVDLLSTRREFRRARRNRKTRYRKPRFDNRVRSKHKGWLAPSVEVKIQEHITSIKRVCRILPVSKVVIETAEFDLQLLKAIEESKPVPQGEDYQQGEMYGHYNVRQYVLWRDGYTCQCCGAHATKKKEVRLHVHHLESRKVDGDAPDNQVTLCESCHEKLHKGLIAEKDFKKRKRKSTRDATFMGIMRKTLMQRLCSELPIPVIETRGYITKATREKLLVLPKSHTNDALAIAQGKQGFNVGYLPGIVQINKIYTIRPVRHHNRQLHKATILKGGIRKSNQTEKYVFGYRLFDKVQFNGQDCFIWGRRTTGIFTIKTINGKMIKDGISFKKLKPVEKSTGYLIA

SEQ ID NO: 12170 - protein, 423 aa, unidentified
  REGION 1..423: note = Biofilm metagenome
MKVAVLDTNKQPLAPTSPRRARLLLKNGKAAIFRRYPFTVILKREVVNPSLPDLKLKIDPGSKISGIAIVNQASGEVVFAAELHHRGHVIRASLDSRRSLRHSRRQRKTRYRKPRFDNRMRPEGWLPPSLESRIENVYTWSQRLRRAYPITGLAMELVKFDMQLMENPEINGIEYQQGELAGFELREYVLVKFNHTCIYVGAGSPCDEILNVDHVIPQSKGGSNRVSNLVLSCRKHNEEKGNLSLEEYGKKRGIDFSRIKAQARAPLKDAAAVSATRWALFNRLKMTGLPVETGSGGLTKFNRVQRGLPKTHWIDAACVGASTPLRINAECVRPLSIKATGHGSRQMCQTDKYGFPIRYRTRNKTFTGFKTGDIVKAGIAKKTFAQGYAGRVTIRQRPSFILNGSDVHPKYLKRVHRSDGFAY

SEQ ID NO: 12171 - protein, 415 aa, Bacillus sp.; identical to SEQ ID NO: 2431

SEQ ID NO: 12172 - protein, 324 aa, Enterococcus sp.
VTLREDKNNSIKKKMDQRRMYRRNRRSCKTRYRKARFNNRKNSKRKERFSPTMTSKLHSHQKEIEFIKSILPIAKLIFETGTFDPRLMKNPSLANPKVKPWGYQQGPNYGFENTKARVLVRDNHTCQICNKKPKNERLEVHHIVFRSQGGSDEENNLVTLCHSCHVELHKGLIHPNFEGSLKSALKYATQMNSIRIQLLKLYPDAIETFGYVTKANRLNLGLPKEHYVDAAVIATAGNQVKFACNLMIKRCIPKGDFQRTKGVRSEKTIPKGKIDGFKKYDKVRYFGNEYFIKGRRTSGYFTLMDIYGQTISFNVIQAEVAHPL

SEQ ID NO: 12173 - protein, 408 aa, unidentified
  REGION 1..408: note = Human gut metagenome
RTNGRRCRRQRRAKANGTLSKKCVKQTTAQNGSVSKRAKKIGVIKRHLPGCEKEALCIGIKNKEAKFNNRTRPEGWLTPTANQLLQTHINLVKKIQKFLPISDVVLEVNKFAFMRLDNPNIQKWQYQQGPLYQKANLEEAVSEMQEHHCLFCKKPIAHYHHVVPQSENGSDTIDNIVGLCTKHHDLVHKETAWQEKLAKKKTGLNKKYGALSVLNQIILALTKGLSFLFPKHFFVTTGKNTYDYRTAHSVSKDHWLDAYCIACSVLPNDVCDSSINSHVPYELKQFRRHDRRALHKENMSRVYTLNGKKVATNRHKAIEQTTDSLEEFRQRQPNDVYKLKVKEHHPEYRNPKRNFPGCVFLVGKRTHVMQGSSGSHNGKADGYYDTNGNSYSSGKCKFVAKNEGIVFA

SEQ ID NO: 12174 - protein, 434 aa, Selenomonas sp.
MSFLATWARRKILLQRKVAEMLTTKKYAFVLDAEGKRFDPTIEQNAWRLVRQHKARLVSKFPMVIQLNKVVDNPNNDEIRCGIDDGANHVGLALVQKCQNKNKILFKGTIEQRKDVKHLLTIRRGYRRYHRYHKQHRPARFLNRASSRRRGRLMPSIIQRKQAMLRVIDRLRQWIRIDGYWLEDVKIDIRALTDGYRPYRWQYHKSNRLDNNLRLATIYRDGHKCMECGKTKTHFEVHHITPRETGGANTISNLITLCPACHARTFGRELQFANRYYVMIGSAVHVEGLDDAQRVMQGKHWFREQLQQRGTLSLTTGADTANKREDWNIVKTHANDAVCITDLEPDSIDIENWTIKPMRRKNKAGVDEVCGFHHRDYVTYTYRNGEVHTGYVTAMYPDKGQLNLQSPTKHCKRVNALKTRLLWRFNKIYWFKCA

SEQ ID NO: 12175 - protein, 420 aa, unidentified; identical to SEQ ID NO: 2681
  REGION 1..420: note = Human gut metagenome

SEQ ID NO: 12176 - protein, 414 aa, unidentified
  REGION 1..414: note = Mouse gut metagenome
MPCSQRKARILLKEDKARIIGYKPFAIQLTVPTGESTQEVHLGVDTGAKHIGIAATSENKVLAKGEIELRDDIHKNMQTRSALRRDRRNRNTRYREARFLNRKRKDGWLPPTVQSKLDATFMWIDKFCNLLPSPILHIEVGKFDIQKMMNPDIKNKEYQNGRCAGYYDVRYFVFARDNYTCQVCKKLNKILHTHHLVYKSKGGSDRADNLITVCTDCHSSENHKESGILYNWMFKHKKVKQYKEATFMNIIRKRTFRKYPNSVITYGSETTPHRKELVLEKTHYNDAIAISKIENIKENPQEYFYIKQFRKKKRSLHESIPTRGRRKEKNVNAERRNKNSPYRAGWFMNDMVSFQNKVGWIYGFSGGESGKECVLRDINGEIIRDSKRSKNNPNVKFSSLKFICHNNNWQYAIL

SEQ ID NO: 12177 - protein, 427 aa, Enterococcus sp.; identical to SEQ ID NO: 2410

SEQ ID NO: 12178 - protein, 418 aa, unidentified; identical to SEQ ID NO: 5294
  REGION 1..418: note = Human gut metagenome

SEQ ID NO: 12179 - protein, 425 aa, Mastigocladopsis sp.
MQTNYVFLVDTNKQPLNPIHPARARELLNKNKAAIYRQFPFTLVLHKAIDNPLVRLLTLKLDPGSKTTGIALLDGENVIWAAELQHRGWSIKDALNSRRSLRSSRRSRKTRYRMARFDNRKRPEGWLPPSLMHRVLTVETWVKRLCRYAPIAQTVMELVKFDTQKMQNPEIDGIEYQQGQLAGYEVRQYLLEKWGRKCVYCDKEGVPLQIEHIHPKSKGGSNRVSNLALSCKRCNLKKGTQLVDEFLKKDAKRLEKIKQQAKKPLKDAAAVNATRWTLFHTLKGILPTTTGTGAQTKYNRTLFQLEKQHWIDAACIGDIKAIKLLTLQPLLIKANGWGTRQMAGTNKYGFPIRHRTRQSLHFGFQTGDIVKAVVLSGKKVGQYVGRVLCRAKGSFDIVTKTGRVGDINHRFCKPIHKKDGYSYAF

SEQ ID NO: 12180 - protein, 442 aa, unidentified; identical to SEQ ID NO: 3234
  REGION 1..442: note = Human gut metagenome

SEQ ID NO: 12181 - protein, 465 aa, Burkholderia sp.; identical to SEQ ID NO: 5838

SEQ ID NO: 12182 - protein, 419 aa, Moorena sp.; identical to SEQ ID NO: 2999

SEQ ID NO: 12183 - protein, 414 aa, unidentified; identical to SEQ ID NO: 2588
  REGION 1..414: note = Human gut metagenome

SEQ ID NO: 12184 - protein, 413 aa, unidentified; identical to SEQ ID NO: 2636
  REGION 1..413: note = Human gut metagenome

SEQ ID NO: 12185 - protein, 500 aa, Moorena sp.
MVYVLSASGKPLMPTEDHRQVRLLLKRKKAVVVRRTPFTIQLVNRVHNYTQPVSLGIDAGSKHIGVSATTEDRVLYEADAELRNDIVELISTRREARHARRNRKTRYRAPRFDNRRRSEGWLAPSVKQKVDCHIKVIADVHKILPISKMIIETASFDTQLLKATLEGKPLPQGTDYQSGEQLGFWNTREYVLFRDNHECQCCHGRSKDPVLNVHHIESRKTGGDSPDNLITLCETCHTGYHKGTVKLPAGIKRGMKFNDAAFMGIMRWSVYNRLKDLYPYVSLTYGYKTKNTRIRAGLPKEHCIDARCISGNPSALSDGIVYFQRKMRCHNRQIHKFKVNRGGLRKLNQAPYLVKGFRLWDRVLYNSEKCFIQGRRSSGFFQLKKLDGTLVSASASCKKLRLVETGKHFIMERRRAIPPRPAEDGASLPINDEKREIMAIDINQIKGFQLTHTIKGRSTTTTFAKKDFSLFKEWVNICKENGYEYDVSLIKEDGSIEPIH

SEQ ID NO: 12186 - protein, 406 aa, unidentified
  REGION 1..406: note = Human gut metagenome
MVYVQDIDGKPLMPTTRHGKVRRLLKSNKAVVVNLCPFTIRLTYISDSYKQEIVLGVDAGTKHVGLSATTKSKELYSSEVILRNDIVDLLSTRRELRRTRRNRLRYRKPRFNNRVKNKRPGWIAPSVRYKVDAHIRVIDNVCSILPISRIVIEVAQFDTQKINNPEISGKEYQEGDQLGFWNVREYVLARDGHKCQYCKGKSKDSILNVHHIESRKTGGNSPSNLITLCETCHKEYHKGNIKLKVKRGTSFRDAAAMGIMKWKLLDKLKSLYPNVSMTFGYITKHNRIKHEIKKSHISDAFVISKNFEAKRPGYYFKEKLVRRHNRQIHKMKILKGGKKKMNQAPFKVFGFRLFDKVEFQGNEYFIYARRLSGYFNIRDINSENKKDVTYKKLTHIGHGLISVETG

SEQ ID NO: 12187 - protein, 411 aa, unidentified
  REGION 1..411: note = Human gut metagenome
MVYVQDIDGKPMMPTTRNGKVRRLLKDNKAVVVNTCPFTIKLTYKTSDYKQGIVLGVDAGTKHVGLSATTKSKELYSGEVILRNDIVELLSTRRESRRTRRNRLRYRKPRFENRVKSKRLGWVAPSVRHRIDAHIRIINNVCSILPVSRVIVEVAQFDTQKIKNPEISGKEYQEGDQLGFWNVREYVLARDGHKCQHCKGKSKDPILNIHHIESRKTGGDSPSNLITLCETCHKEFHKGNIKLKVKRGKSLRDAAVMGIMKWRLYDKLKSLYPNVRMTFGYITKHDRINHGIEKSHVSDAFVISRNFDSERLGYYYKLKLVRRHNRQIHKMKIPKGGKKRMNQSPFKVFGFKLFDKVMFQGEERFIYARRLSGQFKIKDIDGNNERNISYKKLRYVSHGLISIKTNLFLSQ

SEQ ID NO: 12188 - protein, 417 aa, unidentified
  REGION 1..417: note = Human gut metagenome
MPCSPAKARLLLKEKKAIVKRRTPFTIQLTIATGEAKQPVALGVDSGYKHIGLSATTEKAELYASEVELRQDITDLLSARLALRRSRRSRKTRYRAPRFDNRVASKRKGWLAPSVENRIAAHMSRVEAVMRVLPVTAITVETAAFDTQLLKNPDIAGEAYQQGEQLGFWNVREYVLFRDGHVCQHCRGKSKDPILNVHHIESRRTGGDAPNNLITLCETCHKAFHRGEIKLKVKRGKSFKAETFMGIMRWTLFERLKKAHPELRVRNTYGYLTKHKRISHGIAKSHCADAYCIADNLGAKRLEGFFFQKQTRKHNRQIHKLSILKGGLRKKNQAPYEVKGFRLFDKVICKGEEAFIFGRRTSGSFDVRRLDGTRISAGINYKKLRLLEPRTTYLTEFRKEAALPPLHKCRGFRAEFL

SEQ ID NO: 12189 - protein, 465 aa, unidentified
  REGION 1..465: note = Human gut metagenome
MSTCVCVLSNNGERLMPTIRLGKVRHLLKDGKAKIIKHHPFTIQLLYDSKTNTQPIEICEDVGYNYIGISVKSQSHEYVSAQYDTLQDEKACHDSCRKLRRTRRNRLRYRKPRFDNRKRGEGWLAPSLEHKKELNVNVIKMYCEVMPITHAIVEVGSFDTMLVKAIEEGKATPESADYQKGPRYKLATLREAVFYRDNYTCQVCGRKVADGAILHMHHMFYWKGRHGDSLNELLTVCEKCHTPANHQKGGKLYGFGENVKFADLSGAAFMNTVRWQIVNELYAAFGKDFVTVTYGAMTKEKRIALRLEKSHNNDAYAMGEFHPNCRCTFEHYEKVRRNNRILEKFYDSRYIDIRTGEIATGKELFNGRINRNHKKDSENLHRYRGKRTYAGHRALLRKKVNLNPGDLVSLNGEILVVHGTHTKKNGSVNVEFKVPSKSGKKSASLKKLEIIKTSNSMRSAWKKVS

SEQ ID NO: 12190 - protein, 456 aa, unidentified
  REGION 1..456: note = Human gut metagenome
MTNIYILDINGKPLMPCHNGAFVRCRLKNKEAKVVKRKPFTVQLMYEVKNNYKQDIYLGVDAGYKYIGFSASTGNQELFSGELEQDCGMVERNKERRMYRRQRRSRLRYRKARFNNRKAAKPQGWTAPSLQRKRDTHLRFIMMLSSIMPITDINVEIGLFDPALMKATAEGRTIKGTDYQHGEAEGFENMKSYIRYRDSYTCQNPNCKCHKMKKEDREKLKLHVHHIGYYKHDRSSRPGNLITLCELSHTPETHQPGNLLYGWKPKMKSLRETAFMNTVHKEIVDTLKAVYPDKTVRYTYGYKTNLTRRDWHVPKSHHDDAFCIAGQYSLKRADTVYFNQQRRNNRSLEIFYDAKYIDSRDGKRKTGKELYCGRNTRNKNFNKENLHQYRSKKVSKGKRNIRKQRHKYQPNDIVVFEGQKYKIRGSHCKGSRVILDTKKSVSVKKIHILKHCSGIC

SEQ ID NO: 12191 - protein, 460 aa, unidentified; identical to SEQ ID NO: 7734
  REGION 1..460: note = Mouse gut metagenome

SEQ ID NO: 12192 - protein, 470 aa, Blautia sp.; identical to SEQ ID NO: 2925

SEQ ID NO: 12193 - protein, 456 aa, Halomonas sp.
MAVFVLGKNKQPLMPCSEKRARLLLERGRAVVVNLTPFMIRLRDRCQRDCTLQPTLLGIDPGSKETGLTLMRLEDNATDEQAPAIRHVLCLFQLVHRGFQIRQALEQRAGFRRRRRSKNLRHRKPRFDNRTRKKGWLPPSLQHRVDTTMAWVGKLCRWAPVTHLSMELVRFDLQKMENPEISGIEYQQGTLLGYEVREYLLEKWGRKCAYCGTGDTPLEIEHVVAKSRNGSSRVANLTIACHDCNQAKDSQWLADFFATNKGLKKRLKANGLSAEVRLERVQRQLKLPLRDATAVNATRWALFGAMKSTGLPVAVGSGGRTKYNRQRLGIPKTHALDAACVGKFDTLKGWRVPTQVIKAMGRGRYQRTRLDKFGFPRGYLMRQKQVKGFQTGDRVRAIVPAGKKAGTHTGRVAIRKTGSFNIQTEQGAVQGISWPYCTLLQRGDGYGYHQIPTTQH

SEQ ID NO: 12194 - protein, 566 aa, Parasutterella sp.; identical to SEQ ID NO: 11555
  SITE 122: note = misc_feature - Xaa can be any naturally occurring amino acid

SEQ ID NO: 12195 - protein, 419 aa, Moorena sp.; identical to SEQ ID NO: 3927

SEQ ID NO: 12196 - protein, 406 aa, unidentified; identical to SEQ ID NO: 7406
  REGION 1..406: note = Human gut metagenome

SEQ ID NO: 12197 - protein, 439 aa, Campylobacter sp.; identical to SEQ ID NO: 4429

SEQ ID NO: 12198 - protein, 417 aa, unidentified
  REGION 1..417: note = Human gut metagenome
MPCSPAKARLLLKEKKAIVKRRTPFTIQLTIATGEAKQPVALGVDSGYKHIGLSATTEKAELYASEVELRQDITDLLSARLALRRSRRSRKTRYRAPRFDNRVANKREGRLAPSVENRIAAHMSRVEAVMRVLPVTAITVETAAFDTQLLKNPDIAGAAYQQGEQLGFWNVREYVLFRDGHVCQHCRGKSKDPILNVHHIESRRTGGDAPNNLITLCETCHKAFHRGEIKLKVRRGKSFKAETFMGIMRWTLLERLKKAHPELRVRNTYGYLTKHKRISHGIAKSHCADAYCIADNLGAKRLEGFFFQKQTRKHNRQIHKLSILKGGLRKKNQAPYEVKGFRLFDKVICKGEEAFIFGRRTSGSFDVRRLDGTRISAGINYKQLRLLEPRTTYLTEFRKEAALPPLHECRGFRAEFL

SEQ ID NO: 12199 - protein, 420 aa, unidentified; identical to SEQ ID NO: 8221
  REGION 1..420: note = Human gut metagenome

SEQ ID NO: 12200 - protein, 455 aa, Halomonas sp.; identical to SEQ ID NO: 3688

SEQ ID NO: 12201 - protein, 431 aa, Moorena sp.; identical to SEQ ID NO: 2933

SEQ ID NO: 12202 - protein, 627 aa, unidentified
  REGION 1..627: note = Lachnospiraceae bacterium UBA7780
MQELEACICAVGDTMNAPTALVQVVALLQFMVKFRVHGIRNTVTLLPQKVPHWMHSNAVYDSELSFQKDVTVYMYVRVIAKDGTPLMPTRRCGNVRYLLETGMAVAIRTKPFTIRLKYETSKYVQALYAGIDTGRENIGSAVSKENGENVYLADTRSNNGTVHSKMYDRAGFRRKRCRHDRQNKQRKAKFDGTEMKKGDADKVRTTHDCISRKVSYPVAEKSVTHKVIQGKEGKFNNRKHPDGWITPSAKQLVQITMNEVKFMCDTMPIRQLSVERVSFDFQKLANVNIRAWEYGKGPLYGYRSYKDYFCDEQKGKCPFCGEDIAHYHHIMPRHRRGTDTVRNIIGVCESCHEKIHSGQITDEMLHEVKDGVAESFEVGLLNSVMPALIDAMKQFCDARNIRLVVMDGRTTSETRNRYHIRKDHCTDAYCISLAGRNIDPADVKLDDFIFMKRRFKKKSKNIINTLNQRVYYDGKKPVAYNRHRAMDQKTDSLEEYMTKYRRTHTGAETDKHFRSLTVRPAKRTYTFHKNGTIAAVHAGDVVRYVKYNKTYGNTKIDTFVALSCEMFGEGHVKYGNGTQGRKLKFCKTIASGALQCVGIEKTDTYLREVALEEAKRRAARVRRKRTG

SEQ ID NO: 12203 - protein, 426 aa, Moorena sp.
MLKPNFVLVIDTNLKPLTPCTPCIARKLLEAGKAAIYRQYPFTIVLKKTVEANPEPIELKLDPGSKVTGIALVQGEKVIFGAELTHRGQAIKISLESRRANRRGRRARHTRYRQSRCLNRTRPKGWIAPSLAHRVETTLTWVKRFIKLAPIGSITQELVRFDLQQHENPELSGIEYQQGELAGYEVREYLLNKWDRKCTYCGIENVPLQIEHIHPKAKGGSNRISNLCLACAKCNLKKGTQDIEQFLSKKPDLLKKIKAQQKRPLKDAAAVNTTRWTLFNRLQETRLPVSTGSGGKTKFNRTRLKLDKTHWLDAACVGNVEALSVLISQPILIKATGHGSRQACRTDKYGFPSRYVPRFKFVKGFQTGDIVKAIVASGKKIGTYVGRVAVRSSGSFNISDKTGLISGVSHKYCQSIHKKDGYGYSL

SEQ ID NO: 12204 - protein, 417 aa, unidentified
  REGION 1..417: note = Human gut metagenome
MVYVISKDGQPLMPIRRNGKARRLLNKGRARVVHREPFTIQLLFETEDNVTPLTLGVDTGSSKIGCAVVTPKKEVLYISEVQVRNDIKTKMERRKVYRRARRTRKLRYRKSRFLNRRNSTKKDRFSPTMISKINSHIREIEFIKSILPITTLVLETGTFDPHLLKMEGQLFNRHWGYQRGPNYGFANSKAACLNRDDYTCQCCKTKKGTLHAHHIIYRSQGGADTLDNLITLCEECHRKLHNGELVSFESKLKGKKKGQLKHATQMNSIRVQLLKYYPDAIETYGFITKENRQLIELEKTHYNDAIVIAMGSLDTPKLRINILYKKQHIAKGQYKLHQGQRSHQKLPRGKVYGFLNKDIIEYRGNIYLIKSLMSSGYCALSDINGVVQKFENPKTVKLNSIKRISARNTTRCISQKL

SEQ ID NO: 12205 - protein, 442 aa, unidentified; identical to SEQ ID NO: 7213
  REGION 1..442: note = Human gut metagenome

SEQ ID NO: 12206 - protein, 451 aa, Moorena sp.; identical to SEQ ID NO: 4938

SEQ ID NO: 12207 - protein, 346 aa, Moorena sp.; identical to SEQ ID NO: 2872

SEQ ID NO: 12208 - protein, 470 aa, unidentified; identical to SEQ ID NO: 2949
  REGION 1..470: note = Human gut metagenome

SEQ ID NO: 12209 - protein, 421 aa, unidentified
  REGION 1..421: note = Human gut metagenome
MQYVYVLNKHGEPLMPCSPGKARLLLKQQKACVVKRTPFTIKLLYGSAGYKQPITLGVDAGSKHVGLSASTEKRELYREEFTPRNDVVDLLSTRRQNRRSRRNRKTRYRAPRFDNRVHSKHKGWLAPSVEVKIQEHITVIKRICRILPITLVRVETAEFDTQRLKAMLKGKPLPVGTDYQLGEMYDEYNVRQYVLKRDNYTCQCCGAHPTEKKPVRLHVHHLESRHVGGNAPNNLITLCVACHKALHEGKITLDKGKKRGKPLRDAAFMGIMRNTLLARLKDELNIPVKQTYGYITKLLREKNKIPKSHVNDARCIAKAPNAKPCDTMLYTRALRHHNRQIHKAKILNGGIRKKNQAPYLVKGFRLWDKVRYNGEECFITGRRSSGYFALKKYDGTVISNSASYKKLMLLEAATNYITERS

SEQ ID NO: 12210 - protein, 417 aa, unidentified; identical to SEQ ID NO: 2758
  REGION 1..417: note = Human gut metagenome

SEQ ID NO: 12211 - protein, 328 aa, unidentified
  REGION 1..328: note = Human gut metagenome
VYKRQTRYRAPRFDNRIRTKCEGWLAPSVENRINAYLSRIEAVLRLLPITKITVETASFDTQLLKSPDIAGEEYQKGEQLGFWNVREYVLFRDGHVCQHCHGRSKDPVLNVHHLESRRTGGDSPGNLITLCETCHKALHRGEITLKAKRGQSFRAEAFMGIMRWEVLNRLKASHPELEVNNTYGYRTKHARISNGIAKSHCADAFCIAGNLGAERLGEFFFQKQTRRNNRQIHKLSILKGGIRKRNQAPFEIKGFRLFDKVVCKGEEGFIFGRRSSGYFDVRKLDGTRISAGISCKKLHLLEKRRTYLTEIRKEEALPPLPEGSGLRA

SEQ ID NO: 12212 - protein, 431 aa, unidentified
  REGION 1..431: note = Human gut metagenome
MPNKVYVINKHGRPLMPCSPAKARHLLDEGKAKVKKRTPFTIQLVYGSSGYTQEVILGVDAGSKTIGMSASTTKEELLSAEVKPRNDVVDLLSTRREFRRARRNRKTRYRKPRFDNRVRSKHKGWLAPSVEVKIQEHITAIRRVCGILPVSKVVIETAEFDLQMLKAIADGKPVPQGEDYQQGEMYGHYNVRQYVLWRDNYTCQCCGAHPTKKKEVRLHVHHLESRKVGGNAPGNLVTLCDRCHEKLHKGLITEKDLKKRKHRSTRDATFMGIMRKTLMQRLCSELPIPVVETRGYITKATREKLLVLPKSHTNDALAIAQGKHGFNASYLPGIVQSDKIYTIRPVRHHNRQLHKAAILKGGIRKSNQAEKYVFGYRLFDKVQFNEQDCFIWGRRTTGIFTIKTINGKMIKDGISFKKLKLLEKSTSYLIA

SEQ ID NO: 12213 - protein, 423 aa, Moorena sp.; identical to SEQ ID NO: 2845

SEQ ID NO: 12214 - protein, 424 aa, unidentified; identical to SEQ ID NO: 8578
  REGION 1..424: note = Human gut metagenome

SEQ ID NO: 12215 - protein, 248 aa, unidentified
  REGION 1..248: note = Human gut metagenome
VSSFFLAAILSKEHGIMQYVYVLNKHGEPLMPCSPGKARLLLKQQKACVVKRTPFTIKLLFGSAGYKQPITLGVDAGSKHVGLSASTEKRELYSEEFTPRSDVVELLSTRRQNRRSRRNRKTRYRVPRFDNRVHSKHKGWLAPSVEVKIQEHITVIKHICKILPISLVRVETAEFDTQRLKAMLAGKPLPVGTDYQLGEMYDEYNVRQYVLKRDHYTCQCCGTHNTAKKVVKLHVHHLESRKTGGNAP

SEQ ID NO: 12216 - protein, 417 aa, unidentified
  REGION 1..417: note = Human gut metagenome
MPCSPAKARLLLKEKKAIVKRRTPFTIQLTIATGEAKQPVALGVDSGYKHIGLSATTEKAELYASEVELRQDITDLLSARLALRRSRRSRKTRYRAPRFDNRVASKRKGWLAPSVENRIAAHMSRVEAVMRVLPVTAITVETAAFDTQLLKNPDIAGEAYQQGEQLGFWNVREYVLFRDGHVCQHCRGKYKDPILNVHHIESRRTGGDAPNNLITLCETCHKAFHRGEIKLKVKRGKSFKAETFMGIMRWTLFERLKKAHPELRVRNTYGYLTKHKRISHGIAKSHCADAYCIADNLGAKRLEGFFFQKQTRKHNRQIHKLSILKGGLRKKNQAPYEVKGFRLFDKVICKGEEAFIFGRRTSGSFDVRRLDGTRISAGINYKKLRLLEPRTTYLTEFRKEAALPHLHECRGFRAEFL

SEQ ID NO: 12217 - protein, 428 aa, Beggiatoa sp.
MQRVFVLDHNKQPLMPCHPARARKLLKKGKAAVYRRYPFAIIMTHRVGGDLQTVEIKFDPGSRTTGIALVGDFDRGKEVIWAGNLNHRGHQIKSNLNSRRAIRRARRNRKTRYRQARFNNRRRPKGWLPPSLRSRVDNTKNWMHKLARLAPLTQIAVETVRFDTQKLQKPEISGVEYQQGELAGYELREYLLEKWGRECAYCGAKNIPLEIEHIQARSKGGSDRVSNLTLACTPCNIDKGNKDIKEFLSLKPKRLKKIQATATAPLKDAAAVNATRYATGNVLKCFSLPITFSSGGRTKFNRVKLGYLKDHWIDAACVGESGSQVVIPKAITPLIITSKGRGSRQKCRMNQYGFPRTGPKKQKQVKGFQTGDIVKAIVTKGKKIGTYIGRVVVRSRGSFDIGSGEKKVGSISYKYCQLLQRADGYEYT

SEQ ID NO: 12218 - protein, 421 aa, Moorena sp.; identical to SEQ ID NO: 2610

SEQ ID NO: 12219 - protein, 515 aa, unidentified; identical to SEQ ID NO: 11080
  REGION 1..515: note = Human gut metagenome

SEQ ID NO: 12220 - protein, 413 aa, unidentified
  REGION 1..413: note = Human gut metagenome
MTSYSFVLDANGKPLAPTKEQKAWFFIRKKRATLVSKYPMVIQLKKEIPEKEICQDEIRCGIDDGGLHVGIALVQKCKTKNKVVFKGTIEQRNDVKHLMEVRRGYRRYHRYHKRYRQARFDNRKSSKREGRIAPSILQKRQATIRVIHWLNKWINITNYWLEDVSVDIRALTDGYQSYRWQYQKSNRLDENIRKAAILRDDGKCMECGKSNCRLEVHHIKPRRRNGSNTLDNLITLCESCHQKTEGQEELYMDRYFSLLKSSDNKNLNDAQHVMIGKMWLRKQLSGLGVLYLTSGGDTANKRIDWNIEKSHANDAVCITDLQPDTCDMKEWTMKPMRRQSKAKTDHVLGIHHRDLVEYTFKNGETHRGYVTALYPEQKAINFQSPTKHCKKVNARKCKLLWKYSKIYWFENAS

SEQ ID NO: 12221 - protein, 415 aa, unidentified; identical to SEQ ID NO: 11876
  REGION 1..415: note = Human gut metagenome

SEQ ID NO: 12222 - protein, 512 aa, unidentified
  REGION 1..512: note = Human gut metagenome
MSTVYVLNKDGKPLMPTTRCGHIRYLLKEKKARVVASKPFTIQLLYETNDVVQPLYLGIDPGRTNIGVAVVKTDGTAVFTAHLETRNKEIPKLMKKRKDSRRARRTNGRRCRRQRRAKANDTISKKCVKQATAQNGSVSKRAKEIGVIKRHLPGCEKEILCIGIKNKEAKFNNRTRPEGWLTPTANQLLQTHVNLVKKIRKFLPISDVVLEINKFAFMQLDDPNIQKWQYQQGPLYQKASLEEAVSEMQEHHCLFCKKPIANYHHVVPQSENGSNTIGNIVGLCTKHHDLVHKDTVWQKKLAKKKTGLNKKYGAQSVLNQIIPALTERLNTLFPKHFFVTTGKSTYDYRAAHGVSKDHWLDAYCIACSVLPNDVCDSGINNRVPYELKQFRRHDRRALHKANMSRVYTLNDKAVATNRHKAIKQTTDSLEEFRQNHPDDVYKLKVKEHHPEYRNSKRNFPGCVFLVGKHTHVMQGTSGSHNGQADGYYDTNGNSYSSGKCKFVAKNEGIVFT

SEQ ID NO: 12223 - protein, 413 aa, unidentified
  REGION 1..413: note = Human gut metagenome
MTGYAFVLDVNGKQLAPTKEQKAWFLIRKKRVILVSKYPMVIQLNKEIPDEEICKDEIRCGIDDGGLHVGIALVQKCQTKNKVIFKGIIEQRNDVKHLMEVRRDYRNYHRYHKRYRQARFNNRSSSKREGRIAPSILQKRQAIIRVINRLNKWINITNYWLEDVSIDIRALTDGYKSYSWQYQRSNRLDENIRKAVILRDNCECKECGKGNCRLEVHHIKPRRLNGSNTMDNLITLCENCHQKTEGQEELYMSRYFDLLKSSDNKRLNYAQHVMIGKKWLREELSNLGILYLTNGGDTANKRIDWGIEKSHSNDAICITDLQPDICNIKEWTIRPMRRQSKAKTDNVLGIKHRDLVEYTFKNGETYKGYVTALYPEQKAINFQSPTKHCKKVNARKCKLLWKYSKIYWLENAG

SEQ ID NO: 12224 - protein, 440 aa, Clostridium sp.; identical to SEQ ID NO: 5468

SEQ ID NO: 12225 - protein, 413 aa, unidentified; identical to SEQ ID NO: 3023
  REGION 1..413: note = Human gut metagenome

SEQ ID NO: 12226 - protein, 263 aa, unidentified
  REGION 1..263: note = Human oral metagenome
MINPDINGVDYQHGQTYGFFDERYFVFARDNYTCQVCGKSKGKILQTHHIIYRSNGGTDRVDNLITVCTDCHTSANHKKDGILYKWQAEHKKVKQYKEPPFMNTLRRRIFDKYPDVIITYGSETTPKRKEIGLEKTHYNDAIVISGIEAIKENPNEWLLIKQFRKKKRSLHEATARKGYKEPNRTQKRNSKNAPYYKGFWLNDKVFVLGQVGYITGFASYSAYIKNKNNEYITLPSKSYKQVGITMLKLLSHNNNWRYIRNAV

SEQ ID NO: 12227 - protein, 453 aa, unidentified
  REGION 1..453: note = Human gut metagenome
MTAVYVISADGQKLMPTLRNGKVRHLLKEGKAKICKYRPFTIQLTYDTPNQVQPIEIGMDSGYQHIGLSVKTEKKEIFSAEFTLLTDEKKRHDDCRKYRRTRRNRLRYRKPRWLNRTKTTPKGWLAPSLLHKAEAHIKLVKDICSVAPITNITTEVGEFDPALLKAMHEGKEPPQGTDYQQGPLYFADSLRKAVFQRDNYTCKICHKSALKDKDVILKIHHALYWKNRHGNNLSELITVCDRCHTSANHAPNGKLYGLEPKVARLESAAYMNIVRWYIINTLKKELPNIQVNFCYGALTARKRKDLKLEKSHTNDAFCIGNFLPSLRSVATEYFKKKRRNSRILEKFYDAKYIDIRDGKIKKGAELSTGRTNRSIPRNNENNLRKFRSEKKSKGRRQIRKTRYSFQQNDFVFYKKRLYKVIGMQNLGKYISLQGFKPVPISLVQLYKHANAWT

SEQ ID NO: 12228 - protein, 477 aa, Caldanaerobius sp.
LTREDRGSAIRGVTSPVRGSERREGRMVFVLDKKKKPLMPCTEKRARKLLQSGRAVVHRLMPFVIRLKDRTAEESNFQPLRLKFDPGSKATGFSVLREESAEKSAAIIMGEIHHKQGIKDSLDSRRALRRGRRNRKTRYRKPRFDNRRREEGWLPPSLEARVEETVRAAEKLMKWLPITSISTEHVKFDTQLMQNPEISGIEYQQGELYGYEIREYLLEKYGRKCAYCGAENVPLQIEHVVPRNPKHGPRGTNRVSNLTISCERCNQDKGNKQPEEWLEELQKSKRKIDRVRAENLLKVIANLKKPLKDAAMMNATRWALYERLKRTGLPVECGTAARTKKQRIEHGFPKTHYFDACCVGASTPKTIEIKTKYTEIWTAVGRGSRKMCNTDKYGFPISHRQRKKRYFGFQTGDVVEAEVPSGKYKGTWRGRVAVRASGYFDIKDSKGNRICQGISYRYVRLLQYADGWQYEKEKAAY

SEQ ID NO: 12229 - protein, 452 aa, unidentified
  REGION 1..452: note = Human gut metagenome
MMVAVLSSIGVRLMPTTCFKARKFIKSGKAVIHSYDPFTIRLTQRENGGTQPIEYCCDTGYQHIGISIKSAKHEYVGVQVDALKDEKKHHQDATTYRRTRRRKTRYRAARFDNRKATKSKGWLAPSIRHKKDIHLVQVQKYAKVFPITSIVFEMGEFDTQKLKAIEEGRPAPAGVEYQQGEQYGFDDVRNAVFTRDGYRCVCCGRGIEDGAILHAHHLKYRSLGGTNRMGNLVTVCNRCHTPANHQKSGLLWNLMNKYKVKNFKGATFMTAIRWQMYDELKAMFPDTEIHLTYGSRTKEARRLLGVRKSHINDAYCMGDFHPTHRSEHWLYIKKRRNNRVLAKFYDAKYIDSRDGEKKSGKDLFSGRTKRSRELNVENLHRYRQQKVSKGRVSIRRRHYPIQPGDTVIYEGRKYITKGVQNLGTYLKIGEKVVPVRKIRIHHYAGGYIKQMM

SEQ ID NO: 12230 - protein, 423 aa, Moorena sp.
MSNYVFLIDANKKPMNPVHPSHARKLLDSGKASVFRRYPFTLLLKRVVENIVVHPLTLKIDPGSKVTGISLVTDRNEAIWGVELEHRGQQIEDALQSRRAVRRGRRNRNTRYRQARYFNRKRPQGWLAPSLMHRVLTTETWIKRLRKFAPIGDIKLELVQFDTQQLENPEISGIEYQQGELQGYEVREYLLEKWARKCAYCDAENIPLQIEHIQARAKGGSNRIYNLCLACEKCNLKKASQDIRDFLKGKSDLASRILSWAKSPLKDAAAMNSTRWKLFKTLKVTGLLVTTGTGGQTKFNRTRLGLPKEHWIDAACVGVTPSLKILTTRILRVKATGMGGRQRCQTDKFGYPQKHRPLRPIFGFCTGDIVRADVPKGKYKGTFTARVCPMSDGRGEFVIDKKRRSIRLEYCTTVHRKDGYSYA

SEQ ID NO: 12231 - protein, 276 aa, unidentified
  REGION 1..276: note = Human gut metagenome
VETAEFDTQRLKAMLKGKPLPVGTDYQLGEMYDEYNVRQYVLKRDNYTCQCCGAHPTEKKPIRLHVHHIESRHVGGNAPNNLITLCVACHKALHEGKITLDKGKKRGKPLRDAAFMGIMRNTLLARLKDELNIPVKQTYGYITKLLREKNKIPKSHVNDARCIAKAPNAKPCDTMLYTRALRHHNRQIHKAKILKGGIRKKNQAPYLVKGFRLWDKVRYNGEECFITGRRSSGYFALKKYDGTVISNSASYKKLNVAGSSDKLYHGKELRAHSSHD

SEQ ID NO: 12232 - protein, 410 aa, Bacillus sp.
MTHCFVLDAQGRKLSPTKENRAWYLIRTKKATLKSKFPLVIQLVREIPESEIDSSSIQLGIDDGSKLVGIALVQECKTKNKPVFKGTIELRTDVKEKIAVRRGYRRYRRQHKKYRPARFDNRSASKKEGRIPPSIKQRKDSILRVVNQLHKWIRIDRIFLEDVLIDIRALEKGYKPYKWEYQQSNRLDENIRKAVVLRDHNTCQDCGLTNTRMEVHHITPRRLNGSDSIHNLITLCSRCHGKVTGVELKHCMRFFQKVKGRKIYYSDAMHVMQGKTYIQNELKKISPLSLTTGGDTANKRIDWGIEKTHANDAIVICNLNVAPDHCENKNWAIKPMRKHSTKKIESVNGFHHRDFIKYTKRNGERYLAYITALYPEKNQCNMTTLEGKILKRYGISRLTLLWRFSKIYWL

SEQ ID NO: 12233 - protein, 441 aa, unidentified
  REGION 1..441: note = Human gut metagenome
MSVSVFVLDRKHRPLMPCRPARARRLLKSGRARVVKLFPFTIRLTDRLIEDSKLQTVLVKIDPGSRQTGVALVRADEKAHHHALFFINLVHRGESIRDALTARRNCRRRRRGNLRHRAPRFLNRTKPQGWLPPSLRHRVDTATAWVAKLVKLAPVTGLVEELVKFDAQKLQNPEISGTEYQQGTLFEYEVREYLLEKFGRKCVYCGAENVPLNIDHVVPKARGGSNRISNLVLSCVNCNQKKDSQPVDVFLKNRPEVLDRIKRRLKTSLAHAATVNATRWSLFNALKVFGLPVETGSGALTKLNRHTFGVPKEHRLDALCAGRVNGVHYPEGMGILQVRCTGRGNYQRTRVDKYGFPRGYLTRQKRVHGFATGDMVEVVVPSGKKAGTYRGRVAVRKSGYFNIQTPEGVIQGIGWRHCRLLSFNDGYGYAWLRPAAHSSPV

SEQ ID NO: 12234 - protein, 442 aa, unidentified; identical to SEQ ID NO: 2903
  REGION 1..442: note = Human gut metagenome

SEQ ID NO: 12235 - protein, 451 aa, unidentified
  REGION 1..451: note = Human gut metagenome
VLSAWNPFQHWRRITTGRKTEETNLRVLVWNKRGKPLMPCSPAKARLLLKEKKAIVVRRTPFTIQLTIATGETKQPVSLGVDAGYKHVGLSASTEKAELYASEIELRQDITDLLSARRALRQSRRNRKTRYRAPRFDNRIRTKRKGWLALSLENRINAHLSRIEAVLRLLPVTKITVETASFDLQLLKNPDISGKEYQEGEQLGFWNIREYVLCRDGHVCQHCYGRSKDPVLNVHHLESRRTGGDSPGNLITLCETCHKALHRGEITLKAKRGQSFRAEAFMGIMRWEVLNRLKASHPELEVNNTYGYRTKHARISNGIAKSHCADAFCIAGNLGAKRLGEFFFQKQTRRNNRQIHKLSILKHGLRKRNQAPFEVKGFRLFDKVVCQGEEGFIFGRRSSGSFDVRKLDGTRISAGISYKKLRLLEKRRTYLKEIRKEEALPPLPEGRSLRA

SEQ ID NO: 12236 - protein, 446 aa, Lactobacillus sp.
MQNRVFVINKHGEALMPCKPRTARKLLQSGKAKPIKKEPFTIQLLYGASGYKQPINLGVDSGQRHIGLAVTSQDKVLFQSEVELRQDVKKLLERRKTYRQGRRNRKTRYRPMRFLNRIKSRKNNWLPPSVQSKVNHNINWIKRMLTVLPNPELHIEVGKFDMQKMKDPAIKGEGYQKGDLYGYQTVKQYVLARDQYKCQVCKKKGGKYKGKIVKLKIHHIIYRSQGGTNAPANLITVCADCHTYQNHQPGGILYAWYQKKKKVTKPLKGATFMNILRRRLWNAFPDAKFQYGAQTTLQRANLGLAKSHYNDAVTISGIEHISEKPTSIVMFKQFRKKKRFLHEATARKGCKDKEGHRNKNVTSKRNAKNTKEANGFWLNDYVRIKNSKLKGYISGFTGSSCYIKDCLGNYLTLNTYKQTNLSNVEFINHRNNWCNTSISEQRYVME

SEQ ID NO: 12237 - protein, 418 aa, unidentified
  REGION 1..418: note = Human gut metagenome
MVYVLSKTGQPLMPTENHAKVRVLLKQQKAKIVHRCPFTIQLLYDSTDYTQPVSLGIDAGSRHIGVSATTETKVLYEADVTLRNDIVDLLSTRREARRTRRSRKTRYRKPRFNNRIRKDGWLAPSIQQKVDTHLTVVHKATEILPVNSITVETASFDIQKIKNPDISGTGYQQGEQLDFWNVREYVLFRDGHKCQCCKGKSKDPVLNVHHIESRKTGGNAPNNLITLCETCHKGYHNGTVSLPKNIRRGMKFNDAAFMGIMRWAFFNRVKETYEPLGIMVNMTYGYITKKTRIDHNLPKDHFINARCISGHPDAVSDGTVFYQKKVRCHNRQIHKQKILKGGIRKRNQAPYLVKGFRLFEKVKYHGKQYFIFGRRSSGFFDIRTLDGTKVNKGSVSCKKIRSLDMPSSYLTEERKAIV

SEQ ID NO: 12238 - protein, 461 aa, Parasutterella sp.; identical to SEQ ID NO: 3646

SEQ ID NO: 12239 - protein, 515 aa, unidentified; identical to SEQ ID NO: 5111
  REGION 1..515: note = Human gut metagenome

SEQ ID NO: 12240 - protein, 427 aa, Moorena sp.
MRVFVLDKNRKPLDPCHPAKARKLLKSGRAKVLRRYPFTIIIKDLEVENCVTHDHQLKIDPGAKTSGLAIIQGNRVIWGAELTHRGEHIREALTSRRQLRRSRRNRKTRYRQPRFLNRTRSKGWLPPSLMSRVHNVLTWVNKLIKFCPISGISQELVRFDTQKMLNPEISGIEYQQGTLYGYELREYLLEKWDRTCAYCGAKNTRLEIEHIKPRSKGGTNRVSNLAIACHNCNQAKGNQEVEEFLSSKPSILKRILSQAKKPLAGAAAVNATRWKLYNELKLIGLPVEVGSGGLTKYNRCRQNLPKTHWLDAANVGKVSTLHIEDYQPLLIAAKGHGTRQICRTDKFGFPWLHCSQRKIHKGFQTGDIVKAVVTKGKKIGTYIGRVATRKTGSFDITTVRGKVSGISYKYCQAIHRKDGYSYQFHGG

SEQ ID NO: 12241 - protein, 415 aa, unidentified; identical to SEQ ID NO: 4916
  REGION 1..415: note = Human gut metagenome

SEQ ID NO: 12242 - protein, 456 aa, unidentified
  REGION 1..456: note = Marine metagenome
MAVFVLDKKKQPLMPCSEKRARLLLARGRAVVHKRYPFTIRLKNRVGGEAQPLRLGIDPGSKTTGLALMREPDSQQRHVLCLFELIHRGFQIKKALQQRAAFRRRRRSANLRYRAPRFNNRIKPKGWLAPSLQHRVDTVMAWVNRLSKSAPITGISQELVRFDTQKLESPEISGVEYQQGTLLGYEVREYLLEKWGRECAYCGTADTPLEIEHVVPRSRGGSNRVSNLTLSCHPCNAEKDSQTLTDFFATNKGLKKRLKANGLSADAQLERVQRQLKQPMRDASAVNATRWALFSALKTTDLPVAVSSGGRTKYNRQRLNIPKTHALDAACVGAFGKLYDWTVPTLTIKAMGRGSYQRTRLTKHGFPRGFLMRQKQVHGFQTGDMVRAIVPTGKKAGTHTGRVAIRKTGSFNIQAEYGAVQGISHKYCTLIQRSDGYGYYVTLFSNLTGEAGRAVA

SEQ ID NO: 12243 - protein, 424 aa, Enterococcus sp.; identical to SEQ ID NO: 8112

SEQ ID NO: 12244 - protein, 453 aa, Moorena sp.
MQKLLVEFKNTPENTPQVLCSVSGVLNRDKSLSVPYKVLANNISYEDLLSGKRGQDLRVPVINMRGKPLMPTRLRKARILLKQEKAIVVQRSPFTIQLKYPTGETKQTLKLGIDAGYSTIGFSAVTEKKELLSGELTLRKRISKLLKQRRSYRRARRNRLWHRKPRFNNRSKPEGWFAPSIQHKLETHLRLIEKLKKILPVTKIIVEVAKFDQQKMSKPEIKGVEYQQGELQGYEVREYLLEKWKHKCVYCGKSNIPLEIEHIIPKIRGGTDRVSNLTIACHKCNQKKGDKTAAEFGYPEVQKKAKQTLKSATFMNIVRWRLVNTLKCAWTYGYITKHDRIKMKLEKSHINDAFVIAGGTTQSRSVPYMTTQTRRNNRSIQTNRKGFKPSIRRQRYKLQPDDLVKYIKSLFRVKGVFNYGKWVRLISLTKANKIINVNIKKVELVKYGKGIQF

SEQ ID NO: 12245 - protein, 504 aa, unidentified; identical to SEQ ID NO: 5865
  REGION 1..504: note = Human gut metagenome

SEQ ID NO: 12246 - protein, 451 aa, unidentified; identical to SEQ ID NO: 10609
  REGION 1..451: note = Human gut metagenome

SEQ ID NO: 12247 - protein, 426 aa, Parasutterella sp.; identical to SEQ ID NO: 3045

SEQ ID NO: 12248 - protein, 431 aa, unidentified; identical to SEQ ID NO: 3801
  REGION 1..431: note = Human gut metagenome

SEQ ID NO: 12249 - protein, 433 aa, unidentified
  REGION 1..433: note = Human gut metagenome
MSTGLRAVQAEPAGIRKGDALKVFVLNMRGQPLMPCSPAKARHLLKAGKAVVRRRTPFTIQLRIATGETKQSVTLGVDAGAKHVGLSAATEKEEVFASEVELRQDITGLLAARLSLRRERRQRKTRYRAPRFLNRVRSKHKGWLAPSVENRIQAHMSRIDAVCRLLPVTKIVIETASFDIQKIKDPSVEGTDYQQGDQLGFWNVREYVLFRDGHVCQHCHGHSKDKILNVHHLESRKTGGDAPNNLITLCETCHKAYHAGKIKLKVKRGQSFRAEAFMGIMRWTLLNRMRKAHPSLPVENTYGYLTKHKRIALGLPKTHCADAFCIAGNLKALRRGDFLFQQQTRKHNRQIHRCSILKGGVRKLNQAPFLVKGFRLFDKVRIGGQIGFVFGRRVRGTFNIRRLDKTVIGKDINCKKLSLLETRKTFLTELRKE

SEQ ID NO: 12250 - protein, 376 aa, Bacillus sp.; identical to SEQ ID NO: 4597

SEQ ID NO: 12251 - protein, 532 aa, unidentified; identical to SEQ ID NO: 3169
  REGION 1..532: note = Human gut metagenome

SEQ ID NO: 12252 - protein, 512 aa, unidentified; identical to SEQ ID NO: 6489
  REGION 1..512: note = Human gut metagenome

SEQ ID NO: 12253 - protein, 404 aa, unidentified
  REGION 1..404: note = Human gut metagenome
LLKEKKAIVKRRTPFTIQLTIATGETKQPVSLGVDAGYKHVGLSASTEKAELYASEVELRQDITDLLSARRALRQSRRNRKTRYRAPRFNNRLRTKRKGWLAPSVENRINAHLSRIEAVLRLLPVTKITVETASFDLQLLKNPDISGKEYQEGEQLGFWNIREYVLCRDGHVCQHCYGRSKDPVLNVHHLESRRTGGDSPGNLITLCETCHKALHRGEITLKAKRGQSFRAEAFVGIMRWEVHNRLRALHPGIEVSNTYGYRTKHARIANGIAKSHCADAFCIAGNLGAERLCEFFFQKQTRRNNRQIHKLSILKGGIRKRNQAPFEVKGFRLFDKVACQGEEGFIFGRRSSGFFDVRKLDGTRISAGISYKKLHLLEKRQTYLMEIRKEEAFPPLPEGRGLRA

SEQ ID NO: 12254 - protein, 404 aa, unidentified
  REGION 1..404: note = Clostridiaceae bacterium UBA2240
MPTNRHGKVKHLLKDGKAKVVRRTPFTIQLLYDSPEYTQPITLGVDAGSKVVGLSATTEKKELFVSEATLRDDITELLSTRRQNRRTRRNHLRYRMARFLNRTASKKEGWLAPSVKHKVDSHLKVIGNVHRILPISRIVIETASLDIQKIRNPEISGREYQQGEQLGFWNTREYVLWRDNHECQHCHGKSKDRILNVHHKESRKTGGDSPGNLVTLCETCHKSHHAGRIKLKLTPNKSYRDASFMGIMRWYVFNSLNELYPEVSITYGYITKNNRIRNNIEKTHSADAYCISGNLNAMRIDEIYYQVFKRKHNRQIHKANFLKGGKKELDQSAYEVKGFRLFDHVRYRDEDCFIFGRRISGYFDLRKLDGSVVHRSASFKELTLLKRQNTILIERKECKGVLLS

SEQ ID NO: 12255 - protein, 451 aa, unidentified
  REGION 1..451: note = Human gut metagenome
VLSARNPFQHWRRITTGRKTEETNLRVLVWNKRGKPLMPCSPAKARLLLKEKKAIVVRRTPFTIQLTIATGETKQPVSLGVDAGYKHVGLSASTEKAELYASEIELRQDITDLLSARRALRQSRRNRKTRYRAPRFDNRIRTKRKGWLAPSVENRINSHLSRIEAVLRLLPVTKITVETASFDLQLLKNPDISGKEYQEGEQLGFWNIREYVLCRDGHVCQHCYGRSKDPVLNVHHLESRRTGGDSPGNLITLCETCHKALHRGELTLKAKRGQSFRAEAFMGIMRWEVLNRLKASHPELEVNNTYGYRTKHARISNGIAKSHCADAFCVAGNLGAKRLGEFFFQKQTRRNNRQIHKLSVLKHGLRKRNQVPFEVNGFRLFDKVACKGEEGFIFGRRSSGFFDVRKLDGTRISAGISYKKLHLLEKRQTYITEIRKEKALPPLPEGRGLRA

SEQ ID NO: 12256 - protein, 451 aa, unidentified; identical to SEQ ID NO: 7526
  REGION 1..451: note = Human gut metagenome

SEQ ID NO: 12257 - protein, 419 aa, unidentified; identical to SEQ ID NO: 5032
  REGION 1..419: note = Human gut metagenome

SEQ ID NO: 12258 - protein, 502 aa, unidentified; identical to SEQ ID NO: 6776
  REGION 1..502: note = Human gut metagenome

SEQ ID NO: 12259 - protein, 388 aa, Ammonifex sp.
MAPTSVGYPKVFVVDAEGKPLLPCHPARARKLLKSGKAEVLRGSPFAIKLKQAVENPVGSLRAKVDDGSKWVGIALVNEFTGEVVFRGVLVQRGDVVRLLTLRREYRRNRRYRVVRHRECRNQNRKQVVPFPSIRQKKEAIYRVLADLAKIAPISGVDVELVSVGVKNPALPGRDTREKVLNRDGACVLCGSTEKLQRHHLVPRAKGGTDTPENQVLLCAECHRKLHSGEVVSSRKGKTFAWRAHAVLGKAYLLALLSCFGEVRACEGWQTEKWREGLGLAKSHANDALSLFPPERLLKIFGPEHLIYPLRRRRWEDNPTKTCEERNGFRHWDVVRAVRAGKVVFGCVRSLKARAMTLRTAGDGNFEVSYSKAKLLHRPRGLAYVPVW

SEQ ID NO: 12260 - protein, 465 aa, unidentified
  REGION 1..465: note = Human gut metagenome
MSTCVCVLSKNGERLMPTIRLGKVRHLLKDGKAKIVKHHPFTIQLLYDSKTNTQPIEICEDVGYNYIGISVKSESHEYVSAQYDTLQDEKDCHDDCRRMRRTRRNRLRYRKPRFDNRKRGEGWLAPSLRHKKELNVNVVKMYCEVMPVTHAIVEVGSFDTMLVKAIEEGKTTPEGAGYQKGPRYKLATLREAVFYRDNYTCQVCGRKANEGAILHVHHMFYWKGRHGNSLSELVTVCEKCHTPANHQKGGKLYGFSEDIKFANLSGAAFMNTVRWQIVNELYAAFGKPFVTFTYGAMTKEKRIALHLEKSHNNDAYAMGSFHPVDRCAFEHYEKMKRNNRILEKFYDSRYINIRTGEVASGKELFNGRINRNHKKDSENLHKYRGKRIRKGYRALRRKKVALNPGDLVSLNGEILTVHGTHTKKNGSVNVKFKTPSKSGKKSVSLKKLKIIKTISPMRSAWDKVS

SEQ ID NO: 12261 - protein, 448 aa, Variovorax sp.; identical to SEQ ID NO: 9585

SEQ ID NO: 12262 - protein, 419 aa, Butyricicoccus sp.; identical to SEQ ID NO: 3927

SEQ ID NO: 12263 - protein, 416 aa, unidentified; identical to SEQ ID NO: 8117
  REGION 1..416: note = Human gut metagenome

SEQ ID NO: 12264 - protein, 330 aa, unidentified
  REGION 1..330: note = Ga0315277_10026199
MEKRVGYRGRRRTANLRHRPPRFRNRRREKGWLTPCMRSRVGNIRTWTAGLMRVCPITAFSLELVKFDTQAMQNPEISGVEYQRGTLVGWEVREYLLEKWDRKCAYCGAKDVPFEVEHILPKSRGGTDRVSNLTLACHECNQAKGNQTAAEFGHPEVQAEAKQSLKDAAAVTTTRWAVYAVLRDTGLPVETGTGGRTKYNRTRLGLPKAHWIDAACVGASTPDALGVRRTSWQSRPLIIRAMGRGSRQMCRMDKHGFPRTAAKSIKRVHGFQTGDLVRAIVPTGKHAGTHVGRVAVRASGSFQVGTVDGIGYHHCRLLQRTDGYEYVSHS

SEQ ID NO: 12265 - protein, 442 aa, Sutterella sp.; identical to SEQ ID NO: 7529

SEQ ID NO: 12266 - protein, 478 aa, Geobacillus sp.; identical to SEQ ID NO: 5807

SEQ ID NO: 12267 - protein, 453 aa, Moorena sp.
MSVAVLSSTGQKLMPTSNYRARKLLKSGRAAIECYRPIFTIRLIDREEGKTQPIEYACDTGYQHVGVSIKSEKHEFVHAQYDMLSNEPERHNDRRKYRRTRRNRQRYRKPRFDNRSRKNQEMAPSLRHRRENQINLFESFCKVMPITSATFEMGKFDTQLLQAIADGKPLPEGKDYQRGSKYLYQTEREAVFSRDHYTCQVCGKSVKDGVILHTHHIGYWKGYRSNRISNLLTVCEHCHTAKNHKPGGALWGLEPQSTNLAAATYMSTVRWAIYRELVLKYPEIDIHIQYGAKTSVTRKSLHLAKTHANDAYCVGSLHPRHRTTELVYQKKRRNNRILAKFYDAKYIDIRDGAKKSGAVLSCGRINRRESRRSDKNQRIYRGNKCSSGRTSVRKNRYAYQPGDTIVFHSQRFVVNGSHCKGARVILDTGKSVKATDLTCIKKEGGWHFLPAQA

SEQ ID NO: 12268 - protein, 438 aa, Fervidobacterium sp.; identical to SEQ ID NO: 4816

SEQ ID NO: 12269 - protein, 453 aa, Lactobacillus sp.; identical to SEQ ID NO: 4050

SEQ ID NO: 12270 - protein, 430 aa, unidentified
  REGION 1..430: note = Human gut metagenome
MPKVYVLNRHGRPLMPCTPAKARHLLDAGKAKVRHRTPFTIQLLYGSTGYTQEVILGVDAGSKTIGLSAATETEELFSAEVKPRNDVVELMSARRQFRRARRNRTTRYRKPRFDNRVRSKHKGWLAPSVEVKIQEHMTAIRRACAILPVSKVVVETAEFDLQLLKAVAEGKPVPQGEDYQKGEMYGHYNVRQYVLWRDSYTCCICGVHGSVRKGVPLHVHHLESRRVGGDAPDNLVTLCTACHDKLHKGIIMAADIKKRKRRSTRDATFMGIMRMTLLRRLREQLPVPVVETRGYITKATRENLLVLPKSHANDALAIAHGPQGFRAEHLPNIRQADRLYTICPVRHHNRQLHKATILKGGVRKANQAEKYICGFRLYDKVLYNGIECFVWGRRTSGSFLLRQLNGEKVKDGVSYKHLKLLEHSQSYLVA

SEQ ID NO: 12271 - protein, 414 aa, unidentified; identical to SEQ ID NO: 2588
  REGION 1..414: note = Human gut metagenome

SEQ ID NO: 12272 - protein, 278 aa, unidentified
  REGION 1..278: note = Human gut metagenome
MVYVLANDGQPLMPTERHGKVCRMLKSGIAKVVKKCPFTIQLQYESERNVQPVALGIDAGSKHVGVSATTKAKVLYESDVELRDDIVKLLATRRQLRRRRRSRKTRYRPARFDNRRRKEGWLTPSIRQKIESHLTVVANVCKILPVSQIIVETASFDIQKIKNPDIQGIEYQQGEQMDFWNIREYVLFRDGHTCQCCKGKSKDKVLNVHHIESRKTGGNAPNNLITLCETCHKGYHNGTVTLPKNIKRGMKFKDAAFMGIMRWTFYNTLKEQYEPDIP

SEQ ID NO: 12273 - protein, 413 aa, unidentified; identical to SEQ ID NO: 2636
  REGION 1..413: note = Human gut metagenome

SEQ ID NO: 12274 - protein, 413 aa, unidentified; identical to SEQ ID NO: 8345
  REGION 1..413: note = Human gut metagenome

SEQ ID NO: 12275 - protein, 420 aa, unidentified; identical to SEQ ID NO: 5513
  REGION 1..420: note = Human gut metagenome

SEQ ID NO: 12276 - protein, 408 aa, unidentified; identical to SEQ ID NO: 3192
  REGION 1..408: note = Human gut metagenome

SEQ ID NO: 12277 - protein, 512 aa, unidentified
  REGION 1..512: note = Human gut metagenome
MSTVYVLNKDGKPLMPTTRCGHVRHLLKEQKARVVTSKPFTIQLLYETDDVAQPLYLGIDTGRTNIGVAVVRTDGTAVFTAHLETRNKEIPKLMQERKKARRARRTNGRRCRRQRRAKANGTISKKCVKQDTAQNGSVSKRAKKIGVIKRHLPGCEKEVLCIGIKNKEAKFSNRTRPEGWLTPTANQLLQTHINLVKKIQKFLPISDVVLEINKFAFMRLDNPNIQKWQYQQGPLYQKASLEEAVSEMQEHHCLFCKKPIAHYHHVVPQSENGSNTIGNIVGLCTKHHDLVHKDTAWQKKLAKKKTGLNKKYGALSVLNQIIPALTKELSSLFPKHFFATNGKSTYDYRAAHGVSKDHWLDAYCIACSVLPNDVCDSNINSRVPYELKQFRRHDRRALHKANMNRVYTLDGKKVATNRHKAIKQTTDSLEEFRQRQPDDVCKLKVKEHHPEYRNPERNFPGCVFLVGKHTHVMQGTSGSHNGQADGYYDTNGNSYSSGKCKFVAKNKGIVFA

SEQ ID NO: 12278 - protein, 379 aa, unidentified
  REGION 1..379: note = Human gut metagenome
KLLYGSAGYKQPITLGVDAGSKHVGLSASTEKRELYSEEFTPRSDVVKLLSTRKQNRRSRRYRKTRYRAPRFDNRVHSKHKGWLAPSVEVKIQEHITVIKRICKILPISLVRVETAEFDTQRLKAMLAGKPLPVGTDYQLGEMYDEYNVRQYVLKRDNYTCQCCGAHTTAKKLVKLHVHHLESRKTGGNAPSNLVTLCTTCHKNLHKGKVTLDGKERGKPLRDAAFMGVMRKTLMARLKEELPIPVQGTYGYITKMRREQNDIKKSHTNDARCISKHPLAEPCSVCYRTKAIRHHNRQTHKANFSKKGIRKRSQMPYLVEGFRLWDKVLYKGQECFVSGRRSSGSFALKKLDGTSISKGVTFKKLRLLEPATNYLIERM

SEQ ID NO: 12279 - protein, 442 aa, unidentified
  REGION 1..442: note = Human gut metagenome
MSTSVFVLDKKHRPLMPCRPARARRLLRAGRARVVKRFPFVIRLVDRTVEQSEVQPVLIKLDPGSRETGAAVVRDDGKKRHHALAFFVIEHRGGAIRDALKARSAFRRRRRSQNLRCRSPRFLNRVKPKGWLPPSLRHRVETTLSFVRRMCRYLPVSGIAAELVKFDSQKLQNPEVSGVKYQQGTLFEYEVREYLLEKFGRKCVYCGAEGVPLNIDHVVPRAKGGSNRVSNLVLACVSCNQKKGARSLEDFLKGKPEVLARVRRELKTPLRDAAAVNATRWVLFNELKATGLPVETGSGALTKLNRHAFGVEKEHWLDALCVGRLNGVVTRKGLNVLEIRCMGRGSRQRTRLTKYGFPRGYLMRQKCVHGFATGDMVEANVPKGKKAGLWRGRVAVRVSGSFNIQTPKGVIQGVGWKHCRLISHNDGYGYAWLGHAPHSSPA

SEQ ID NO: 12280 - protein, 380 aa, Anoxybacillus sp.
ESEIKATYRLKIDYGSRHTGLAILRGQEVVWLGQLDHRTDIKERIDKRRAFRRARRNRKTRYRKPRFLNRKRKEGWLPPSLESRMQNIKTWVERLRKICPIEHISYENAKFDTQLMRNPEINGVEYQQGTLQGYEVREYLLEKFGRKCCYCGKEGVPLEVEHIIPKSRGGTDRIDNLCLACRDCNQRKGSQTAEEFGYPHIQEMVKKTLKDASVVNATRRKVYEVLKQSGCEVECGTGARTKMNRIRLGLPKIHYFDACCVGKSTPLQLHFKTKEVLFIKAKGRGSRSRTNLDRYGFPRGYLARQKYFFGFQTGDMVKANVPKGKYQGVWFGEVACRKTGSFDIKGKDGKRIAQGINYRYVQVIQRFDGYAYGKGVAELA

SEQ ID NO: 12281 - protein, 431 aa, unidentified; identical to SEQ ID NO: 10549
  REGION 1..431: note = Human gut metagenome

SEQ ID NO: 12282 - protein, 431 aa, unidentified
  REGION 1..431: note = Human gut metagenome
MPNKVYVINKHGRPLMPCSPAKARHLLDAGKAKVKKRTPFTIQLVYGSSGYTQEVILGVDAGSKTIGMSASTTKEELLSAEVKPRNDVVDLLSTRREFRRAQRNRKTRYRKPRFDNRVRSKHKGWLAPSVEVKIQEHITAIRRVCGILPVSKVVIETAEFDLQMLKAIADGKPVPQGEDYQQGEMYGHYNVRQYVLWRDGYTCQCCGAHTTKKKEVRLHVHHLESRKVGGDAPDNQVTLCESCHEKLHKGLIAEKDFKKRKRRSTRDATFMGIMRKTLMQRLCSELPIPVIETRGYITKATREKLLVLPKSHTNDALAIAQGKQGFNVGYLPEIAQIDKIYTIRPVRHHNRQLYKATILKGGIRKSNQTKKYVFGYRLFDKVQFNEQDCFIWGRRTTGIFTIKTINGKMIKDGISFKKLKLVEKSTSYLIA

SEQ ID NO: 12283 - protein, 512 aa, unidentified
  REGION 1..512: note = Human gut metagenome
MSTVYVLNKDGKPLMPTTRCGHVRHLLKEQKARAVRTKPFTIQLLYETDDVVQPLYLGIDPGRTNIGVAVVKTDGTAVFTAHLETRNKEIPKLMKKRKDSRRARRTNGRRCRRQRRAKANGTISKKCVKQDTAQNGSVSKRAKEIGVIKRHLPGCEKEVLCIGIKNKEAKFNNRTRPEGWLTPTANQLLKTHINLVKKIQKFLPISDVVLEVNKFAFMQLDNPVIKKWQYQQGPLYQKGDLESAVSEMQEQHCLFCKKPIEHYHHVVPQHKNGSNTIANIVGLCAKHHNLVHKDTAWQEKLAKKKTGLNKKYGALSVLNQIIPALTKELSSLFQKHFFVTTGKSTYDYRAAHGISKDHWLDAYCIACSVLPNDVCDSTINSRAPYELKQFRRHDRRALNNANMSRIYTFNGKKVAFNRHKAVEQVVDSLEEFRKKNQNTVCKLKVEKHHQTYRNPNRNYPGSIFLVKKQIHIMQGIVSSRNGKATTYYDTNTNKIAAGKCRFVAKNTGILFV

SEQ ID NO: 12284 - protein, 512 aa, unidentified; identical to SEQ ID NO: 10788
  REGION 1..512: note = Human gut metagenome

SEQ ID NO: 12285 - protein, 419 aa, unidentified; identical to SEQ ID NO: 4877
  REGION 1..419: note = Human gut metagenome

SEQ ID NO: 12286 - protein, 413 aa, unidentified; identical to SEQ ID NO: 3476
  REGION 1..413: note = Human gut metagenome

SEQ ID NO: 12287 - protein, 408 aa, unidentified
  REGION 1..408: note = Human gut metagenome
MVYVQDIDGKPMMPTTRHGKVRRLLKANKATVVNLCPFTIRLMYATSGYKQEIVLGVDAGTKHVGLSATTKSKELYSSEVILRSDIVELLSTRRESRRARRNRLRYRKPRFENRVKSKRLGWVAPSVRHRIDAHIRVIDNVCSILPVSRVIVEVAQFDTQKIKNPDISGDEYQEGDQLGFWNVREYILARDGHKCQHCKGKSKDPILNVHHIEYRKTGGDSPSNLITLCETCHKEYHKGNIDLKVKRGKSLRDAAVMGIMKWKLYEELKSRYDNVLMTFGYITKYNRIKYGIEKSHISDAFVISKNFNALRLGYHYKVRLVRRHNRQIHKQNVLKGGAKKPNQSPFEVFGFRLFDRVMFEGNYYFIFGRRKSGSFNIRDINGGNQRNVTYKKLKLSIGKRFMIQKEMN

SEQ ID NO: 12288 - protein, 465 aa, unidentified; identical to SEQ ID NO: 3603
  REGION 1..465: note = Human gut metagenome

SEQ ID NO: 12289 - protein, 474 aa, unidentified; identical to SEQ ID NO: 9173
  REGION 1..474: note = Mouse gut metagenome

SEQ ID NO: 12290 - protein, 426 aa, Moorena sp.
MSNSTNYVFVLDAKKKPLAPCQPAMARSLLKAGKAKVFKRYPFTIILNKLVDEENQGLQLKIDPGSKQTGFAMVTQSEEVIFAMVLIHRGQQIKNALLRRRTLRRTRRHRKTRYRKCRFLNRKRKKGWLPPSLRHRVLTVETWVNRLSQLSPVSSLAIELVKFDTQKIQNPEISGVEYQQGELFGYDVREYLLEKWGRSCAYCGATDTPLEVEHIIPRSKGGSNRVSNLAIACHQCNQNKGAIDIREFLKDQPSVLTHVLKVAKTPLKDAAAVNSTRTSIFETLKVKGLPVVTGSGAGTKYNRRRLNLPKEHWIDAACIGEVEKLTILTNQPLVVTAMGHGCRQMVQMDKYGFPRKGYKAKKPVPGWKTGDIINVVKGRNAGLKGVRIKTVRSKGNFDIRHGDKILSVSRNHIQPVHRRDGYNYSF

SEQ ID NO: 12291 - protein, 427 aa, unidentified
  REGION 1..427: note = Human gut metagenome
LRVFVLNKRGKPLMPCSPAKARLLLKEKKAIVVRRTPFTIQLTIATGESKQPVSLGVDAGYKHVGLSASTEKAELYASEVELRKDITDLLSARRALRQSRRNRKTRYRAPRFDNRIRTKRKGWLAPSVENRINAHLSRIEAVLRLLPITKITVETASFDMQRLKNPDISGKEYQEGEQLGFWNVREYVLFRDGHVCRHCHGRSKDPVLNVHHLESRRTGSDSPDNLITLCETCHKALHRGEITLKAKRGQSFRAQAFMGIMRREVLNRLKASYPELKVHETYGYLTKHARIANGSVKSHGADAFCIAGNLGAERLGEFFFQKQTRRNNRQIRKLSILKGGIRKRNQAPFEAKGFRLFDKVACQGEEGFIFGRRSSGSFDVRKLDGTRISAGISCKKLRLLERRRTYLTEIRKEEALPPLPEGRGLRA

SEQ ID NO: 12292 - protein, 414 aa, unidentified; identical to SEQ ID NO: 2588
  REGION 1..414: note = Human gut metagenome

SEQ ID NO: 12293 - protein, 546 aa, unidentified
  REGION 1..546: note = Human gut metagenome
MVFPAYNYAKASSSQGKHNLLLRQERLIVKEVAYMSTVYVLNKDGKPLMPTTRCGHVRYLLKEKKARVVASKPFTIQLLYETDDVVQPLYLGIDPGRTNIGVAVVKADGTAVFTAHLETRNKEIPKLMKKRKDSRRARRTNGRRCRRQRRAKANGTISKKCVKQTTAQNGSVSKRAKEIGVIKRHLPGCEKDVLCIGIKNKEAKFSNRTKSEGWLTPTANQLLQTHINLVKKIRKFLPISDVVLEINKFAFMQLDNPNVQKWQYQQGPLYQKANLEEAVSEMQEHHCLFCKKPIAHYHHVVPQSENGSNTIGNIVGLCTKHHDLVHKDTAWQKKLAKKKTGLNKKYGALSVLNQIIPALTKELSSLFPKHFFATNGKSTYDYRAAHGVRKDHWLDAYCIACSVLPNDVCDKNINSRVPYELKQFRRHDRRALNNENMSRVYTFNGKMVATNRHKATEQTTDSLEEFRQRQPNDVCNLKVKEHHPTYRNMNRNYPGSVFLVGNQIHVMQGIASSKDGEATTYKDTNANSIAAGKCKFVAKNSGILFV

SEQ ID NO: 12294 - protein, 313 aa, Microcoleus sp.
LSKVFVLDTNKQTLNPIHPGRARLLLSQGKAAVFRQYPFTIILKKEVSNPVVQPLRVKIDPGAKTTGLAIVNDNTGEVVWVAELQHRGFQLRDALTSRRQLRRSRRNRKTRYRKPHFLNRTRPPSWLPPSLNSRVANILTWVKRLSALCQITAISQELVRFDTQKMQQADISGVGYQQGTLAGYEIREFLLEKWHRTCAYCSARGTKLEIEHIKLKPLLIAAKGHGTRQACRTDKWGFPQRYCSRNKVHKGFQTGDIVKAIVTKGKKVGTYVGRVATRASGSFNISARNGLVQGINHKYCKFMHKKDGYSYAN

SEQ ID NO: 12295 - protein, 427 aa, Enterococcus sp.
MQVFVRNIQGKPLMPCSNRKARLLLKEGKAKIYQYNPFTIQLCYPCREYVQECHIGIDTGSKHIGVAVTSEDKVLFKGEVELRQDVKSNLDTRRSYRRDRRNRKTRYRKARFLNRKKSKKKDVWLPPSIENRMNHTFKWIDTFLSLVPNPQLHIEVGKFDIAKMINPEIQGIDYQQGQTYGFYDVRYFVFARDNYTYQCCGKSKGKILQTHHIIYRSNGGSNRADNLITVCTDCHTYENHQKGGVLYQWQENHKKTKQYKEPPFMNILRKRIFAKYSNAVITYGSETTPKRKELGLEKTHYNDAIVISGISTIKENPDEWLLIKQFRKKKRSLHEATARKGRKEPNCLQKRNAKNKPCYKGFYLNDKVEVFGRIGHITGFASGGVYIKNSENEYITLPNKSYKKVGVSKLKLLHHNNNWQYINKRIA

SEQ ID NO: 12296 - protein, 457 aa, unidentified; identical to SEQ ID NO: 6471
  REGION 1..457: note = Human gut metagenome

SEQ ID NO: 12297 - protein, 425 aa, Aphanothece sp.; identical to SEQ ID NO: 6227

SEQ ID NO: 12298 - protein, 310 aa, Fischerella sp.; identical to SEQ ID NO: 3573

SEQ ID NO: 12299 - protein, 413 aa, unidentified; identical to SEQ ID NO: 4790
  REGION 1..413: note = Human gut metagenome

SEQ ID NO: 12300 - protein, 431 aa, unidentified
  REGION 1..431: note = Human gut metagenome
MPDKVYVISRLGHPLMPCSPAKARHLLDDKKAKVVKRMPFTIRLLYGSTKYIQPIILGVDAGSKTIGLSASTAKEEVFAAEVMPRNDVVENLSTRREFRRARRNRTTRYRKPRSDNRVRSNHERWLAPSVKVKIQEHITSIKRVCTILPISKVVIETAEFDLQLLKAIQEGKPIPEGEDYQKGEMYGSYNVCQYVLWRDNYTCICCGVRGTPNNPVRLHVHHFESRKYGGNAPDNHRTLCDDCHKKFHLGIITDVKLKTRRRQSTRDAAFMGIMRKTLMWRLRTELFIPVAETKGYITKATREKLLVLPKSHTRDALAIAQGRHGFGIKEYAYVEPANHIYTVRPVRHHNRQLHKASILKGGIRKRNQASKYVFGFRLYDKVLYQGKACFVWGRRTSGTFLLRTIDGIKVKDGVSYRNLTLLERSSNYLIA

SEQ ID NO: 12301 - protein, 423 aa, unidentified; identical to SEQ ID NO: 3951
  REGION 1..423: note = Human gut metagenome

SEQ ID NO: 12302 - protein, 475 aa, unidentified; identical to SEQ ID NO: 4985
  REGION 1..475: note = Human gut metagenome

SEQ ID NO: 12303 - protein, 470 aa, unidentified
  REGION 1..470: note = Human gut metagenome
MSVFVVGLNGCRLMPVSERKARLLLKGGKASVYRKVPFTIKLNYKTGSTVQPGYLGIDTGSQHIGVSVVRQDGTVLHKEEIGLRDSMSKRKLLESRASLRRGRRYRKTRYRHPKWKPKTKRIYSEKADRKGRHWKKQKNMFTSKRQAGWLPPSLQSKTDHHIQWIRKLLHLLPEGYRLSIELGRFDPARMKDPGIHGELYQKGPQYDYENVRAYVLARDGYTCRVCKKKGGKLHVHHILYRSRGASDDPKYMAAVCSNCHTTENHLPGGILYQWMQDQKKFTRGLRDATFMNILKKRLRRAFPDAVFTYGNITKADREKLGLPKSHGNDATAIALVKTEVKSVKDEEPVIHIQQVRRKKRSLHEETPRKGRKEPNRTASRSDKNTKSVTVAKGSGEKKASMTACLFDRVELDGKKGWITGFTGTSCYVKDKEDNYICTSPKYKQVSISKLRILHHCGNWVIGAEKPLGKG

SEQ ID NO: 12304 - protein, 424 aa, Petrotoga sp.; identical to SEQ ID NO: 10084

SEQ ID NO: 12305 - protein, 420 aa, unidentified
  REGION 1..420: note = Human gut metagenome
MQYAYVLNKRGEPLMPCSPGKARILLKQQKACVVKRTPFIIKLLHGSAGYKQPITLGVDAGSKHVGLSASTEKRELYSEEFTPRNDVVELLSTRRQNRRSRRNRKTRYRAPRFNNRVHSKHKGWLAPSVEVKIQEHITVIKRICRILPVTLVRVETAEFDTQRLKAMLAGKPLPVGTDYQLGEMYDEYNVRQYVLKRDNYTCQCCGAHTTAKKTVKLHVHHLESRKVGGNAPSNLITLCTTCHNNLHKGKITLDGKKRGKTLRDAAFMGIMRNTLLTRLRNELNIPVQNTYGYITKLLREQNDIKKSHVNDARCISKHPLAKPCSVCYRTKAIRHHNRQIHKAKILKGGIRKANQAPYIVKGFRLWDKVLYNEQECFISGRRSSGYFALRKFDGTTITNSISFKKLRLLEPATNYLIERK

SEQ ID NO: 12306 - protein, 413 aa, unidentified; identical to SEQ ID NO: 2636
  REGION 1..413: note = Human gut metagenome

SEQ ID NO: 12307 - protein, 414 aa, unidentified
  REGION 1..414: note = Human gut metagenome
MPCSPAKARLLLKEKKAIVVRRTPFTIQLTIATGESKQPVSLGVDAGYKHVGLSASTEKAELYASEVELRQDITDLLSARRALRQSRRNRKTRYRAPRFDNRIRTKRKGWLAPSVENRINAHLSRIETVIRLLPVTKISVETTSFDMQLLKNSDIAGKEYQESEQLGFWNVREYVLFRDGHVCQHCHGRSKDPVLNVHHLESRRTGGDSPGNLITLCETCHKELHRGEITLKAKRGQSFRAETFMGIMRWEVLDHLKASHPKLEVQNTYGYRTKHARIVNGIAKSHCADAFCIAGNLGAERLGEFLFQKQTRRNNRQIHKLSILKGGIRKRNQVPFEVKGFRLFDKVACKGEEGFIFGRRSSGYFDVRKLDGTRISAGISYKKLRLLEKRQTYLTEIRKEEALPPLPEGRGLRA

SEQ ID NO: 12308 - protein, 470 aa, unidentified; identical to SEQ ID NO: 2825
  REGION 1..470: note = Human gut metagenome

SEQ ID NO: 12309 - protein, 266 aa, unidentified
  REGION 1..266: note = Human gut metagenome
MFVDMVYVQDIDGKPMMPTTRHGKVRRLLKDKKAVVVNLCPFTIRLTYVTSDYKQEIVLGVDAGTKHVGLSATTKSKELYSSEVILRNDIVDLLSTRRELRKARRNRLRYRKPRFDNRVKSKRLGWIAPSVKYKVDAHIRVVENVCSILPISRIVIEVAQFDTQKIKNPEISGKEYQEGDQLEFWNTREYVLARDGHKCQYCKGKSKDKILNVHHLESRKTGGDSPSNLITLCETCHKEYHKGNIDLKIKRGSSLRDAAVMELIFV

SEQ ID NO: 12310 - protein, 423 aa, Arthrospira sp.; identical to SEQ ID NO: 2857

SEQ ID NO: 12311 - protein, 512 aa, unidentified; identical to SEQ ID NO: 3971
  REGION 1..512: note = Human gut metagenome

SEQ ID NO: 12312 - protein, 442 aa, unidentified; identical to SEQ ID NO: 2903
  REGION 1..442: note = Human gut metagenome

SEQ ID NO: 12313 - protein, 406 aa, unidentified
  REGION 1..406: note = Human gut metagenome
MVYVLDKNGQPLMPTDRHRKVRLMLQSGQAKVIKRCPFTIQLNYDSGHQTQEISLGIDAGSKHIGVSATTKIKVLYEADVELRNDIVNLLSSRRERRRGRRNRKIRYRQAKFNNRRRGNGWLAPSIRQKIGTHLIVVENICKMLPISRIMVETASFDIQKIKNPDIQGAEYQQGDQLGFWNNREYVLFRDNHTCQCCKGKSKDKILNVHHIGSRKTGGNAPNNLITLCETCHTGYHKGTVQLPKAIKRGMRFKDAAFMGIMRWAFYEALKQQYEPVGTPVHDTYGYITKHTRIAYNLPKEHYVDARCISGNPEASSNGEYYYQKKVRCHNRQIHKLTVLKGGIRKQNQATYLVKGYRLFDKVSYQGKGYFVFGRRKSGFFDIRTLSGKQVNKGSLSCKKRKRLNSG

SEQ ID NO: 12314 - protein, 414 aa, unidentified; identical to SEQ ID NO: 2588
  REGION 1..414: note = Human gut metagenome

SEQ ID NO: 12315 - protein, 341 aa, Pseudoalteromonas sp.; identical to SEQ ID NO: 6143

SEQ ID NO: 12316 - protein, 414 aa, unidentified
  REGION 1..414: note = Human gut metagenome
MPCSPAKARLLLKEKKAIVVRRTPFTIQLTIATGESKQPVSLGVDAGYKHVGLSASIEKAELYASQVELRQDITDLLSARRALRRARRNRKTRYRAPRFDNRIRTKRKGWLAPSVENRINAHLSRIEAVLRLLPVTKITVETASFDMLLLKNPDIAGKEYQEGEQLGFWNVREYVLFRDGHVCQHCYGRSKDPVLNVHHLESRRTGGDSPGNLITLCETCHEALHRGEIALKTKRGHSFRAEAFMGMMRWEVLNRLKASYPELKVHETYGYLTKHARIANGIVKSHGADAFCIAGNLGAERLGEFFFQKQTRRNNRQIHKLSILKGGIRKRNQAPFEIKGFRLFDKVACKGEESFIFGRRSSGSFDVRKLDGTRISAGISCKKLRLLEKRRTYLTEIRKEEALPPLPEGRGLRA

SEQ ID NO: 12317 - protein, 421 aa, Lactobacillus sp.
  REGION 302..327: note = misc_feature - Xaa can be any naturally occurring amino acid
MQNRVFVINRQGEPLMPCTQRKCRKLLQSGKAKVIRKEPFTIQLLFGSTGYKQPVSIGVDSGQHHIGLAVTSQDKVLFQGEVSLRQDVKKLLDTRRSYRRGRRDRNTRYRPPRFLNRAKPVGWLPPSVASKIQHNINWIQRLQAVLPKAELHIEVGKFDMAKMVQPGITGLGYQQGDLYGYETTKQYVLDRDNYTCRICHGKTKDPKLKIHHIIYRSTGGTNQVSNLLTVCATCHTQANHQPGGKLYALQAKRFQSHHSLKGATFMNILRRRLFTAFPEAKFQYGAQTTLNRAKLELPKAHXXXXXXXXXXXXXXXXXXXXXXXXXXKGRKTPNTTSKRNAKNTKAINGFHLNDYVQLPNGLRGNISGFSGKTACYVKAGDDHYLTINPKYKQVNLSKLKVIRHQNNWNVAEINTSDYMMA

SEQ ID NO: 12318 - protein, 519 aa, Streptosporangium sp.; identical to SEQ ID NO: 5462

SEQ ID NO: 12319 - protein, 424 aa, Moorena sp.; identical to SEQ ID NO: 8578

SEQ ID NO: 12320 - protein, 470 aa, unidentified; identical to SEQ ID NO: 2825
  REGION 1..470: note = Human gut metagenome

SEQ ID NO: 12321 - protein, 426 aa, Lactobacillus sp.; identical to SEQ ID NO: 3294

SEQ ID NO: 12322 - protein, 439 aa, unidentified; identical to SEQ ID NO: 3280
  REGION 1..439: note = Wastewater metagenome

SEQ ID NO: 12323 - protein, 255 aa, unidentified
  REGION 1..255: note = Human gut metagenome
MLAGKPLPVGADYQLGEMYDEYNVRQYVLKRDNYTCQCCGAYPTEKKPVRLHVHHIESRHVGGNAPNNLITLCAVCHKALHEGKITLGNGKKRGKPLRNAAFMGIMRNTLLARLKDELNIPVKQTYGYITKLLREENHVEKSHTNDARCIAKAPNAKPCDTMFRTRALRHHNRQIHKAKILKGGTRKKNQAPYLVKGFRLWDKVRYNGEECFITGRRTSGYFAIKKYDGTVISNSASYKKLTLLEAATNYITERS

SEQ ID NO: 12324 - protein, 451 aa, unidentified; identical to SEQ ID NO: 2436
  REGION 1..451: note = Human gut metagenome

SEQ ID NO: 12325 - protein, 427 aa, Enterococcus sp.; identical to SEQ ID NO: 3871

SEQ ID NO: 12326 - protein, 494 aa, unidentified
  REGION 1..494: note = Human gut metagenome
MTMVYVQNKDGKPLMPTTRYCYVRLLLKEKKARVVCTTPFTIRLNYDTPNITQDLILGIDPGRTNIGVAVVKEDGSCVFSAHLETRNKEVPLLMKKRAAFRRQHRTQDRRRKRQRRAIAAGTTVESNTIERLLPGYEKPIVCHHIRNKEARFNNRSRPAGWLTPTANHLLQAHINLIAKAAKFLPITKVVVELNRFAFMAMDNPNIRRWEYQQGPLYGLGSVKDAVYAQQDGHCLFCKKPIDHYHHVVPRHKGGSETLANRCGLCEKHHALVHKDKAWAEKLVTRKGGMNKKYHALSVLNQIIPHLMEYLGSETPYDVYATDGKSTKGFRIAKNVPKEHYTDAYCIACSILDADTKVSAPAEPFKLKQFRRHDRQSCIRQMVDRKYLLDGKVVATNRHKSIEQKSDSLEEFREAYGDAAVSQLTVRPHSPQYKDMARIMPGAVMDFDGIVGVFKGSSGRNNGTPNYYNSTKGARVLTKRCALLAKNAGMVFIPA

SEQ ID NO: 12327 - protein, 346 aa, unidentified
  REGION 1..346: note = Human gut metagenome
MVYVQDINGKPMMPTTRYGKVRRLLKDKKAVVVNLCPFTIKLMYVTSDYKQEIVLGVDAGTKHVGLSATTKSKELYSSEVILRNDIVDLLSTRRELRKARRNRLRYRKPRFDNRVKSKRPGWIAPSVKYKVDAHICVINNVCSILPISRIVIEVAQFDTQKIKNPEISGKEYQEGDQLEFWNTREYVLARDGHKCQYCKGKSKDSILNVHHIESRKTGGDSPSNLITLCETCHKEYHKGNIDLKIRRGKSLRDAAVMGIMKWRLYEELKSRYDRVFMTFGYITKHNRIKYGIEKSHTSDAFVISKNINAKRIERQYLKRLIRRHNRQIHKMKILKGGEEEKQSSSF

SEQ ID NO: 12328 - protein, 430 aa, unidentified; identical to SEQ ID NO: 3252
  REGION 1..430: note = Human gut metagenome

SEQ ID NO: 12329 - protein, 420 aa, unidentified
  REGION 1..420: note = Human gut metagenome
MQYAYVLNKRGEPLMPCSPGKARILLKQQKACVVKRTPFTIKLLFGSAGYKQPITLGVDAGSKHVGLSASTEKRELYSEEFTPRSDVVELLSTRRQNRRSRRNRKTRYRVPRFDNRVHSKHKGWLAPSVEVKIQEHITIIKRICKILPISLVRVETAEFDTQRLKAMLAGKPLPVGTDYQLGEMYDEYNVRQYVLKRDHYTCQCCGAHNTAKKVVKLHVHHLESRKTGGNAPSNLITLCTTCHKNLHKGKVTLDGKERGKPLRDAAFMGIMRKTLMARLKEELPIPVQGTYGYITKMRREQNDIKKSHVNDARCISKHPLAEPCSVCYRTKAIRHHNRQTHKANFSKGGIRKRSQMPYVVEGYRLWDKVLYKGQECFVSGRRASGSFTLKKLDGTRISKGVTFKKLRLLEPATNYLIERK

SEQ ID NO: 12330 - protein, 518 aa, unidentified
  REGION 1..518: note = Human gut metagenome
MTPKKRKEASRMSEYIYVIGVDGDPQMPTKRKRHVEKLLQAGRARVFRQIPFTIQLTYENKPVLQPITIAEDPGRSNIGMAVVSLSGELLSAAVVQTRNKEIVKLMEKRKQHRRASRNGERKARQRLAKKCHTMIKAGSLMRKLPMYGKDKRVRCNMIKNTEARFCNRKREDGWLTPSAGHLVRTHINLIHKMQKFLPITDVAIEINQFAFLSLEDPSISGVDFQNGPLKGYDDLNAAVEALQDGHCLMCNSPIEHRHHIVPRSMQGSNTIGNIAGLCCKCHERVHKDSAFEDSLKKKKAGLNKRYAAVSALNQAIPFICKRLEQEFGKEHVHYCSGRDTSMVRRSLGYHKTKEEQLHEVDAWCIAVLSLQQIPEKAPSFDHVHEILQFRRQDRSRIKAQTSRAYYHERKKIAKNRKKAEGQREDSLQEWRKRQVERYGEEQTRKMISQLKVKKSIRRYNRLDRLMPGAVFYYQGIRYVMRGQHCEGTYLQAVGMGSKDFPAKKCKIVAHNEGLVFVS

SEQ ID NO: 12331 - protein, 413 aa, unidentified; identical to SEQ ID NO: 2636
  REGION 1..413: note = Human gut metagenome

SEQ ID NO: 12332 - protein, 423 aa, unidentified
  REGION 1..423: note = coral metagenome
MRVFVLNKNRQPLDPCKPARARILLSAGKAKVYRRYPFTIILTEEIKNPVTHEHQLKIDPGAKTTGLAIIQGQRVIWGAELTHRGFQIRDNLTSRRQLRRSRRSRKTRYRKPRFSNRTRPKGWLAPSLTSRVQNILTWVKKLIRFCPVTGISQELVRFDTQKLQNPEISGIEYQQGTLYGYELREYLLEKWNRKCAYCGATGTQLEIEHIKPKSRGGSNRVSNLTIACHSCNQAKSNQDIELFLSKKPSLLKRILRQAKRPLADAASVNITRWKLYHDLKSIGLPVEVGSGGLTKFNRCRQSLPKAHWLDAANVGKVETLIIEVTLPLLITAKGHGTRQLCRTNKYGFPIRHCSRIKFHKGFQTGDIVHAVVTKGKKVGTYVGRVATRKSGSFNISTKLGLVQGISHKYCQFIHRKDGYAYAI

SEQ ID NO: 12333 - protein, 424 aa, Anaerostipes sp.; identical to SEQ ID NO: 3434

SEQ ID NO: 12334 - protein, 447 aa, unidentified; identical to SEQ ID NO: 5316
  REGION 1..447: note = Human gut metagenome

SEQ ID NO: 12335 - protein, 407 aa, unidentified
  REGION 1..407: note = Human gut metagenome
QPLMPTDRHRKVRLMLQSGQAKVIKRCPFTIQLNYDSGHQTQEISLGIDAGSKHIGVSATTKIKVLYEADVELRNDIVDLLSSRRELRRGRRNRKTRYRQAKFNNRRRGNGWLAPSIRQKIGTHLTVVENICKILPISRIMVETASFDIQKIKNPDIQGAEYQQGDQLGFWNVREYVLFRDGHTCQCCKGKSKDKILNVHHIGSRKTGGNAPNNLITLCETCHTGYYKGTVQLPKAIKRGMRFKDAAFMGIMRWAFYEALKQQYEPVGTPVHNTYGYITKHTRIAYNLPKEHYVDARCISGNPEASSNGEYYYQKKVRCHNRQIHKLTVLKGGIRKQNQATYLVKGYRLFDKVSYQGKGYFVFGRRQSGFFDIRTLSGEKVNKGSLSCKKLKFIATRTYYLTERRAV

SEQ ID NO: 12336 - protein, 423 aa, unidentified
  REGION 1..423: note = Human gut metagenome
MQYVYVLNKHGEPLMPCSPRKARLLLNQKKACVVKRTPFTIKLLYGSTGYKQPIILGVDAGSKHIGISATTEKCELYREEAIPRNDVVDLLSARRAFRRSRRNRKTRYRAPRFNNRVHSKHKGWLAPSVEVKIQEHITLIKRVCRILPVTLVRVETAEFDTQRLKAMLEGKPLPVGTDYQHGEMYDEYNVRQYVLKRDNYTCQCCGAHPTKTKAVKLHVHHIETRRTGGNAPNNLITLCTACHKALHAGKVTLNGKKRGKPLKDAAFMGIMRKTLMERLLKELKIPVQETYGYITKYLREKHSIPKSHTNDARCISKNLLAIPCDTCYYTKAIRHHNRQLHKATILKGGIRKANQAPYTVKGYRLWDKVFYHGSECFITGRRTSGYFALKKLDGTVVSNSASYKKLRLLEVATNYITEKKVKG

SEQ ID NO: 12337 - protein, 474 aa, unidentified; identical to SEQ ID NO: 9173
  REGION 1..474: note = Mouse gut metagenome

SEQ ID NO: 12338 - protein, 431 aa, unidentified; identical to SEQ ID NO: 3801
  REGION 1..431: note = Human gut metagenome

SEQ ID NO: 12339 - protein, 242 aa, unidentified
  REGION 1..242: note = Human gut metagenome
LQFYRKEHGIMQYVYVLSKHGEPMMPCSPGKARLLLKQQKACVVRRTPFTIKLLYGSAGYKQPITLGVDAGSKHVGLSASTEKRELYREEFTPRNDVVELLSTRRQNRRSRRNRKTRYRAPRFDNRVHSKHKGWLAPSVEVKIQEHITIIKRICKILPISLVRVETAEFDTQRLKAMLAGKPLPVGTDYQLGEMYDEYNVRQYVLKRDNYTCQCCGAHTTAKKLVKLHVHHLESRKTGGNAP

SEQ ID NO: 12340 - protein, 420 aa, unidentified; identical to SEQ ID NO: 8840
  REGION 1..420: note = Human gut metagenome

SEQ ID NO: 12341 - protein, 422 aa, Streptomyces sp.
VARQTPFVIRLKDRDAEKSEVEGVAVRIDPGSRETGIAITADIAYPLTATPDVIVSRRGLYSLELRHRGSQIRDKMHLRAAYRHRRRSRKTRYRAPRYSNRQRPEGWLPPSLKHRVDTTYSWVRRLQKWAPVTEIHIERTSFDVHALSAGVPLQGIEYQQGTLQGYEVRQYLLEHWRRRCAYCGASGVALQIEHIRPRSRGGSDRLSNLTLACEPCNLAKGSFPVEVFLKGEPRRLARILGQAKAPLRDAAVMNATRWTLWRRLQEFGVPVHSWSGGRTKYNRSRHGLPKTHSLDALAVGDVPDGTVIGGIPTTVLLVSCTGRGTHARTRTDKHGFPRLKLPRTKQFFGYATGDLVTATVPTGKNAGTHVGRVAVRSSGRFNIRGAHGLVQGIHHRHVRLLQRADGYGYARRAEDPQISAPR

SEQ ID NO: 12342 - protein, 347 aa, unidentified
  REGION 1..347: note = Human gut metagenome
LPIYRKEHGVMQYVYVLNKHGEPLMPCSPGKARLLLKQQKAHVVKRTPFTIKLLYGGAGYKQPITLGVDAGSKHVGLSASTEKRELYREEFTPRNDVVDLLSTRKQNRRSRRNRKTRYRASRFDNRVHGKHKGWLAPSVEVKIQEHITVIKRTCRILPVALVRVETAEFDTQRLKAMLEGKPLPVGTDYQLGEMCDEYNVRQYVLNRDHYTCQCCGAHTTTKKTVKLHVHHLESRKVGGNAPSNLITLCTTCHDALHKGKVSLDNKKRGKPMRDAVFMGIMRKTLMARLREELPIPVQGTYGYITKMWREQNDIKKSHVNDARCISKHPLAEPCSVCYRTKAIRHHN

SEQ ID NO: 12343 - protein, 417 aa, unidentified
  REGION 1..417: note = metagenome
MPCSPAKARLLLKERKAIVKRRTPFTIQLTIATGEAKQPVALGVDSGYKHIGLSATTEKAELYASEVELRQDITDLLSARLALRRSRRSRKTRYRAPRFNNRVASKHKGWLAPSVENRIAAHLSRVEAVMRVLPVTAITVESAAFDTQLLKNPDITGAAYQQGEQLGFWNVREYVLFRDGHVCQHCRGKSKDPILNVHHIESRRTGGDAPNNLITLCETCHKAFHRGEIKLKVRRGKSFKAETFMGIMRRTLFERLKKAHPELNVRNTYGYLTKHKRISYGIAKSHCADAYCIADNLGAKRLEGFFFQKQTRKHNRQIHKLLILKGGLKKKNQAPYEVKGFRLFDKVICKGEEAFIFGRRTSGSFDVRRLDGTRISAGINYKKLRLLEPRTTYLTEFRKEAALPPLHECRGFRAEFL

SEQ ID NO: 12344 - protein, 440 aa, Lactobacillus sp.; identical to SEQ ID NO: 5150

SEQ ID NO: 12345 - protein, 408 aa, Bacillus sp.; identical to SEQ ID NO: 9968

SEQ ID NO: 12346 - protein, 420 aa, unidentified; identical to SEQ ID NO: 6017
  REGION 1..420: note = Human gut metagenome

SEQ ID NO: 12347 - protein, 414 aa, unidentified
  REGION 1..414: note = Human gut metagenome
MPCSPAKARLLLKEKKAIVVRRTPFTIQLTIATGEAKQPVSLGVDAGYKHVGLSASTEKAELYASEVELRQDVSDLLSARRALRQSRRSRNTRYRAPRFDNRIRTKRKGWLAPSVENRINAHLSRIETVLRLLPITKITVETASFDTQLLKNPDIAGKEYQKGEQLGFWNVREYVLFRDGHVCQHCHGRSKDPVLNVHHLESRRTGGDSPGNLITLCETCHKALHRSEITLKAKRGQSFRAESFMGIMRWEVLNRLKASHSELEVNNTYGYRTKYARIANDIAKSHCTDAFCIAGNLGAERLGEFFFQKQTRRNNRQIHKLSILKGGIRKRNQAPFEIKGFRLFDKVVCKGDEGFIFGRRSSGYFDVRKLDGTRISAGISYKKLHLLEKRRTYLTEIQKEEGLPPLPEGRGLRA

SEQ ID NO: 12348 - protein, 428 aa, Moorena sp.; identical to SEQ ID NO: 4771

SEQ ID NO: 12349 - protein, 378 aa, Moorena sp.
SRYPMVIQLKKKIPDQEICKDEIRCGIDDGGLHVGVALVQKCQTRNKVIFKGTIEQRNDVKHLMDVRRGFRRYHRYHKRYRPARFDNRKSSKRKVRIAPSILQKRQATIRVINQLNKWVNITNYWLEDVAIDIRALTDGYKPYRWQYQKSNRLDENIRKAVILRDGCRCMECGKSNCRLEVHHIKPRRLKGSNTLGNLITLCTGCHQKTEGVEELYMNRYFALLNSSDNKSLSYAQHVMIGKKWLREQLSKLGMLHLTNGGDTANKRIDWGIAKSHSNDAICITDLQPDTCEIKEWVIKPMRRQSKAKTDNVLGIKHRDLVEYTFMNGETHRGYVTALYPEENALNFQSPAKHCKKVNARKCKVLWKYSKIYWLNDVS

SEQ ID NO: 12350 - protein, 495 aa, unidentified; identical to SEQ ID NO: 12045
  REGION 1..495: note = gut metagenome

SEQ ID NO: 12351 - protein, 455 aa, unidentified
  REGION 1..455: note = Human gut metagenome
VIKSSEGKERCPLHQTPSNIDEGCLLPERAWRQNLRVFVINQRGKPLMPCSPAKARVLLREKKVRVKRRTPFTIQLTTATGEARQDVSLGVDAGYRHVGLSASTEKAELYASEAVLRDDITDLLSARLALRRARRNRKTRYRAPRFSNRVHSKNKGWLAPSVEHKIASHLKLVENVCRLLPVTNITVETASFDMQAIKNPDIKGTEYQQGEQLGFWNVREYVLWRDGHQCQHCRGKSGDPILNVHHLESRRTGGDAPNNLVTLCETCHKAYHAGRIDLKLKRGRSMRAEAFMGIMRWTFFYRLKEIHADKTVENTYGYLTKHTRITHGIEKSHCADAYCIVGNLSAERLPEYLYQKQVRKHNRQIHKLTIGRGGIRKRQQTPFEVKGFRLFDKVRLGGEEGYIFGRRSSGYFDVRRLDGQKLSAGVSFKKLHLLEKRKTYLTVLLPRLKTKVSAP

SEQ ID NO: 12352 - protein, 456 aa, unidentified; identical to SEQ ID NO: 3495
  REGION 1..456: note = Human gut metagenome

SEQ ID NO: 12353 - protein, 431 aa, unidentified
  REGION 1..431: note = Human gut metagenome
MPNKVYVINKHGRPLMPCSPAKARHLLDEGKAKIKKRTPFTIQLVYGSSGYTQEVILGVDAGSKTIGVSALTKKEELFAANVIPRNDVVDLLSTRREFRRVRRNRKTRYRKPRFDNRVRSKHKGWLAPSVEVKIQEHITAIRRVCGILPVSKVVVETAEFDLQLLKAIADGKPVPQGEDYQKGEMYGHYNVRQYVLWRDNYTCQCCGTHPSKKKEVRLHVHHLESRKVGGDAPDNQVTLCESCHEKLHKGLIAEKDFKKRKRRSTRDATFMGIMRKTLMQRLCSELPIPVVKTRGYITKATREKLRVLPKSHINDALAIAQGKQGFNVGYLPGILQIDKIYTIRPVRHHNRQLHKATILKGGIRKSNQTEKYVFGYRLFDKVQFNGQDCFIWGRRTTGIFTIKTINGKMIKDGISFKKLKLVEKSTSYLIA

SEQ ID NO: 12354 - protein, 416 aa, unidentified
  REGION 1..416: note = Human gut metagenome
MVYVLDKNGQPLMPTDRHRKVRLMLQSGQAKVIKRCPFTIQLNYDSGHQTQEISLGIDAGSKHIGVSATTKIKVLYEVDVELRNDIVDLLSSRRELRRGRRNRKTRYRQAKFNNRRRGNGWLAPSIRQKIGTHLTVVENICKILPISRIMVETASFDIQKIKNPDIQGAEYQQGDQLEFWNVREYVLFRDGHTCQCCKGKSKDKILNVHHIESRKTGGNAPNNLITLCETCHTGYHKGTVQLPKAIKRDMRFKDAAFMGIMRWAFYEALKQQYEPVGTPVHNTYGYITKHTRIAYNLPKEHYVDARCISGNPEASSNGEYYYQKKVRCHNRQIHKLTVLKGGIRKQNQATYLVKGYRLFDKVSYQGKGYFVFGRRQSGFFDIRTLSGEKVNKGSLSCKKLKFIATRTYYLTERRAV

SEQ ID NO: 12355 - protein, 268 aa, unidentified
  REGION 1..268: note = Human gut metagenome
LLKAIADGKPVPQGEDYQKGEMYGHYNVRQYVLWRDDYTCQCCGAHATKKKEVRLHVHHLESRKVGGDAPDNQVTLCESCHEKLHKGLITAKDFKKRKRRSTRDATFMGIMRKTLMQMLCSELPIPVVKTRGYITKATREKLLVLPKSHTNDALAIAQGKRGFNVGYLPEIAQIDKICTIRPVRHHNRQLHKAAILTGGIRKSNQAEKYVFGYRLFDKVQFNGQDCFIWGRRPTGIFTIKTINGKMIKDDISFKKLKPVEKSTSYLIA

SEQ ID NO: 12356 - protein, 477 aa, unidentified; identical to SEQ ID NO: 3241
  REGION 1..477: note = Human gut metagenome

SEQ ID NO: 12357 - protein, 376 aa, unidentified
  REGION 1..376: note = Human gut metagenome
MPNKVYVINKHGRPLMPCSPAKARHLLDAGKAKVKKRTPFTIQLVYGSSGYTQEVILGVDAGSKTIGISASTKKEEVFAADVTPRNDVVDLLSTRREFRRARRNRKTRYRKPRFDNRVRSKHKGWLAPSVEVKIQEHITAIRRVCGILPVSKVVVETAEFDLQLLKAIEEGKPVPQGEDYQQGEMYGHYNVRQYVLWRDNYTCQCCGAHATKKKEVRLHVHHLESRKVGGDAPDNQVTLCDRCHEKLHKGLITEKDLKKRKRRSTRDATFMGIMRKTLMQRLCSELPIPVIETRGYITKATREKLLVLPKSHTNDALAIAQGKHGFNVGYLPGIEQIDKIYTIRPVRHHNRQLHKAAILKGGIRKSNQVEKYVFGY

SEQ ID NO: 12358 - protein, 414 aa, unidentified; identical to SEQ ID NO: 4015
  REGION 1..414: note = Human gut metagenome

SEQ ID NO: 12359 - protein, 357 aa, Calothrix sp.; identical to SEQ ID NO: 4929

SEQ ID NO: 12360 - protein, 441 aa, unidentified
  REGION 1..441: note = Human metagenome
VGVPQQCEIFSKERKLLMVFVLNRSKKPLDMISNAEARILIKKKLAVIHKVYPFTIRLRDNSAVSNDKNYTVKVDPGSKHTGIAITDDKDQVVMLAELEHRGHVIKKKMDSRRAVRCHRRNRKTRYREARFLNRTRPEGWLAPSVKSRADNVINFIKKYKKLLNINKVMIEHVSFDTAQMTANNNLIGIGYQQGPLYQTKLREFIFSKTNGRCSYCGAKATEIDHIVPRANGGTNSTYNLTPACRSCNELKGKLSLKDFGKIVGKDFSKLEPKKLPRNAAIVQSARNYMVKEITKIVSDTKTYNTWLTKYNRDQLGLPKQHYYDALSVGNVENYKFLTNEVLQISAKGRGSRQMCRVDRYGFPRTSPKGSKSVEGFQTGDMVKVIILKGSKKGEYLGKVAVRSSKKFDIQTKTKTIKSIWYKHFHIVQRSDGYLYSYKERI

SEQ ID NO: 12361 - protein, 407 aa, unidentified
  REGION 1..407: note = Human gut metagenome
VLDANNKQLTPTKEQKAWFLIRKKRATLVSKYPMVIQLKKKIPDKEICKDEVRCGIDDGGLHVGVALVQKCQTRNKVVFKGVIEQRNDVKHLIDVRCGYRRYHRYHKRYRSARFNNRNSSKREERIAPSILQKRQATIRVINQLNKWINITNYWLEDVAIDIRALTDGYKPYRWQYQKSNRLDENIRKAVILRDGCKCMECGKSNCRLEVHHIKPRRLKGSSTLDNLITLCTKCHQKTESVEELYMDRYFALLNSSDNKNLNYAQHVMIGKKWLREQLSNLGMLYLTNGGDTANKRIDWDIAKSHSNDAICITDLRPDTCEIKEWAIKPMRRQSKAKTDNVLGIKHRDLVEYTFRNGKTHRGYVTALYPEQNAINFQSPTKHCKKVNAKKCKVLWKYSKIYWLDNVG

SEQ ID NO: 12362 - protein, 413 aa, unidentified
  REGION 1..413: note = Human gut metagenome
LKVFVLNMRGKPLMPCSPAKARHMLKAGKAFVVRRTPFTIKLTIATGETKQDVTLGVDAGARHVGISATTEKEEVFASEVALRQDITGLLADRLAFRRARRNRKTRYRAPRFNNRVRSKHKGWLAPSVENRIQAHISRIEAVCRLLPVTKIVIETASFDIQKIRNPEVEGTGYQQGDQLGFWNVREYVLFRDGHVCQHCHGRSRDKILNVHHLESRKTGGDAPNNLITLCETCHKAYHAGKIKLKVKRGQSFRAEAFMGIMRWTLLDRVRKTHPKLPVENTYGYLTKHKRIALGLPKTHCADAFCIAGNLKALRRGDFLFQQQTRKHNRQIHRCSILKGGVRKLNQAPFLVKGFRLFDKVRIGGQIGFVFGRRVRGIFNIRRLDKTVIGTDINCKKLSLLETRKTFLTELRKE

SEQ ID NO: 12363 - protein, 430 aa, Desulfobacter sp.
LSVFVLDTNRKPQNPVHPAKARLLLTEGKAAVFRQFPFTIILKEKVLDVASNPLRIKIDPGSRETGIAVINDDSGEIIFAMELRHRGQQIKNNLESRRAIRRSRRNRKTRYRKPRFDNRTRAEGWLPPSLKSRVHNIETWVNRLCRFCNIQAISMELVRFDMQKIQNPEISGVAYQQGELMGYEVREYLLEKWDRTCAYCGKTDIPLEIEHIVPKSKGGSNRVSNLTLACTACNRKKGNKPLEQFLSRKPGLLKRIQKQSKVPLKDAGAVNTTRWDLFRTLKKTGLPVETGSGGLTKFNRTTRGLHKTHWLDAACVGKSTPEKMFQIDKAVLIVKADGHGSRQMCRVNKFGFPRTTAKSTEKKVKGFQTGDIVKAVVTSGKKVGTYTGRVAVRKSGSFNIKTVDKTVQGISWKYCRLLHASDGYSYNTTC

SEQ ID NO: 12364 - protein, 408 aa, unidentified; identical to SEQ ID NO: 6729
  REGION 1..408: note = Human gut metagenome

SEQ ID NO: 12365 - protein, 518 aa, unidentified
  REGION 1..518: note = Human gut metagenome
MANLKLIDELLEKTEYIYVLGIDGKPQMPTNRKVRVRSLFKSGMAKVVDTVPFTMQLLYENKPVLQPITIAEDPGRTNIGAAVLTQFGDLVFSAVVETRNKSIKKLMSDRKAHRQASRHGERKARQRLAKKYKSMIKAGMIMRKLPQYAADKFVTCKVIKNTEARFCNRKRMPDWLMPTVNHLVQTHINLIKKVEKYLPITDVAIEVNRFAFMQMENPDASGVDFQNGPLKGFDDVKAAIREQQHGKCLMCKNDIEHFHHIIPRSKGGSNTIQNQVGLCKKCHAKVHTDAEFQAKLKDKKEGLIKKYGALSALNQAVPFICKELLKIYGAEHVHFCTGKDTSLIRSSLGYDKTKDNQMHEVDAYCICLAAIGADKTKRPDFNNVFKIKQFRRQDRSIINYQRERTYYLDGKKIATNRKPRFEQKGDALSDWYSEQVKLKGKKYADKLTGRITVKKSTRGYNSKDRVMPGTIFYYGGKRLVLSGQTTRGKYYKAYGDPKTNYPAAKCQIYKHNEGLAFV

SEQ ID NO: 12366 - protein, 512 aa, unidentified; identical to SEQ ID NO: 4031
  REGION 1..512: note = Human gut metagenome

SEQ ID NO: 12367 - protein, 453 aa, Scytonema sp.
MSKVFVIDTNKKPLNPIHSAQARQLLRNGKAAVFKRFPFTIILKEARPEAPVQSLRLKIDPGSKTSGIAIVNDSTGEVVFAAELKHRGFAIHESLTSRKQLRRSRRNRKTRYRQPPKHEWFRKGNKQPCPKQRRSWIAPSLMSRVHNIKTWVERLRKVAPIKAISQELVRFDMQLIRHPNIQGKEYQQGFLFGYETREYLLEKWKRECAYCGIKNVPFQIEHIHCRAKGGSDSITNLTLSCEKCNLKKGTKDIKDFLKKAPARLEKILKQAKQPLADAAAVNSTRFKLLEVLKETGLPVETGSGGLTKFNRTQQGLEKTHWIDSACVGKSTPEKLNVKGVKPLLITANGHGTRQICRTDKYGFPNRHCSRTKFHFGFQTGDIVKAIVTNGTVGASSRGTRPTRCLKKVGEYVGRIATRATGSFNISTKDGLVQGISQKYCKQIHKKDGYSYVF

SEQ ID NO: 12368 - protein, 512 aa, unidentified
  REGION 1..512: note = Human gut metagenome
MSTVYVLNKDGKPLMPTTRGGHVRHLLKEQKARVVRTNPFTIQLLYETDNLVQPLYLGIDPGRTNIGVAVVKTDGTAVFTAHLETRNKEIPKLMQGRKKARRARRTNGRRCRRQRRAKANGTISKKCVKQATAQNGSVSKRANEIGVIKRHLPGCEKEVLCIGIKNKEAKFSNRTRPEGWLTPTANQLLQTHINLVKKIQKFLPISDVVLEINKFAFMRLDNPNVQKWQYQQGPLYQKASLEEAVSEMQEHHCLFCKNTIDHYHHVVPQHKNGSNTIGNIVGLCAKHHDLVHKDTSWQEKLAKKKTGLNKRYGALSVLNQIIPALTKELSSLFPKHFFATNGKSTYDYRAAHGVSKDHWLDAYCIAGSVLPNDACDNNINNRVPYELKQFRRHDRRALHKENMSRVYTLNGKSVATNRHKAIKQTTDSLEEFRQRQPNDVCKLKVKEHHPEYRNPKRNFPGCEFLVGKHTHVMQGTSGSHNGKADGYYDTNGNSYSSGKCKFVVKNEGIVFT

SEQ ID NO: 12369 - protein, 430 aa, Desulfobacter sp.
LNVFVLDTNKKPQNPVHPAKARLLLTEGKAAVFRQFPFTIILKETVLDVASNPLRIKIDPGSRETGIAVINDDSGEIVFAMELRHRGQQIKNNLESRRAIRRSRRNRKTRYRKPRFDNRTRAEGWLPPSLKSRVHNIETWVNRLCRFCNIQAISMELVRFDMQKIQNPEISGVAYQQGELMGYEVREYLLEKWDRTCAYCGKTDIPLEIEHIVPKSKGGSNRVSNLTLACTACNRKKGNKPIEQFLSRKPRLLKRIQKQSKVPLKDAGAVNTTRWDLFRTLKKTGLPVETGSGGLTKFNRTTRGLHKTHWLDAACVGKSTPEKIFQIDKAVLIVKADGHGSRQMCRMNKFGFPRTTAKSTEKKVKGFQTGDIVKAVVTSGKKVGTYIGRVAVRKSGSFNIKTVDKTVQGISWKYCRLLHASDGYSYNTTC

SEQ ID NO: 12370 - protein, 456 aa, Halomonas sp.; identical to SEQ ID NO: 10947

SEQ ID NO: 12371 - protein, 414 aa, unidentified
  REGION 1..414: note = Human gut metagenome
MPCSPAKARLLLKEKKAIVKRRTPFTIQLTIATGETKQPVSLGVDTGYKHVGLSASTEKAELYASEVELRQDVSDLLSARRALRQSRRNRKTRYRAPRFDNRIRTKRKGWLAPSVENRINAHLSRIEAVLRLLPVTKITVETASFDMQLLKNPEISGKEYQEGEQLGFWNVREYVLFRDGHVCQHCHGRSKDPVLNVHHLESRRTGGDSPGNLITLCETCHKALHRGEITLKAKRGQSFRAEAFMGIMRWEVLNRLKASHPELEVNNTYGYRTKHARISNGIAKSHCADAFCIAGNLGAKRLGEFFFQKQTRRNNRQIHKLSILKHGLRKRNQTPFEIKGFRLFDKVACKGEEGFIFGRRSSGFFDVRKLDGTRISAGISYKKLHLLEKRRTYLTEIRKEEALPPLPEGSGLRA

SEQ ID NO: 12372 - protein, 434 aa, Selenomonas sp.
MSFLMTWARRKILQKWKVAEMPTIKKYAFVLDAEGKQLDPTIEQNAWRLVRQHKARLVSKFPMVIQLNKVVDTPNSDMVHCGIDDGANHVGLALVQKCQTKNKVLFKGTIEQRKDVKHLLDVRRGYRRYHRYHKQYRPAKFLNRASSRRIGRLMPSIIQRRQAVLRVIDRLRQWVHIDGYWLEDVKIDIRALTDNYQPYRWQYQKSNRLDNNLRLAAIHRDGCKCMECGKEKTRFEVHHITPQEAGGADTISNLITLCPKCHTRTFGREAQFADRYYAMIGSAGHVEGLDDAQRVMQGKHWFREQLQQRGMLRLTTGGDTANKREDWSIVKTHANDAVCITDLEPENVEVEEWCIKPMRRKSKAGIDEVCGFRHRDYVTYTYRNGDTHTGYVTAMYPDKRQLNFQSPTKHCKRVPALKARLLWRYNRIYWFKCA

SEQ ID NO: 12373 - protein, 431 aa, unidentified
  REGION 1..431: note = Human gut metagenome
MPNKVYIINKHGRPLMPCSPAKARHLLDEGKAKVKKRTPFTIQLVYGSSGYTQEVILGVDAGSKTIGMSASTTKEELLSAEVKPRNDVVDLLSTRREFRRAQRNRKTRYRKPRFDNRVRSKHKGWLAPSVEVKIQEHITAIRRVCGILPVSKVVVETAEFDLQLLKAIADGKPVPQGEDYQQGEMYGHYNVRQYVLWRDGYTCQCCGAHATKKKEVRLHVHHLESRKVGGDAPDNQVTLCESCHEKLHKGLIAEKDFKKRKRKSTRDATFMGIMRKTLMQRLCSELPIPVIETRGYITKATREKLLVLPKSHTNDALAIAQGKQGFNVGYLPGIVQINKIYTIRPVRHHNRQLHKATILKGGIRKSNQTEKYVFGYCLFDKVQFNGQDCFIWGRRTTGIFTIKTINGKMIKDGISFKKLKLAEKSTSYLIA

SEQ ID NO: 12374 - protein, 414 aa, unidentified
  REGION 1..414: note = Human gut metagenome
MPCSPAKARLLLKEKKAIVKRRTPFTIQLTIATGETKQPVGLGVDAGYKHVGLSASTDKAELYASQVELRQDITDLLSARRALRRARRNRKTRYRAPRFNNRIRTKRKGWLAPSVENRINAHLSRIEAVLRLLPVTKITVETASFDMLLLKNPDIAGKEYQEGEQLGFWNVREYVLFRDGHVCQHCYGRSKDPVLNVHHLESRRTGGDSPGNLITLCETCHEALHRGEIALKTKRGHSFRAEAFMGMMRWEVLNRLKASHSELEVNNTYGYRTKHARIVNGIDKSHCADAFCIAGNLGAERLCEFFFQKQTRRNNRQIHKLSILKGGIRKRNQAPFEIKGFRLFDKVACKGEESFIFGRRSSGYFDVRKLDGTRISAGISYKKLRLLEKRRTYLTEIRKEEALPLLPEGRGLRA

SEQ ID NO: 12375 - protein, 493 aa, unidentified; identical to SEQ ID NO: 3781
  REGION 1..493: note = Human gut metagenome

SEQ ID NO: 12376 - protein, 406 aa, unidentified; identical to SEQ ID NO: 5685
  REGION 1..406: note = Human gut metagenome

SEQ ID NO: 12377 - protein, 775 aa, unidentified
  REGION 1..775: note = Ga0315296_10011343
VVVRPQGKLDHIPIPKPERGGITIRSENVLGIDFGPEHVGLALVRREPAGEQVLYAASITLRDLSPVMKERRALRRQRRSESWYRQPRVPQRGGGSARGAGAQEDEQAVEGVPEEEEEDRSRARSAPEYRRAQGCNKPKRKCKYVDPKTGEVCGANTPRKEKVRDLLLWDICQHLPVEPEQRLAILSYVNQVNIVRPEVLACLALEERALLENHRALARASKSKPLPQLLCELKIKKQLQSQILAIASGDPERKAADLKGRMAFCRKHFLLHHQQTRIPKPSAWLPPSIRCRHADLERVCREEVAPRWPVHRIRLERAQFDLQAIQRDPQGRGKDWDPEEWQRGPCWGRRNIYSAKRHEQGNRCAYCGKEPKKENRLELEHVKPGGGNTWDNLVLACRKCNQRKGKAEARGAGLKFSVDPDTGVSLAPRGLGESVVARYMTQTDQGYRELVARLQQLFPDAQIEYRYGYQTDHIRKRWIGSAQFAETALSLGYKQSPPRPKKRRKQWSELAHLKRKPRRHSDPLKSHVMDAVAIAGSLQRDSPPELCQADKITIRPSRRQLFDTNPLGRGSDGRFYQRVKICGTQGGLSFRRVKHVVDARKRAILERVRDLLIEQAKGNEESPPSAFTPDAAQLIPFTSVRLAKRDASKTNTRRLHAPDDDRLPQQKGGHWYKAAGGPNWATVVYRLGGREQVAVLRNPAAFPDASSDIPAGAQVLFSFRKGKLVSFEQDGQTTRARITKNNSDGTLTVERLDDGREVTRSARCFRPVPLLAPNA

SEQ ID NO: 12378 - protein, 470 aa, unidentified; identical to SEQ ID NO: 2925
  REGION 1..470: note = Human gut metagenome

SEQ ID NO: 12379 - protein, 443 aa, unidentified
  REGION 1..443: note = Human gut metagenome
LTKDENRPSGRTTGLRAEQAEPAGIRKGDTLKVFVLNMRGKPLMPCSPAKARHMLKAGKAVVVRRTPFTIKLTIATGETKQDVTLGVDAGARHVGISATTEKEEVFASEVALRQDITGLLADRLAFRRARRNRKTRYRAPRFNNRVRSKHKGWLAPSVENRIQAHMSRIEAVCRLLPVTKIVIETASFDIQKIRNPEVEGTGYQQGDQLGFWNVREYVLFRDGHICQHCRGRSKDPILNVHHLESRKTGGDAPNNLITLCETCHKAYHAGKIKLKVKRGQSFRAEAFMGIMRWTLLDRVRKTHPKLPVENTYGYLTKHKRIALGLPKTHCADAFCIAGNLKALRRGDFLFQQQTRKHNRQIHKCSILKGGVRTLNQAPFLVKGFRLFDKVRIGGQIGFVFGRRVRGTFNIRRLDKTVIGTDINCKKLSLLETRKTFLTELRKE

SEQ ID NO: 12380 - protein, 428 aa, unidentified; identical to SEQ ID NO: 6717
  REGION 1..428: note = Human gut metagenome

SEQ ID NO: 12381 - protein, 428 aa, Moorena sp.; identical to SEQ ID NO: 4771

SEQ ID NO: 12382 - protein, 431 aa, unidentified
  REGION 1..431: note = Human gut metagenome
MPNKVYVINKHGRPLMPCSPAKARHLLDAGKAKVKKRTPFTIQLVYGSSGYTQEVILGVDAGSKTIGVSALTKKEELFAANVIPRNDVVDLLSTRREFRRARRNRKTRYRKPRFDNRVRSKHKGWLAPSVEVKIQEHITTIRRVYGILPVSKVVVETAEFDLQLLKAIADGKPVPQGEDYQKGEMYGHYNVRQYVLWRDNYTCQCCGAHATKKKEVRLHVHHLESRKVGGDAPDNQVTLCESCHEKLHKGLIAEKDFKKRKRRSTRDATFMGIMRKTLMQRLCSELPIPVVKTRGYITKATREKLLVLPKSHTNDALAIAQGKRGFNVGYLPEIAQIDKIYTIRPVRHHNRQLHKATILKGGIRKSNQTEKYVFGYRLFDKVQFNGQDCFIWGRRTTGIFTIKTINGKMIKDGISFKKLKPVEKSTSYLIA

SEQ ID NO: 12383 - protein, 420 aa, unidentified; identical to SEQ ID NO: 9391
  REGION 1..420: note = metagenome

SEQ ID NO: 12384 - protein, 438 aa, unidentified
  REGION 1..438: note = Human gut metagenome
LITGKYISSTRPWQEEKFSERKVSEMTNYAFVLDADGKQLAPTKEQKAWFLIRKKRAALVSKYPMVIQLNKEVPDEEICKDEIRCGIDDGGLHVGIALVQKCQTQNKVVFKGTIEQRNDVKHLMDIRRGYRHYHRYHKRYRQARFNNRSSSKQKGRITPSILQKRQATVRVINQLNKWINITDYWLEDVAIDIRAMTDGYKPYKWQYQKSNRLDENIRKAVILRDGCKCMECGKSNCKLEVHHIKPRRSKGSNTLGNLITLCAKCHHKTKGVEELYMDRYFALLNSSDNKNLNYAQHVMIGKKWLREQLSSLGILHLTNGGDTANKRIDWDIAKSHSNDAICITNLRPDECEIKEWTIKPMRRQSKAKTDNVLGIKHRDFVEYTFKNGETHRGYVTALYPEQNALNFQSPTKHCKKVNVRKCKVLWKYSKIYWLDNVS

SEQ ID NO: 12385 - protein, 414 aa, unidentified; identical to SEQ ID NO: 7107
  REGION 1..414: note = Human gut metagenome

SEQ ID NO: 12386 - protein, 410 aa, Bacillus sp.
MTKNKNKEYCFVLDVEGGKLAPTSVNNGWYLIRKKRAKLVAKYPMVIQLHKSVEDVDYKIRLGIDDGSLHVGVGLVQECKTKNKPIFKATIEHRKDVSKLMEQRRGYRRYKRNHKRYRQAKFGNRASSRREGRIAPSILQKRQTIIRFVNKISKWIDIASIHLEDVAIDIRALTDDKKLYNWQCQKSNRLDENMRKAVIIRDKYECMECRKSNCMLEVHHIVPRRLRGSNTLDNLITLCSKCHQKTEGKEEKFVDKYQKLINGKSLRLDFAQHVMQGKNWLQQHLSQYGTLLLTSGGDTANRRIDWSIEKAHSNDALVICGLEIHDTNIKDWVIKPIRKKTKAIHSETYGFKHRDIVQYTDTKKVTHVGYISAMYPDKLQINIQTKEKHLKRVNARKSVLKWRFRGLYFL

SEQ ID NO: 12387 - protein, 451 aa, Moorena sp.; identical to SEQ ID NO: 5203

SEQ ID NO: 12388 - protein, 411 aa, unidentified; identical to SEQ ID NO: 6901
  REGION 1..411: note = Human gut metagenome

SEQ ID NO: 12389 - protein, 461 aa, unidentified
  REGION 1..461: note = Human gut metagenome
MVYVINKQGQALMPTERFGKVRRLLKNGLANVVCRIPFTIQLDYDTTNFVQPISLGVDAGSKHIGISATTSEKELYAADVELRNDIVEKLSTRKEQRRTRRNRLRYRKVRFNNRVSSKRKGRLAPSIENKIQTHLTVVEKIHKFLPVTNIIVETAAFDIQKIKNPSISNEEYQQGEQLHFFNVREYVLHRDGYQCQHCKGKSKDPILNVHHIESRKVGGNSSQNLITLCKSCHKAYHKGKIELKVKRGASFRDSAFMSTMRWSFYEKLKNIYPNVSMTFGYITKNTRITNGLPKDHYVDARCISGNPTTKPLGYYFYQKKVRCQNRQIHKVNFLKGGRKKLNQAPFLVKGYRLFDLVEYQKDLYYIFGRRDSGFFDIRKLDGTKVNKGSISCKQMRLIDIRKTIIIEKRIASKFMKKGDKVREIGDTLTGTIVYIANGYADVKYPNMKGVCSLPVQFLEKV

SEQ ID NO: 12390 - protein, 413 aa, unidentified
  REGION 1..413: note = Human gut metagenome
MTNYAFVLDVNGKQLAPTKEQKAWFLIRKKRATLISKYPMVIQLKKEISDEQICKDEICCGIDDGGLYVGVALVQKCKTKNKVVFKGTIEQRNDVKHLMEVRKGYRGYHRFHKRYRQARFNNRKSSKRKERIAPSILQKRQAIIRVIKQLNKWINIANYLLEDVAIDIRALTDGYKLYRWQYQQSNRLDENIRKTVILRDDCKCMECGKSNCRLEVHHIKPRRLNGSNTLDNLISLCETCHQRTEGQEELYMDRYFSILNSTDNKNLNYAQHVMIGKKWLREQLSELGTLILTTGGDTANKRIDWNIEKSHSNDAICITGLQTDTCNVKEWTIKPMRRQSKAKTDNVLGIKHRDLVEYTFRNGETHRGYVTALYPEQNALNFQSPTKHCKRVNAKKCKLIWKYSKIYWLDNVS

SEQ ID NO: 12391 - protein, 442 aa, unidentified; identical to SEQ ID NO: 4418
  REGION 1..442: note = Human gut metagenome

SEQ ID NO: 12392 - protein, 454 aa, Clostridium sp.
LDTVAVINASGKKLMPTNSYRARKLLKSKRAVIHKYRPVFTIKLVDRVDGYTQPIEYKCDTGYQNIGISICSDTKEFVNEQRNLLKDEVKRHNSCRKYRRTRRNRLRYRKARWNNRKGMISKDGFAPSIRNKRDMHIRLYEEYCKVFPITKAVFEMGQFDTQVLKAIEAGLPVPVGIDYQRGEQYGYATLREAVFARDNYTCICCGKSAVKDGVKLRIHHIGYLSGDRSNRMTNLGSVCENCHTSKNHKPGGKLYNLKPRLKTFKGATFMTMVRYSMIKQLKVTTPGVDIKVTYGATTKLARKELNIKKTHSNDAYCMGEFHPKHRSDFKHYKKCRRNNRVLSKFYDAKYRDLRDGSVKTGSQLSCGRTNRKISRHTELDERIYRAHKITKGRVSTRRQHYSLRPGDKVLYNGKIYFVSGMQSNGASVKLTNGKAYSLKKVRVLQHCNAWTAVV

SEQ ID NO: 12393 - protein, 477 aa, unidentified; identical to SEQ ID NO: 2707
  REGION 1..477: note = Human gut metagenome

SEQ ID NO: 12394 - protein, 423 aa, Moorena sp.
MSNLIFVLDSNQKPLTPCKPSMAHKLLTANKAAVFRMYPFTIILKKIVSATPEPTTLKIDPGSKTTGIALLQGEKVIWGAELTHRGQAIKASLESRRAIRRGRRNRHTRYRQARFLNRKRPKGWLAPSLQHRVETTLCWVNRLIKLVPISSIVQELVRFDLQQLENPEISGVEYQQGELLGYEVREYLLNKWDRKCAYCGVENVPLQVEHIHPKAKGGTNRISNLCLACEKCNTKKGSQDIEKFLAKKPDILKHILSQAKRPLKDAAAVNSTRWALFNRLKETGLPVSTGSGGLTKFNRTRLNLSKTHWLDAACVGSVESLEILTSKPLLIKATGHGTRQMCRTDKYGFPSRYVPRFKFVKGFQTGDIVKAVVTSGKKIGTYLGRVAVRTSGSFNISAPELVSGISFKYCKIVHHKDGYSYAF

SEQ ID NO: 12395 - protein, 465 aa, unidentified
  REGION 1..465: note = Human gut metagenome
MNTCVCVLSNNGERLMPTFRLGKVRHLLKDGKAKIVKHYPFTIQLLYNSKTNIQPIEICEDVGYNYIGISVKSESYEYVSAQYDTLQDEKEHHDDCRKMRRARRNRLRYRKPRFDNRKRSEGWLAPSLEHKKQLNISLVERYVSVIPITHATVEVGSFDTMLLQAIQKGEAKPEGADYQEGPRYNLATLREAVFYRDNYACQVCGRKITDGAILHMHHMFYWKGRHGYKLDELVTACEKCHTPANHQKGGKLFGFGEDKEFADLSGAAFMNAVRWQIVNALHTTYSKEFVTITYGAMTKEKRIALQLEKSHNNDAYAMGEFHPSRRCAFEHYEKVRRNNRILEKFYDSRYIDIRTGKETAGKELFNGRISRNHKKDSENLHKYRGKRVYKGHRALMRKKINLNPGDVVSLNGETLVVHGTHTDKKGAVNVEFKAPAKNGQKSASLKKLKIVKTANSMHSAWEKVS

SEQ ID NO: 12396 - protein, 473 aa, unidentified; identical to SEQ ID NO: 3562
  REGION 1..473: note = uncultured beta proteobacterium

SEQ ID NO: 12397 - protein, 534 aa, Acrocarpospora sp.
LTTFHVSEQTHQAVLPQRLALESVGADNPEGGDETAYRLPTLPGAGVEHGRGEIGSGGTRLLRRHPEPSSDGKGAARKGATHPVVFVLDKHGHPLDPCHPARARRLLAAGQAVVVRHTPFVIRLRDRVAADSTVQGVQVGIDPGSKHTGIAVFTERGEDRAGKYSIQLDHRGGQIRDKLTARAALRGGRRSRTLRYRAPRFNNRTKPKGWLAPSLRHRVDTTMSWVTRLSRWAPVRAVHVERVAFDTHTLTAGRPLQGVEYQQGTLAGYEVREYLLAKWGRTCAYCGATGVPLNIDHIHPRSRGGSDRVGNLTLACIPCNQTKNATPIEEFLKSKPALLAKLLKHAKAPLRDAAAVNATRWALWRTLAATGLPVATSSGGRTKWNRSRTGAPKSHTLDALHVGHLDAVTGWPSVVLVVKATGRGTYCRTRTDKYGFPRLRLPRVKQVHGYATGDLVRAVVPSGKNAGTHVGRVAVRSTGKFNITTAHGTRQGTHHRHVRLLQRADGYAYTSQGETHATGRSGLEGPPAPVSSPG

SEQ ID NO: 12398 - protein, 454 aa, unidentified
  REGION 1..454: note = Human gut metagenome
VSYTARYVPAYRFKHITKKEVPYMVYVLDIDGQPLMPTSRHGKVRRLLNSHLAKVVKRCPFTIQLLYQSTKETQPVSLGVDAGSRHIGLSATTEREVVYQEELVPRNDIVKLLSARRTLRRTRRNRKTRYRKPRFNNRVHSKHKGWLAPSVEVKIQEHITTIKRICQILPISEIQVETAEFDLQRLKAMKEGKPLPVGTDYQLGEQYDFYNTRQYVLHRDGYTCQCCGTHDNNIKLHVHHIESRQTGGDAPNNLITLCEHCHKLLHAGKTILPKDKKRGRSYRDATFMGVMRKTLQERLKKEIDVPVEGTYGYITKYWREKTGLEKSHTNDAICISKHPYAKPLDTYYLTKAVRHHNRQIHKSNFSKGGIRKRNQAPYLVKGFRLFDKVLYQGKSYFIFGRRATGYFDIRTLDGTKVNKGSIKYKKLRIQDTAKAYLKEARAIPHVNKFTCVLA

SEQ ID NO: 12399 - protein, 499 aa, unidentified
  REGION 1..499: note = Human gut metagenome
MSTSVFVLDKKHRPLMPCRPARARRLLRAGRARVVKRFPFVIRLVDRTVEQSEVQPVLIKLDPGSRETGAAVVRDDEKKRHHALAFFVIKHRGGAIRDALKARSAFRRRRRSQNFRCRSPRFLNRVKPKGWLPPSLRHRVETTLSFVRRMCRYLPVSGIATELVKFDSQKLQNPEVSGVKYQQGTLFEYEVREYLLEKFGRKCVYCGAEGVPLNIDHVVPRAKGGSNRVSNLVLACVSCNQKKGARSLEDFLKGKPEVLARVRRELKTPLRDAAAVNATRWVLFNELKATGLPVETGSGALTKLNRHAFGVEKEHWLDALCVGRLNGVVTRKGLNVLEIRCMGRGSRQRTRLTKYGFPRGYLMRQKCVHGFATGDMVEANVPKGKKAGLWRGRVAVRVSGSFNIQTPKGVIQGVGWKHCRLISHNDGYGTRGSATRLIPPCLNLWTTHPLSSRSTAVFDSGTEGCLRQPQATSGNPRSSASRINSLPPKAAGGFMPRST

SEQ ID NO: 12400 - protein, 442 aa, unidentified; identical to SEQ ID NO: 3218
  REGION 1..442: note = Human gut metagenome

SEQ ID NO: 12401 - protein, 438 aa, unidentified; identical to SEQ ID NO: 4848
  REGION 1..438: note = Human gut metagenome

SEQ ID NO: 12402 - protein, 408 aa, unidentified
  REGION 1..408: note = Human gut metagenome
MVYVQDINGKPMMPTTRYGKVRRLLKDKKAVVVNLCPFTIKLTYVTSDYKQKIVLGVDAGTKHVGLSATTKSKELYSSEVILRNDIVDLLSTRRELRKTRRNRLRYRKPRFNNRIKSKRPEWVAPSVKYKIDAHIRVIDNVCFILPISRIVIEVAQFDTQKIKNPNISGKEYQEGDQLGFWNVREYVLARDGHKCQYCKGKSKDSILNVHHIESRKTGGSSPSNLITLCETCHKEYHKGNINLKIKRGKSLRDAAVMGIMKWKLYEELKSKYDRVFMTFGYVTKYNRINHGIEKSHVSDAFVISKNFNAIRLGYYYKVRLVRRHNRQIHKQKIPKGGIKRLNQSPFEVFGFRLFDRVMFENNYYFIFGRRKTGRFNIRDIDGKNQRDITYKKLKLSRRKCFMVQNEMN

SEQ ID NO: 12403 - protein, 302 aa, unidentified
  REGION 1..302: note = Human gut metagenome
PSVENRINAHLSRIEAVLRLLPITKITVETASFDMQRLKNPDISGKEYQEGEQLGFWNVREYVLFRDGHVCRHCHGRSKDPVLNVHHLESRRTGSDSPDNLITLCVTCHKALHRGEITLKAKRGQSFRAQAFMGIMRREVLNRLKASYPELKVHETYGYLTKHARIANGIVKSHGADAFCIAGNLGAERLGEFFFQKQTRRNNRQIHKLSILKGGIRKRNQAPFEAKGFRLFDKVACQGEEGFIFGRRSSGSFDVRKLDGTRISAGISCKKLRLLEKRRTYLTEIRKEEALPPLPEGRGLRA

SEQ ID NO: 12404 - protein, 419 aa, unidentified
  REGION 1..419: note = Anaerobic digester metagenome
MLVYVINRHGKPLMPCKPQKARKLLKEQKAKVVKRTPFTIQLLYGSSGYKQDVTLGVDTGSKTIGLSATTENKEVFSAEVELRTDIVDLLSTRRTLRRSRRSRKTRYRQPRFLNRKKPEGWVAPSVQNKIDTHIKVVKMVHAILPITKVVVEVAQFDIQKIKNQNIQGEDYQQGEQLGFYNVREYVLFRDKHTCQHCNGKSKDPILNVHHIESRKTGGNSPDNLITLCETCHRKYHKGEIELKVKRSSSFRDAAFMGIMRWAFYDKLKELYSNVSLTFGYITKNVRIKHNLEKSHRIDARCISGNPLAKENGCWYFFKQVRKQNRQLHKTNPKKGVRRENKAPGYVHGYQLFDKVEYLDRECFVFGRRSSGYFDLRTLDGEVVSRSASVGKLKLVERSSSLLCERREVSFLTGLKPCVS

SEQ ID NO: 12405 - protein, 418 aa, unidentified; identical to SEQ ID NO: 4950
  REGION 1..418: note = Human gut metagenome

SEQ ID NO: 12406 - protein, 428 aa, unidentified
  REGION 1..428: note = Human gut metagenome
LKVFVLNMRGQPLMPCSPAKARHLLKAGKAVVRRRTPFTIQLRIATGETKQSVTLGVDAGAKHVGLSAATEKEEVFASEVELRQDITGLLAARLSLRRERRQRKTRYRAPRFLNRVRSKHKGWLAPSVENRIQAHLSRIDAICGLLPVTKIVIETASFDIQKIKHPDVEGTDYQQGDQLGFWNVREYVLFRDGHVCQHCHGHAKDKILNVHHLESRQTGGDAPNNLITLCETCHKACHAGKIKLKVKRGQSFREEAFIGIMRWTLLDRVRKAHPGLPVENTYGYLTKNTRITLGLPKAHCVDGYCIAGNLKAVRRGVYLHQRQVRKHNRQIHKCTVLSKTLKDGTKIGYRKLNQTPHLVKNFRLFDKVRCLGQTGFIFGRRSSGYFDVRRLDGVKISSCINYRKLTLLEKRSTYLTELRKEDGASSPV

SEQ ID NO: 12407 - protein, 423 aa, Arthrospira sp.
MSNHIFVLDTNRKPLTPCKPGVARSLLKAGKASVFRRYPFTIILNKEVDANPEPLELKLDPGSKVTGIALKQGNHIIFAAELQHRGQQIKEALLSRRQLRRSRRNRKTRYRPARFLNRTRPEGWLAPSWQHRVDTLMTWVHRFRRLAPVGRITQDLVRFDLQLMENPEISGVEYQQGELQGYEVREYLLEKWGRTCAYCGAQNVPLEVEQIQPRSKGGSDRVSNLTMACHSCNQAKGNGDIRDFLSGQPDVLSRLLRQAKSPLKDAAAVNSTRWALFKALKATGLPVTTGTGGQTKFNRLRLNLPKAHWLDAACVGPVESLEVLTSKPLLILAKGHGTRQMCGTNKYGFPNRHRSRRQIHKGFQTGDMVTALVTAGKKIGSYLGRVLCRASGSFDITTASVRVAGISHKYCQPIHRKDGYAYA

SEQ ID NO: 12408 - protein, 470 aa, unidentified; identical to SEQ ID NO: 5320
  REGION 1..470: note = Human gut metagenome

SEQ ID NO: 12409 - protein, 441 aa, Moorena sp.
MSKVFVVDANKHPLNPVHPGYARLLLKQGKAAVLRHYPFVLILHAEVEMPQLEPLRVKLDPGSKTTGLALVKDATGEVIFAAEITHRGAEIKHALDGRRGVRRGRRQRDTRYRKPRFLNRRRPKGWLPPSLESRVCNVVTWVKRLRRLCPLAAISQELVRFDLQAMETPEIAGIAYQQGTLAGYEAREYLLEKWGRKCCYCGATRLPLQIEHIQCRAKGGSDRISNLCLACGPCNLKKGTVDIQVFLAKKPDLRKRILARARAPLADAAAVNSTRWALYERLQAVGLPVECGSGGRTKFNRASRGLEKTHWHDAACVGASTPEILQIQGIVPLLITAQGYGCRQMCNVNEIGFPCSKPKGAKKVKGFQTGDIVRAIVTSGTKQGTYMGRVLVRATGSFDIRTKDGRVQGISHRFCTPIHRRDGYSYKQGADHAAHPTQSTR

SEQ ID NO: 12410 - protein, 431 aa, unidentified; identical to SEQ ID NO: 6055
  REGION 1..431: note = Human gut metagenome

SEQ ID NO: 12411 - protein, 417 aa, unidentified; identical to SEQ ID NO: 12198
  REGION 1..417: note = Human gut metagenome

SEQ ID NO: 12412 - protein, 431 aa, unidentified
  REGION 1..431: note = Human gut metagenome
MPNKVYVINKHGRPLMPCSPAKARHLLDAGKAKVKKRTPFTIQLVYGSSGYTQEVILGVDAGSKTIGMSASTTKEELLSAEVKPRNDVVDLLSTRREFRRARRNRKTRYRKPRFDNRVRSKHKGWLAPSVEVKIQEHITAIRRVCGILPVSKVVVETAEFDLQLLKAIADGKPVPQGEDYQQGEMYGHYNVRQYVLWRDNYTCQCCGAHATKKKEVRLHVHHLESRKVGGDAPDNQVTLCESCHEKLHKGLIAEKDFKKRKRKSTRDATFMGIMRKTLMQRLCSELPIPVVETRGYITKATREKLLVLPKSHTNDALAIAQGKQGFNVGYLPEILQIDKIYTIRPVRHHNRQLHKAAILKGGIRKSNQAGKYVFGYRLFDKVQFNGQDCFVWRRRTTGIFTIKTINGKMIKDGISFKKLKLVEKSTGYLIA

SEQ ID NO: 12413 - protein, 428 aa, unidentified
  REGION 1..428: note = Human gut metagenome
LKVFVLNMRGRPLMPCSPAKARHLLKAGKAVVKRRTPFTIQLRIATGETKQNVTLGVDAGAKHVGLSAATEKEEVFASEVELRQDITGLLAARLSLRRDRRHRKTRYRAPRFLNRVRSKHNGWLPPSVENRIQAHLSRIDAICGLLPVTKIVIETASFDIQKIKHPDVEGTDYQQGDQLGFWNVREYVLFRDGHVCQHCHGHAKDKILNVHHLESRQTGGDAPNNLITLCERCHKACHAGKIKLKVKRGQSFREEAFMGIMRWTLLDRVRKAHPGLPVENTYGYLTKNTRITQGLPKAHCVDAYCIAGNLKAVRRGVHLYQRQVRKHNRQIHKCTVLSKTLKDGTKIGYRKLNQTPHLVKNFRLFDKVRCLGQTGFIFGRRSSGYFDVRRLDGVKISSCINYRKLTLLEKRGTCLTELRKEDGASSPV

SEQ ID NO: 12414 - protein, 431 aa, Klebsiella sp.; identical to SEQ ID NO: 3801

SEQ ID NO: 12415 - protein, 441 aa, Ktedonobacter sp.
MSKVFVVDANKHPLNPVHPGYARLLLKQGKAAVLRHYPFVLILHAEVEMPQLEPLRVKLDPGSKTTGLALVKDATGEVIFAAEITHRGAEIKHALDGRRGVRRGRRQRDTRYRKPRFLNRRRPKGWLPPSLESRVCNVVTWVKRLRRLCPLAAISQELVRFDLQAMENPEIAGIAYQQGTLAGYEAREYLLEKWGRKCCYCGATRLPLQIEHIQCRAKGGSDRISNLCLACGPCNLKKGTVDIQVFLAKKPDLRKRILARARAPLADAAAVNSTRWALYERLQAVGLPVECGSGGRTKFNRASRGLEKTHWHDAACVGASTPEILHLQGIVPLLITAQGYGCRQMCNVNEIGFPCSKPKGAKKVKGFQTGDIVRAIVTSGTKQGTYMGRVLVRATGSFDIRTKDGRVQGISHRFCTPIHRRDGYSYKQGADHAAHPTQSTR

SEQ ID NO: 12416 - protein, 450 aa, Moorena sp.; identical to SEQ ID NO: 4205

SEQ ID NO: 12417 - protein, 419 aa, unidentified; identical to SEQ ID NO: 10184
  REGION 1..419: note = Human gut metagenome

SEQ ID NO: 12418 - protein, 427 aa, Lachnospira sp.
MKQGNRVFVLNMRDEPLMPCSQRKARILLKKGKAVINKYNPFTIQLTYATGETKQDCHIGVDTGAKHIGIAITSEDKVFYKAEVELRQDVSSNLDTKRIYRRSRRNRKCRYRKPRFQNRKRTDKWLPPSLQNRVNHTFNWIDKFSALVPNPILHIEVGKFDTAKMINPDINGVDYQHGQTYGFFDERYFVFARDNYTCQVCGKSKGKILQTHHIIYRSNGGTDRVDNLITVCTDCHTSANHKKGGILYKWQAEHKKVKQYKEPPFMNALRRRIFDKYPDAIITYGSETTPKRKEIGLEKTHYNDAIVISGIETIKENPDEWLLIRQFRKKKRSLHEATARKGRKEPNRTQKRNRKNTPCCKGFWLNDKVSVLGQVGYITGFTSGGAYIKNKNDEYITLPSKSYKQVGISNLRLLSHNNNWQYIRNAV

SEQ ID NO: 12419 - protein, 403 aa, unidentified
  REGION 1..403: note = Human gut metagenome
MPNKVYVINKHGRPLMPCSPAKARHLLDAGKAKVKKRTPFTIQLLFGSTGYTQEVILGVDAGSKTIGLSASAETEELLSAEVKPRNDVVDLLSTHREFRRARRNRKTRYRKPRFDNRVRSKHKGWLAPSVEVKIQEHITSIKRVCRILPVSKVVIETAEFDLQLLKAIADGKPVPQGEDYQKGEMYGHYNVRQYVLWRDDYTCQCCGAHATKKKEVRLHVHHLESRKVGGDAPDNQVTLCESCHEKLHKGLIAEKDFKKRKRRSTRDATFMGIMRKTLMQRLYSELPIPVIETRGYITKATREKLLVLPKSHTNDALAIAQGKRGFNVGYLPEIAQIDKIYTIRPVRHHNRQLHKAAILKGGIRKSNQAGKYVFGYRLFDKVQFNGQDCFIWGRRTTGIFTIK

SEQ ID NO: 12420 - protein, 437 aa, Clostridium sp.; identical to SEQ ID NO: 10814

SEQ ID NO: 12421 - protein, 454 aa, unidentified
  REGION 1..454: note = Human gut metagenome
VSYTARYVPAYRFKHITKKEVPYMVYVLDIDGQPLMPTSRHGKVRRLLNSHLAKVVKRCPFTIQLLYQSTKETQPVSLGVDAGSRHIGLSATTEQEVVYQEELVPRNDIVKLLSARRALRRSRRNRKTRYRKVRFNNCVHSKHKGWLAPSVEVKIQEHITAIKRICQILPISDIHVETAEFDLQRLKAMEEGRPLPVGTDYQLGEQYDFYNTRQYVLHRDEYTCQCCGTHDNNVKLHVHHVESRQTGGEAPNNLITLCEHCHKSIHAGKMMLPKGKKRGKSYRDAAFMGIMRNTLLERLKKEVNVPVTMTYGYITKYWREKAGLEKSHINDAICISKHPYARPLETYYLTKAVRHHNRQIHKTKFSKGGIRKRNQAPYLVKGFRLFDKVLYQGESYFIFGRRITGYFDIRTLDGTKVNKGSTSYKKLRIQDTAEAYLTEVRAIPHMNEFTCVLA

SEQ ID NO: 12422 - protein, 431 aa, Escherichia coli
MNRVFVLSKTGKTLMPCHPARARQLLHDKKAVIKRLYPFTIQLTHRSEEYIQPVELKFDPGSKQTGIGIVLHGKNRFSAIYGTVLTHRGNEIKNNLDSRRMIRRSRRNRKTRYRQVRFLNRVRSKHKGWLAPSVQSRVDNIVEWSKRFIRYVTVGFITVESVKFDMQKMENADVDGIEYQRGTLFDYEVKEYLLEKYNYSCVYCGAKNVPFEKEHVIPRSRGGSNRISNLVLSCRSCNEKKDNLPIEEFLKDNPALLKKIKAQLKSSLKDAAAVNITRKQIVKELENLNVPVLTGTGAETKYNRVSQGYKKEHYIDALCAGTTGTKVYIPSTLKPLLIKKERRNNRQMCLVDKYGFPRGKAKGSKIVHGFKTGDIVKAVVLKGKKKGTYKGKVAVRSSGSFNIKVKQGVVEGIGWKNCVMLYRFDGYSYAY

SEQ ID NO: 12423 - protein, 402 aa, unidentified
  REGION 1..402: note = Human gut metagenome
QPIEYKCDTGYQNIGISICSDTKEFVNEQRDLLKDEVKRHSDSRKYRRTRRNRLRYRKARWNNRKGMISKDGFAPSIRNKRDVHVRLYEEYYKVFPITKAVFEMGQFDTQVLKAVEAGLPIPDGTDYQRGEQYGYATLREAVFARDNYKCICCGKSAIKDGVKLRIHHIGYLSGDRSNRMANLGSVCESCHTSKNHKPGGKLYNLKPELKTFKGATFMTTVRYSMVKQLKAATPDVDIRVTYGAATKLARKALNVKKTHSNDAYCMGEFHPKHRSDFKHYRKCRRNSRVLSRFYDAKYRDLRDGSVKTGSQLSCGRTNRKISRHTELDGRIYRAHKISRGRVSIRRQHYSLRPGDKVLYDGKAYFVTGMQNSGTRVKLTNRKVCSLKKVHVLQHCNAWTAVI

SEQ ID NO: 12424 - protein, 431 aa, unidentified; identical to SEQ ID NO: 4463
  REGION 1..431: note = Human gut metagenome

SEQ ID NO: 12425 - protein, 426 aa, Sutterella sp.
LAKDHYRSIDREETNLRVYVLNKRGEPLMPCSAAKARILLKEKKAKVKRRTPFTIQLTIATGETTQPVNLGVDAGYEHIGLSASTEKAELYASEIELRQDISELLAARRALRGARRSRKTRYRAPRFDNRKRDKGWLAPSVENRIGAHVSRVEAVLRILPVTKIIVETASFDVQRLKNPDVQGVEYQEGEQLGFWNVREYVLFRDGHECQHCHGKSKDRVLNVHHIESRRTGGDAPNNLITLCETCHKAFHRGEIELKVKRGRSFQAETFMGVMRWTFFERLRARHPEIEVRNTYGYLTKDTRIANKIEKSHCADAFCIAGNLKAKRLGYYFFQKQTRRHNRQIHKLTILKGGVRKRHQTPYEIKGFRLYDKVLYRGKTAFIFGRRSSGYFDIRTLDGERISAAVNSKKLRLLEKRRTFLIELRRN

SEQ ID NO: 12426 - protein, 415 aa, unidentified; identical to SEQ ID NO: 10543
  REGION 1..415: note = Human gut metagenome

SEQ ID NO: 12427 - protein, 421 aa, unidentified
  REGION 1..421: note = Clostridia bacterium
MLQKQEYALVLDSDGNKLAPTKVQKAWFLIRKKRAKLIQRYPMVIQLTKKVNMIKDGTTLECGIDDGSKYVGIALVQKCKTKNKVFFKGTIELRQDVKKKMDIRREYRRYRRSHKHYRPARFNNRVSMIKKGLPPPSIKQKKDSIIRVVNSLNKFVNIDNIHLEDVKINIREMVEGKKLYGDEYNIPNKENANLRIATLIRDNYTCQECSKKTNLEVHHIIPRSKNGSNSIYNTITLCADCHQKTEGKEFLFAGKYLRQIGSDFLKGLNYAQHVMQGKKYLRARLREIVNLDTTDGLTTSERREMWGIDKSHSNDAVCITGLKPNDIEITEYTIIPQRRKSKAKSKGLNGFKHRDIVTYHHTNNIDYIGNITAIYTDGTNTLNVKTKEKHFKRVSYKRCKLFYRFDKIWWLQDKFIQFYII

SEQ ID NO: 12428 - protein, 514 aa, Nocardiopsis sp.; identical to SEQ ID NO: 3215

SEQ ID NO: 12429 - protein, 536 aa, unidentified; identical to SEQ ID NO: 4526
  REGION 1..536: note = Human gut metagenome

SEQ ID NO: 12430 - protein, 423 aa, unidentified
  REGION 1..423: note = Human gut metagenome
MVYVLSIDGQPLMPTDRHGKVRHLLKDGRAEVVKCCPFTIRLLYDSTHYTQDIVLGVDAGSKHIGLSGTTETKELYASDVELRNDIVDLISTRRQNRRFRRNRKTRYRKARFLNRLSDKKDWLAPSIRQKVDTHMTVVSRVCKILPVTKIIVETASFDIQKIKDPDISGTGYQHGEQLDFWNVREYVLFRDGHTCQCCKGKSKDPVLNVHHIESRKTGGDAPNNLITLCETCHKGYHSGAVQLPKAIHRGMRFKDAAFMGIMRWAFYNKLKEVYEPQDIEIRMTFGYLTKNTRIRHHLPKEHYIDARCISGHPEAIPNNEVFYQKKVRCHNRQIHKNTILKGGIRKRNQTGYLVKGFRLFDKVAYKGREYFIFGRRQSGFFDLRNLSGCKVNKGSLSYRKIGFLEPRQYYLCERRVMDTQGCA

SEQ ID NO: 12431 - protein, 522 aa, unidentified
  REGION 1..522: note = Human gut metagenome
MNYIDFVFVTDKDNLPCNPINEGYAGKLLRTGKAKIVNHDPLVIKRLDDYSSKNENRHTITLKVDTGFGNIGFSASDNKHEYIAGQVELLSGISDRLVTRKGYRTQRRSRLRYRRNKNIDYKTVNNPTYKNGNEDGWLAPSVIHKIESHVRVIDKIALWIPIDKVIIETANFDIQQIKATLNGIAINGIDYQKGEMYGFENVKQYVRERDNYTCQICKEKLTDKRHVVIEVHHIIPRSKGGSNKPDNMISLCHCCHKKVHENNNDNKLFRELQQRKIINTYKDATFMNTMRWELYNRLKENYDVSISFGYITRMNRKNAGLKKYHYTDAVCISEYHRITLTRNVYLVEQKRCNDRCMESFFDAKYIDSRDGKVKKGSELCKLRVATASSKRSTKKEDIDNKRIYRQEKVSKGKRRYENHSYCLKPGDLIYINYGNHKGNIAEVTTMQKNPNGTYKIVFSYANPKCKIPSINIKEKEYEELTHNQCEKVKIVRTRRGMIWRKVNRLEFEENTAEQIDKKVKNK

SEQ ID NO: 12432 - protein, 414 aa, unidentified; identical to SEQ ID NO: 2588
  REGION 1..414: note = Human gut metagenome

SEQ ID NO: 12433 - protein, 442 aa, Anaerostipes sp.; identical to SEQ ID NO: 2903

SEQ ID NO: 12434 - protein, 312 aa, unidentified
  REGION 1..312: note = Human gut metagenome
MSTCVCVLSNSGERLMPTFRLGKVRRLLKDGKAKIVKHHPFTIQLLYDSKANTQPIEICEDVGYNYIGISVKSQSHEYVSAQYDTLQDEKACHDSCRKLRRTRRNRLRYRKPRFDNRKRGEGWLAPSLRHKKELNVNVVKMYCAVMPITHATIEVGSFDTMLVKAIQEGKAIPEGADYQKGPRYNLATLREAVFYRDNYVCKVCGRKATEGAILHVHHMFYWKGRHGNSLSELITVCEKCHTPANHQKGGKLFGFGEDKEFANLSGAAFMNAVRWQIVNALYATYGKEFVTITYGAMTKEKRIILGIEKTHN

SEQ ID NO: 12435 - protein, 417 aa, unidentified; identical to SEQ ID NO: 5520
  REGION 1..417: note = Human gut metagenome

SEQ ID NO: 12436 - protein, 461 aa, unidentified
  REGION 1..461: note = Human gut metagenome
VQPLYLGIDPGRTNIGVAVVKADGTAVFAAHLETRNKKIPKLMQDRKKARRARRTNGRRCRRQRRAKANGTISKKCVKQDTAQSKNPSKRAKEIGVIKRHLPGCKKDVLCVGIKNKEAKYTNRARLEGWLTPTANQLLQTHINLVKKIQKFLPISDVVLEVNKFAFMRLDNPNIQKWQYQRGPLYQKGSLENAVSEMQEHHCLFCEKPIEHYHHVVLKSENGSNTIANIVGLCAEHHNLVHKDVAWQEKLVEEKTGLNKKYGALSVLNQIIPALTKELSFLFPKHSFMTNGKSTHDYRAAHGISKDHWLDAYCIACSVLPIDVCDSTINNCVPYELKQFRRHDRRALNNENMNRVYTLNDKVVATNRHKATEQEAASLEEFRKEHPNDVCKLKVKEHHPTYRNMNRNYPGSVFLVGKQIHVMQGIASSKDGKATKYNDTRATTIAAGKCKFVAKNSGILFV

SEQ ID NO: 12437 - protein, 442 aa, unidentified; identical to SEQ ID NO: 2903
  REGION 1..442: note = Human gut metagenome

SEQ ID NO: 12438 - protein, 427 aa, unidentified; identical to SEQ ID NO: 4977
  REGION 1..427: note = Human gut metagenome

SEQ ID NO: 12439 - protein, 419 aa, Moorena sp.; identical to SEQ ID NO: 2828

SEQ ID NO: 12440 - protein, 425 aa, Moorena sp.; identical to SEQ ID NO: 7553

SEQ ID NO: 12441 - protein, 442 aa, unidentified
  REGION 1..442: note = Human gut metagenome
MVTVQQSTHHLPFGRVFIRRNLFMVYVISQDGKPLMPCSDPIARLLLKQGKAKVKKREPFTIKLTYETTNYTQGLTLGVDTGSGTIGTAVSKDNGDIVYMSEVVVRNDITDKMTQRAKYRRNRRNRKTRYRKARWLNRASSIKKDRFSPTMQSKLHSHVREIEYIQSILPVTEMVFETGQFDMHLMKNPSLANPKVRPWGYQKGANYGFENTKAMVLNRDNYTCQCCKGKHKDSKLEVHHIVFRSQGGSDEESNLLTLCHTCHKDLHSGKINPKLSGKVKGNLKYATQMNSIRKQLFRFYPNAIETFGYVTKANRLHLGVDKEHYYDACTIATQGNAFNVKSNLYKKKCVSDGDFQKTKGIRSEEPIVTDKICGFRKFDKVRYFGNDYFIKGRMSTGYAILMDIDGNKIDFSTMPRGYKTPKLSNCKRITARSTVMTQVKVV

SEQ ID NO: 12442 - protein, 440 aa, unidentified
  REGION 1..440: note = Ga0315273_10003408
VNITPNGKPEGRVAPSRREMNRVLVVDTNHKPQDPVHPAEARKLLEGQQAAVLRMRPFTIILKVAVEDEPRPLRVKIDPGSRTTGVVLVDEESNQVVWAAEIDHRGVTIKKRMDARRSLRCSRRNRKTRHRQCRFQNRRRIGGWLPPSLRSRVQNIETWVRRLSRWSPVRFISMELVKFNTQLMENPEISGMEYQQGELRGYEVREYLLEKWGRNCVYCGVMGVPLQVEHINPRSRGGTNRISNLAFSCRDCNIEKGTMTAEEFGYPKIQEQARRPLRDAAAVNITRKEIGERLRDTGFPVEEGTGGRTKFNRVGQGYPKAHWIDAACVGKSGENVHLDPTQSVLKIKAMGRGSRQACRMDRFGFPRTGPKGNRVIHGFRTGDLVKAVVLTGKFRGTHSGRIVIRSSGSFTIGGIITTSWKNCKVSQQMDGYTSGSFVND

SEQ ID NO: 12443 - protein, 442 aa, unidentified; identical to SEQ ID NO: 2903
  REGION 1..442: note = Human gut metagenome

SEQ ID NO: 12444 - protein, 512 aa, unidentified; identical to SEQ ID NO: 8424
  REGION 1..512: note = Human gut metagenome

SEQ ID NO: 12445 - protein, 436 aa, unidentified
  REGION 1..436: note = Human metagenome
MTKTLTKQTTQVCVLDQHGKPLMPTTRLGKVYRLLKTQKAHIVSYEPFTIQLDYEPDTHIIQPMTLGVDSGAIHSGYSLANEHREYYSAEVIARDDITKRLSNRRMYRQNRRSRKTRYRKPRFKNRKNKKKGWLPPSLEQKVAVQLNEIDHLHRYFPIKNIIVEVAEFDIQKIKDPNISGIGYQQGTLYGYNIRNYLLEKHNRKCFYCGKTVSNFEVEHMIPKTRGGSNRIDNLTLSCHDCNQKKDTLTAEEFIKQTLPAKKAAAKLKQLPNEKRLFKYMTQMNTTRWALYNAINEKYANVEMTYGYITKYNRIQAGLPKAHHIDAKCITGFATVPSIDQTVVKIKMRRHNRLLHRSTFNKGHIRKAASLPTVIFGFQLYDLVMFDNHLYYINSRRSSGSFKLKSLEDLKDENRNYKKLTRLAHTNAYLTKRYVNT

SEQ ID NO: 12446 - protein, 518 aa, unidentified; identical to SEQ ID NO: 7468
  REGION 1..518: note = Human gut metagenome

SEQ ID NO: 12447 - protein, 425 aa, Planktothrix sp.; identical to SEQ ID NO: 10115

SEQ ID NO: 12448 - protein, 416 aa, unidentified; identical to SEQ ID NO: 4565
  REGION 1..416: note = Human gut metagenome

SEQ ID NO: 12449 - protein, 443 aa, Fervidicola sp.
MVFVLNKDKTLLAPCHEAVARRLLKQGKAVVSKIYPFTIRLKEQKDTSTFRPNYRLKIDYGSRHTGIVILKNDCEVVFMMQIHHRTDVKENMDRRRAFRRSRRNRKTRYRKPRFLNRKKNESWLPPILQSRVENIKTWVRRLCELCPITAISYENTKFDTQKLRNPEISGIEYQQGTLQGYEVREYLLEKFGRKCVYCGATNVPLEIEHVIPKSRGGTDRIDNLVIACHECNQKKGNKTAEEFGYPEIQKLVKESLKDCAIVNATRWRIYEVLIETGLPVECGSGALTKMNRMKLGLPKDHHFDAVCVGHSTPDRIWFRTRTILHVIAKGRGTRQIANVDKNGFSRGYRARQKLFYGFQTGDMVKAVVPKGKYKGTWIGTIACRKNGYFDIKDKTGERIAQGISHKYCKIIRRFDGYCYELEQTKINGTFPLQPAEVGEEMCQ

SEQ ID NO: 12450 - protein, 424 aa, unidentified
  REGION 1..424: note = Nitrospiraceae bacterium
MHRVFVPITSKQPLMPCSPARARLLLKAKRAAVFRRKPFTIIPKGRTLGGIQPVVWQLDPGSQITGMALVGEFPHQGRIMLWASELYHRGDHIRQKLLARSSVRRGRRARKTRYRPARFKNRRRPEGWLPPSLQSRLDNVMNWTRKVQRCVLIRSIAMELVRFDTQQLMNPEVTGVEYQQGELFGFEVREYLLEKWRRTCAYCHKTNVPMEIEHLIPRSRGGSNRVGNLTLACTSCNQRKGNQTASEFGYPQLMTQARQPLKDAAAVNSTRWALYRQLQALGLPVSVWSGGQTKYNRTQQGYPKAHWIDAACVGINGSQVRLDPQTQPLAISATGRGTRQVVKTDHFGFPRSKAARVKRTHGFQTGDLVRLTQPYGKYGGKWVGPLAGVRATGKFDLLTSRGRVTAPASRFTLYQRTEGYIYAA

SEQ ID NO: 12451 - protein, 515 aa, unidentified; identical to SEQ ID NO: 3339
  REGION 1..515: note = Human gut metagenome

SEQ ID NO: 12452 - protein, 413 aa, unidentified
  REGION 1..413: note = Human gut metagenome
MTSYAFVLDVNGKQLAPTKEQKAWFLIRKKRAALVSKYPMVIQLKKEIQENEICKDEIRCGIDDGGLHVGIALVQKCKTKNKVVFKGTIEQRNDVKHLMEVRRGYRRYHRYHKRYRQARFNNRKSSKREGRIAPSILQKRQATIRVINQLNKWINITNYWLEDVSIDIRVLTDGYKPYCWQYQKSNRLDENIRKAAILRDGGKCMECGKSNCRLEVHHIKPRRRNGSNTLDNLITLCESCHQKTEGQEELYMDRYFSMLKSSDHKNLNYAQHVMIGKKWLRKQLSSLGVLYLTNGGDTANKRIDWNIEKSHANDAVCITDLQPDTYDMKEWTMKPMRRKSKAKTDNVLGIRHRDLVEYTFKNGETHRGYVTALYPEQKAINFQSPTKHCKKVNARKCKLRWKYSKIYWFENVS

SEQ ID NO: 12453 - protein, 480 aa, unidentified
  REGION 1..480: note = Human gut metagenome
MKGKNMIITLDKNKRPLGFMSERRCRILLEKKRAVLYRYFPTIVILKDVDARKLSGLSSYRIKIDPGAKYTGIAIVMDDTNEFMYAMQIEHRGEQIKKNLDTRRSARRNRRSRETGYRRSKWGNQCTAKEQRQSYDSRRDENWLPPSVKSTADNIISWIRRLCRWINITNCSIESVRFDTQLMENPEIEGVEYQQGTLYGYEVKEYLLEKYGHTCQYCGGKSNDPILEWEHMIPRSRGGSDRLKNASLACHDCNQDKGNHTLEEWQTILQDRIPKERGKQKELDQIRQKFVQHVMEGKAPVKGLRYAAWVNSSRRYLQRHLYLRFPELECSSGGRTKYNRNALEYPKEHHYDALCVGEIPEDGFVDRTHGYYLYAKATGRGTRLRGQINQCGVIIRKWRDRSKTAFGFQTGDLVVADVPKDTNYKYKGHFSGRVMIRKSGSFDIRTLSGELVTVNAKFCRLLQNNSGYQMIIKRVIPLGN

SEQ ID NO: 12454 - protein, 408 aa, unidentified
  REGION 1..408: note = Human gut metagenome
MVYVQDINGKPMMPTTRHGKVRRLLKDKKAVVVNLCPFTIRLTYVTSDYKQEIVLGVDAGTKHVGLSATTKSKELYSSEVILRNDIVDLLSTRRELRKTRRNRLRHRKHRFNNRIKSRRPGWTAPSVKYKVDAHIRVIDNVCSILPISRIVIEVAQFDTQKINNPNISGKEYQEGDQLGFWNVREYVLARDGHKCQHCKGKSKDPVLNVHHIESRKTGGDSPSNLITLCETCHKEYHKGNIDLKIRRGKSLRDAAVMGIMKWRLYEELKSKYDNISMTFGYVTKYNRIKHGIEKSHVFDAFVISKNFDAIRLGYYYKVRLVRRHNRQIHKQKIPKGGIKRLNQSPFEVFGFRLFDRVMFENSYYFIFARRKTGSFNIRDIDGKNQRDITYKKLKLSRCKRFMVQKEMD

SEQ ID NO: 12455 - protein, 442 aa, unidentified; identical to SEQ ID NO: 4418
  REGION 1..442: note = Human gut metagenome

SEQ ID NO: 12456 - protein, 480 aa, unidentified; identical to SEQ ID NO: 2726
  REGION 1..480: note = Human gut metagenome

SEQ ID NO: 12457 - protein, 494 aa, unidentified; identical to SEQ ID NO: 6841
  REGION 1..494: note = Human gut metagenome

SEQ ID NO: 12458 - protein, 404 aa, unidentified
  REGION 1..404: note = Human gut metagenome
MVYVQDIDGKPLMPTTRHGKVRRLLKSNKAVVVNLCPFTIRLTYISDSYKQEIVLGVDAGTKHVGLSATTKSKELYSSEVILRNDIVDLLSTRRELRKARRNRLRYRKPRFDNRVKSKRPGWIAPSVKYKVDAHIRVVENVCSILPISRIVIEVAQFDTQKIKNPEISGKEYQEGDQLEFWNTREYVLARDGHKCQYCKGKSKDSILNVHHIESRKTGGDSPSNLITLCETCHKEYHKGNIDLKIRRGKSLRDAAVMGIMKWRLYEELKSRYDRVFMTFGYITKHNRIKYGIEKSHTSDAFVISKNINAKRIERQYLKRLIRRHNRQIHKMKILKGGRRKTIKLLLRFSVLGCLIKCCITIKYSLFMEGENQGVSISGISTEKIQKMFHAKSLNSLEGRGIRLY

SEQ ID NO: 12459 - protein, 414 aa, unidentified
  REGION 1..414: note = Human gut metagenome
MPCSPAKARLLLKEKKAIVVRRTPFTIQLTIATGETKQPVSLGVDAGYKHVGLSASTEKAELYASEIELRQDITDLLSARRALRQSRRNRKTRYRAPRFDNRIRTKRKGWLAPSVENRINSHLSRIEAVLRLLPVTKITVETASFDLQLLKNPNISGKEYQEGEQLGFWNIREYVLCRDGHVCQHCYGRSKDPVLNVHHLESRRTGGDSPGNLITLCETCHKALHRGELTLKAKRGQSFRAEAFMGIMRWEVLNRLKASHPDLEVNNTYGYRTKHARISNGIAKSHCADAFCVAGNLGAKRLGEFFFQKQMRRNNRQIHKLSVLKHGLRKRNQVPFEVNGFRLFDKVACKGEEGFIFGRRSSGFFDVRKLDGTRISAGISYKKLHLLEKRQTYITEIRKEKALPPLPEGRGLRA

SEQ ID NO: 12460 - protein, 472 aa, unidentified
  REGION 1..472: note = Human gut metagenome
MNTCVCVLSNNGERLMPTFRLGKVRRLLKDGKAKIVKHHPFTIQLLYDSKTNTQPIEICEDVGYNYIGISAKSKSHEYVSAQYDTLQDEKEHHDDCRKMRRTRRNRLRYRKPRFDNRKRGEGWLAPSLRHKKELNVNVVKMYCAVMPITYATVEVGSFDTMLVKAIQEGKVIPEGADYQKGPRYNLATLREAVFYRDNYVCKVCGRKATEGAILHMHHMFYWKGRHGNSLNELLTVCEKCHTPANHQKSGKLYGFGEDVKFADLSGAAFMNTVRWQIVNELYAAFGKPFVTITYGAMTKEKRIALQLEKSHNNDAYAMGEFHPNHRCAFEHYEKVRRNNRILEKFYDSQYIDIRTGEIATGKELFNGRINRNHKKDSENLHKYRGKRTYAGHRALLRKKVNLNPGDLVSLNGEPLVVLGTHTRKNGAVNVEFETPSKSGRKSASLKKLKIVKAADSIHPAWEKVSQIIQRKE

SEQ ID NO: 12461 - protein, 318 aa, Parasutterella sp.
PRFDNRIRTKRKGWLAPSVENRIDAHLSRIEAVLRLLPVTKITVETASFDLQLLKNPDISGKEYQEGEQLGFWNIREYVLCRDGHVCQHCYGRSKDPVLNVQHLKSRRMGGDSPGNLITLCETCHKALHRGEITLKVKRGQSFRAEAFMRIMRWEVLNRLKASHPELEVNNTYGYRTKHARIANDIANSHCADAFCIAGNLGAERLSEFFFQKQTRRNNRPIHKLSILKGGLRKRNQAPYEIKGFRLFDKVACQGEEGFIFGRRSSGYFDVRKLNGTHISAGISYKKLRLLEKRQTYLIEIRKEEALPPLPEGRGLRA

SEQ ID NO: 12462 - protein, 406 aa, unidentified; identical to SEQ ID NO: 7798
  REGION 1..406: note = Human gut metagenome

SEQ ID NO: 12463 - protein, 521 aa, Nonomuraea sp.; identical to SEQ ID NO: 10621

SEQ ID NO: 12464 - protein, 396 aa, unidentified
  REGION 1..396: note = Human gut metagenome
VVRRTPFTIQLTIATGESKQPVSLGVDAGYKHVGLSASTEKAELYASEVELRKDITDLLSARRALRQSRRNRKTRYRAPRFDNRIRTKRKGWLAPSVENRINAHLSRIEAVLRLLPITKITVETASFDMQRLKNPDISGKEYQEGEQLGFWNVREYVLFRDGHVCRHCHGRSKDPVLNVHHLESRRTGSDSPDNLITLCETCHKALHRGEITLKAKRGQSFRAQAFMGIMRREVLNRLKASYPELKVHETYGYLTKHARIANGIVKSHGADAFCIAGNLGAKRLGEFFFQKQTRRNNRQIHKLSILKGGIRKRNQAPFEAKGFRLFDKVACQGEEGFIFGRRSSGSFDVRKLDGTRISAGISCKKLRLLEKRRTYLTEIRKEEALPPLPEGRGLRA

SEQ ID NO: 12465 - protein, 512 aa, unidentified
  REGION 1..512: note = Human gut metagenome
MSTVYVLNKDGKPLMPTTRGGHVRHLLKEQKARVVRTKPFTIQLLYETDDVVQLLYLGIDPGRTNIGVAVVKTDGTAVFTAHLETRNKEITKLMKKRKNSRRARRTNGRRCRRQRRAKANGTISKKCVKQDTAQNGSVSKRAKEIGVIKRHLPGCEKEVLCIGIKNKEAKFSNRVRPEGWLTPTANQLLQTHINLVKKIRKFLPISDVVLEINKFAFMQLDNPNIQKWQYQQGPLYQKANLEEAVSEMQEHHCLFCKKPIAHYHHVVPQSENGSDTIGNIVGLCTKHHDLVHKDTAWQKKLAKKKTGLNKKYGALSVLNQIIPALTKELSSLFPKHFFATNGKSTYDYRSAHGVSKDHWLDAYCIACSVLPNDVCDSGINNRVPYELKQFRRHDRRALNNENMSRVYTLNDNVVATNRHKATKQTTDSLEEFRQNHPDDVCKLKVKEHHPTYRNMNRNYPGSVFLIGKQVHVMQGIAGSKDGEATTYKDTNANSIAAGKCKFVAKNSGILFV

SEQ ID NO: 12466 - protein, 415 aa, unidentified; identical to SEQ ID NO: 3582
  REGION 1..415: note = Human gut metagenome

SEQ ID NO: 12467 - protein, 414 aa, unidentified; identical to SEQ ID NO: 4347
  REGION 1..414: note = Human gut metagenome

SEQ ID NO: 12468 - protein, 400 aa, unidentified
  REGION 1..400: note = Human gut metagenome
LPIYRKEHDIMQYVYVLNKHGEPLMPCSPGKARLLLKQQKAHVIKRTPFTIKLLYGSTGYKQPITLGVDAGSKHVGLSASTEKRELYREEFTPRNDVVDLLSTRKQNRRSRRNRKTRYRPPRFDNRVHSKHKGWLAPSVEVKIQEHITVIKRICRILPVALVRVETAEFDTQRLKAMLEGKPLPVGTDYQLGEMYDEYNVRQYVLKRDNYTCQCCGAHTTAKKAVKLHVHHLESRKMGGNAPGNLITLCITCHDALHKGKVSLDNKKRGKPMRDAAFMGIMRRTLMSRLREELPITVQGTYGYITKMQREQNDIKKSHVNDARCISKHPLAEPCSVCYRTKAIRHHNRQTHKANFSKGGIRKRSQMPYVVEGYRLWDKVLYKGQECFVSGRRASGSFTLK

SEQ ID NO: 12469 - protein, 431 aa, unidentified
  REGION 1..431: note = Human gut metagenome
MPNKVYVINKHGRPLMPCSPAKARHLLDAGKAKVKKRTPFTIQLVYGSSGYTQEVILGVDAGSKTIGVSASTKKEELFAANVIPRNDVVDLLSTRRESRRARRNRKTRYRKPRFDNRVRSKHKGWLAPSVEVKIQEHITAIRRVCGILPVSKVVVETAEFDLQLLKAIADGKPVPQGEDYQKGEMYGHYNVRQYVLWRDDYTCQCCGAHATKKKEVRLHVHHLESRKTGGDASGNLVTLCESCHEKLHKGLITEKDLKKRKHRSTRDATFMGIMRKTLMQMLCSELPIPVVETRGYITKATREKLRVLPKSHINDALAIAQGKQGFNVGYLPGILQIDKIYTIRPVRHHNRQLHKAAILKGGIRKSNQAGKYVFGYRLFDKVQFNGQDCFIWGRRTTGIFTIKTINGKMIKDGISFKKLKPVEKSTSYLIA

SEQ ID NO: 12470 - protein, 422 aa, unidentified
  REGION 1..422: note = gut metagenome
LRVFVINQRGKPLMPCSPAKARVLLREKKARVKRRTPFTIQLTTATGEARQDVSLGVDAGYRHVGLSASTEKAELYASEAVLRDDITDLLSARLALRRARRSRKTRYRAPRFLNRVHSKNKGWLAPSVEQRIASHLKLVENVCRLLPVTKITVETASFDMQAIKNPDIKGAEYQQGEQLGFWNVREYVLWRDGHQCQHCRGKSGDPILNVHHLESRRTGGDAPNNLVTLCETCHKAYHAGRIDLKLKRGRSMRAEAFMGIMRWTFFNRLKEIHSGKTVENTYGYLTKHTRITHGIEKSHCADAYCIAGNLRAERLPDYLWQKQVRKHNRQIHKLTIGKGGIRKRQQTPFEVKGFRLFDKVRLGDEEGFIFGRRSSGYFDVRRLDGQKLSAGVSFRKLHLLEKLTTYLTVLLPRLKTRVSAPE

SEQ ID NO: 12471 - protein, 424 aa, unidentified; identical to SEQ ID NO: 8578
  REGION 1..424: note = Human gut metagenome

SEQ ID NO: 12472 - protein, 480 aa, unidentified; identical to SEQ ID NO: 2726
  REGION 1..480: note = Human gut metagenome

SEQ ID NO: 12473 - protein, 408 aa, unidentified; identical to SEQ ID NO: 10304
  REGION 1..408: note = Human gut metagenome

SEQ ID NO: 12474 - protein, 406 aa, unidentified
  REGION 1..406: note = Human gut metagenome
MVYVQDIDGKPMMPTTRHGKVRQLLKDKKAVVINTCPFTIKLMYKTSDYKQEIVLGVDAGTKHVGLSATTKSKELYSGEVILRSDIVELLSTRRESRRTRRNRLRYRKPRFNNRIKSKRLGWVAPSVRHRIDAHIRVIDNICSILPVSRVIVEVAQFDTQKIKNPDISGDEYQEGDQLGFWNVREYVLARDGHKCQHCKGKSKDPILNVHHIESRKTGGDSPSNLITLCETCHKEYHKGNIDLKVKRGKSLRDAAVMGIMKWKLYEELKSRYPNVSMTFGYITKYNRIKYGIEKSHTSDAFVISRNFNAKRIERQYLKRLIRRHNRQIHKMKILKGGKKKNNQAPFEVFGFRLFDKVLYNNEICFIYGRRKSGCFDIRDFDGKNSKNVTYKKLKLIRGKRYPIILK

SEQ ID NO: 12475 - protein, 419 aa, unidentified
  REGION 1..419: note = Human gut metagenome
MVYVISQDGKPLMPCSDPIARLLLKQGKAKVKKREPFTIKLTYETTNYTQGLTLGVDTGSGTIGTAVSKDNGDIVYMSEVVVRNDITDKMTQRAKYRRNRRNRKTRYRKARWLNRASSIKKDRFSPTMQSKLHSHVREIEYIQSILPVTEMVFETGQFDMHLMKNPSLANPKVRPWGYQKGANYGFENTKAMVLNRDNYTCQCCKGKHKDSKLEVHHIVFRSQGGSDEESNLLTLCHTCHKDLHSGKINPKLSGKVKGNLKYATQMNSIRKQLFRFYPNAIETFGYVTKVNRLHLGVAKEHYYDACTIATQGNAFNVKSNLYKKKCVSDGDFQKTKGIHSEQPIVTDKICGFRKFDKVRYFGNDYFIKGRMSTGYAILMDIDGNKIDFSTMPRGYKTPKLSNCKRITARSTVMTQVKVV

SEQ ID NO: 12476 - protein, 449 aa, Allochromatium sp.
MAVFVLDKQKKPLMPCTEKRARLLLERGRAVVVRLAPFTIRLKDRLGGALQPLRLKLDPGSRVTGLALVRESETCDPDTGAVERLEHGLWFGELAHRGQAIREALTLRRHYRRARRSRKTRYRAPRFLNRLRREGWLPPSLQHRLDTTVNWVQRLRRLAPITALSQELVRFDTQAMQNPEISGVEYQQGELAGYEVREYLLEKWRRRCAYCGATHVPLEIEHIVPRARGGSDRVSNLTLACRPCNQRKGNRSIEDFLQRQPARLHQIQAQAKAPLQDAAAVNATRWALLNALKTTGLPVETASGGRTKFNRTRLDIPKTHALDAACVGAVDQVHDWNRPVLSIRATGRGAYSRTRTSKNGFPRGYLRRHKRVQGFQTGDWVRAEVPKGKKAGVHVGRVAVRLTGSFNIQAPAGTVQGISYRHCRLLQRADGYGYAFQPKPKMEKARRAA

SEQ ID NO: 12477 - protein, 458 aa, Lactobacillus sp.; identical to SEQ ID NO: 5037

SEQ ID NO: 12478 - protein, 420 aa, unidentified; identical to SEQ ID NO: 8472
  REGION 1..420: note = Human gut metagenome

SEQ ID NO: 12479 - protein, 449 aa, Moorena sp.
MIYAFVLAEDGTRLMPTDIRHARRLLKKKEAVIAGHNPFTIQLTRPSERHVQPVECCFDTGSVHIGVSIKSEKHEFVHNQYDNLKDEKKRHANRLKMRRARRNRKRYRKARFDNRKKNKGWIAPSLKNKEQNHLRIAEKYNKVCPIIQATIEVGSFDTAAMKEYEETGNVLEGKDYQHGPRYGYATLREAVFYRDGYKCRCCKKGIRKGVILRIHHLGFRKGDRSNRMSNLITVCTECHTAANHKPGGKLYDWHPKVKPLKDAAFMNVVRWKLYNDMKAMFPEWKMSITYGAETKMRRNERNIEKTHANDAYVMGEFQPKHRQKEQFFIKQRRHNRVLQKFHDAKYRDVRSGKKKSGSTLSCGRTSRSESRRSDKNQRIYRANKVKKGSVSIRTQQYEIRPNDQVLINGKWRTTSGVHNNGTRCIVNKKSIGIDKIQGIRHCGGWARIA

SEQ ID NO: 12480 - protein, 415 aa, unidentified
  REGION 1..415: note = Human gut metagenome
MVYVLDKDGHPLIPTNRHGKVRRMLKSGQVKVVKKCPFTIQLMYESEHNVQPVSLGIDAGSKHIGVSATTKTTVLYEADVELRDDIVKLLATRRQMRSFRRSRKTRYRPKRFDNRRRGKGWFAPSIRQKINTHLVTVARVCEILPVTQIIVETASFDIQKIKNPKIQGVEYQRGEQTDFWNVREYVLFRDGHVCQCCKGKKKDPILNVHHIESRKSGGDAPNNLITLCETCHKGYHNGTIKLPKRIKRGMKFKDAAFMGIMRWTFYNTLKEKYEPDIPVSMTYGYLTKNTRIQHNLPKEHYIDARCISGNPDAKSDGVYYYQKKIRCHNRQIHKFNTLRKGVRKLNQSEYLVKGYRIFDKVRYQGKEYFVFGRRKTGFFDIRTLSGEKANNGSLSIKKIAFVDTRKNYITERRTV

SEQ ID NO: 12481 - protein, 224 aa, unidentified
  REGION 1..224: note = Human gut metagenome
RDHYTCQCCGTHNTAKKVVKLHVHHLESRKTGGNAPSNLVTLCTTCHKNLHKGRVTLDGKERGKPLRDAAFMGIMRKTLMVRLKEELPIPVQGTYGYITKMRREQNDIKKSHVNDARCISKHPLAEPCSVCYRTKAIRHHNRQTHKANFSKGGIRKRSQMPYVVEGYRLWDKVLYKGQECFVSGRRASGSFTLKKLDGTRISKGVTFKKLRLLEPATNYLIERM

SEQ ID NO: 12482 - protein, 418 aa, unidentified
  REGION 1..418: note = Human gut metagenome
MVYVLSQHGQPLMPTENHAKVRALLKHGKAKVIQRCPFTIQLLYESTTHTQKINLGIDAGSKTIGVSATTESKVLYESEVVLRNDIVELLSGRRALRRSRRNRKTRYRKPRFDNRRRPDGWLTPSIRQKIKTHVTVVENVMKILPVTKIIVETASFDIQKIKNPEIEGAEYQYGEQLDFWNVREYVLFRDGHTCQCCKGKSKDNILNVHHIESRKTGGNAPNNLITLCETCHKAYHKGVITLPKEIHRGMRFRDAAFMGIMRWAFYDRLKELYTPFGVEVINTYGYITKNTRIEHGLPKEHYVDARCISGNPAAKPLGHYYFQKKVRCHNRQIHKNTILKGGIRKRNQAAYLVNGYRLFDKVKYQNQEYFIFGRRSSGFFDIRTLDGTKVNKGSISCKKLQLVEKSKHYLTEQRKVAA

SEQ ID NO: 12483 - protein, 470 aa, Thermoanaerobacterium sp.; identical to SEQ ID NO: 6736

SEQ ID NO: 12484 - protein, 411 aa, unidentified
  REGION 1..411: note = Human gut metagenome
MVYVQDIDGKPMMPTTRHGKVRRLLKDNKAVVVNTCPFTIKLTYKTSDYKQEIVLGVDSGTKHVGLSATTKSKELYASEVILRSDVVDLLSTRRGLRRTRRSRLRYRKQRFNNRVKSKKDGWIAPSVRHKIDSHIRIISFVYSILPVSKLIVEVAQFDTQKIKNPEISGKEYQEGEQLGFWNVREYVLARDGHKCQHCKGKSKDPILNIHHIESRKIGGDSPSNLITLCETCHKEFHKGNIKLKVSRGKSLRDAAVMGIMKWELYEELKSKYDNVLMTFGYITKYNRINHGIEKSHVSDAFVISRNFDSERLGYYYKRKLVRRHNRQIHKMKILKGGIRKRNQAPFKVFGFRLFDKVMFQGEEHFIYARRLSGQFNIRDINGENKKDVSCKKLKYVSHGLVSVKTNLFLSQ

SEQ ID NO: 12485 - protein, 512 aa, unidentified; identical to SEQ ID NO: 3720
  REGION 1..512: note = Human gut metagenome

SEQ ID NO: 12486 - protein, 426 aa, Moorena sp.; identical to SEQ ID NO: 11500

SEQ ID NO: 12487 - protein, 451 aa, Moorena sp.; identical to SEQ ID NO: 3199

SEQ ID NO: 12488 - protein, 442 aa, Ktedonobacter sp.
MNDASLGGPCIGENRKETMSRVLIVDQQRRPLMPCTPARARLLLKQKKAAVLRRCPFTLILHESRSEAVVQPLRLKIDPGSKVSGLALVNDTSGEVVWAAEVTHRGEQVHKDLQKRAGVRRGRRQRHTWYRPARYLNRRRPKGWLPPSLESRVQNVETWTQRLIFWAPVGSLSYEAVRFDTQALQNPEIEGTQYQHGTLAGLEVKEYLLLKWGQRCAYCEKMGLPLQLEHIIPKIRGGSNRVTNLTLACEQCNGKKGNQTAEEFGFPHLQAQAKAPLKDAAAVNSTRRVLHQRLMRTGLPIEASSGGHTKWNRGERDIAKTHWLDAANVGPSTPARLLFQHVRPWLIEANRRQDRQLCLVNALGFPRSKPKKKSPKHDFRTGDIVRAVVPAHLENPGIYVGRMAAKASGAFTITTKQRKVSDIGYRYCTRLQHTDGYSYLIK

SEQ ID NO: 12489 - protein, 493 aa, unidentified; identical to SEQ ID NO: 3154
  REGION 1..493: note = Human gut metagenome

SEQ ID NO: 12490 - protein, 408 aa, unidentified
  REGION 1..408: note = Human gut metagenome
MVYVQDIDGKPMMPTTRHGKVRRLLKDSKAVVVNTCPFTIKLMYKTSDYKQEIVLGVDAGTKHVGLSATTKSKELYASEVILRSDVVELLSTRRELRRTRRNRLRYRKPRFDNRVKNKYHGWVAPSVRYRIDAHIRIIDSICSILPISRIIVEVAQFDTQKIKNPDIYGNEYQEGDQLGFWNVREYVLARDGHKCQHCKGKSKDPILNVHHIESRKTGGDSPSNLITLCETCHKEYHKGNIDLKVKRGKSLRDAAVMGIMKWKLYDELKSRCDNVSMTFGYITKYNRIKYRIEKSHISDAFVISKNFNALMLEYHYKVKLVRRHNRQIHKQKVLKGGVKKPNQSPFEVFGFRLFDRVMFEGNCYFIFGRRKSGSFNIRDIDGGNQRDVTYKKLKLLRCKRFMIQKETN

SEQ ID NO: 12491 - protein, 502 aa, unidentified; identical to SEQ ID NO: 2616
  REGION 1..502: note = Human gut metagenome

SEQ ID NO: 12492 - protein, 414 aa, unidentified
  REGION 1..414: note = Human gut metagenome
MVYVINKQGQALMPTERFGKVRRLLKNSLAHVVCRIPFTIQLDYDTTDYTQPVSLGIDAGSKHIGISATTSEKEMYAADVELRNDIVDKLSTRRELRRTRRSRLRYRKARFNNRVSSKRKGWLAPSVENKIQTHLTVVEKIHKFLPITNIVVEIASFDIQKINNPIISGSEYQQGEQLDFFNVREYVLFRDNHICQHCKGKSKDKVLNVHHIESRKAGGDSPNNLITLCETCHKAYHRGEFELNVKRGKSFRDAAFMGIMRWSFYDRLKNIYPNVSMTFGYITKNARITNNLPKEHYVDARCISGNPVAKPLGYYFYQKKVRCQNRQIHKVNFLKGGRKKLNQAPFLVKGFRLFDLVEYQKELYYIFGRRSSGSFDIRKLDGTKVNKGSINCKYLRLIATRKSILTEKRMQVNL

SEQ ID NO: 12493 - protein, 430 aa, unidentified
  REGION 1..430: note = Human gut metagenome
MPKVYVLNRHGRPLMPCTPAKARHLLDAGKAKVRHRTPFTIQLLYGSTGYTQEVILGVDAGSKTIGLSAATETEELFSAEVKPRNDVVELMSARRQFRRARRNRTTRYRKPRFDNRVRSKHKGWLAPSVEVKIQEHMTAIRRACAILPVSKVVVETAEFDLQLLKAVAEGKPVPQGEDYQKGEMYGHYNVRQYVLWRDSYTCRICGVHGSVRKGVPLHVHHLESRRVGGDAPDNLVTLCTACHDKLHKGIIMAADIKKRKRRSTRDATFMGIMRMTLLRRLREQLPVPVVETRGYITKATRENLLVLPKSHTNDALAIAHGPQGFRAEYLPNIRQADRLYTIRPVRHHNRQLHKATILKGGVRKANQAEKYICGFRLYDKVLYNGIECFVWGRRTSGSFLLRQLNGEKVKDGVSYKHLKLLERSQSYLVA

SEQ ID NO: 12494 - protein, 465 aa, unidentified; identical to SEQ ID NO: 3070
  REGION 1..465: note = Human gut metagenome

SEQ ID NO: 12495 - protein, 480 aa, unidentified
  REGION 1..480: note = Human gut metagenome
LYTKPLDNIGEGSLPPSGEINLKGMTFMVYVKSIDGKALMPTSNAKARKLLKQKKAKVVSLRPFVVKLTYKTKTEYTQKLNLGVDSGYYNIGFSVIDAKQEYIAGEVKLLEGMKKRLLKKASYRRIRRSRLRYRKARWNNRVKSKKKGWLAPSLKHKLDTHIKFIDYLKNILPIGKITIEVANFDIQKMKYDLISGVDYQNGDMFGFWNVREFVLHRDGHKCQNPNCIHKDKKEQILKVHHIRYRSEGGSDRPENLITLCSKCHTPANHKKGKFLYDWCVNGKKVRGFKDATFMSMIRWYLVNDLKSKHNNVSITYGYITKNHRIQNGIEKSHLNDAFAIAKGTNQARTKDRFLVIQDRLKNRSLEKFYDSKIIDIRTEKKVSGGDLNCGRSTKNKNLNTENLRKYRGVKISKGQRRIRKQKYFYQPNDLVKYDGKVYTVKGTQNEGKYIALKEIKKVPKVELLIPYVFKKGLNWSYGLC

SEQ ID NO: 12496 - protein, 338 aa, unidentified
  REGION 1..338: note = Human gut metagenome
MSTVYVLNKDGKPLMPTTRCGHVRHLLKEQKARVVTSKPFTIQLLYEADDVVQSLYLGIDPGRTNIGVAVVKADGTAVFTAHLETRNKEIPKLMKKRKESRRARRTNGRRCRRQRRAKANGTISKKCVKHDTAQNGSVSKCAKEIGVIKRHLPGCEKDVLCICIKNKEAKFSNRTRPEGWLTPTANQLLQTHINLVKKIQKFLPISDVVLEINKFAFMRLDNPNVQKWQYQQGPLYQKANLEETVSEMQEHHCLFCKKKIDHYHHVVPQHKNGSNTIDNIIGLCTQHHDLVHKDATWQKRLAKKKTGLNKKYGALSVLNQIIPALTKELSSLFPKHFL

SEQ ID NO: 12497 - protein, 420 aa, unidentified
  REGION 1..420: note = Human gut metagenome
MQYAYVLNKRGEPLMPCSPGKARILLKQQKACVVKRTPFTIKLLHGSAGYKQPITLGVDAGSKHVGLSASTEKRELYSEEFTPRNDVVELLSTRRQNRRSRRNRKTRYRAPRFNNRVHSKHKGWLTPSVEVKIQEHITVIKRICRILPVTLVRVETAEFDTQRLKAMLAGKPLPVGTDYQLGEMYDEYNVRQYVLKRDNYTCQCCGAHTTAKKAVKLHVHHLESRKVGGNAPSNLITLCTTCHNNLHKGKITLDGKKRGKTLRDAAFMGIMRNTLLTRLRNELHIPVQNTYGYITKLLREQNDIKKSHVNDARCISKHPLAEPCSICYRTKAIRHHNRQIHKAKILKYGIRKANQAPYIVKGFRLWDKVLYNGQECFISGRRTSGYFALRKLDGTTITNSISFKKLQLLEPATNYLIERM

SEQ ID NO: 12498 - protein, 460 aa, Lactobacillus sp.
LDEWQESLFPALRKRRKNMKHENANRVFLLSRDGKPLMPCRPRKARLLLKSGKAFVVKKYPFTIQLKYGSYGYKQKVSLGVDTGQRHIGFAVVSQEKVLCQSEVELRQDVHKNLYTRKIYRRSRRNRKTRYRQACFLNRVHGKRDGLWLPPSVKGKVNHNIAWIKRYLAVLPNPDLHVEVGKFDMAKMLNPQISGKQYQEGSLKGWKNYEYYVLARDKYTCQLCRKHGKGVKLVVHHIIYRSQGGTDRVSNLITLCTDCHTTNNHQPGGKLYKWMKAKKKVTTHLKGATFMNILRKRMMAAFPEASFQYGSQTYVDRKNLNLPKGHFMDAIAISGIKSVGQMPETVTMISQFCKKKRSLHEATARKGRKQPNKAAKRNAKNTKYARGIWLNDYVRAIGNNAKGYVQGFKSNGYFVYLTDGLGNYVLNNGKNYINRKQCQLIMHNGNWQKAEQKLSLYEFK

SEQ ID NO: 12499 - protein, 413 aa, unidentified
  REGION 1..413: note = Human gut metagenome
MVYVLNENGQPLIPTENHAKVRVLLKQGKAKVVNNCPFTIQLLYSSTNYTQPVTLGVDAGSKHIGLSATTEDRELYAADVELRNDIVKLLAARRASRRSRRNRKTRYRKPRFNNRKRDKGWLAPSIREKIGTHLKVVDDTCKLLPVSKIIVETASFNIQKIKNPDVKSTDYQQGEQLGFWNVREYVLFRDGHKCQCCKGKSKDKILNVHHIESRQTGGNAPNNLITLCETCHTGYHKGTVKLPAKIKRGMKFKDAAFMGIMRWAFCGELKKRYPDVSLTYGYITKKTRIENGLPKEHYVDARCISGHPSAKPLGTVFYIKKVRCHNRQIHKLKILKKGVRKRNQAEYEVYGFRLYDKVSWKGRICFVFGRRSTGRMDLRLLDGTHVNASVSYKNIKLLRMRSNYLIEVKNAIG

SEQ ID NO: 12500 - protein, 456 aa, Halomonas sp.; identical to SEQ ID NO: 2881

SEQ ID NO: 12501 - protein, 442 aa, unidentified; identical to SEQ ID NO: 2903
  REGION 1..442: note = Human gut metagenome

SEQ ID NO: 12502 - protein, 493 aa, unidentified; identical to SEQ ID NO: 2644
  REGION 1..493: note = Human gut metagenome

SEQ ID NO: 12503 - protein, 412 aa, unidentified; identical to SEQ ID NO: 6105
  REGION 1..412: note = Microbial mat metagenome

SEQ ID NO: 12504 - protein, 493 aa, unidentified; identical to SEQ ID NO: 2644
  REGION 1..493: note = Human gut metagenome

SEQ ID NO: 12505 - protein, 487 aa, unidentified; identical to SEQ ID NO: 11019
  REGION 1..487: note = Human gut metagenome

SEQ ID NO: 12506 - protein, 406 aa, unidentified
  REGION 1..406: note = Human gut metagenome
MVYVQDINGKPMMPTTRYGKVRRPLKDKKAVVVNLCPFTIKLMYVTSDYKQEIVLGVDAGTKHVGLSATTKSKELYSSEVILRNDIVDLLSTRRELRKARRNRLRYRKPRFDNRVKSKRPGWIAPSVKYKVDAHICVINNVCSILPISRIVIEVAQFDTQKIKNPEISGKEYQEGDQLEFWNTREYVLARDGHKCQYCKGKSKDSILNVHHIESRKTGGDSPSNLITLCETCHKEYHKGNIDLKIRRGKSLRDAAVMGIMKWRLYEELKSRYDRVFMTFGYITKHNRIKYGIEKSHTSDAFVISKNINAKRIERQYLKRLIRRHNRQIHKMKILKGGKKKNNQAPFEVFGFRLFDKVLYNNKIFFVYGRRKSGSFNIRDFNGENSKDVSRKKFKLIRGKRHPIILK

SEQ ID NO: 12507 - protein, 413 aa, unidentified; identical to SEQ ID NO: 6529
  REGION 1..413: note = Human gut metagenome

SEQ ID NO: 12508 - protein, 424 aa, Mastigocoleus sp.; identical to SEQ ID NO: 6040

SEQ ID NO: 12509 - protein, 518 aa, unidentified; identical to SEQ ID NO: 7468
  REGION 1..518: note = Human gut metagenome

SEQ ID NO: 12510 - protein, 535 aa, unidentified; identical to SEQ ID NO: 6116
  REGION 1..535: note = Human gut metagenome

SEQ ID NO: 12511 - protein, 447 aa, unidentified; identical to SEQ ID NO: 8397
  REGION 1..447: note = Human gut metagenome

SEQ ID NO: 12512 - protein, 430 aa, unidentified
  REGION 1..430: note = Human gut metagenome
MPKVYVLNRHGRPLMPCTPAKARHLLDAGKAKVRHRTPFTIQLLYGSTGYTQEVILGVDAGSKTIGLSAATETEELFSAEVKPRNDVVELMSARRQFRRARRNRTTRYRKPRFDNRVRSKHKGWLAPSVEVKIQEHMTAIRRACAILPVSKVVVETAEFDLQLLKAVAEGKPVPQGEDYQKGEMYGHYNVRQYVLWRDSYTCRICGVHGSVRKGVPLHVHHLESRRVGGDAPDNLVTLCTACHDKLHKGIIMAADIKKRKRRSTRDATFMGIMRMTLLRRLREQLPVPVVETRGYITKATRENLLVLPKSHTNDALAIAHGPQGFRAEYLPNIRQADQLYTICPVRHHNRQLHKATILKGGVRKANQAEKYICGFRLYDKVLYNGIECFVWGRRTSGSFLLRQLNGEKVKDGVSYKHLKLLERSQSYLVA

SEQ ID NO: 12513 - protein, 413 aa, unidentified
  REGION 1..413: note = Human gut metagenome
MTSYSFVLDANGKQLAPTKEPKAWFLIRKKRAALVSKYPMVIQLKKKIQENEICKDEIRCGIDDGGLHVGIALVQKCKSKNKVVFKGTIEQRNDVKHLMEVRRNYRRYHRYHKRYRQARFDNRKSSKRKGRIAPSILQKRQATIRVINRLNKWINITNYWLEDVSIDIRVLTDGYKSYSWQYQKSNRLDENIRKATILRDGGKCMECGKSNCRLEVHHIKPRRRNGSNTLDNLITLCESCHQKTEGQEELYMDRYFSLLKSSDNKNLNYAQHVMIGKMWLRKQLSGLGVLYLTSGGDTANKRIDWNIEKSHTNDAVCITDLQPDTCDIKEWAIKPMRRQSKAKTDHVLGIHHRDLVEYTFKNGETHRGYVTALYPEQKAINFQSPTKHCKKVNARKCKLLWNYSKIYWFENAS

SEQ ID NO: 12514 - protein, 443 aa, unidentified; identical to SEQ ID NO: 4257
  REGION 1..443: note = Human gut metagenome

SEQ ID NO: 12515 - protein, 489 aa, Polaromonas sp.
MQCEFLISGVGVAVFVLDNQGKALMPCTEKRARLLLARGRARVHRLTPMVIRLVDRQAAACDFQPLRLKLDPGSKTTGVALVRDVESIEVATGEIHCGVAVLNLMELVHRGRHISEALTARRQMRRRRRSNLRYRAPRFLNRGNKKSGWIAPSLQHRVDTSIAWVKRIQHWAPVRAISSERVRFDMQALQNPEISGVEYQQGTLYGYELREYLLEKWGRQCAYCDAKDTPLQIEHIRPKALGGSNRASNLTLACQCCNQKKAARSIEDFLARDKKRLDRILAQATKPLRDAAAVNATRWTLANALKATGLPVELASGGQTKFNRCRLGVPKTHALDAACVGQVRFIQDWSKPTLTLKAMGRGSYQRTRLDKFGFPRGYLMRSKRVHGFGTGDMVRADVTKGVKAGHHAGRVAVRASGSFNIQTRRNGISGVIQGISHKHCRVIQRNDGYGYFFNRTDHTGREQVRPKASDAAHPALYLPAMNGRVSRAI

SEQ ID NO: 12516 - protein, 442 aa, unidentified
  REGION 1..442: note = Human gut metagenome
VSFTVRYVLAYCCKHITKKEVPCMVYVLDINGQPLMPTTRHGKVRRLLNNHLAKAVKRCPFTIQLLYQSTKETQPVSLGVDAGSKHIGLAAATEKKVVYQEELIPRNDVVKLLSVRRALRYSRRNRKTRYRKSRFNNRVHSKHKGWLAPSVEAKIQEHITAIKRICQILPVSEIHVETAEFDLQRLKAIEEGKPLPVGTDYQLGEQYDFYNTRQYVLHRDGYTCQCCGTHDNNVKLHVHHIESRQTGGNAPNNLITLCEHCHKALHEGKLKLPKGKKRGKSYRDATFMGITRKTLLERLKKEVDVPVTGTYGYITKYWREKAGLEKSHINDAVCISKHPYVEPLDTYYLTKAVRHHNRQIHKVNFSKGGIRKRNQAPHLVKGFRLFDKVLYQGKECFIFGRRVSGRMDIRLLDGIRINASVGYKNLELLELRKAYLTERRTC

SEQ ID NO: 12517 - protein, 413 aa, unidentified; identical to SEQ ID NO: 2636
  REGION 1..413: note = Human gut metagenome

SEQ ID NO: 12518 - protein, 481 aa, unidentified
  REGION 1..481: note = Anaerobic digester metagenome
MVFVLDKHKKPLMPCSEKRARLLLKKGRAVVHRLHPFTIRLKDRALEESVVQPLKLKIDPGAKTTGIAVINETDQSRGEVVFLAEIKHKAGIKKAMDTRRSLRHSRRYRKTRYRKPRYQNRKPEKCVSCGRNAKHGSRYCRSCLQTKSFVDNGYRKVRLPVSLEARVTQTFTAVNKLKKLIPLSAIATEHVKFDTQKLQNPEVTGIEYQQGELFGYEVREYLLEKWGRKCAYCGRKNVPLEVEHIVPKSRGGTNRVSNLTLACHDCNQKKGNLTAEEFGYSEVQKQAKQPLKDAAMMNATRWKLYCRLKEIGLPVECSTGARTKKQRIEHGLPKTHYYDACCVGTTPNKLVFRTQYVAVWTALGRGTRRMCNPDKYGFPRGHRQRRKFHFGFQTGDIVKAEVPKGKYAGVWMGRVAVRASGGFDLKDASGNRICQGINYRYCRLIQRTDGWQYEKYLRKEGNEADRIPPTTKVVGFLRCVP

SEQ ID NO: 12519 - protein, 430 aa, unidentified; identical to SEQ ID NO: 4504
  REGION 1..430: note = Human gut metagenome

SEQ ID NO: 12520 - protein, 436 aa, unidentified
  REGION 1..436: note = Human metagenome
MTRTLTKQTTQACVLDQQGKPLMPTTRLGKVYRLLKTQKAHIVSYEPFTIQLDYEPDTHIIQPMTLGVDSGAIHSGYSVANEHREYYSAEVIARDDISKRLSDRQMYRKNRRYRKTRYRKPRFKNRKNKKKGWLPPFLEQKVAVQVNEIDHLYRYFPIETIIIEVAEFDIQKIKDPDISGVEYQQGTLQGYNIRNYLLEKHERKCFYCGKSVSDFEVEHMLPKSRGGSNRIDNLTLSCHDCNQKKDTLTAEEFIKQTLPAKKAAAKLKQLPNEKRLFKYMTQMNATRWALYNAINEKYANVKITYGYITKYNRIQAGLLKAHHIDAKCITGFATVPSIDQTVVKIKLRRHNRQLHRATFSKGHARKAACLPTITFGFQLYDLVYFDNHYYYIKGRRSSGIFALVSIEGLKDTNRSYKKLTQLAHTNAYLINRYVNA

SEQ ID NO: 12521 - protein, 489 aa, unidentified; identical to SEQ ID NO: 5672
  REGION 1..489: note = Human gut metagenome

SEQ ID NO: 12522 - protein, 472 aa, unidentified
  REGION 1..472: note = Oxalobacteraceae bacterium
LSVFVLDQKLRPLMPCREKRARKLLAAGRARIHRLYPFCIRIVDRALEDSVLQPLVIKIDPGSKVTGLAVCRISEAVDDDGVVAPVMHIQFLMELLHRGQTIKQSLHARSSMRRRRRGNLRYRQPRFDNRTRQTGWLPPSLLHRVLTIETWVNRIRNMAPITQIAQELVRFDMQKMQNPEIAGIEYQQGTLAGYELREYLLEKWNRECSYCGAKDLPLQMEHIVAKANGGSNRASNLCLGCESCNQKKGAKDIRAFLKNDPIRLAQILKHAKMSLRDAAAVNATRNALLKVLKATDLPVETGTGGRTKWNRSRLGIVKTHALDAACVGVVADVVSINAPALQITCMGRGTHSRTLLDQYGFPRTTLPRTKTFFGFKTGDMITAEVTKGKRIGSHKGRVAVRSSGYFNIQSGIKGMKAVQGIPHKDCRIAQRADGYNYLWKSVSDQPKAKASTAVQSAPCLTALKDGVSRSIF

SEQ ID NO: 12523 - protein, 431 aa, unidentified; identical to SEQ ID NO: 3801
  REGION 1..431: note = Human gut metagenome

SEQ ID NO: 12524 - protein, 411 aa, unidentified; identical to SEQ ID NO: 6901
  REGION 1..411: note = Human gut metagenome

SEQ ID NO: 12525 - protein, 442 aa, unidentified
  REGION 1..442: note = Human gut metagenome
MVTVQQSTHHLPFGRVFIRRNLFMVYVISQDGKPLMPCSDPIARLLLKQGKAKVKKREPFIIKLTYETTNYTQGLTLGVDTGSGTIGTAVSKDNGDIVYMSEVVVRNDITDKMTQRAKYRRNRRNRKTRYRKARWLNRASSIKKDRFSPTMQSKLHSHVREIEYIQSILPVTEMVFETGQFDMHLMKNPSLANPKVRPWGYQKGANYGFENTKAMVLNRDNYTCQCCKGKHKDSKLEVHHIVFRSQGGSDEESNLLTLCHTCHKDLHSGKINPKLSGKVKGNLKYATQMNSIRKQLFRFYPNAIETFGYVTKVNRLHLGVAKEHYYDACTIATQGNAFNVKSNLYKKKCVSDGDFQKTKGIRSEQPIVTDKICGFRKFDKVRYFGNDYFIKGRMSTGYAILMDIDGNKIDFSTMPRGYKTPKLSNCKRITARSTVMTQVKVV

SEQ ID NO: 12526 - protein, 406 aa, unidentified
  REGION 1..406: note = Human gut metagenome
MVYVQDIYGRPLMPTTRHGKVRRLLKSKKATVVNLCPFTIRLLYDTTGYKQEITLGVDTGTKHVGLSATTKSKELYASEVILRSDVVDLLSTRRELRKIRRYRLRYRKPRFMNRIKSKKRGWIAPSIRQKIDSHIRIIGFVYSILPVSKLIIEVAQFDTQKIKNPEISGKEYQEGEQLGFWNVREYVLARDEHKCQHCKGKSKDPVLNVHHIESRKTGGDSPSNLITLCKTCHKEFRKGNIKLKVNRGESLRDAAVMSIMKWELYDELKSLYPNVKMTFGYITKYNRINHGIEKSHVSDAFVISRNFDSERLGYYYKRKLVRRHNRQIHKMKAPKGGNKRMNQSPFKVFGFRLFDKVMFQGKERFIYARRLRGIFNIRDINGENKKDISYKKLEYVSHGLISIVAG

SEQ ID NO: 12527 - protein, 414 aa, unidentified
  REGION 1..414: note = Human gut metagenome
MPCSPAKARLLLKEKKAIVKRRTPFTIQLTIATGETKQPVGLGVDAGYKHVGLSASTDKAELYASQVELRQDITDLLSARRALRRARRNRKTRYRAPRFNNRIRTKRKGWLAPSVENRINAHLSRIEAVLRLLPVTKITVETASFDMLLLKNPDIAGKEYQEGEQLGFWNVREYVLFRDGHVCQHCYGRSKDPVLNVHHLESRRTGGDSPGNLITLCETCHEALHRGEIALKTKRGHSFRAEAFMGMMRWEVLNRLKASHSELEVNSTYGYRTKHARIVNGIDKSHCADAFCIAGNLGAERLCEFFFQKQTRRNNRQIHKLSILKGGIRKRNQAPFEIKGFRLFDKVACKGEESFIFGRRSSGYFDVRKLDGTRISAGISYKKLRLLEKRRTYLTEIRKEEALPPLPEGRGLRA

SEQ ID NO: 12528 - protein, 477 aa, unidentified; identical to SEQ ID NO: 2707
  REGION 1..477: note = Human gut metagenome

SEQ ID NO: 12529 - protein, 414 aa, unidentified; identical to SEQ ID NO: 6490
  REGION 1..414: note = Lachnospiraceae bacterium UBA4368

SEQ ID NO: 12530 - protein, 404 aa, unidentified
  REGION 1..404: note = Human gut metagenome
LLKEKKAIVVRRTPFTIQLTIATGESKQPVSLGVDAGYKHVGLSASTEKAELYASEVELRPDVSDLLSARRTLRQSRRNRKTRYRAPRFDNRIRTKRKGWLAPSVENRINAHLSRIGAILRLLPVTKITVETASFDTQLLKNPDISGKEYQEGEQLGFWNVREYVLFRDGHACQHCHGRSKDPVLNVHHLESRRTGGDSPGNLLTLCETCHKALHRREIKLKTKRGQSFRAEAFMGIMRWEVLNRLKASHPELEVHNTYGYRTKHTRIVNGIDKSHCADAFCIAGNLGAKRLGEFFFQKQTRRNNRQIHKLSILKHGLRKRNQAPFEVKGFRLFDKVVCQGEEGFIFGRRSSGSFDVRKLDGTRISAGISYKKLCLLEKRRTYLKEIRKEEALPPLPEGRSLRA

SEQ ID NO: 12531 - protein, 425 aa, Moorena sp.; identical to SEQ ID NO: 2698

SEQ ID NO: 12532 - protein, 356 aa, Moorena sp.
MSYVFVIDQEKRPLDPVHPGRARKLLSSGKAAVYRRFPFVLILKHPVSEAHPQPLRLKIDPGSKTTGLAVLNDTSGQVLWAAELVHRGEEVHQALQKRAGVRRGRRSRHTRYRAARFSNRRRKRGWLAPSLCSRMQNVQTWTRRLMRWCPLGAISYEAVRFDTQAIQNPEIKGVAYQHGTLAGLEVKEYLLLKWRHKCVYCQKGDIPLEVEHIVPKRRGGSDRITNLTLACEACNQQKGSQTAQAFGFPHLQAQALQPLKDAAAVNSTRWALYERLKATGLPIEVSTGGQTKWNRKQRGIPKSHWLDAVCVGPSTPERVQWQHVIPLLITARGRHGYFKITGTHGMVEGIHGRHCP

SEQ ID NO: 12533 - protein, 421 aa, Moorena sp.
MQNRVFVIDVNKQPLNPIHPGRARKLLKQGKAAVFRTYPFTIILKKTVPDPVNEPHRIKLDPGAKVTGMALVNQRTDAVVWAAELTHRGDMIRQKLADRRRVRRNRRHRKTRYRPARFDHRKRPDGWLAPSLQHRVETTMTWVERLGKCCSITDLSMELVRFDTQKLQNPEISGVQYQQGVLFGYELREYLLTKWRHECAYCGAQKVPLEIEHIHPKSKGGSDRVSNLAIACHQCNQKKGNKPVEQFLKKKPEVLKRLLAQANAPLKDAAAVNSTRWALFNRLQETGLAIEIGTGGLTKYNRTLQGLPKTHWLDAACVGKSTPMLNIATSQPLQITCTGRGGRQKAAINKYGYPIRHNPLKPIKGWQTGDIAKHRVHGIGRITPRSRGSFVLSKPDKTKKSVKPIDLKPVFRRDGYSYKWA

SEQ ID NO: 12534 - protein, 378 aa, Moorena sp.; identical to SEQ ID NO: 11223

SEQ ID NO: 12535 - protein, 468 aa, Petrotoga sp.; identical to SEQ ID NO: 3825

SEQ ID NO: 12536 - protein, 435 aa, unidentified
  REGION 1..435: note = Human gut metagenome
MSVAVMSKTGMRLMPTSEYRARKLLKSKKATVYGHNPFTIQLTERETGDVQPVELCMDTGYLHIGTSVKSEKHEYLGVQIDTLTDEKQKHDACRMYRRQRRSRKRYRQSRFNNRKRSDGWIAPSLEHKKDIHIQIISRICNAMPITNITLEMGNFDTQVLKALEENRPLPQGTDYQHGERYGIATLREAVFARDKYTCQCCRKTIADGAILHVHHIIYRSRGGTNRMSNLATVCDRCHTPANHKPGGKLYNWKPKLASFKGATFMTTVRWKMYNEVKSKFSDIKIHITYGAETKEQRRAFDITKSHVNDAFVMGQFHPKHRSRPVCYKKKHRNNRCLEKFYDAKYIDSRDGKKRSGQELFNGRINRNHKKDSENLHQYRQQKVSAGRRTIRKQHYSIQPHDIVVFNRQQFETSGCHCNGARAILLPQKKSVFPGA

SEQ ID NO: 12537 - protein, 494 aa, unidentified
  REGION 1..494: note = Human gut metagenome
MSTVYVLNKDGKPLMPTTRYCYVRLLLKENKARVVSTTPFTIQLNYDTPDITQDLILGIDPGRTNIGVAVVKEDGQCVFSAHLETRNKDVPLLMEKRAAFRRNHRNLDRRRKRQRRAKAAGTIVENETIERLLPGYEKPIVCHHIRNKEARFNNRSRPAGWLTPTANHLLQAHINLIAKIAKLLPVTKVVVELNRFAFMAMDNPNIRRWEYQQGPLYGLGSVEDAVYAQQDGHCLFCDKPIDHYHHVVPRNKNGSETLANRCGLCAKHHDLVHKDKAWAEKLVTRKGGMNKKYHAQSVLNQIISFLMEYLGRETPYDVYATDGKSTKGFRIAKNVPKEHYTDAYCIACSILDANTKVSTPAEPFELKQFRRHDRQSCIRQMVDRKYLLDGKVVATNRHKSIEQKSDSLEEFREAYGDAAVSQLTVRPHLPQHKDMTRIMPGAVMDFDGIVGVFKGSSGRNNGTPNYYNSTKGARVLTKRCALLAKNAGMVFIPA

SEQ ID NO: 12538 - protein, 420 aa, unidentified; identical to SEQ ID NO: 3089
  REGION 1..420: note = Human gut metagenome

SEQ ID NO: 12539 - protein, 455 aa, unidentified; identical to SEQ ID NO: 12351
  REGION 1..455: note = Human gut metagenome

SEQ ID NO: 12540 - protein, 411 aa, unidentified; identical to SEQ ID NO: 5226
  REGION 1..411: note = Human gut metagenome

SEQ ID NO: 12541 - protein, 391 aa, Moorena sp.
MSKKPNYVFVLDTKRQPLTPCKPSVARKLLNARKAKVFRLYPFTIILNKEVADSSESLTLKIDPGSKVTGLAILSCSKLLWVAELIHRGQTIKAALESRRSLRRSRRNRHTRYRKPKFLNRTRTKGWLAPSLQHRVETTLTWVNKLSRLVPIRFIFQELVRFDLQQIENPEISGVEYQQGELVGYEVREYLLNKWDRKCTYCGAENVPLQVEHIHPKAKGGTNRISNLCLACEPCNIKKGTKSIEQFLSKKPDVLKKILAQAKRPLKDAASVNSTRWALLNGLKDTGLDVTTGSGGLTKFNRTRLQLPKTDYFDAACVGDTLELFVLANQPLLIKATGHGSRQMCRTDKFGFPSRYVPQFKLIKGFQTGDILTYSPFLKKGDSPSLTALDY

SEQ ID NO: 12542 - protein, 458 aa, unidentified
  REGION 1..458: note = Human gut metagenome
MSTCVCVLSNNGERLMPTFRLGKVRHLLKDGKAKIVKHHPFTIQLLYDSKTNTQPIEICEDVGYNYIGISVKSESYEYVSAQYDTLQDEKEHHDDCRRYRRTRRNRLRYRKRRFDNRKRNKGWLAPSLEHTKQLNISLIERYVSVIPITHATVEVGSFDTMLLQSIQKGEAKPEGADYQEGPRYNLATLREAVFYRDNYTCQVCGRKIADGAILHMHHMFYWKGRHGYKLDELVTACEKCHTPANHQKGGKLFGFGEDKEFADLSGAAFMNAVRWQIVNALHTTYSKEFVTITYGAMTKENRIALQLEKSHNNDAYAMGDFHPVHRCGFRHYQKRRRNNRVLEKFYDATYIDTRTGNKAKGKELFNGRISRNYKKDSENLHKYRSKKVSKGRRSIRRRRYAIQPYDTVRLEGKTYITSGCHNKGTRLLIPVNGKSKSVAISKVQVVCHAGPWIKLSKY

SEQ ID NO: 12543 - protein, 422 aa, unidentified
  REGION 1..422: note = Human gut metagenome
LNKRGKPLMPCSPAKARLLLKEKKAIVVRRTPFTIQLTIATGESKQPVSLGVDAGYKHVGLSASTEKAELYASEVELRKDITDLLSARRALRQSRRNRKTRYRAPRFDNRIRTKRKGWLAPSVENRINAHLSRIEAVLRLLPITKITVETASFDMQRLKNPDISGKEYQEGEQLGFWNVREYVLFRDGHVCRHCHGRSKDPVLNVHHLESRRTGGDSPGNLITLCETCHKALHRGEITLKAKRGQSFRAQAFMGIMRREVLNRLKASYPELKVHETYGYLTKHARIANGIVKSHGADAFCIAGNLGAERLGEFFFQKQTRRNNRQIHKLSVLKHGLRKRNQVPFEVNGFRLFDKVACKGEEGFIFGRRSSGSFDVRKLDGTRISAGISCKKLRLLEKRRTYLTEIRKEEALPPLPEGRGLRA

SEQ ID NO: 12544 - protein, 414 aa, unidentified; identical to SEQ ID NO: 6226
  REGION 1..414: note = Human gut metagenome

SEQ ID NO: 12545 - protein, 424 aa, unidentified; identical to SEQ ID NO: 3434
  REGION 1..424: note = Human gut metagenome

SEQ ID NO: 12546 - protein, 417 aa, unidentified
  REGION 1..417: note = Human gut metagenome
MPCSPAKARLLLKEKKAIVKRRTPFTIQLTIATGEAKQPVTLGVDSSYKHIGLSATTEKVELYASQVELRQDITDLLSARLALRRSRRSRKTRYRAPRFDNRVASKRKGRLAPSVENRIAAHMSRVEAVMRVLPVTAITVETAVFDTQLLKTPDIAGAAYQQGEQLGFWNVREYVLFRDGHVCQHCRGKSKDPILNVHHIESRRTGGDAPNNLITLCETCHKAFHRGEIELKIKRGKSFKAETFMGIMRWTLFERLKKAHPELNVHNTYGYLTKHKRISYGIAKSHCADAYCIADNLSAKRLKGFFFQKQTRKHNRQIHKLSILKGGLRKKNQAPYEVKGFRLFDKVICKGEEAFIFGRRTSGSFDVRRLDGTRISAGINYKKLRLLEPRTTYLTEFRKEAALPPLHKCRGFRAEFL

SEQ ID NO: 12547 - protein, 404 aa, Salipiger sp.
LLRDGKAAVFRRYPFTIILKRKVPDAEPAPVEVKIDPGSKTTGLALVQGDKVLWGGELTHRGHQIRDRLQMRRERRRGRRNKLRYRKPRYRTKAQINNADRKRKKGWLAPSLLHRVETIMTWMDRFRRYAPVGSIAMELVKFDLQQMQNPEISGVEYQQGDLAGFEVKEYLLAKWGRKCAYCGAEGRPLEVEHIQPRSRGGSNRVSNLTLACEPCNQAKGNKPVEAFLSSKPDLLARIMKQAKRPLRDAASVNSTRWVLFTALKLTGLPVTAGTGGRTKYNRKRMGWAKAHWLDAAAVGNVDALTLRTDKPLLISAKGQGGRQKGVFDKHGQPRRNKAGAAQIRPLKPIHGWRSGDIAKARGLEGRISPRTRGSFELRAAGQKPRSFPPRDFVAIHRNDGYAYQ

SEQ ID NO: 12548 - protein, 423 aa, Arthrospira sp.
MSNHIFVLDTNRKPLTPCKPGVARSLLKAGKASVFRRYPFTIILNKEVDANPEPLELKLDPGSKVTGIALKQGNHIIFAAELQHRGQQIKEALLSRRQLRRSRRNRKTRYRPARFLNRTRSKGWLAPSWQHRVDTLMTWVQRFRRLAPVGRIAQELVRFDLQLMENPEISGVEYQQGALQGYEVREYLLEKWGRTCAYCGAQNVPLEVEHIQPRSKGGSDRVSNLTMACHSCNQAKGNGDIRDFLSGQPDVLSRLLRQAKSPLKDAAAVNSTRWALFKALKATGLPVTTGTGGQTKFNRLKLNLPKAHWLDAACVGPVESLEVLTSKPLLILAKGHGTRQMCGTNKYGFPNRHRSRRQIHKGFQTGDMVTALVTAGKKIGSYLGRVLCRASGSFDITTASVRVAGISHKYCQPIHRKDGYAYA

SEQ ID NO: 12549 - protein, 413 aa, unidentified; identical to SEQ ID NO: 3476
  REGION 1..413: note = Human gut metagenome

SEQ ID NO: 12550 - protein, 418 aa, unidentified
  REGION 1..418: note = Human gut metagenome
MVYVINKQGQALMPTERFGKVRRLLKNGLAHVMYRIPFTIQLDYDTTNFIQPISLGIDAGSKHIGISATTSEKELYAADVELRNDIVEKLSTRREQRRTRRNRLRYRRARFNNRVSSKRKGWLAPSIENKIQTHLTVVEKIHKFLPITNIIVETAAFDIQKIKNPSISGKEYQQGEQLNFFNVREYVLHRDGHQCQHRKGKSKDPILNVHHIESRKVGGNSSQNLITLCESCHKAYHKGEIELEVKRGTSFRDSAFMSTMRWSFYKKLKNIYPNVSMTFGYITKHTRITNGLPKNHYVDARCISGNPTAKHLEYYFYQKKVRCQNRQIHKVNFLKGGRKKLNQAPYLVKGYRLFDLVEYQKDLYYIFGRRESGFFDIRKLDGTKVNKGSISCKQMRLIDIRKTIIIEKRMQGAIHPIN

SEQ ID NO: 12551 - protein, 518 aa, unidentified; identical to SEQ ID NO: 7468
  REGION 1..518: note = Human gut metagenome

SEQ ID NO: 12552 - protein, 460 aa, Petrotoga sp.; identical to SEQ ID NO: 4123

SEQ ID NO: 12553 - protein, 509 aa, unidentified
  REGION 1..509: note = Human gut metagenome
MPDTDYIYVLGADGKPQMPTKRKRHVKRLLDTGKARIACHVPYTIQLLYENTPVLQPVMLAEDPGRTNIGMAVLSVKGELLMSAVVETRNRKIVRLMNHRRGYRRASRNGERKARQRLAKRFSTMLKAGMLMRKLPKFAADKFITCHYIRNTESRFCNRKRPDGWLTPTSRQLVETHINLIHKIQKYLPVTDIAMEVNRFAFLSLENPSVSGVDFQNGPLKGFDSLHDAVNELQHGKCLLCDKKIEHYHHIVPRFMNGSNTIGNIAGLCMECHNKVHKRAAYQKKLNDVKKGLDKKYGALSALNQAVPFICKRLEAEFGKEHVSYCTGRDTAKMRSSFGFQKTKDNQMHETDAWCIGILALNRIPDVVPNFGQTYCIRQFRRQDRSFVYAQTERVYKLDGVIVAKNRKKRTEQKTDSLEDWYNRQVVLYGKKKADFMRSRLTAVKSKRRYNDLTRVMPGAIFMYNGERYVLSGRLSKGLLFRAVGDAKTNYPASKCKIIRHNEGLVFVC

SEQ ID NO: 12554 - protein, 456 aa, unidentified; identical to SEQ ID NO: 4174
  REGION 1..456: note = Human gut metagenome

SEQ ID NO: 12555 - protein, 428 aa, unidentified
  REGION 1..428: note = Human gut metagenome
LKVFVLNMRGRPLMPCSPAKARHLLKAGKAVVRRRTPFTIQLRIATGETKQNVTLGVDAGAKHVGLSAATEKEEVFASEVELRQDITGLLAARLSLRRERRQRKTRYRAPRFLNRVRSKHNGWLPPSVENRIQAHLSRIDAICGLLPVTKIVIETASFDIQKIKHPDVEGTDYQQGDQLGFWNVREYVLFRDGHVCQHCHGHAKDKILNVHHLESRQTGGDAPNNLITLCETCHKACHAGKIKLKVKRGQSFRAEAFIGIMRWTLLDRVRKAHPGLPVENTYGYLTKNTRITQGLPKTHCVDAYCIAGNLKAVRRGVYLHQRQVRKHNRQIHKCTVLSKTLKDGTKIGYRKLNQTPHLVKNFRLFDKVRCLGQTGFIFGRRSSGYFDVRRLDGVKLSSGISYRKLTLLEKRSTYLTELRKEDGASSPV

SEQ ID NO: 12556 - protein, 430 aa, Oscillochloris sp.
MVFVLATDRTPLDPTTFHRADHLLRCGRASVFRTYPFTIIVHDRTAVASVTHPHRLKLDPGSKTTGIAVVAEESGRVVWAGELTHRGQQIRDRLLTRRASRRSRRQRKTRYRQPRFLNRRRPEGWLAPSLQHRVETTLTWVNRLRRFVPITAISTELVRFDTQFMQDAEISGVAYQQGTLAGYEVREYLMEKWGRRCAYCGAKEIPLQIEHIVPRARGGSDQVSNLALACEPCNIRKGTQTAAEFGHLDIQAQARRPLKDAAAVNATRWVLYQRLTATGLLVEVGTGGRTKYNRTRLGLAKTHWHDAACVGASTPHGLEVRGVQPLLIRATGHGSRQACRMDKYGFPRTGPKGARVVKGFKTGDMVRAVVTTGTKVGVYVGRVAVRTTGSFNITTATGTIQGLNHRFFTHLHRADGYTYPGDGASSHPGS

SEQ ID NO: 12557 - protein, 407 aa, unidentified; identical to SEQ ID NO: 3417
  REGION 1..407: note = Human gut metagenome

SEQ ID NO: 12558 - protein, 451 aa, unidentified
  REGION 1..451: note = Human gut metagenome
MSVAVMSKTSMRLMPTSEYRARKLLKSKKATVYGYHPFTIQLTERETGDVQPVELCMDTGYLHIGMSVKSKKHEYLGVQIDTLTDEKQKHDACRMYRRQRRSRKRYRQSRFNNRKRSDGWIAPSLEHKKDIHIQTISRICNAIPITNITLEMGNFDTQVLKALKKNRPLPQGTDYQHGERYGIATLREAVFARDKYTCQCCRRTIADGAILHVHHIIYRSRGGTNRMSNLATVCDRCHTPANHKPGGKLYNWKPKLASFKGATFMTAVRWKMYNEVKSKFSDINIHITYGAETKEQRRAFDITKSHVNDAFVMGQFHPKHRSRPVCYKKKRRNNRCLEKFYDAKYIDSRDGKKRSSQELFNGRINRNHKKDSENLHQYRQQKVSSGRRTIRKQHYSIQPHDIVVFNRQQFETSGCHCNGARAILLPQKKSVAIKKLSIHKYAGGYFKSDFT

SEQ ID NO: 12559 - protein, 456 aa, unidentified; identical to SEQ ID NO: 8309
  REGION 1..456: note = Human gut metagenome

SEQ ID NO: 12560 - protein, 442 aa, unidentified; identical to SEQ ID NO: 2903
  REGION 1..442: note = Human gut metagenome

SEQ ID NO: 12561 - protein, 413 aa, Blautia sp.; identical to SEQ ID NO: 3290

SEQ ID NO: 12562 - protein, 414 aa, unidentified
  REGION 1..414: note = Human gut metagenome
MPCSPAKARLLLKEKKAIVKRRTPFTIQLTIATGETKQPVSLGVDAGYKHVGLSASTEKAELYASEVELRQDVSDLLSARRALRQSRRNRKTRYRAPRFDNRIRTKRKGWLAPSVENRINAHLSRIEAVLRLLPVTTITVETASFDMQLLKNPEISGKEYQEGEQLGFWNVREYVLSRDGHVCQHCHGRSKDPVLNVHHLESRRTGGDSPGNLITLCETCHKALHRGEITLKAKRGQSFRAEAFMGIMRWEVLNRLKASHPEQEVQNTYGYRTKHARIENGIAKSHCADAFCIAGNLGAERLGEFFFQKQTRRNNRQIHKLSVLKHGLRKRNQAPFEIKGFRLFDKVACKGEEGFIFGRRSSGYFDVRKLDGTHISAGISYKKLRLLEKRQTYITEIRKEEALPPLSEGRGLRA

SEQ ID NO: 12563 - protein, 376 aa, unidentified
  REGION 1..376: note = Human gut metagenome
LWISYLLVGNKEELVGAALRYRKARFNNRISSKRKGWLAPSVENKIQTHLTVVEKIHKFLPITNIVVETASFDIQKIKNPSISNEEYQQGEQLDFFNVREYILFRDGHTCQHCKGKSKDKVLNVHHIESRKTGGDSPNNLITLCETCHKAYHRGEFELNVKRGKSFRDAAFMGIMRWNLYDRLKNIYPNVSMTFGYITKNTRITNNLPKEHYVDARCISGNPVAKPLGYYFYQKKVRCQNRQIHKVNFLKGGRKKLNQAPFLVKGFRLFDLVEYQKDLYYIFGRRDSGFFDIRKLDGTKVNKGSISCKQMRLIDIRKTIIIEKRIASKFMKKGDKVREIGDTLTGTIVYIANGYADVKYPNMKGVCSLPVQFLEKV

SEQ ID NO: 12564 - protein, 436 aa, unidentified
  REGION 1..436: note = Human gut metagenome
MPCHPARARTLLKKGRARVHKVFPFTIRLTDRELENSSVQPMLIKIDPGSKETGIALVREEKNKGHHALYFINLQHRGQQIRNALYKRRCLRRSRRSRNLRYRSPRFLNRRRAEGWLAPSLQHRADSILSWVSRLRKIAPVERISQELVKFDTQLIQNSKIEGIEYQQGELVGYELREYLLEKFGRKCIYCGADNVPLNIDHVIPKSKGGSNRASNLVLACVQCNQKKGSRSVEEFLKDKPEVLRQIKNQLKQPLKDAASVNATRWKLFNKLKLTGFPFEVGSGALTKFNRKKFGIPKAHWLDALCVGNVPSVTNWRNLNVLNIKCCGRGAYQRTRTDKYGFPRGICMRQKKVYGFSTGDMVKAIIPKGKKKGVYVGKVAVRKTGSFNLQTSGQTIQGISYRYCRLITHSDGYSYSWKSCPIPPRVETRGILGEVR

SEQ ID NO: 12565 - protein, 442 aa, unidentified
  REGION 1..442: note = Human gut metagenome
MGEGLQPTERSRRQNLRVFVLNKRGQPLMPCSPAKARLLLKEKKAVVRHRTPFTIQLTQATGETVQPVTLGVDVGSKFIGLSASTEKAEHYASEAELRTEVVDLLSSRREMRRARRNRKTRYRAPRFDNRIHSKNKGWLAPSVENKINTHLSCVDNVRKCLPVTKIVVETAAFDIQKIKNPDIEGTDYQQGDQLGFWNVREYVLCRDGQQCCHCHGKSKDPILNVHHLESRKTGGNAPNNLITLCETCHKAYHDGKITLKQKRRQVFRDAAFMGIMRWTFFNRLKAQCPEIEVRNTYGYLTKNTRIRHGLEKSHHTDAFCIAGNLEAKRLGVYFFQKQTRKHNRQIHKMSILKGGVRKLQQAPYEVKGFRLFDKVRYDGREAFIFGRRSSGYFDIRLLTGEKVSAGVSYKKLVLLEKRKTFLTQLIKENAIPPATEVAGFLA

SEQ ID NO: 12566 - protein, 428 aa, Moorena sp.; identical to SEQ ID NO: 4440

SEQ ID NO: 12567 - protein, 462 aa, unidentified
  REGION 1..462: note = Human gut metagenome
MSVLVIGRNGRALMPTNPRKARLLLKKKTASVVCRHPFTIQLLYKTGCATQEGSIGIDTGSQHIGVGITCGDKVILKDEHALRSSMEKRSLLATRAVMRRGRRYRKVRYRKPKWRHHTKRMYFEKANRRGQHWRKVKTTTQSPRSKGWLPPSLQSKCDHHFRIIDRYLKYLPDPITRNLVIETGRFDMARMNDPTIHGEMYQRGPMYDAENRRAYIFARDNYQCACCKAKAGTTRKADGTTVKLVAHHILFRSRGATDNPKYIISVCDHCHTTKAHQPGGILYSWMENNKKVARGLRDATFMNILRKRLFARYPQAAFTYGNITAADRKKLRLPKSHANDAVAISLFGKEASTVKNICQTMHYKQIRKSKRSLHEAIPRKGRKNPNTKAVRNKKNTTQVNGFKLWDSVLANGKKLFICSFTGTSAYLIDKNGCYISQPGKTYKQWPLSKLKRLHPNGNWLMA

SEQ ID NO: 12568 - protein, 367 aa, unidentified
  REGION 1..367: note = Human gut metagenome
YKHVGLSASTEKAELYASEVELRQDVSDLLSARRALRQSRRSRNTRYRAPRFDNRIRTKRKGWLAPSVENRINAHLSRIETVLRLLPVTKITVETASFDTQLLKNPDIAGKEYQKGEQLGFWNVREYVLFRDGHVCQHCHGRSKDPVLNVHHLESRRTGGDSPGNLITLCETCHKELHRGEITLKAKRGQSFRAETFMGIMRWEVLDRLKASHPKLEVQNTYGYRTKHARIVNGIAKSHCADAFCIAGNLGAERLGEFFFQKQTRRNNRQIHKLSILKGGIRKRNQAPFEVKGFRLFDKVACQGEEGFIFGRRSSGFFDVRKLDGTRISAGISCKKLHLLEKRRTYLTEIRKEEALPPLPEGRGLRA

SEQ ID NO: 12569 - protein, 418 aa, unidentified
  REGION 1..418: note = Human gut metagenome
MVYVLSKTGQPLMPTENHAKVRVLLKQQKAKIVHSCPFTIQLLYDSTDYTQPVSLGIDAGSRHIGVSATTETKVLYEADVTLRNDIVDLLSTRREARRTRRSRKTRYRKPRFNNRIRKDGWLAPSVRQKVDTHLTTVRKVTEILPVNSITVETASFDIQKIKNPDIAGTGYQQGEQLDFWNVREYVLFRDGHKCQCCKGKSKDPVLNVHHIESRKTGGNAPNNLITLCETCHKGYHNGTVSLPKNIRRGMKFNDAAFMGIMRWAFFNRVKETYEPLGIMVNMTYGYITKNTRIEHDLPKDHFIDARCISGHPDATSGGTVFYQKKVRCHNRQIHKQKILKGGIRKRNQAPYLVKGFRLFEKVKYHGKQYFIFGRRSSGFFDIRTLDGTKVNKGSVSCKKIRSLDMPRSYLTEERKAIV

SEQ ID NO: 12570 - protein, 414 aa, unidentified
  REGION 1..414: note = Human gut metagenome
MPCSPAKARLLLKEKKAIVVRRTPFTIQLTIATGETKQPVSLGVDAGYKHVGLSASTEKAELYASEVELRQDITDLLSARRALRQSRRNRKTRYRAPRFDNRIRTKRKGWLAPSVENRINAHLSRIEAVLRLLPVTKISVETASFDMQLLKNPDIAGKEYPEGEQLGFWNVREYVLFRDRHVCQHCYGRSKDPVLNVHHLESRRTGGDSPGNLITLCETCHKALHRGDITLKAKRGKSFRAEAFMGIMRWEVHNRLRALHPGIEVSNTYGYRTKHARIANGIAKSHCADAFCIAGNLGAERLCEFFFQKQTRRNHRQIHKLSILKGGIRKRNQAPFEVKGFRLFDKVACQGEEGFIFGRRSSGFFDVRKLDGTRISAGISCKKLHLLEKRRTYLTEIRKEEALPPLPEGRGLRA

SEQ ID NO: 12571 - protein, 419 aa, Paenibacillus sp.; identical to SEQ ID NO: 3664

SEQ ID NO: 12572 - protein, 576 aa, unidentified; identical to SEQ ID NO: 5774
  REGION 1..576: note = metagenome

SEQ ID NO: 12573 - protein, 443 aa, Anoxybacillus sp.
MVEENMTCFMQRKGENPMVFVLDTNKRPLAPCHEAVARKLLKQGKAAIYKRYPFTIILKEIVDNFRPKTPYRLKIDHGSKHTGLAILRGQEVVWLGQLDHRTDIKERIDKRRAFRRARRNRKTRYRKPRFLNRRRKDGWLPPSLESRVQNIQTWVNRLKKLCPIGYISYENTKFDTQLMRNPEISGIEYQQGTLQGYEVREYLLEKFGRKCCYCGKENVPLEVEHIIPKSRGGTDRVDNLCLACHDCNQRKGSKTAEEFGYPHIQKQVKESLKDASAVNSTRWKVYEVLKQSGCEVECGTGARTKMNRIRLDLPKTHYFDACCVGESTPNHLYFKTKEVLFIRAKGRGSRSRTNLDRYGFPRGYLARQKFFFGFQTGDMVKAVIPRGKYQGVWFGEVSCRKTGSFDIKGKDGKRIAQGINYRYVQVIQRFDGYTYRREGMNIA

SEQ ID NO: 12574 - protein, 413 aa, unidentified; identical to SEQ ID NO: 3587
  REGION 1..413: note = Human gut metagenome

SEQ ID NO: 12575 - protein, 524 aa, unidentified
  REGION 1..524: note = Lachnospiraceae bacterium UBA2826
METQQAQMPVAYSQILERRYQRMFEVNIMVQNADSTPLMPIHHYGRAKRMLRSGKARIVSRRPFVIRLTYQIENPGLDIVTLGIDPGRTNIGLALIDSKGRDLGSYVLQTDNKSVPKHMKDRRMHRQASRRGERKRRQRRAVSADRTGMLRKTRIYRMLPGCKRPVRCKSIRNSKARFNNRKRPEGWLTPTARNLLDTHLQAVKRLAEYYPIQNIAIEINRFDFAKMENPGILNWQYQKGKLFGFADRDEAVFSLQHGRCLLCGRQKIEHYHHIVPRSRGGSESIDNIAGLCMKCHELVHKSGAAAAKLQAKKQGELKKYHALSVLNQIMQCLLTELSALYPTYVTTGQKTHRSRMEYGLPEKEKDDNTHHIDAWIIAVDAMGICPEEIPTFSNMQMILQFRRHDRAGIHYQKERTYYLDGRIVCKNRHKRTGQTDGVSKYISLAEYRAQHPHEVSRLSVRKSTRGYNDMKRELPGALVRYKGHTLTVSGKHNDRYQFVEKEICREAPIRQCKVICHNRGLVFA

SEQ ID NO: 12576 - protein, 439 aa, unidentified
  REGION 1..439: note = Human oral metagenome
MVFVLDKSKKPLDMITNAKARILLRNNLAIIHKVYPFTIRLIDNSCGSRNKAYTVKFDPGSKHTGIAIVDNTNKVVMLAELEHRGHLIKRNLDKRRAVRRSRRQRKTHYRAARFLNRTRPQGWLAPSVKSRADNVINFVKKYKKLLNINKVMIENVSFDTAQMNSDKKLWGNDYQQGNLYNKNLREFIFSKTKGRCSYCGEKAEEIDHIVPRAKGGSNSTHNLTPACRSCNEKKSNLSLKEFGKLMNKDYSQLEPKKLPKDAAIVQSARNYMVKEIAKLVPDTITYEAWMTKYNRDQLGLSKQHYYDALSVGETPTKFNFLTDKILQISAKGRGSRQMCRMDSYGFPRTFAKASKSVKGFQTGDMVKAIVPFGLKQGEYLGKVAVRSSGSFNIQTKTKTIQGIRYRYCHIIQRSDGYSYDYKERDFFSAMNCRVSVAEL

SEQ ID NO: 12577 - protein, 512 aa, unidentified; identical to SEQ ID NO: 5549
  REGION 1..512: note = Human gut metagenome

SEQ ID NO: 12578 - protein, 512 aa, unidentified; identical to SEQ ID NO: 4350
  REGION 1..512: note = Human gut metagenome

SEQ ID NO: 12579 - protein, 442 aa, unidentified; identical to SEQ ID NO: 2903
  REGION 1..442: note = Human gut metagenome

SEQ ID NO: 12580 - protein, 378 aa, Moorena sp.
MQNYVLVIDTNKRPLNPISPKKARRLLDKGKAAVFRMYPFTIILKTAIYNPVVLPCHIKIDPGSKTTGFALVQNNQVIWGMELEHRGELIKKKLESRKAVRRGRRNRHTRYRKPRFLNRRRKDGWLPPSLEHRILTIQTWVKRLIKFCPVNEIWVERVKFDTQKMPNPEINGIQYQQGELAGYEVREYLLEKWGRECTYCGKQSIPLQIEHIHPKSKGGSNSAKPTLRERVSNLCLACEKCNQRKGNKSIEDFLKKKPNLLQKIKTKAKQPLPDAAAVNTTRNKLVKVLRSIKLVVTGTGAQTKYNRTKLGLPKQHWIDAACVGDIETLVLRTSQPLLVTCKGPGGRQKAALNKYGYPIRHNPLKPIKGACYWGHSQA

SEQ ID NO: 12581 - protein, 525 aa, unidentified
  REGION 1..525: note = Human gut metagenome
VSLPVKQVNRDKTSTGNSFKAPQRARRRTCRSAGAEQGRNCHLERNIIMIIALDKNKRPLGFLTERRCRILMERKRAVLYRVFPTVVILMDMDVRKLQDLPSYRIKIDPGSKYTGIAIVRNDTDELVYAMQIEHRGDAVRAGLQKRKMARRNRRSRETGYRRAKWGNRCLSDGDKKSYNSSRKDGWLPPSIRSVADNVLTWVQRLSRWVNITDCSLEAVRFDTQLLENPNIKGEEYQHGTLFGYEIREYLLEKFGHTCQYCGGESGDPVLEWEHIHPKSRGGSNRVKNALLSCSSCNRDKDNQTPEEWIGQVSFRLSHEKGKKRELDSKRIELIQKVIDGKPEGQPMRYAAWVSSSRRYLENHLFQIFRDVECSSGGRTKYNRTKLGYPKEHHYDALCIGTVPEKGYHDRTNGYYLYAKATGRGTRLRGTLNKCGIIVTKWTSRKKNFFGFQTGDIVVAEVPHKTPKPYKHEGRFVGRVMVRASGSFDIRTTGGRLATVKAGFCRLLQANSGCAYSMERAISLGH

SEQ ID NO: 12582 - protein, 425 aa, unidentified; identical to SEQ ID NO: 10997
  REGION 1..425: note = Human gut metagenome

SEQ ID NO: 12583 - protein, 416 aa, unidentified
  REGION 1..416: note = Human gut metagenome
VISQDGKPLMPCSDPIARLLLKQGKAKVKKREPFTIKLTYETTNHTQGLTLGVDTGSGTIGTAVSKDNGDIVYMSEVVVRNDITDKMTQRAKYRRNRRNRKTRYRKARWLNRASSIKKDRFSPTMQSKLHSHVREIEYIQSILPVTEMVFETGQFDMQLMKNPSLANPKVRPWGYQKGANYGFENTKAMVLNRDNYTCQCCKGKHKDSKLEVHHIVFRSQGGSDEESNLLTLCHTCHKDLHSGKINPKLSGKVKGNLKYATQMNSIRKQLFRFYPNAIETFGYVTKANRLHLGVDKEHYYDACTIATQGNAFNVKSNLYKKKCVSDGDFQKTKGIRSEQPIVTDKICGFRKFDKVRYFGNDYFIKGRMSTGYAILMDIDGNKIDFSTMPRGYKTPKLSNCKRITARSTVMTQVKVV

SEQ ID NO: 12584 - protein, 442 aa, unidentified; identical to SEQ ID NO: 3218
  REGION 1..442: note = Human gut metagenome

SEQ ID NO: 12585 - protein, 414 aa, unidentified
  REGION 1..414: note = Human gut metagenome
MVYVINKQGQALMPTERFGKVRRLLKNSLAHVMCRIPFTIQLDYDTTDYTQPVSLGVDAGSKHIGISATTSDKELYAADVELRNDIVDKLSTRRELRRTRRSRLRYRKARFNNRVSPKRKGWLAPSVENKIQTHLTVVEKIHKFLPITNIVVETAAFDIQKINNPSISGSEYQQGEQLDFFNVREYILFRDGHTCQHCKGKSKDKVLNVHHIESRKTGGDSPKNLITLCETCHKAYHRGELELNVKRGRSFRDAAFMGIMRWSFYDRLKNIYPNVSMTFGYITKNTRITNNLPKEHYVDARCISGNPVAKPLGYYFYQKKVRCQNRQIHKANFLKGGRKKLNQAPFLVKGFRLFDLVEYQKELYYIFGRRSNGSFDIRKLDGTKVNKGSINCKHLRLISTRKSILTEKRILVNL

SEQ ID NO: 12586 - protein, 428 aa, unidentified
  REGION 1..428: note = Human gut metagenome
LKVFVLNMRGQPLMPCSPAKARHLLKAGKAVVKRRTPFTIQLRIATGETKQNVTLSVDAGAKHVGLSATTEKEEVFASEVELRQDITGLLAARLSLRRDRRHRKTRYRAPRFLNRVRSKHKGWLAPSVENRIQAHMSRIDAVCRLLPVTKIVIETASFDIQKIKDPSVEGTDYQQGDQLGFWNVREYVLFRDGHVCQHCHGRSKDKILNVHHLESRQTGGDAPNNLITLCETCHKAYHAGKIKLKVKRGQSFRAEAFMGIMRWTLLDRVRKAHPGLPVENTYGYLTKHTRITHGLPKTHCVDAYCIAGNLKAVRRGVYLHQRQMRKHNRQIHKFTVLSKRLEDGTKIGYRKLNQSPYLVHGFRLFDKVRCLGQIGFIFGRRSSGYFDVRRLDGVKLSPSISWRKLTLLEKRSTYLTELRKQDGASSPV

SEQ ID NO: 12587 - protein, 427 aa, Parasutterella sp.; identical to SEQ ID NO: 3787

SEQ ID NO: 12588 - protein, 442 aa, unidentified; identical to SEQ ID NO: 3161
  REGION 1..442: note = Human gut metagenome

SEQ ID NO: 12589 - protein, 455 aa, unidentified
  REGION 1..455: note = Human gut metagenome
VLQTTNPFQHWRRITTDRKVEQTEPVRYPSMENTLKVFVLNMRGQPLMPCSPPKARKLLRAGKAVPVRRTPFVIQLTVPTGETKQPITLGVDAGYKHVGLSATTAKEELLASEVELRQDVTGLLSNRLALRRARRNRKTRYRAPRFDNRVRSKHKGWLAPSVENRIQAHISRIEAVCRVLPITKIVIETASFDIQKIKNPEVEGTDYQQGEQLGFWNVREYVLFRDGHVCQACKGRSKDLILNVHHIESRKTGGDAPGNLITLCEACHKAYHAGKLKQFSPRRGASFRAETFMGIMRWTVLNRLRERHPELPVTNTYGYLTKHKRIVAGLPKTHCADAFCIAGVLDAKRRGEYLFQKQTRRHNRQIHKLTILKGGVRKRHQAPYLVHGFRLFDKVLCKGEVGFIFGRRSSGAFDVRRLDGTKISAGISYKKLSLLEKRKMFLTELRKEGRDSSRV

SEQ ID NO: 12590 - protein, 415 aa, Bacillus sp.; identical to SEQ ID NO: 2671

SEQ ID NO: 12591 - protein, 278 aa, unidentified
  REGION 1..278: note = Human gut metagenome
ICRILPVTLVRVETAEFDTQRLKAMLAGKPLPVGTDYQLGEMYDEYNVRQYVLKRDNYTCQCCGAHTTAKKTVKLHVHHLESRKVGGNAPSNLITLCTTCHNNLHKGKITLDGKKRGKTLRDAAFMGIMRNTLLTRLRNELNIPVQNTYGYITKLLREQNDIKKSHVNDARCISKHPLAKPCSVCYRTKAIRHHNRQIHKAKILKGGIRKANQAPYIVKGFRLWDKVLYNEQECFISGRRSSGYFALRKFDGTTITNSISFKKLRLLEPATNYLIERK

SEQ ID NO: 12592 - protein, 430 aa, unidentified; identical to SEQ ID NO: 4817
  REGION 1..430: note = Human gut metagenome

SEQ ID NO: 12593 - protein, 414 aa, Parasutterella sp.
MPCSPAKARLLLKEKKAIVVRRTPFTIQLTIATGESKQPVSLGVDAGYKHVGLSASTEKAELYASEVELRPDVSDLLSARRTLRQSRRNRKTRYRAPRFDNRIRTKRKGWLAPSVENRINAHLSRIGAILRLLPVTKITVETASFDTQLLKNPDISGKEYQEGEQLGFWNVREYVLFRDGHACQHCHGRSKDPVFNVHHLESRRTGGDSPGNLLTLCETCHKALHRREIKLKTKRGQSFRAEAFMGIMRWEVLNRLKASHPELEVHNTYGYRTKHTRIVNGIDKSHCADAFCIAGNLGAERLCEFFFQKQTRRNNRQIHKLSILKHGLRKRNQAPFEVKGFRLFDKVVCQGEEGFIFGRRSSGSFDVRKLDGTRISAGISCKKLRLLEKRRTYLKEIRKEEALPPLPEGRSLRA

SEQ ID NO: 12594 - protein, 424 aa, unidentified
  REGION 1..424: note = Cyanobacteria bacterium UBA8553
MFVFVLDINKKPLNPTHPARARKLLKTGKAAVFKRYPFTMILKEEIVEPSNQELRIKIDSGAKTTGIAILRNEVVLWAAELTHRGFQIREALTSRRQLRRSRRNRKIRYRQPRFNNRCRTDGWLPPSLISRVDNILTWAKRLLRLSPITAISTELVRFDTQLMQNPEISGIEYQQGELAGYELREYMLEKWHRKCAYCGVTDTQLEIEHIIAKSKGGSNRVSNLTLSCTKCNQKKGNKPIEQFLKNKPEVLKLILAQAKRSLADTAAVNATRWKLLNSLKELGLPVETGTGGRTKYNRCRQNLPKTHWLDASNVGASTPEDLKVLVSKPLVIKATGHGNRQMCGTNAYGFPIRHRSNIKKHFGFQTGDIVKAVVTKGKKIGSYTGRVLCRATGNFDVTTASGRVAGISHKYCSFIHRSDGYAYQ

SEQ ID NO: 12595 - protein, 412 aa, Deinococcus sp.; identical to SEQ ID NO: 3738

SEQ ID NO: 12596 - protein, 433 aa, Moorena sp.
MRVFVLDQNRTPLDPCKPARARILLKQGRAKVFRTYPFTIILTEVVEGAVTHEHQLKIDPGAKTTGLAILSNNVLIWGAELTHRGFQIRDALTSRRQLRRSRRNRKTRYRKPRFLNRKRPDGWLPPSLTSRVHNILTWVKKLIRLCPIAGISQELVRFDPQKMENPEISGTDYQQGTLYGYEIREYLLEKWNRKCAYCGATDTQLEIEHIKSKSKGGSDRVSNLAIACRDCNQAKGNQDIEQFISCKPDVLKWVRSQAKRPLADATAVNATRWKLYNELKLTGLSVETGSGGQTKYNRYRFNLPKTHWLDAACVGEVPSIYVENDQTLLIAAKGHGTRQICRTDKYGFPKRHCSRTKIHKGFQTGDIVKAVVTKGKKIGTYVGRVATRQTGSFNISTSHGLIQGISHKYCTPIHKKDGYAYQINALSSLSFPR

SEQ ID NO: 12597 - protein, 417 aa, unidentified
  REGION 1..417: note = Human gut metagenome
MPCSPAKARLLLEEKKAIVKRRTPFTIQLTIATGEAKQPVALGVDSGYKHIGLSATTEKAELYASEVELRQDITDLLSARLALRRSRRSRKTRYRVPRFDNRVASKRKGRLAPSVENRITAHMSRVEAVMRVLPVTAITVETAAFDTQLLKNPDITGAAYQQGEQLGFWNVREYVLFRDGHVCQHCRGKSKDPILNVHHIESRRTGGDAPNNLITLCETCHKAFHRGEIKLKVRRGKSFKAETFMGIMRRTLFERLKKAHPELNVRNTYGYLTKHKRISYGIAKSHCADAYCIADNLGAKRLEGFFFQKQTRKHNRQIHKLLILKGGLKKKNQAPYEVKGFRLFDKVICKGEEAFIFGRRTSGSFDVRRLDGTRISAGINYKKLRLLEPRTTYLTEFRKEAALPPLHKCRGVCAEFL

SEQ ID NO: 12598 - protein, 413 aa, unidentified; identical to SEQ ID NO: 2636
  REGION 1..413: note = Human gut metagenome

SEQ ID NO: 12599 - protein, 447 aa, unidentified
  REGION 1..447: note = Human gut metagenome
VPAYRIKHITKKEAPYMVYVLDIDGQPLMPTSRHRKVRKLLNSHLAKVVKRCPFTIQLLYQSTKETQPVSLGVDAGSRHIGLAATTEQKVVYQEELVPRNDVVKLLSARRALRSSRRSRKTRYRKPRFNNRVHSKHKGWLAPSVEVKIQEHITAIKRICQILPISDIHVETAEFDLQRLKAMEEGRPLPVGTDYQLGEQYDFYNTRQYVLHRDEYTCQCCGTHDNNVKLHVHHIESRQTGGDAPNNLITLCEHCHKLLHAGKTILPKVKKRGKSYRDATFMGIMRKTLLERLKKEIDVPVEGTYGYITKYWRERAGLEKSHINDAICISKHPYARPLETYYLTKAVRHHNRQIHKTKFSKGGIRKRNQAPYLVKGFRLFDKVLYQGESYFIFGRRITGYFDIRTLDGTKVNKGSTSYKKLRIQDTAEAYLTEVRAIPHMNEFTCVLA

SEQ ID NO: 12600 - protein, 512 aa, unidentified
  REGION 1..512: note = Human gut metagenome
MSTVYVLNKDGKPLMPTTRCGHVRHLLKEQKARAVASKPFTIQLLYETDDVVQPLYLGIDPGRSNIGVAVVKTDGMAVFTAHLETRNKEIPKLMKKRKDSRRARRTNGRRCRRQRRAKANGTISKKCVKQTTAQNGSVSKRAKEIGVIKRHLPGCEKDVLCIGIKNKEAKFNNRTRPTGWLTPTANQLLQTHINLVKKIQKFLPISDVVLEVNKFAFMQLDNPNIQKWQYQKGPLYQKESLKSAVSEMQEHHCLFCKKKIDHYHHVVPQHKNGSNTIDNIVGLCTQHHDLVHKDTTWQKKLAKKKTGLNKKYGALSVLNQIIPALTKELSSLFPKHFFVTNGKSTYDYRAAHGVSKDHWLDAYCIACSVLPNDTCDKTINSRVPYELKQFRRHDRRALNNENMSRVYTFNGKMVAANRHKATEQTTDSLEEFRQRQPNDVCNLKVKEHHPTYRNMSRNYPGSIFLVEKQVHIMQGIAGSKDGKATTYKDTNANSIAAGKCKFVAKNSGILFV

SEQ ID NO: 12601 - protein, 447 aa, unidentified
  REGION 1..447: note = Human gut metagenome
VQSVTLGCDPGRTNIGLAAVRSDGTDLYRSHCETRNKEIVDLMDARRAARRASRRGERLARKRLAAKHETATTFPDGRKLPGYEKPIMLKDIINTEARFNNRVRPAGWLTPTATQLLRTHLNLIKRISRILPVSDIALEINKFAFMQLDEPDKNKWNIDFQHGPLYGTGGLKAAVRQLQNDTCLLCQENVIEHFHHLIPRSKRGDNTINNIAGLCQKCHEAVHKSADTAEKLSTLKKGQTKRYGGTAVLNQIIPKLVEELGKTYHEHLHLTYGWQTKEFRTKHKLEKTHDTDAYCIAAGTMQTVKPNIRTDVYEIKQFRRHNRANIHHQTERTYKLNGQTVAKNRRKRTDQKTDSLAEWFENTVKQYGQQKAEHLRAELKVRKSTRYYNSKDRMMPGAVFQYEGNRYVVTGQLSGGQYFRAYGKGNRNFPAKKIRIISLNRGLVYVA

SEQ ID NO: 12602 - protein, 412 aa, unidentified
  REGION 1..412: note = Human gut metagenome
MVYVISQDGKPLMPCSNPIARLLLKQGKAKVKKREPFTIKLTYEAPNYTQDLTLGVDTGSGTIGTAVSKDNGDIVYMSEVVVRNDITDKMTQRVKYRRNRRNRKIRYRKARWLNRANSIKNDRFSPTMQSKLHSHVKEIEYIKSILPITEMVFETGQFDTHFMKNPSLANPKVKHWGYQKGTNYGFENTKAMVLNRDSYTCQCCKGKHKDSKLEVHHIVFRSQGGSDEESNLITLCHTCHKDLHSGKINPKLSGKVKGNLKYATQMNSIRKQLFRLYPNAIETFGYVTKANRLHLGVNKEHYYDACTIATQGNAFNVKSNLYKKKCVSDGDFQKTKGVCSEQPIVTDKICGLDCQHFFRQIFLGYFSDIVQAFDTLRKNVCGDDYTSLHNPIVLSSVLPAYGMFHSIQILFL

SEQ ID NO: 12603 - protein, 446 aa, Pseudomonas sp.; identical to SEQ ID NO: 9324

SEQ ID NO: 12604 - protein, 512 aa, unidentified
  REGION 1..512: note = gut metagenome
MSTVYVLNKDGKPLMPTTRGGHVRHLLKEQKARVARTKPFTIQLLYETDDAVQPLYLGIDPGRTNIGIAVVKADGTAVFTAHLETRNKEVPKLMQDRKKARRARRTNGRRCRRQRRAKANGTISKKCVKQTTAQNGSVSKRAKDIGVIKRRLPGCEKDVLCIGIKNKEAKFNNRTRPEGWLTPTANQLLQTHINLVKKIQKFLPISDVVLEINKFAFMRLDNPNIQKWQYQQGPLYQKANLEEAVSEMQEHHCLFCKKPIEHYHHVVPQHKNGSNTIDNIVGLCTKHHDLVHKETAWQEKLAKKKTGLNKKYGALSVLNQIIPALTKELSSLFPKHFFATNGKSTYDYRAAHGVSKDHWLDAYCIACSVLPSNVCDSNINNHMPYELKQFRRHDRRVLNNENMNRVYTLNNKAVAINRHKAKDQKTVSLEEFRKEHPDDVCKLKVKEHHPTYRNMNRNFPGSVFLVGKQIHIMQGIASSKDGKATKYNDTSATAIAAGKCKFVAKNTGILFV

SEQ ID NO: 12605 - protein, 425 aa, Nodularia sp.; identical to SEQ ID NO: 3165

SEQ ID NO: 12606 - protein, 414 aa, unidentified
  REGION 1..414: note = Ga0315273_10075764
VNHQQHRADQNLRVSDIVYVLNLRGEPLMPCRQQKSRKLLKEGRAKVVKRAPFTIQLCAPTGETKQSVVLGIDTGFGNIGFSAVSEKEELISGTVKLDGRTKERLSERRMYRRNRRNKLWYRQPRFNNRASTKKQGWLPPSVERRYRTHLSLIARIKTLLPISQVILEIAKFDIQKLENSSISGKEYQQGDMYGYQSVRSYLMSREKGLCEHCGKDFIGSPSHIHHRKPKGQSGSNRLANLMLVHKKCHLKIHKHPKLLKKHQKSSVKEYRQSTFMSIISKRFWKDIPNLIVTFGNVTWVDRNKLGLEKTHSNDAFVIANGSTQTRCQPFEIIQRHKNNRVLQLNRKGFKPSIKRKRSKIGPQDLFWIGKIKYTCKGMFNKGTYILYGDVKKKEYVKMKLVERYFGQGSLVWNI

SEQ ID NO: 12607 - protein, 424 aa, Moorena sp.
MRVFVLDKNRKPLDPCKPARARILLKQGKARVLKRYPFTIIMQDLEVRNCVTHEHQLKIDPGAKTTGLAIVQDNKVVWGAELTHRGFQIRDALISRRQLRRSRRNRKTRYRKPRFLNRKRSVGWLAPSLMSRVHNILTWTNKLSKLCPIVGISQELVRFDTQKMENPEISGVEYQQGTLWGYELREYLLEKWNRQCAYCGAANIQLEIEHIKPKSKGGSDRVCNLAIACKKCNQRKGSQEIQQFLSGKPSILKRVLSQAKRPMADAAAVNTTRWKLYNQLKSTGLPIETGSGGLTKYNRCRQNLPKTHWLDAANVGQVDKLYIEDFQPLLIKAKGHGTRQMCRTDKFGFPSRYVPRFKFVKGFQTGDIVKAIVTKGKKIGTYTGRVATRQTGSFNISTNHGLIQGISHKYCSTVHRKDGYSYSF

SEQ ID NO: 12608 - protein, 413 aa, Sharpea sp.; identical to SEQ ID NO: 4953

SEQ ID NO: 12609 - protein, 444 aa, Calothrix sp.; identical to SEQ ID NO: 11946

SEQ ID NO: 12610 - protein, 376 aa, unidentified
  REGION 1..376: note = Human gut metagenome
SVSKRAKEIGVIKRHLPGCEKDVLCIGIKNKEAKFNNRTRPTGWLTPTANQLLQTHINLVKKIQKFLPISDVVLEVNKFAFMQLDNPNIQKWQYQKGPLYQKESLKSAVSEMQEHHCLFCKKKIDHYHHVVPQHKNGSNTIDNIVGLCTQHHDLVHKDATWQKRLAKKKTGLNKKYGALSVLNQIIPALTKELSSLFPKHFFVTNGKSTYDYRAAHGVSKDHWLDAYCIACSVLPNDTCDKTINSRVPYELKQFRRHDRRALNNENMSRVYTFNGKMVAANRHKATEQTTDSLEEFRQRQPNDVCNLKVKEHHPTYRNMSRNYPGSIFLVEKQVHIMQGIAGSKDGKATTYKDTNANSIAAGKCKFVAKNSGILFV

SEQ ID NO: 12611 - protein, 456 aa, unidentified; identical to SEQ ID NO: 11534
  REGION 1..456: note = Human gut metagenome

SEQ ID NO: 12612 - protein, 431 aa, unidentified; identical to SEQ ID NO: 4483
  REGION 1..431: note = Human gut metagenome

SEQ ID NO: 12613 - protein, 434 aa, Anoxybacillus sp.; identical to SEQ ID NO: 8088

SEQ ID NO: 12614 - protein, 544 aa, unidentified; identical to SEQ ID NO: 9634
  REGION 1..544: note = Human gut metagenome

SEQ ID NO: 12615 - protein, 420 aa, Moorena sp.
MQNYVLVIDTDKQPLNPISPKKARRLLDKGKAAVFRMYPFTIILKAAIANPTISPCQIKIDPGSKVTGFALVQDDQVIWGMELEHRGGLIKKKLESRSGVRGGRRNRNTRYRKPRFLNRKRPEGWIPPSLEHRVLTIETWVRRLTKFCPVNEIWIEIVKFDTQKMQDPEINGVEYQQGELAGYEVREYLLEKWGRECAYCGKQNIPLQIEHIHPKSKGGSDRVSNLCLACEKCNQRKGNRPIEEFLKKKPDLLQKIKNKALSPLRDAAAVNTTRNKVVKVLKEIKPVLTGTGAQTKYNRTKLGLPKQHWIDAACVGDVEALVLRTYQPLVVTCKGQGGRQKAALNKYGYPIRHNPLKPIKGWSSGDIAKNLLTGEFGRVNPRSKSNSFNYTVRGKKAISLHVKNLLRVHRKDGYTYGFSQ

SEQ ID NO: 12616 - protein, 431 aa, Klebsiella sp.; identical to SEQ ID NO: 2435

SEQ ID NO: 12617 - protein, 416 aa, unidentified
  REGION 1..416: note = Human gut metagenome
MVYVLDKNGQPLMPTDRHRKVRLMLQSGQAKVIKRCPFTIQLNYDSGHQTQEISLGIDAGSKHIGVSTTTKIKVLYEVDVELRNDIVDLLSSRRELRRGRRNRKTRYRQAKFNNRRRGNGWLAPSIRQKIGTHLTVVENICKMLPISRIMVETASFDIQKIKNPDIQGAEYQQGDQLEFWNVREYVLFRDGHTCQCCKGKSKDKILNVHHIESRKTGGNAPNNLITLCEPCHTGYHKGTVQLPKAMKRGMRFKDAAFMGIMRWAFYEALKQQYEPVGTPVHNTYGYITKHTRIAYNLPKEHYVDARCISGNPEASSNGEYYYQKKVRCHNRQIHKLTVLKGGIRKQNQATYLVKGYRLFDKVSYQGKGYFVFGRRQSGFFDIRTLSGEKVNKGSLSCKKLKFIATRTYYLTERRAV

SEQ ID NO: 12618 - protein, 465 aa, unidentified; identical to SEQ ID NO: 3603
  REGION 1..465: note = Human gut metagenome

SEQ ID NO: 12619 - protein, 426 aa, Scytonema sp.; identical to SEQ ID NO: 3553

SEQ ID NO: 12620 - protein, 447 aa, unidentified
  REGION 1..447: note = Human gut metagenome
RCRKLLEVRRAVFYRHYPAVIILKDVDARNIYKLPSYRIKIDPGAVHTGIAIVCNETNEVMYFLQIEHRGSEVKKALITRKQTRRNRRSRETRYRRCKFKNGGDFDSSRKNGWLPPSVKSTADNVIHWVEKLCRYINITECSFEAVRFDSQLMDNPEIGGEEYQQGTLSGYELREYLMEHFRHTCQYCGGESGDPVLEWEHKIPRSRGGSDSVKNASLACSCCNRDKGNRTLEEYLEDSKHISPKGKSEKALNEARISHISGILEKGTIYGSNRYSAWVNSTRRYIEKYLFLMFDDVECCSGGRTKYNRIKLKLPKDHHYDALCVGSVPKEGYTDRTNSYVLYVKATGRGTRFRGQCNSCGVITVKYKNNSKRKFGFQTGDIVQLNKPKGKDTGQYTGKVAVRSSGSFDLIRKGCKRITANYKYFRMMQYSDGYEYLGPLRPIPHSA

SEQ ID NO: 12621 - protein, 442 aa, Deinococcus sp.; identical to SEQ ID NO: 5259

SEQ ID NO: 12622 - protein, 447 aa, unidentified; identical to SEQ ID NO: 3915
  REGION 1..447: note = Human gut metagenome

SEQ ID NO: 12623 - protein, 420 aa, unidentified
  REGION 1..420: note = Human gut metagenome
MQYVYVLNKHGEPLMPCSPRKARLLLKQKKACVVKRTSFTIKLLYGSTGYKQPITLGVDAGSKHIGISAATEKYELYCEEATPRNDVVDLLSARRAFRRSRRNRKTRYRAPRFNNRVHSKHKGWLAPSVEVKIQEHITLIKRVCRILPVTFVRVETAEFDTQRLKAMLEGKPLPVGTDYQLGEMYDEYNVRQYVLKRDNYTCQCCGAHPTKTKAVKLHVHHIETRRTGGNAPNNLITLCTACHKALHAGKVTLDGKKRGRSLKDAAFMGVMRKTLMERLLKELKIPVQGTYGYITKYLREKHSIPKSHTNDARCISKNPLAIPCDTCYYTKAIRHHNRQLHKATILKGGIRKANQAPYTVKGYRLWDKVSYNGSECFITGRRTSGYFALKKLDGTVVSNSASYKKMRLLEVATNYITERR

SEQ ID NO: 12624 - protein, 557 aa, unidentified
  REGION 1..557: note = Human gut metagenome
MIYNLGSTRERGFMKQKKQKVMVYILNKKGKPLMPTTRCGHVRKLLDSKKAVVVNSNPFTIRLKYDTPNGVQDVFAGIDSGRENIGSGASNEDGDCLYLGELKTSNKSIKLKMTERAGFRKERRRHDRQNKQRKARKDHTEIQNGNIDICRTTISCKSVQISYPAAEESVTHKIIRGKEGKFANRHRDEGWITPSARQLVQMHMNDLRSICKILPISHVTLERVAFDFQKLENENIKAWEYDKGKLYGYDSPEEYIHDVQNGKCLVCGKPHIDYLHHIIPRSKGGSDNVSNIAGLCYDCHYGPMGVHNCQDTQDRLPELKNEANKQYKVSLLNSVMPVLIEEMDKFCEANSIIFSICEGHDTAKVRDMYDLQKDHCLDGFAISLVGRNVKSVDVMPDRIYQKQRYKKKSKNIIQKRNCREYYDDKKLVAVNRHKGTDQKADSLEEYMNTYAETHTADECKKHFDSLTVKPARRTYTFHKKGCICPFHIGDKVRYEKKNKIKGNTKVETFICESIHFYKDENKAKVEHNKTKSKRMKFCRVLEAGCTPYIDYRKLALM

SEQ ID NO: 12625 - protein, 557 aa, unidentified; identical to SEQ ID NO: 3108
  REGION 1..557: note = Human gut metagenome

SEQ ID NO: 12626 - protein, 426 aa, Nostoc sp.; identical to SEQ ID NO: 10840

SEQ ID NO: 12627 - protein, 413 aa, unidentified; identical to SEQ ID NO: 3023
  REGION 1..413: note = Human gut metagenome

SEQ ID NO: 12628 - protein, 406 aa, unidentified
  REGION 1..406: note = Human gut metagenome
MQYVYVLNKHGEPLMPCSPRKARLLLKQKKACVVKRTPFTIKLLHGSAGYKQPITLGVDAGSKHVGLSASTEKRELYSEEFTPRNDVVELLSTRRQNRRSRRYRKTRYRAPRFNNRVHSKHNGWLAPSVEVKIQEHITVIKRICRILPVTFVRVETAEFDTQRLKAMLEGKPLPVGTDYQLGEMYDEYNVRQYVLKRDNYTCQCCGAHPTKTKAVKLHVHHIETRRTGGNAPNNLITLCTACHKALHAGKVTLDGKKRGRSLKDAAFMGVMRKTLMERLLKELKIPVQGTYGYITKYLREKHSIPKSHTNDARCISKNPLAIPCDTCYYTKAIRHHNRQLHKATILKGGIRKANQAPYTVKGYRLWDKVSYNDSECFITGRRTSGYFALKKLDGTVVSNSASYKKM

SEQ ID NO: 12629 - protein, 424 aa, unidentified
  REGION 1..424: note = Human gut metagenome
MRVFVFNMRGRPLMPCSQRKARLLLKENKAMIYKYHPFTIQLTYTTGETKQDCHIGIDTGSKYIGAAVRSEDKVFWKGEIELRQDIRSNLDTKRIYRRSRRNRKTRYRKPRFLNRKRRDEWLPPSLQSRINHTFHWIDTLSSLVPNPILHIEVGKFDVAKMINPEIHGVDYQHGQTYGFFDERYFVFARDNYTCQCCGKSKNKILNTHHIIYRSNDGTNRVDNLITVCTDCHTSQNHRKGGIFYQWQEQHKKVKQYKEPPFMNTLRKRIFVAYPDAEITYGSETTPKRKAMKLDKTHYNDAIVISGINEIKENPEEWLLIKQFRKKKRSLHEATARKGRKKPNRNQTRNSKNTPYYKGFYLNDKVSVFGKSGYITGFTSNAAYIKDENNDYITLPNKTYKQVSINKMKLECHNNNWQYIIKNAV

SEQ ID NO: 12630 - protein, 458 aa, Moorena sp.; identical to SEQ ID NO: 4474

SEQ ID NO: 12631 - protein, 512 aa, unidentified
  REGION 1..512: note = Human gut metagenome
MSTVYVLNKDGKPLMPTTRCGHVRHLLKEQKARVVTSKPFTIQLLYEADDVVQSLYLGIDPGRTNIGVAAVKADGTAVFTAHLETRNKEIPKLMKKRKESRRARRTNGRRCRRQRRAKANGTISKKCVKNDTAQNGSVSKRAKEIGVIKRHLPGCEKDVLCIGIKNKEAKFSNRTRPEGWLTPTANQLLQTHINLVKKIQKFLPISDVVLEINKFAFMRLDNPNVQKWQYQQGPLYQKANLEETVSEMQEHHCLFCKKKIDHYHHVVPQHKNGSNTIDNIIGLCTQHHDLVHKDATWQKRLAKKKTGLNKKYGALSVLNQIIPALTKELSSLFPKHFFVTNGKSTYDYRAAHGVSKDHWLDAYCIACSVLPNDTCDKTINSRVPYELKQFRRHDRRALNNENMSRVYTFNGKMVATNRHKATEQTTDSLEEFRQRQPNDVCNLKVKEHHPTYRNMNRNYPGSVFLVGNQVHVMQGIAGSKDGEATTYKDTNANSIAAGKCKFVAKNSGILFV

SEQ ID NO: 12632 - protein, 512 aa, unidentified
  REGION 1..512: note = Human gut metagenome
MPTVYVLNKDGKPLMPTTRCMHVRHLLKNGKARVVKSKPFTIQLLYETDDVVQPLYLGIDPGRTNIGVAVVKADGAAVFTAHLETRNKEVPKLMKKRKESRCARRTNGRRCRRQRRAKTNGTISKKCVKQTTAQNGSVSKRAKEIGVIKRHLPGCEKDVLCIGIKNKEAKFTNRARPEGWLTPTANQLLQTHINLVKKIQKFLPISDVVLEVNKFAFMQLDNPNIQKWQYQQGPLYQKGSLENAVSEMQEHHCLFCEKPIEHYHHVVPKSENGSNTIANIVGLCTEHHNLVHKDATWQKKLVKEKVGLVKKYSALSVLNQIIPALTKEMNSLFPKHFFVTNGKSTYDYRTAHGVSKDHWLDAYCIACSVLPNDVCDSNINSHVPYELKQFRRHDRRVLHKANMSRVYTLNGKTVATNRHKAIKQTTDSLEEFRQSHPGDVCKLKMKEHHPAYRNLNRNYPGSVFLVDGQVHVMQGVSGSHNGKADGYYNTNGNAYPYYKCKFVVKNEGIVFA

SEQ ID NO: 12633 - protein, 374 aa, unidentified
  REGION 1..374: note = Human gut metagenome
LSKVKTMRVFVFNMRGRPLMPCSQRKARLLLRENKAMIYKYHPFTIQLTYTTGETKQDCHIGIDTGSKYIGAAVRSEDKVFWKGEIELRQDIRSNLDTKRIYRRSRRNRKTRYRKPRFLNRKRRDEWLPPSLQSRINHTFHWIDTLSSLVPNPILHIEVGKFDVAKMINPEIHGVDYQHGQTYGFFDERYFVFARDNYTCQCCGKSKNKILNTHHIIYRSNGGTNRVDNLITVCTDCHTSQNHRKGGIFYQWQEQHKKVKQYKEPPFMNTLRKRIFVAYPDAEITYGSETTPKRKAMKLDKTHYNDAIVISGINEIKENPEEWLLIKQFRKKKRSLHEATARKGRKKPNRNQTRNSKNTPYYKGFYLNDKVSVF

SEQ ID NO: 12634 - protein, 493 aa, unidentified; identical to SEQ ID NO: 3154
  REGION 1..493: note = Human gut metagenome

SEQ ID NO: 12635 - protein, 415 aa, Moorena sp.; identical to SEQ ID NO: 3370

SEQ ID NO: 12636 - protein, 427 aa, Fischerella sp.; identical to SEQ ID NO: 3477

SEQ ID NO: 12637 - protein, 446 aa, Pseudomonas sp.
VAVYVLDKTGTPLMPCSEKRARLLLERGRARIHRQVPFVIRLVDRRQADSALQSLTLKFDPGSKFTGIALVRQKGQRVSVLSLMELAHRGAAIRQAMQQRAAFRRRRRGQNLRHRTPRFDNRTRPEGWLPPSLRHRLDTTLGWVGRMRNWAPISDLAVERVKFDMQAIQNPEISGVKYQQGELAGYEVREYLLEKWGRCCAYCNAENTPLEIEHIVPRSAGGSDRVPNLTLACRPCNQRKGNQPVEVFLKARSELLARIKAKAKVPLRDAAAVNATRNALFRALLDTGLSVTTGTGAQTKFNRRCLGLPKTHALDAASVGEIRAIEHWQRPTLAIKATGRGEYQRTRLTAHGFPRGYLTRQKRHFGFQTGDQVRAEVPTGKKAGTHQGRVAVRKTGSFNIQTPDGVVQGIHHRHCTLIQRADGYAYSDTPTDSAQPQKEAARAGAR

SEQ ID NO: 12638 - protein, 446 aa, Moorena sp.
VRVFVKNQRGEPLMPCSPRKSRMLLKEKKARIIQYRPFTIQLTIATGETVQENNLGVDVGSKHVGVAVTSGEKVLTKGEIELRQDIKSLLETRKTYRKSRRNRKTRYRRCKFKYKTKRIYDLKKKKWMKKKLTFESPRLKGWLPPSIQSRITNTFFWIDRYQSLLPNCRLHIEVGKFDVQKMMNPDIKGKDYQEGEAFGYYDARYFVLARDQYTCQVCKKKNKIFNTHHVIYRSHGGSNRADNLITVCTDCHTPENHQKGEIFWEWMIKKKKTKTYKEPPFMNSLRIRISKRYPDAHITYGSVTTPHRKVLGLDKTHYNDAIAMTGIETIKLNPNERFLIKQFRKKKRSLHEATARKGRKAKNITQKRNEKNTKESNGFHLNDEVRTACGKRGFISGFTGKTACYVKSIDGEYIVIKGKTHKQQPIKSLTFIRHNGNWQYQIKENT

SEQ ID NO: 12639 - protein, 472 aa, unidentified
  REGION 1..472: note = Human gut metagenome
FRQIPFTIQLTYENKPVLQPITIAEDPGRSNIGMAVVSLSGELLSAAVVQTRNKEIVKLMDKRKQHRRASRNGERKARQRLAKKCHTMIKAGFLMRKLPMYGKDKRVKCLVIKNTESRFCNRKREDGWLTPSAEHLVQTHINLIHKMQKFLPITDVAIEINRFAFLSLEDPSISGVDFQKGPLKGYDDLNAAVEDLQDGHCLMCNSPIEHRHHIVPRSMQGSNTIGNIAGLCCKCHEKVHKDSAFEDSLKKKKAGLNKRYAAVSVLNQAIPFICKRLEQEFGKEHVHYCSGRDSSMVRRSLGYHKTKEEQLHEVDAWCIAVLSLQHVPEKAPEFDHVHEILQFRRQDRSRIKAQTSRAYYHEGKKIAKNRKKAEGQREDSLQEWRKRQVERYGEEQTRKMISQLKVKKSIRRYNRLDRLMPGAVFYYQGVRYVMRGQHCEGTYLQAVGMGSKDFPAKKCKIVAQNEGLVFVS

SEQ ID NO: 12640 - protein, 512 aa, unidentified; identical to SEQ ID NO: 10560
  REGION 1..512: note = Human gut metagenome

SEQ ID NO: 12641 - protein, 442 aa, unidentified; identical to SEQ ID NO: 4533
  REGION 1..442: note = Human gut metagenome

SEQ ID NO: 12642 - protein, 426 aa, Parasutterella sp.; identical to SEQ ID NO: 3045

SEQ ID NO: 12643 - protein, 419 aa, Anoxybacillus sp.; identical to SEQ ID NO: 5328

SEQ ID NO: 12644 - protein, 465 aa, unidentified; identical to SEQ ID NO: 12189
  REGION 1..465: note = Human gut metagenome

SEQ ID NO: 12645 - protein, 431 aa, Escherichia sp.; identical to SEQ ID NO: 3801

SEQ ID NO: 12646 - protein, 410 aa, unidentified
  REGION 1..410: note = Human gut metagenome
YSFVLDANGKPLAPTKEQKAWFFIRKKRATLVSKYPMVIQLKKEIPEKEICQDEIRCGIDDGGLHVGIALVQKCKTKNKVVFKGTIEQRNDVKHLMEVRRGYRRYHRYHKRYRQARFDNRKSSKREGRIAPSILQKRQATIRVIHWLNKWINITNYWLEDVSVDIRALTDGYQSYRWQYQKSNRLDENIRKAAILRDDGKCMECGKSNCRLEVHHIKPRRRNGSNTLDNLITLCESCHQKTEGQEELYMDRYFSLLKSSDNKNLNDAQHVMIGKMWLRKQLSGLGVLYLTSGGDTANKRIDWNIEKSHTNDAVCITDLQPDTCDIKEWAIKPMRRQSKAKTDHVLGIHHRDLVEYTFKNGETHRGYVTALYPEQKAINFQSPTKHCKKVNARKCKLLWKYSKIYWFENAS

SEQ ID NO: 12647 - protein, 413 aa, unidentified; identical to SEQ ID NO: 3290
  REGION 1..413: note = Human gut metagenome

SEQ ID NO: 12648 - protein, 428 aa, unidentified
  REGION 1..428: note = Human gut metagenome
LKVFVLNMRGRPLMPCSPARARHLLKAGKAVVRRRTPFTIQLRIATGETKQSVTLGVDAGAKHVGLSAATEKEEVFASEVELRQDITGLLAARLSLRRDRRHRKTRYRAPRFLNRVRSKHKGWLAPSVENRIQAHMSRIDAVCRLLPVTKILIETASFDIQKIKDPSVEGTDYQQGDQLGFWNVREYVLFRDGHVCQHCHGHAKDKILNVHHLESRQTGGDAPNNLITLCERCHKACHAGKIKLKVKRGQSFREEAFIGIMRWTLLDRVRKAHPGLPVENTCGYLTKNTRITLGLPKAHCVDAYCIAGNLKAVRRGVHLYQRQVRKHNRQIHKCTVLSKTLKDGTKIGYRKLNQTPHLVKNFRLFDKVRCLGQTGFIFGRRSSGYFDVRRLDGVKLSSGISYRKLTLLEKRSTYLTELRKEDGASSPV

SEQ ID NO: 12649 - protein, 424 aa, Planktothrix sp.
MSNLVFVLDTNKKPLTPCKPSMAHKLLTAGKAAVFRRYPFTIILKKVVIATPQLIILKLDPGSQTTGIALVQDEQVIFGAELTHRGQTIKASLESRRLLRRSRRNRHTRYRQARFLNRTRQEGWLAPCLQHRVETTLTWVNKLLRLAPIGSIVQELVRFDLQQLDNPEISGIEYQQGELKGYEIREYLLNKWQRKCAYCGIENVRLQIEHIHPKSQGGSNRISNLCLACEKCNTQKGTQSIELFLTHKPDILKKILSQAKHPLKDATAVNSTRWALFNRLKETGLPISTGSGGLTKFNRTRLNLPKTHWLDAACVGEVNSLQVLTSQPLLIKATGHGSRQMCRTDKFGFPSRYVPRLKFVKGFQTGDIVKAIVSSGHKVGTYIGRVAVRTTGSFNISLKKTLVQGISHKYCSLIHRKDGYLYAT

SEQ ID NO: 12650 - protein, 515 aa, unidentified; identical to SEQ ID NO: 5111
  REGION 1..515: note = Human gut metagenome

SEQ ID NO: 12651 - protein, 422 aa, unidentified; identical to SEQ ID NO: 5457
  REGION 1..422: note = Human metagenome

SEQ ID NO: 12652 - protein, 365 aa, unidentified
  REGION 1..365: note = Human gut metagenome
LGVDAGSKHVGLSASTEKRELYSEEFTPRNDVVELLSTRRQNRRSRRNRKTRYRAPRFNNRVHSKHKGWLAPSVEVKIQEHITVIKRICRILPITLVRVETAEFDTQRLKAMLAGKPLPVGTDYQLGEMYDEYNVRQYVLKRDNYTCQCCGAHTTAKKTVKLHVHHLESRKVGGNAPSNLITLCTTCHNNLHKGKITLDGKKRGKTLRDAAFMGIMRNTLLTRLRNELNIPVQNTYGYITKLLREQNDIKKSHVNDARCISKHPLAKPCSVCYRTKAIRHHNRQIHKAKILKGGIRKANQAPYIVKGFRLWDKVLYNEQECFISGRRSSGYFALRKFDGTTITNSISFKKLRLLEPATNYLIERK

SEQ ID NO: 12653 - protein, 442 aa, unidentified; identical to SEQ ID NO: 4418
  REGION 1..442: note = Human gut metagenome

SEQ ID NO: 12654 - protein, 465 aa, unidentified
  REGION 1..465: note = Human gut metagenome
MSTCVCVLSNSGERLMPTIRLGKVRRLLKDGKAKIVKHHPFTIQLLYDSKTNTQPIEICEDVGYNYIGISVKSQSHEYVSAQYDTLQDEKACHDSCRKLRRTRRNRLRYRKPRFDNRKRGEGWLAPSLRHKKELNVNVVKMYCAVMPITHATVEVGSFDTMLVKAIQEGKAIPEGADYQKGPRYNLATLREAVFYRDNYTCQVCGRKVADGAILHMHHMFYWKGRHGDSLNELLTVCEKCHTPANHQKGGKLYGFGENVKFADLSGAAFMNTVRWQIVNELYAAFGKDFVTVTYGAMTKEKRIALRLEKSHNNDAYAMGEFHPNCRCTFEHYEKVRRNNRILEKFYDSRYIDIRTGEIATGKELFNGRINRNHKKDSENLHRYRGKRTYAGHRALLRKKVNLNPGDLVSLNGEVLVVHSTHTNKKGAVNVEFKTPGKSGQKSASLKKLKIVKAADSMHSAWEKIS

SEQ ID NO: 12655 - protein, 443 aa, unidentified
  REGION 1..443: note = Human gut metagenome
LTKDENRPSGRTTGLLAEQAEPAGIRKGDTLKVFVLNMRGKPLMPCSPAKARHMLKAGKAVVVRRTPFTIKLTIATGETKQDVTLGVDAGARHVGISATTEKEEVFASEVALRQDITGLLADRLAFRRARRNRKTRYRSPRFNNRVRSKHKGWLASSVENRIQAHMSRIDAVCRLLPVTKIVIEAASFDVQKIKNPTIEGTDYQQGDQLGFWNVREYVLFRDGHICQHCRGRSKDPILNVHHLESRKTGGDAPNNLITLCETCHKAYHAGKIKLKVKRGQSFRAEAFMGIMRWTLLDRVRKTHPELPVENTYGYLTKHKRIALGLPKTHCADAFCIAGNLKALRRGDFLFQQQTRKHNRQIHRCSILKGGVRKLNQAPFLVKGFRLFDKVRIGGQIGFVFGRRVRGIFNIRRLDKTVIGTDINCKKLSLLETRKTFLTELRKE

SEQ ID NO: 12656 - protein, 457 aa, unidentified
  REGION 1..457: note = Human gut metagenome
MDAVAVISASGKPLMPTNPVRARKLIKKGKAVIYKYRPLFTIRLTERTDGDIQTIEYCCDTGYQHIGLSIKSRKHEYVNEQRDLLPNETERHNGSRKYRKARRRRKLRHRACRRDNRHDNQICKDGYAPSIRNKRDQHISLYRSYTEILPVGRAVFEMGQFDTQVLKAIEKGEPLPQGKDYQHGERYGYATLREAVFARDSYTCICCGKNAFKDKRILCIHHLGFRIGDRTNRLANLATVCTKCHTPKNHQPKGKLYNLKPELKDFKGATFMTMVRWDMLDKLKAVSKGIRVDVTYGAVTKEARRDLKIKKSHANDAYCMGSFHPSHRTDLKRYEKCRRNNRVLSKFYDATYIDIRDGKKKKANALGCNRTKRRESRRSEKNERIYRGEKVSKGRIVLRTKRTVIRPGDIVYTGKKKYIVASSKNLGKQLKLADGSLLTTSKVTKIIHCGGWKTVTL

SEQ ID NO: 12657 - protein, 419 aa, Anaerostipes sp.
  SITE 419: note = misc_feature - Xaa can be any naturally occurring amino acid
MVYVISQDGKPLMPCSDPIARLLLKQGKAKVKKREPFTIKLTYETTNYTQGLTLGVDTGSGTIGTAVSKDNGDIVYMSEVVVRNDITDKMTQRAKYRRNRRNRKTRYRKARWLNRASSIKKDRFSPTMQSKLHSHVREIEYIQSILPVTEMVFETGQFDMQLMKNPSLANPKVRPWGYQKGANYGFENTKAMVLNRDNYTCQCCKGKHKDSKLEVHHIVFRSQGGSDEESNLLTLCHTCHKDLHSGKINPKLSGKLKGNLKYATQMNSIRKQLFRFYPNAIETFGYVTKANRLHLGVDKEHYYDACTIATQGNAFNVKSNLYKKKCVSDGDFQKTKGIRSEQPIVTDKICGFRKFDKVRYFGNDYFIKGRMSTGYAILMDIDGNKIDFSTMPRGYKTPKLSNCKRITARSTVMTQVKVX

SEQ ID NO: 12658 - protein, 420 aa, Pseudoalteromonas sp.
MLAYILNKHGKPLMPCKAAKARKLLKAGEAKVVKRTPFTIKLLHGSSGHTQHVVAGMDTGSKHVGCAAIANGKVIYQSEVALRTDVSKKMQQRAMYRRTRRNRKLRYRPARWLNRASMRKEGRLAPSLKSKLDSHLREKKQVEAILPISHWKVETASFDIHKITNPIVTGVGYQQGALLGYYNVKAYVLQRDNYKCQSGRKTKHNAKLHVHHKVFRSQGGTDAPSNLIALCETCHNDLHAGKFELKVKRSKTKHATEIGILKAQLKQCWDFEETFGYVTKFKREQVLGLPKTHYYDAVSICCEDGELVQQGKHVLRKRHVASGDYQQTKGIRSEKRIPVGKLFGLKKHDFVQTPQGTGFVKGKRSSGYFALETILGDKVHASANIKKNTVRISARTTTLTQLMEAAIPLGTKVPSILAVN

SEQ ID NO: 12659 - protein, 429 aa, unidentified; identical to SEQ ID NO: 6772
  REGION 1..429: note = Microbial mat metagenome

SEQ ID NO: 12660 - protein, 340 aa, Anoxybacillus sp.; identical to SEQ ID NO: 7336

SEQ ID NO: 12661 - protein, 415 aa, unidentified; identical to SEQ ID NO: 6534
  REGION 1..415: note = Human gut metagenome

SEQ ID NO: 12662 - protein, 452 aa, Lactobacillus sp.; identical to SEQ ID NO: 3322

SEQ ID NO: 12663 - protein, 419 aa, unidentified
  REGION 1..419: note = metagenome
MIYIRSKDGKALMPSERGGRIGYFLRHGKAHVVSRVPFTVQLDYESTTYTQEVSLGVDAGSKHIGVSAGSEKKELLAAQVELRNDVVNLLSIRREQRRTRRNRKTRYRKIRFDNRKKKDDWLAPSVEQKVESHLKVIRLAHKLLPITKTTIEVAQFDVQKIKSPDIKGEEYQKGEQMGFWNVREYVFARDGHRCVHCKGKSKDPILNVHHLESRKTGGNSPSNLVTLCETCHKAYHRGEFTLKIKRGSSLRDAAVMNIMRWAVYERARLEFGKVHLTYGYVTKLTRIENGITKTHAADAFCIAKNVHAKRLRTFFQCRCVPRHTRALHVANPKRGGIRRSTIASHKIGKSHFQRFDMVRWKNKECFIFGSTNGRPVLRDIEGIKMHENVSVNIMTIKFLKRLRNNILVEEKDFRKLSII

SEQ ID NO: 12664 - protein, 213 aa, unidentified
  REGION 1..213: note = Human gut metagenome
MVYVLANDGQPLMPTERHGKVCRMLKSGMAKVVKKCPFTIQLQYESERNVQPVSLGVDAGSKHIGISATTKTKVLYESDVELRDDIVKLLATRRQLRRSRRSRKTRYRPVRFDNRKRKEGWLAPSIRQKIGSHLTVVANACKILPINQIIVETASFDIQKIKDPEIQGIEYQQGEQMDFWNIREYVLFRDGHTCQCCKGKSKDKVLNVHHIES

SEQ ID NO: 12665 - protein, 380 aa, Arthrospira sp.; identical to SEQ ID NO: 3196

SEQ ID NO: 12666 - protein, 424 aa, unidentified; identical to SEQ ID NO: 3351
  REGION 1..424: note = Human gut metagenome

SEQ ID NO: 12667 - protein, 420 aa, unidentified
  REGION 1..420: note = Human gut metagenome
MQYVYVLSKHGEPMMPCSPGKARLLLKQQKACVVRRTPFTIKLLYGSAGYKQPITLGVDAGSKHVGLSASTEKRELYREEFTPRNDVVELLSTRRQNRRSRRNRKTRYRAPRFDNRVHSKHKGWLAPSVEVKIQEHITIIKRICKILPISLVRVETAEFDTQRLKAMLAGKPLPVGTDYQLGEMYDEYNVRQYVLKRDNYTCQCCGAHTTAKKLVKLHVHHLESRKTGGNAPSNLVTLCTTCHKNLHKGKVTLDGKERGKPLRDAAFMGIMRKTLMARLKKELPIPVQGTYGYITKMRREQNDIKKSHTNDARCISKHPLAEPCSVCYRTKAIRHHNRQTHKANFSKKGIRKRSQMPYLVEGYRLWDKVLYKEQKCFVSGRRSSGSFTLKKLDGTSVSKGVTFKKLRLLEPATNYLIERM

SEQ ID NO: 12668 - protein, 423 aa, unidentified; identical to SEQ ID NO: 12336
  REGION 1..423: note = Human gut metagenome

SEQ ID NO: 12669 - protein, 456 aa, unidentified; identical to SEQ ID NO: 6026
  REGION 1..456: note = Human gut metagenome

SEQ ID NO: 12670 - protein, 442 aa, unidentified; identical to SEQ ID NO: 8269
  REGION 1..442: note = Human gut metagenome

SEQ ID NO: 12671 - protein, 461 aa, Parasutterella sp.; identical to SEQ ID NO: 3646

SEQ ID NO: 12672 - protein, 534 aa, Acrocarpospora sp.; identical to SEQ ID NO: 12397

SEQ ID NO: 12673 - protein, 442 aa, unidentified
  REGION 1..442: note = Human gut metagenome
MSTSVFVLDKKHRPLMPCRPARARRLLRAGRARVVKRFPFVIRLVDRTVEQSEVQPVLIKLDPGSRETGAAVVRDDEKKRHHALAFFVIKHRGGAIRDALKARSAFRRRRRSQNLRCRSPRFLNRVKPKGWLPPSLRHRVETTLSFVRRMCRYLPVSGIATELVKFDSQKLQNPEVSGVKYQQGTLFEYEVREYLLEKFGRKCVYCGAEGVPLNIDHVVPRAKGGSNRVSNLVLACVSCNQKKGARSLEDFLKGKPEVLARVRRELKTPLRDAAAVNATRWVLFNELKATGLPVETGSGALTKLNRHAFGVEKEHWLDALCVGRLNGAVTRKGLNVLEIRCMGRGSRQRTRLTKYGFPRGYLMRQKCVHGFATGDMVEANVPKGKKAGLWRGRVAVRVSGSFNIQTPKGVIQGVGWKHCRLISHNDGYGYAWLGHAPHSSPA

SEQ ID NO: 12674 - protein, 450 aa, unidentified
  REGION 1..450: note = Human gut metagenome
MVYVLNLEGEPLMPTNNAKARKLLKNQKAKVVKVKPFVIQLLYRTTEYKQPIILGIDSGYLNIGFSAITNKKELLVGEVKMLKGMKDRLLERSQYRKIRRQRLRYRKPRFNNRKRNDGWLAPSIQHKLDTHIKIINEINRMLPISNIIVEVANFDIQKIKNPNIRSEEYQQGEQMGFWNLREYILYRDGHKCQNPNCKNKSKNQILEIHHIKYKSEGGTDVPSNLITLCNKCHTSPNHKKGKFLYDWMMKKKKVKGFKDATFMSMVRWKIINELKTKYQSVNFTYGYMTKNHRIRHAIEKTHYNDAFAIAKGTNQIRCKDIWTVEQSRLNNRSLEKFYDAKYMDVRANKKVSAGELNNGRRTRNKNLNSENLKIYRGKKISKGRRSIRVGKSKYQPNDLIKYKGVVYTVKGSQNKGSNIALKEIKKVPNVKYIIPYIYKKGFNWKNELYK

SEQ ID NO: 12675 - protein, 455 aa, unidentified
  REGION 1..455: note = metagenome
VSFTVRYVLAYRFKHIKKERKVPCMVYVLDINGQPLMPTTRHGKVRRLLNSHLAKVVKRCPFTIQLLYQSTKEIQPVSLGVDAGSKHIGMAATTEKKVVYQEELSPRNDVVKLLSARRTLRRTRRNRKTRYRKPRFNNRVHSKHKGWLAPSVEVKIQEHITAIKRICQILPISEIHVEISEFDLQRLKAMEEGRTLPVGTDYQLGEQYDFYNTRQYVLHRDGYTCQCCGTHDNNIKLHVHHIESRQTGGNAPSNLITLCEHCHKALHKGKFELPKGKKRGKTYRDATFMGIMRKTLLERLKKEIDVPVAGTYGYITKYWRERAGLEKSHINDAICISKYPYAKPLDTYYLTKVVRNHNRQIHKSNFSKGGIRKRNQAPYLIKGFRLFDKVLYQGKEYFIFGRRATGYFDIRTLDGTKVNKDSISYKKLRIQDTAKAYLKEARAIPHMNKFTCVLA

SEQ ID NO: 12676 - protein, 459 aa, unidentified
  REGION 1..459: note = Ga0315284_10107383
MSKKTLQVKLKNTLRDAPLVPDPVSSALNKEETPSVQDTVRTCNNPEVDLLQHAGGQGSRVTDNVRVFVFNMRKEPLMPVSSRKARLLLKTGRAVVVRRSPFTIQLTYASGEDKQEISCGVDSGYAHIGFSCVTKKQELIRGEVDVDNWTSKHLAERKMYRKQKRSKLRYRELRFLNRKRSDGWLPPSVNRRYQTHIHLIALLKQLLPISDIIVETASFDIQKLNNPEISGKEYHQGNLYEQSNLRSFILAREKNTCQLCKEGYSKTDHWHKHHIIPRSQGGTDKPDNIALLHEKCHDKLHAKGLYKQLEKNKQYKEATFMNIVKGKFKEDLNCKTVFGYETFIKRNELQLSKSHSNDAFVIAGGSIQNRCFEYLVKQKRRNNRCLQLNRKGFKPSIRRQRYKLRPDDLVRIENNKIYEVKSTHSYGKRVKLKGRKDIAIKKISWFFHSKSLIFKRILK

SEQ ID NO: 12677 - protein, 408 aa, unidentified; identical to SEQ ID NO: 6795
  REGION 1..408: note = Human gut metagenome

SEQ ID NO: 12678 - protein, 442 aa, unidentified
  REGION 1..442: note = Human gut metagenome
MSTSVFVLDKKHRPLMPCRPARARRLLRAGRARVVKRFPFVIRLVDRTVEQSEVQPVLIKLDPGSRETGAAVVRDDEKKRHHALAFFVIKHRGGAIRDALKARSAFRRRRRSQNFRCRSPRFLNRVKPKGWLPPSLRHRVETTLSFVRRMCRYLPVSGIATELVKFDSQKLQTPEVSGIEYQQGTLFEYEVREYLLEKFGRKCVYCGAEGVPLNIDHVVPRAKGGSNRVSNLVLACVSCNQKKGARSLEDFLKGKPEVLARVRRELKTPLRDAAAVNATRWVLFNELKATGLPVETGSGALTKFNRHAFGVEKEHWLDALCVGRLNGAVTRKGLNVLEIRCMGRGSRQRTRLTKYGFPRGYLMRQKCVHGFATGDMVEANVPKGKKAGLWRGRVAVRVSGSFNIQTPKGVIQGVGWKHCRLISHNDGYGYAWLGHAPHSSPA

SEQ ID NO: 12679 - protein, 465 aa, unidentified; identical to SEQ ID NO: 3909
  REGION 1..465: note = Human gut metagenome

SEQ ID NO: 12680 - protein, 526 aa, unidentified
  REGION 1..526: note = Human gut metagenome
LLRQERLIVKEVANMSTVYVLNKDGKPLMPTTRGGHVRHLLKEQKARVVRAKPFTIQLLYETNDVVQPLYLGIDPGRTNIGVAVVKANGTAVFTAHLETRNKEIPKLMQDRKKARRARRTNGRRCRRQRRAKANGTISKKCVKQTTAQNGSVSKRAKDIGVIKRRLPGCEKDVLCIGIKNKETKFTNRTRPEGWLTPTANQLLQTHINLVKKIQKFLPISDVVLEVNKFAFMRLNNPNIQKWQYQQGPLYKKESLESAVSEIQEHHCLFCKKPIDHYHHVVPQHKNGSNTIGNIVGLCAKHHDLVHKDSAWEKKLAKKSTGLYKKYGALGVLNQIIPTLTNELSSLFPKHSFVTNGKSTYDYRAAHGVSKDHWLDAYCIACSVLPSNVCDSNINNHMPYVLKQFRRHDRRVLNNENMNRVYTLNNKAVAINRHKAKDQKTVSLEEFRKEHPDDVCKLKVKEHHPTYRNMNRNFPGSVFLVGKQIHVMQGIASSKDGKATKYNDTSATAIAAGKCKFVAKNTGILFV

SEQ ID NO: 12681 - protein, 419 aa, Moorena sp.; identical to SEQ ID NO: 8685

SEQ ID NO: 12682 - protein, 451 aa, Geobacillus sp.; identical to SEQ ID NO: 4536

SEQ ID NO: 12683 - protein, 426 aa, unidentified
  REGION 1..426: note = Human gut metagenome
MVYVQNHLGQPLMPTQDHRKVRLLLKAGAAVVVRRTPFTIRLTTRTKTYVQPVILGVDAGSKTVGMSAATHEEEVFAAELTPRNDVVKNLADRREFRLSRRGRTTRYRQPRFNNRVHSKHKGWLAPSVEVKIQEHITSIKRACELLPIGKVVVETAEFDLQLLKSIADGMPVPQGENYQKGEMYGFYNVRQYVFFRDGYTCQCCGAHGKGIKFHTHHMESRKTGGNAPDDLVTVCDKCHKAFHAGLITDAKLKKRRRKSTRDAAFMGIMRKTLLQRLRAELPIPVVETRGYITKATRERLLKLPKSHTNDALAIAMGRHGFGIEEVTYMPQSDRIYQIKPVRHHNRQLHKAIPKKGGRRQRSQGPKYVQGFRRFDKVLYRGQECFIWGLRTRGYFQLKLLNGTKVHESAKASELILLEHSSGYLIA

SEQ ID NO: 12684 - protein, 474 aa, Halomonas sp.; identical to SEQ ID NO: 11386

SEQ ID NO: 12685 - protein, 419 aa, unidentified; identical to SEQ ID NO: 6355
  REGION 1..419: note = Human gut metagenome

SEQ ID NO: 12686 - protein, 455 aa, unidentified
  REGION 1..455: note = Human gut metagenome
VWLSKPLATLGKDFDSSFEESGFFLAANLLGKEHDIMHVYVINKHGEPLMPCSSRKARTLLDNKKAFVVKRTPFTIKLQHGSAGYKQPITLGVDAGSRHVGLSASTETHELYREEFTPRNDVVDLLSTRREFRRARRNRKTRYRAPRFDNRVHSKHKGWLAPSVEVKIQEHITVIKHVCQIMPISLVRVETAEFDTQRLKAMLEGKPLPVGTDYQLGEMYDEYNVRQYVLKRDNYTCQCCGAHATKTKQVKLHVHHLESRKTGGNAPNNLITLCPTCHKAIHEGKKTLDTKKRGKPLRDAAFMGIMRKTLLMRLRKKLSIPVQQTYGYITKMLREKNNLPKSHMNDALCIAKHPKAAPCENCYRSKAVRHHNRQIHKATILKGGIRKNNQAPYIAKGFRLWDKVLYNKQECFISGRRATGYFALRKLDGTIIVNSASYKKLRLFETAKNYLRERM

SEQ ID NO: 12687 - protein, 460 aa, unidentified; identical to SEQ ID NO: 7594
  REGION 1..460: note = Human gut metagenome

SEQ ID NO: 12688 - protein, 414 aa, unidentified
  REGION 1..414: note = Human gut metagenome
MPCSPAKARLLLKEKKAIVKRRTPFTIQLTIATGESKQPVTLGVDAGYKHVGLSASTEKAELYASEVELRQDVSDLLSARRALRQSRRNRKTRYRAPRFNNRLRTKRKGWLAPSVENRINAHLSRIEAVLRLLPVTKITVETASFDMQLLKNPDIAGKEYQEGEQLGFWNVREYVLFRDRHVCQHCYGRSKDPVLNVHHLESRRTGGDSPDNLITLCETCHKALHRGDITLKAKRGKSFRAEAFMGIMRWEVHNRLRALHPGIEVSNTYGYRTKHARIANGIAKSHCADAFCIAGNLGAERLCEFFFQKQTRRNNRQIHKLSILKGGIRKRNQAPFEVKGFRLFDKVACQGEEGFIFGRRSSGFFDVRKLDGTRISAGISCKKLHLLEKRRTYLTEIRKEEALPPLPEGRGLRA

SEQ ID NO: 12689 - protein, 413 aa, unidentified; identical to SEQ ID NO: 3295
  REGION 1..413: note = Human gut metagenome

SEQ ID NO: 12690 - protein, 462 aa, unidentified
  REGION 1..462: note = Human gut metagenome
MSVLVIGQNGRALMPTTTRKARILLKENKASVVCRHPFTIHLRYKTGCATQEGSIGIDTGSQHIGIGVTCGNKVILKDEHELRSSMEKRSLMETRATMWRGRRYRKVRYRKPKWRHHTKRMYFEKANRKGQHWRKVKTTTQSPRPESWLPPSLQSKCDHHFRIIDRYLKCLPDSITKNLVIEVGRFDMARMNDPTIHGEMYQRGPMYDTENLRAYIFARDGYKCACCKAKAGSIRKKDGTSVKLIAHHIQFRSRGATDNPKYMISVCDHCHTTKAHQPGGILYSWMEKNKKVTRGLRDATFMNILRRRLFDRFPQAAFTYGNITAVDRKRLLLPKSHANDAVAISLFGKDVSVINATCQTLRYKQVRKSKRSLHEATPRKGRKEPNTKAIRNKKNTTHVNGFKLWDSVLVNGQKLFICGFTGSSAYLVDQDGHYVSPPGKTYKQWTLSKLSRSHPNGNWLMA

SEQ ID NO: 12691 - protein, 553 aa, Streptomyces sp.; identical to SEQ ID NO: 4116

SEQ ID NO: 12692 - protein, 374 aa, Moorena sp.
VSEMTSYAFVLDANGKQLAPAKEQKAWFLIRKKRAALVSKYPMVIQLKKEIPENEICKDEIRCGIDDGGLHVGIALVQKCKTKNKVVFKGTIEQRNDVKHLMEVRRSYRHYHRYHKRYRPARFDNRKSSKRKKRIAPSILQKRQAIIRVIHWLNKWINITNYWLEDVSIDIRALTDGYKPYRWQYQKSNRLDENIRKAAILRDGGKCMECGKLNCRLEVHHIKPRRRNGSDTLDNLITLCKSCHQKTEGQEELYMDRYFSLLKSSDHKNLNYAQHVMIGKEWLRKQLSSLGVLYLTNGGDTANKRIDWNIEKSHANDAVCITNLQPDTYDMKEWTVKPMRRQSKAKTDNVVGIKHRAINEQIQNIAQKKDTLCR

SEQ ID NO: 12693 - protein, 414 aa, unidentified
  REGION 1..414: note = Mouse gut metagenome
MPCSPAKARLLLKEKKAIVKRRTPFTIQLTIATGETKQPVSLGVDAGYKHVGLSASTEKAELYASEVELRQGITDLLSARRALRQSRRNRKTRYRAPRFDNRISTKRKGWLAPSVENRIDAHLSRIEAVLRLLPVTKITVETASFDMQLLKNPDIAEKEYQEGEQLGFWNVREYVLFRDGHVCQHCHGRSKDPVLNVHHLESRRTGGDSPGNLITLCETCHKALHHGEITLKTKRGQSFRAEAFMGIMRWEVLNRLKVSHPELEVNNTYGYLTKHARIKSGITKSHCSDAFCIAGNLGAKRLGEFLFQKQTRRNNRQIHKLSILKGGIRKRNQAPFEINGFRLFDKVACKGEEGFIFGRRSSGSFDVRKLDGTRISAGISCKKLHLLEKRRTYLTEIRKEEALLALPEGRDLRA

SEQ ID NO: 12694 - protein, 472 aa, unidentified; identical to SEQ ID NO: 3077
  REGION 1..472: note = Human gut metagenome

SEQ ID NO: 12695 - protein, 423 aa, Arthrospira sp.; identical to SEQ ID NO: 3202

SEQ ID NO: 12696 - protein, 442 aa, unidentified; identical to SEQ ID NO: 3161
  REGION 1..442: note = Human gut metagenome

SEQ ID NO: 12697 - protein, 447 aa, unidentified
  REGION 1..447: note = Human gut metagenome
MNYLDFVLIVDKNKVPCIPIKESTAAYLLRHNKAKIINHDPTVIQRFDEYSADYEIRNIFELKIDSGYLNIGFSVSDSEHEYLAGQVNLLQGMSERLTVRASNRRFKRARLRYRKNKNVDYKIVHNPTYKNGNQDGWIAPSIQHKIDSHIRLIKKIAQWVPIDRIIIEVAKFDIQKMIADLDGRIISGKDYQNGEMKGYENVTAYVRDRDKYTCQMCLSSGKVKNKNNDTIEVHHIIPRAAGGTNRPSNLICLCHHHHRLVHSNNNNNKYFKELQNKKMPDTYKDSTFMNIVRYKIYNALCADFKDVELAYGYETKINRRLIGLPKFHYTDAVCLKEWKNISLTKFIYIVDQKRCNDRKMESFFDAKYIDIRDGKTKSGTELCYTRLDNASSWRTTCKNEVDNLRQYREKKITKGRKQRECHFYCLKPGDLIFINLGNHKGNLAEVK

SEQ ID NO: 12698 - protein, 420 aa, unidentified
  REGION 1..420: note = Human gut metagenome
MQYAYVLNKRGEPLMPCSPGKARILLKQQKACVVKRTPFTIKLLHGSAGYKQPITLGVDAGSKRVGLSASTEKRELYSEEFTPRNDVVELLSTRRQNRRSRRNRKTRYRAPRFNNRVHSKHKGWLAPSVEVKIQEHITVIKRICRILPITLVRVETAEFDTQRLKAMLAGKPLPVGTDYQLGEMYDEYNVRQYVLKRDNYTCQCCGAHTTAKKTVKLHVHHLESRKVGGNAPSNLITLCTTCHNNLHKGKITLDGKKRGKTLRDAAFMGIMRNTLLTRLRNELNIPVQNTYGYITKLLREQNDIKKSHVNDARCISKHPLAKPCSVCYRTKAIRHHNRQIHKAKILKGGIRKANQAPYIVKGFRLWDKVLYNEQECFISGRRSSGYFALRKFDGTTITNSISFKKLRLLEPATNYLIERK

SEQ ID NO: 12699 - protein, 512 aa, unidentified; identical to SEQ ID NO: 5824
  REGION 1..512: note = Human gut metagenome

SEQ ID NO: 12700 - protein, 443 aa, Anoxybacillus sp.; identical to SEQ ID NO: 10875

SEQ ID NO: 12701 - protein, 476 aa, unidentified
  REGION 1..476: note = Human gut metagenome
VVSKNPFTIRLAYDTPDVTQSLILGIDPGRTNIGLTVIRETGESVYTAHLETRNKKIPKLMKARKQFRTERRTLKRRRKRQCRAIASNTVSPKCVKTSNSQSSNESKKGMKQGVLERLLPGCDTPILCIGIKNKEARFNNRIRKTGWLTPTANHLLQTHLNAMNKICKILPVTKTVLEINKFAFMQLDNPCVKKWQYQRGQLFGYGSVEEVVYEQQNSHCLFCDKAIDHYHHVVPRSKRGSETLANRVGLCAEHHTLVHNDEKWNTKLIAKKQGMNKQYHALSVLNQIIPALSNALVKLFPDRFYATSGKSTYTFREAYGINKDHHIDAYCIAASILPDVNVKLSQTVYEIKQFRRHDRQVCHKANLNRRYALNGKVVATNRHKAMNQKTDSLEEYTTNGGKTENLTVIEHKAQYKRLDRIMPGAIFELDNKRKVMFKTDGFHNNQSDYVCFIDGSKIGYSKCNKPVTLNSGLVYC

SEQ ID NO: 12702 - protein, 440 aa, Clostridium sp.; identical to SEQ ID NO: 10253

SEQ ID NO: 12703 - protein, 454 aa, Moorena sp.
MRINSVSPARQTLKTLPRQTSHESRRDATMSNYVFVIDTNHRQLNPCTPGVARSLLNATKAAVYRRYPFTIILKKEVTGPVEPCQLKIDPGSRATGLAILQGNRVLWGAELTHRGQSIKNSLDSRRSLRRGRRGRKTRYRQPRFLNRTRPKGWLAPSLMHRVLTTMTWVNRLIKLCPIQSITQELVRFDTQVIQNPEISGTQYQQGTLYQYETREYLLEKWGRQCAYCGQEDTPLEVEHIVSRSKGGSNRVSNLTIACVSCNQKKSNRSIEDFLSGKPDLLKRIKAQAKAPLKDAAAVNATRWKLFKALKEMGLPVSVGTGGQTKFNRKQQGLPKAHWIDAAATGKDIPELEFCTCQPLLIQCSGHGTRQMCGTDKYGFPIRHRSKKKIHYGFQTGDIVKAFVTQGKKIGSYMGRVLCRKSGNFDISTKDGRVAGINHKHCTHIHKKDGYNYAF

SEQ ID NO: 12704 - protein, 319 aa, unidentified
  REGION 1..319: note = Human gut metagenome
APRFDNRIRTKRKGWLAPSVENRINAHLSRIGAILRLLPVTKITVETASFDTQLLKNPDISGKEYQEGEQLGFWNVREYVLFRDGHACQHCHGRSKDPVLNVHHLESRRTGGDSPGNLLTLCETCHKALHRREIKLKTKRGQSFRAEAFMGIMRWEVLNRLKASHPELEVHNTYGYRTKHTRIVNGIDKSHCADAFCIGGNLGAKRLGEFFFQKQTRRNNRQIHKLSILKHGLRKRNQAPFEVKGFRLFDKVVCQGEEGFIFGRRSSGSFDVRKLDGTRISAGISYKKLRLLEKRRTYLKEIRKEEALPPLPEGRSLRA

SEQ ID NO: 12705 - protein, 419 aa, Moorena sp.
MPCSEKRARLLLARGRARVHRVVPFVIRLTDRLARNSRFQPLRLKLDPGSKTTGMALVLEKADAGVGVLNLFELVHRGRQISEALMQRSRFRRRRRGANLRYRAPRFNNRTRRTGWLAPSLQHRIETTMSWFRRIQRWVPFSALSMELVRFDMQAMQNPEIAGVEYQQGVLFGYEVREYLLEKWGRRCAYCDAQGVPLQIEHVLAKARGGSNRVSNLTLGCEPCNLDKGAQDVREFVKEKARLARILAKAKAPLRDAAAVNTTRWVLLNALKTTDLTVEAGSGGRTKWNRTRLGLPKTHALDAACVGTVQAIFGWQRPTLELKCSGRGSYQRTRLTAHGFPRGFLVRQKRIHGFQTGDRVRATVPTGKKAGTHVGRVAVRATGNFNIQTPQGVVQGIAHRHCTMVQPADGYGYATRAIK

SEQ ID NO: 12706 - protein, 427 aa, Moorena sp.
MRVFVLDKNRKPLDPCHPAKARKLLKLGRAKVLRRYPFTIIIKDLEEENCVTHDHQLKIDPGAKTTGLAIIQDNRVIWGAELTHRGFQIREALTSRRQLRRSRRNRKTRYRQPRFLNRKRPKGWLAPSLMSRVYNILTWVNKLIKFCPVTGISQELVRFDTQKMLNPEISGIEYQQGTLYGYELREYLLAKWNRTCAYCGAIGTRLEIEHIKPKSKGGSNRVSNLAIACHNCNQAKGNQEIEQFLSKKPSILKRILSQAKKPLADAAAVNATRWKLHDELKLIGLPVEVGSGGLTKYNRCRQNLPKTHWLDAANVGNVDTLYIEDYQPLLITAKGHGTRQICRTDKFGFPRLHCSQKKIHKGFQTGDIVKAVVTKGKKIGTYVGRIATRKTGFFDITTAKGKVSGISYKYCQAIHRKDGYSYQFHGG

SEQ ID NO: 12707 - protein, 459 aa, unidentified
  REGION 1..459: note = Ga0315273_10181434
MYFVIDGRNNIQHPTRRSSMIHHWIKTGKARFIGKNLVQVFKQFNKAKTISYKFVVGLDPGYKNIGYSIFKIYKNKLQNLLNGEVTTRTSEVTKLLQEKKMYRQNRRSKHRKNILRKFGRAKFEAPRWRNRGKKSWAPTHIHLIQSHLNVLEFIFKRINLSESEIASEYFKFDSQKALDSTIYSWKYQKGPQFGFENIKAFVRARDKYTCQICSEKLCKLRVHHIQERTNGGSDRPENLITLCESCHGLVHSNQASCPRISTVTPMRDSGVLNSCMKHLTQIISPTYTITGADTSALRNYYSIEKSHINDAKMVALAKLDLESFECHNLAEDINMKQYRRHTRNWVKRYEDRKYYIDNICVAWNRKARSTQNKDKPSLLEFKQEYPDERVIVKAGRVIYFRANNLAKFRPGDIFKHQDSAYILKSWESTHGYVNSETELKFRTKNCIKIKKISGLTITR

SEQ ID NO: 12708 - protein, 414 aa, Moorena sp.
MVYVLNKDGHPLMPTERHGKVRRMLRDGLAHVVRLVPFTIQLDFSSCKVVQEVSLGIDAGSKHIGVSATTEKRELFAMQVEERDDVVKLIADRREARRTRRNRKTRYRAARFDNRRRKEGWFAPSSENRISAHLRVIKFVCSILPVGKTTIEVAQFDSQKIKDDKITGVEYQQGEQLGFWNVREYVLARDGHTCQYCKGKSKDKILNVHHLESRKTGGNAPNNLITLCETCHKAYHRGDIQLKARRGTSLRDAAAMSIMRWEVYNRTKQEFANVHLTYGYMTKHSRIHNDIAKTHCADALCISGNVKAERLSWFFGVRLQRRHNRSLHLYKPAKGGTRRSTIASHWIGKSRLQQYDYVEWNGQKAFISGSQNGRPYLKNFEDNYIMTPKASVNAKTVKFIRRKRGSMIIEQLPK

SEQ ID NO: 12709 - protein, 384 aa, Halomonas sp.; identical to SEQ ID NO: 5940

SEQ ID NO: 12710 - protein, 446 aa, unidentified; identical to SEQ ID NO: 11087
  REGION 1..446: note = Ga0373630_0000437

SEQ ID NO: 12711 - protein, 420 aa, unidentified; identical to SEQ ID NO: 12089
  REGION 1..420: note = metagenome

SEQ ID NO: 12712 - protein, 442 aa, unidentified; identical to SEQ ID NO: 7529
  REGION 1..442: note = Human gut metagenome

SEQ ID NO: 12713 - protein, 447 aa, unidentified
  REGION 1..447: note = Human gut metagenome
VPAYRIKHITKKEAPYMVYVLDIDGQPLMPTSRHRKVRKLLNSHLAKVVKRCPFTIQLLYQSTKETQPVSLGVDAGSRHIGLAATTEQKIVYQEELVPRNDVVKLLSARRALRSSRRSRKTRYRKPRFNNRVHSKHKGWLAPSVEVKIQEHITAIKRICQILPISDIHVETAEFDLQRLKAMEEGRPLPVGTDYQLGEQYDFYNTRQYVLHRDEYTCQCCGTHDNNVKLHVHHIESRQTGGDAPNNLITLCEHCHKLLHAGKTILPKGKKRGKSYRDATFMGIMRKTLLERLKKEIDVPVEGTYGYITKYWRERAGLEKSHINDAICISKHPYARPLETYYLTKAVRHHNRQIHKTKLSKGGIRKRNQAPYLVKGFRLFDKVLYQGESYFIFGRRITGYFDIRTLDGTKVNKGSTSYKKLRIQDTAEAYLTEVRAIPHMNEFTCVLA

SEQ ID NO: 12714 - protein, 411 aa, unidentified; identical to SEQ ID NO: 6901
  REGION 1..411: note = Human gut metagenome

SEQ ID NO: 12715 - protein, 419 aa, Moorena sp.; identical to SEQ ID NO: 12705

SEQ ID NO: 12716 - protein, 440 aa, Lactobacillus sp.; identical to SEQ ID NO: 5150

SEQ ID NO: 12717 - protein, 433 aa, unidentified
  REGION 1..433: note = Euryarchaeote sp.
MFKMVFVLDKRKKPLMPCTEKRARLLLSRGRAVIHRMAPFTIRLKDRVAEESELQPLRLKLKPGAKESGLAVLREISLEESEAIFLCEMRHKPGIKQSLDSRRNLRRGRRNRKTRYRAPRFDNRRRPEGWLPPSLGARVSQLMNVVNKLTELLPITSISYENAKFDTQLLQNPEISGIEYQQGELFGYEVRDYLLEKWGRRCAYCGKTGVSLEIEHIVPVSRGGTNRVSNLTLACRDCNQEKGVLTAEEFGYPEVQTKAKRPMKDEAMLNATRWKLYNQLKNTGLSLECGTAARTKKQRIEHDLPKSKYHEACVIGKSTPGKLVIKQKYVQVWTAVGRGTRRICNTDKHGFPISHRARQKVHFSFQTGDLVVAEIPKGKYAGRWVGRVAVRSSGYFDIKDSAGRRVCQGVSRRHFRLLQRADGWQYEKEKLAG

SEQ ID NO: 12718 - protein, 440 aa, Lactobacillus sp.; identical to SEQ ID NO: 5150

SEQ ID NO: 12719 - protein, 509 aa, unidentified; identical to SEQ ID NO: 9060
  REGION 1..509: note = Human gut metagenome

SEQ ID NO: 12720 - protein, 442 aa, unidentified; identical to SEQ ID NO: 3161
  REGION 1..442: note = Human gut metagenome

SEQ ID NO: 12721 - protein, 415 aa, unidentified
  REGION 1..415: note = Marine metagenome
MPCVPARARQLLKKGKASVYRRFPFTIILNERVGGSTQPTELKYDPGSKTTGISLVVHGKTASRVVWAGELTHRSWNIIEALNTRRNVRKFRRYRKTRYRQPRFLNRTRKDKWLPPSIQSRVDNIVTTTRKLKVFAPLSLLACEVVKFDTQKLRNPEIDGAEYQRGTLFGFELWEYLLVKWNHSCAYCNAKNTPLEKEHVVAKSKGGSNSVTNLVVSCRPCNEKKGNKSIEEFLKKKPSVLKKIKLQLKAPLKDAASMNATRYAIARELEIFNLPVNYGTGGQTKYNRTNQGYRKEHWIDASCATSTGENIQILDTMTPLIIKAVGRGSRKMCQTDGYGFPSSKPKAVKRIKGFQTNDIVKAIVTKGKKKGVYVGKVSIRSTGRFNIKTKQGTIQGINHRYCNLLQRIDGYEYHT

SEQ ID NO: 12722 - protein, 414 aa, unidentified; identical to SEQ ID NO: 2588
  REGION 1..414: note = Human gut metagenome

SEQ ID NO: 12723 - protein, 463 aa, Moorena sp.
MAVFVLDRSGSSLMPCTEKRARLLLERGRARVHKMLPFTIRVVDLETEDCEFQALRVKLDPGSKTTGMALVRETAENGVAVINLFELMHRGKQISEALTARRGHRKVRRSHLRYRAPRFLNRGNQKPGWLAPSLLHRVNTTLAWVSRIRRYAPVSAISTELVRFDMQALENPEIEGAQYQQGTLAGYEVREYLLEKWGRTCAYCGAKGLPLQIEHIHPKSKSGSDRISNLTLACQCCNAKKAALPVEVFLAKQPERLKRIQAQAKRPLKDAAAVNATRWALVNVLKATGLTVETASGGRTKFNRMALGIPKTHALDAACVGDVNSMTGWHKPTLCLKAMGRGSYQRTRLDKYGCVRGYLTRSKSIQGFQTGDMVKAEVTQGKKTGSYTGRVAVRASGSFNIQTRDGLVQGVSHRYCTVVQRGDGYGYQLVAKTDATGTPPKQGDASHPALYLPGLKAGVSRAN

SEQ ID NO: 12724 - protein, 421 aa, unidentified; identical to SEQ ID NO: 4235
  REGION 1..421: note = Human gut metagenome

SEQ ID NO: 12725 - protein, 376 aa, unidentified; identical to SEQ ID NO: 8049
  REGION 1..376: note = Filamentous sp.

SEQ ID NO: 12726 - protein, 493 aa, unidentified; identical to SEQ ID NO: 3154
  REGION 1..493: note = Human gut metagenome

SEQ ID NO: 12727 - protein, 515 aa, unidentified
  REGION 1..515: note = Human gut metagenome
MIPNERRHLMPYIYVIGMDGKPQMPTKRRRHVQKLLDTGKARITERVPFTIQLLYDNDPVLQPVILAEDPGRTNIGVATLDLKGNLLLSAAVETRNKEIAKLMEKRRQCRRASRNGERKARQRLAKKYGTMIQAGMRMRKLPQYAADAFITCKVIRNTQARFCNRRRPDGWLTPSARHLVQTHINLVHKVQKYLPVTDVAIEVNRFAFMQLEDPAICGVDFQTGPLKGYDDRDAAVYDLQDGKCLMCKHEITQYHHIVPRSRNGSNTIGNIAGLCDQCHDRVHKDADFAEQMKEKKEGMDKKYGALSVLNQAIPFICKQLETEFGRGHVHYCTGRETSLVRQSTGYQKTRKNQLHEVDAWCIGALALAELPENVPDFKEIHLIRQFRRQDRSLVNAQTERVYKLGGKMVAKNRKKRTGQETDALEDWYNRQVETYGKQEADCMRSRLKVTKSRRRYNNPNRMMPGAVFLYEGVRYVMRGQHSKGAYLQAVGMENRDFPVRKCKILTRNTGLVFVS

SEQ ID NO: 12728 - protein, 425 aa, Planktothrix sp.
MSNYVFVIDTNKQPQNPVHPAQARLLLNQGQAAVYRRYPFTIILKESKPELEIEQITLKIDPGSKTTGITLVQGNKVIWGAELTHRGQTIKMSLESRCLLRRSRRNRKTRYRQPRFLNRKRLEGWLAPSLQHRVETTLTWVSKLIRFAPIRSIIQELVRFDLQQLENPEISGIEYQQGELQGYEVRQYLLEKWSRKCAYCGVKNTPLEVEHIHPKSQGGTDRISNLTVACHDCNQKKGNQDIQDFLSGKPDLLPRILKQAKQPLKDATAVNSTRWLLFNRLKETGLPVSTSSGGLTKFNRTRLNLPKTHWLDAACVGKVETLKVLTNKPLLILATGRGTRQMCGTDKYGFPTRHRSRIQIHKGFQTGDIVKAVVTKGKKIGFYLGRVLCRASGSFDLVTPHGRVAGISHKYCQSIHKKDGYSYGF

SEQ ID NO: 12729 - protein, 507 aa, unidentified
  REGION 1..507: note = Human gut metagenome
MSEYIYVIGMDGDPQMPIKRKRHVEKMLQTGRARVFRQVPYTIQLTYKNQPVLQPVTIAEDPGRSNIGMAVVSLSGELLSAAVVQTRNKEIVKLMEKRKLHRRASRNGERKARQRLAKRCHTMLKAGFLMRKLPMYRKDKRVKCLVIRNTEARFCNRKREDGWLTPSAEHLVRTHINLIHKMQKFLPITDVAIEINRFAFLSLEDPSISGVDFQNGPLKGYDDLNAAVEDLQDGHCLMCNSLIEHRHHIVPRSMQGSNTIGNIAGLCCKCHERVHKDARFEDRLKKKKAGLDKRYAAVSALNQAIPFICKRLEQEFGKEHVHYCSGRDTAMVRRSFGYHKTKEEQLHVVDAWCIAVLSLRQIPEKAPEFDHVHEILQFRRQDRSRIKAQTSRAYYHEGKKIVRNRKKAEGQGEDSLQEWRKRQVDRYGEEQTRKMISQLKVKKSIRRYNRLDRLMPGAVFYYQGVRYVMRGQHCEGTYLQAVGMGSKDFPAKKCKIVANNEGLVFVS

SEQ ID NO: 12730 - protein, 416 aa, unidentified
  REGION 1..416: note = Human gut metagenome
MVYVLDKNGQPLMPTDRHRKVRLMLQSGQAKVIKRCPFTIQLNYDSGHQTQEISLGIDAGSKHIGVSTTTKIKVLYEVDVELRNDIVDLLSSRRELRRGRRNRKTRYRQAKFNNRRRGNGWLAPSIRQKIGTHLIVVENICKMLPISRIMVETASFDIQKIKNPDIQGAEYQQGDQLEFWNVREYVLFRDGHTCQCCKGKSKDKILNVHHIESRKTGGNAPNNLITLCEPCHTGYHKGTVQLPKAIKRGMRFKDAAFMGIMRWAFYEALKQQYEPVGTPVHNTYGYITKHTRIAYNLPKEHYVDARCISGNPEASSNGEYYYQKKVRCHNRQIHKLTVLKGGIRKQNQATYLVKGYRLFDKVSYQGKGYFVFGRRQSGFFDIRTLSGEKVNKGSLNCKKLKFIATRTYYLTERRAV

SEQ ID NO: 12731 - protein, 442 aa, unidentified; identical to SEQ ID NO: 7396
  REGION 1..442: note = gut metagenome

SEQ ID NO: 12732 - protein, 441 aa, unidentified; identical to SEQ ID NO: 6900
  REGION 1..441: note = Human gut metagenome

SEQ ID NO: 12733 - protein, 430 aa, unidentified; identical to SEQ ID NO: 4817
  REGION 1..430: note = Human gut metagenome

SEQ ID NO: 12734 - protein, 457 aa, unidentified; identical to SEQ ID NO: 5177
  REGION 1..457: note = Human gut metagenome

SEQ ID NO: 12735 - protein, 413 aa, Clostridium sp.; identical to SEQ ID NO: 4134

SEQ ID NO: 12736 - protein, 451 aa, unidentified; identical to SEQ ID NO: 3061
  REGION 1..451: note = Human gut metagenome

SEQ ID NO: 12737 - protein, 450 aa, Moorena sp.; identical to SEQ ID NO: 4205

SEQ ID NO: 12738 - protein, 349 aa, unidentified
  REGION 1..349: note = Human gut metagenome
IKNKEAKFSNRTRPEGWLTPTANQLLQTHINLVKKIQKFLPISDVVLEVNKFAFMRLDNPNIQKWQYQQGPLYKKESLESAVSEIQEHHCLFCKKPIDHYHHVVPQHKNGSNTIGNIVGLCAKHHDLVHKDSAWEKKLAKKSTGLYKKYGALGVLNQIIPTLTNELSSLFPKHSFVTNGKSTYDYRAAHGVSKDHWLDAYCIACSVLPSNVCDSNINNHMPYVLKQFRRHDRRVLNNENMNRVYTLNNKAVAINRHKAKDQKTVSLEEFRKEHPDDVCKLKVKEHHPTYRNMNRNFPGSVFLVGKQIHVMQGIASSKDGKATKYNDTSATAIAAGKCKFVAKNTGILFV

SEQ ID NO: 12739 - protein, 442 aa, Lactobacillus sp.; identical to SEQ ID NO: 5193

SEQ ID NO: 12740 - protein, 428 aa, unidentified; identical to SEQ ID NO: 5143
  REGION 1..428: note = Human gut metagenome

SEQ ID NO: 12741 - protein, 538 aa, unidentified
  REGION 1..538: note = Human gut metagenome
AKASSSQGKHNLLLRQERLIVKEVAYMSTIYVLNKDGKPLMPTTRGGHVRHLLKEQKAQVVTSKPFTIQLLYETDDVVQPLYLGIDPGRTNIGVAVVKIDGTAVFTAHLETRNKEIPKLMQGRKKARRARRTNGRRCRRQRRAKANGTISKKCVKQTTAQNGSVSKRAKKIGVIKRHLPGCEKEVLCIGIKNKEAKFSNRARPEGWLTPTANQLLQTHINLVKKIQKFLPISDVVLEINKFAFMRLDNPNVQKWQYQQGPLYQKASLEEAVSEMQEHHCLFCKNTIDHYHHVVPQHKNGSNTIGNIVGLCAKHHDLVHKDTSWQEKLAKKKTGLNKRYGALSVLNQIIPALTKELSSLFPKHFFATNGKSTYDYRAAHGVSKDHWLDAYCIAGSVLPNDACDNNINSHVPYELKQFRRHDRRALHKENMSRVYTLNGKSVATNRHKAIKQTTDSLEEFRQSHPGDVCKLKVKEHHPAYRNLNRNHPGSVFFVGEQAHVMQSIVASKDGKATRYKDTNVNKIAAGQCRFVAKNEGIVFT

SEQ ID NO: 12742 - protein, 412 aa, unidentified; identical to SEQ ID NO: 6913
  REGION 1..412: note = Human gut metagenome

SEQ ID NO: 12743 - protein, 442 aa, unidentified
  REGION 1..442: note = Human gut metagenome
MVTVQQSTHHLPFGRVFIRRNLFMVYVISQDGKPLMPCSDPIARLLLKQGKAKVKKREPFTIKLTYETTNYTQGLTLGVDTGSGTIGTAVSKDNGDIVYMSEVVVRNDITDKMTQRAKYRRNRRNRKTRYRKARWLNRASSIKKDRFSPTMQSKLHSHVREIEYIQSILPVTEMVFETGQFDMQLMKNPSLANSKVRPWGYQKGANYGFENTKAMVLNRDNYTCQCCKGKHKDSKLEVHHIVFRSQGGSDEESNLLTLCHTCHKDLHSGKINPKLSGKVKGNLKYATQMNSIRKQLFIFYPNAIETFGYVTKANRLHLGVDKEHYYDACTIATQGNAFNVKSNLYKKKCVSDGDFQKTKGIRSEQPIVTDKICGFRKFDKVRYFGNDYFIKGRMSTGYAILMDIDGNKIDFSTMPRGYKTPKLSNCKRITARSTVMTQVKVV

SEQ ID NO: 12744 - protein, 489 aa, unidentified
  REGION 1..489: note = Human gut metagenome
MAMVYVQNKDGKPLMPTTRYCYVRLLLKEKKARVVCTTPFTIQLNYDTPDITQDLILGIDPGRTNIGVAVVKEDGQCVFSAHLETRNKDIPLLMKKRAGFRRQHRTLDRRRKRQRRARATGTTIAEGSVERLLPGYEKPVVCHYIRNKAARFNNRSRPAGWLTPTANHLLQTHINLIAKVAKFLPITKVVVELNRFAFMAMDNPNIHRWEYQQGPLYGLGSVEDAVYAQQDGHCLFCKKPIDHYHHVIPRHKGGSETLANRCGLCAKHHDLVHKDKAWADKLVTRKEGMNKKYHALSVLNQIIPFLMEYLGSETLYDVYAIDGRSIKGFRIAKNVPKEHYTDAYCIACSILDTDNKVSAPVEPFELKQFRRHDRQACIRQMVDRKYLLHGKVVAANRHKAFEQKSDSLQEFREAYSDVAVSQLTVKPHPPQYKDMSRIMPGAVMDFDGIVGVMQSSIVGQFYKSTKGHKATPKRCVLLSQNAGMVFIPT

SEQ ID NO: 12745 - protein, 415 aa, unidentified
  REGION 1..415: note = Human gut metagenome
MVYVLANDGQPLMPTERHGKVCRMLKSGIAKVVKKCPFTIQLQYESERNVQPVALGIDAGSKHVGVSATTKAKVLYESDVELRDDIVKLLATRRQLRRRRRSRKTRYRPARFDNRRRKEGWLAPSIRQKIESHLTVVANVCKILPVSQIIVETASFDIQKIKNPDIQGIEYQQGEQMDFWNIREYVLFREGHTCQCCKGKSKDKVLNVHHIESRKTGGNAPNNLITLCETCHKGYHNGTVTLPKNIKRGMKFKDAAFMGIMRWTFYNTLKEQYEPDIPVHYTYGYITKNTRINHNLPKGHCIDARCISGNPDAVSDGTYYYQKKVRCHNRQIHKQTILKGGIRKSNQAEYLVRGFRLFDKVRYQGREYFIFGRRKSGFFDIRTLSGEKVNKGSINVKRLTFVDTRKNYLTERRTV

SEQ ID NO: 12746 - protein, 466 aa, unidentified; identical to SEQ ID NO: 2809
  REGION 1..466: note = Human gut metagenome

SEQ ID NO: 12747 - protein, 424 aa, Enterococcus sp.
MRVFVRNMQGKPLMPCSNRKARLLLKEGKAKIYQYNPFTIQLCYASREYVQECHIGIDTGTKHIGMAVTSEDKVLFKGEIELRQDVKSNLDTRRSYRGDRRNRKTRYRKARFLNRKKKESWLPPSIENRINHTFKWINKLVALLPNPKLHIEVGKFDVAKMINPNVQGVDYQHGQTYGFYNVRYFVFARDNYTCQCCKKSKNKILQTHHIVYRSNGGSNRADNLITVCTDCHTYENHQKGGILYQWQENRKKTKQYKEPPFMNVLRKRIFTQYPNAIITYGSETTPKRKELGLEKTHYNDAIVISGITKIKENPNEWLLIKQFRKKKRSLHEATARKGRKEPNRLQKRNAKNTPYYKGFYLNDKVRVFNQVGHITGFTSSGAYIKNSENEYITLPNKSYKQIGISNIRLLHHNNNWQYIHKHIA

SEQ ID NO: 12748 - protein, 413 aa, unidentified; identical to SEQ ID NO: 2636
  REGION 1..413: note = Human gut metagenome

SEQ ID NO: 12749 - protein, 431 aa, unidentified
  REGION 1..431: note = Human oral metagenome
MRIFVKNMRGKPLMPCTPRKARLLLKQKKAKIVGYKPFTIQLQYATGETIQEIIVGVDEGARYIGVALVSQGKVLAKGEVELRRDVHSLLLSRAQYRRGRRFRKTRYRKTRFLNRKRPDGWLSPSIQAKLDANFAWIDKFCSLVPSPKLRIEVGKFDVAKMINPDIQGVDYQHGQTYRYYDVRYFVFARDEYTCQVCKKENKILHTHHIIYRSKGGTDRADNLITVCSDCHTDENHKQGGILYQWMCEHKKTRQYKEPPFMNILRRRTFQKYPNAEFTYGSETSPRRKELSLDKTHYNDAIAITGVEAIKDNEQGCFRIKQFRKKKRSLHEATPRKGRKMKNVNAKRNKKNTKQLRGWYLNDEVVCFGQRGWISGFTGTSSAYVIDCDSEYIQNPSKNYKQVNLSDLKLICHNNNWQYEVALKYRHSSYHL

SEQ ID NO: 12750 - protein, 408 aa, unidentified; identical to SEQ ID NO: 11975
  REGION 1..408: note = Human gut metagenome

SEQ ID NO: 12751 - protein, 414 aa, unidentified; identical to SEQ ID NO: 6986
  REGION 1..414: note = Human gut metagenome

SEQ ID NO: 12752 - protein, 431 aa, unidentified
  REGION 1..431: note = Human gut metagenome
MPNNVYVINKHGRPLMPCSPAKARHLLDAGKAKVKKRTPFTIQLVYGSSGYTQEVILGVDAGSKTIGVSALTKKEELFAANVIPRNDVVDLLSTRREFRRARRNCKTRYRKPRFDNRVRSKHKGWLAPSVEVKIQEHITTIRRVYGILPVSKVVVETAEFDLQLLKAIADGKPVPQGEDYQKGEMYGHYNVRQYVLWRDDYTCQCCGAHATKKKEVRLHVHHLESRKVGGDAPDNQVTLCESCHEKLHKGLIAEKDFKKRKRRSTRDATFMGIMRKTLMQRLYSELPIPVIETRGYITKATREKLLVLPKSHTNDALAIAQGKRGFNVGYLPEIAQIDKIYTIRPVRHHNRQLHKAAILKGGIRKSNQAGKYVFGYRLFDKVQFNGQDCFIWGRRTTGIFTIKTINGKMIKDGISFKKLKPVEKSTSYLIA

SEQ ID NO: 12753 - protein, 415 aa, unidentified; identical to SEQ ID NO: 3018
  REGION 1..415: note = Human gut metagenome

SEQ ID NO: 12754 - protein, 456 aa, unidentified; identical to SEQ ID NO: 3342
  REGION 1..456: note = Ga0373629_0068408

SEQ ID NO: 12755 - protein, 408 aa, unidentified; identical to SEQ ID NO: 5302
  REGION 1..408: note = Human gut metagenome

SEQ ID NO: 12756 - protein, 461 aa, unidentified
  REGION 1..461: note = Anaerobic digester metagenome
VLDVKSPDNIGEERRSEDRVTSPLRDSERRTTMVFVLDKHKKPLMPCSEKRARQLMERKRAVIHRMEPFTIRLKDRTAQESKLQPLRLKLDPGSKTTGMAVMEDNGSGRVIFLGEIKHKPGIKQSLESRRSLRRSRRNRKTRYRKPRFENRRRAQGWLPPSLEARVNQTMNATAKLQRLLPITAMSTEHVKFDTQLMANPEINGTEYQQGELQGYEVREYLLEKWGRKCAYCGAENVPLEVEHIIPKARGGSNRISNLAIACTPCNQEKNTMTAEEFGFPEVQTQARKPLRDAALMNATRWRLFEQLKDTGLPVECGTGARTKKQRIEHGLPKTHYFDACCVGASTPDELIIKPHYINVWSAMGRGKRQMCRTDKYGFPRAHRQRRKLHFGFQTGDIVTANVPKGKYAGQWRGRVTCRARGSFDIRNGERQIICNTNHKNCKVIQRADGWQYEWIVKEDSA

SEQ ID NO: 12757 - protein, 427 aa, Oscillochloris sp.; identical to SEQ ID NO: 5291

SEQ ID NO: 12758 - protein, 477 aa, Massilia sp.
VSVTRRVSAIGGINVAVFVLDRKQAPLMPCSEKRARKLLAAGRARVHRLLPFSIRLVDLAAVDCVFQPVKIKLDPGSKTTGIALVRESETRDAATAEVKRSANVLTLFELVHRGRQISEALNARRLMRRRRRGSLRHREPRFQNRGNQGHGWLAPSLRHRMDTTLAWLVRLRKLAPVTAIAQELVRFDMQKMENPEIAGIAYQQGTLAGYEVREYLLEKWDRKCAYCDAKDVPLNLDHAHAKARGGSNRVSNLVLSCVPCNRKKAARDVREFLAHDPARLARIQSQLKRPLKDAAAVNATRWALSHALKATGLPLTTGSGGLTKFNRTRLGIPKTHALDAVCVGMVDAVVNWLKPTLALKATGRGCYQRTRLDAYGFPRGYLTRKKRIHGFQTGDMVKALVTKGKKIGAYTGRVAVRATGSFNIQTQHGVVQGISHKHCKIVQRADGYGYSLVAKTDATGTPPKQGTLRVPCPATPA

SEQ ID NO: 12759 - protein, 423 aa, unidentified
  REGION 1..423: note = Human gut metagenome
MVYVLNIDGQPLMPTDRHGKVRHLLKDGRAEVVKCCPFTIRLLYDSTHYTQDIVLGVDAGSKHIGLSGTTETKELYASDVELRNDIVDLISTRRQNRRFRRNRKTRYRKARFLNRLSDKKDWLAPSIRQKVDTHMTVVSRVCMILPVTKIIVETASFDIQKIKDPDISGTGYQQGEQLDFWNVREYVLSRDGHTCQCCKGKSKDPVLNVHHIESRKTGGDAPNNLITLCETCHKGYHSGAVQLPKAIHRGMRFKDAAFMGIMRWAFYNKLKEVYEPQDIEIRMTFGYLTKNTRIRHHLPKEHYIDARCISGHPEAIPNNEVFYQKKVRCHNRQIHKNTILKGGIRKRNQTGYLVKGFRLFDKVAYKGREYFIFGRRQSGFFDLRNLSGCKVNKGSLSYRKIGFLEPRQYYLCERRVMDTQGCA

SEQ ID NO: 12760 - protein, 408 aa, Bacillus sp.; identical to SEQ ID NO: 8258

SEQ ID NO: 12761 - protein, 418 aa, unidentified; identical to SEQ ID NO: 12569
  REGION 1..418: note = Human gut metagenome

SEQ ID NO: 12762 - protein, 420 aa, unidentified; identical to SEQ ID NO: 4855
  REGION 1..420: note = Human gut metagenome

SEQ ID NO: 12763 - protein, 494 aa, unidentified
  REGION 1..494: note = Human gut metagenome
MTMVYVQNKDGKPLMPTTRYCYVRLLLKEKKARVVCTTPFTIQLNYDTPDVTQDLILGIDPGRTNIGVAVVKEDGQCVFSAHLETRNKEVPLLMKKRAAFRRNHRTLDRRRKRQRRAIAAGTTVESNTIERLLPGYEKPVVCHYIRNKEARFNNRSRPAGWLTPTANHLLQTHINLIAKIAKFLPITKVVVELNRFAFMAMDNPNIRRWEYQQGSLYGLGSVEDAVYAQQDGHCLFCKEPIDHYHHVVPRHKGGSETLANRCGLCERHHALVHKDKAWAEKLVTRKGGMNKKYHALSVLNQIIPHLMEYLGRETPYDVYATDGKSTKGFRVAKNVPKEHYTDAYCIACSILDANTKVSTPAEPFKLKQFRRHDRQSCIRQMVDRKYLLDGKVVATNRYKAIEQKSDSLEEFREAYGDPAVSQLTVRPHLPQYKDMTRIMPGAVMDFDGAVGVFQGSSGRNNGTPNYYNSTKGARVLTKRCALLAKNIGMVFIPA

SEQ ID NO: 12764 - protein, 479 aa, Acidithiobacillus sp.; identical to SEQ ID NO: 8867

SEQ ID NO: 12765 - protein, 427 aa, unidentified; identical to SEQ ID NO: 5062
  REGION 1..427: note = Human gut metagenome

SEQ ID NO: 12766 - protein, 470 aa, unidentified; identical to SEQ ID NO: 2825
  REGION 1..470: note = Human gut metagenome

SEQ ID NO: 12767 - protein, 465 aa, unidentified; identical to SEQ ID NO: 6009
  REGION 1..465: note = Human gut metagenome

SEQ ID NO: 12768 - protein, 483 aa, unidentified
  REGION 1..483: note = Human gut metagenome
LTFVSIYVQRVYGRTRRFFQSAALHSGRQARGNIYPAGQTAGVLQKEVRTMAAVYVISASGKPLMPTTRCGHIRGLLNAGKARVVEREPFTIQLKYETPDVTQPLYLGIDPGRTNVGSAVVREDGECVFTAQLTTRNKDVPKLMKARKQFRMAHRRLKRRCKRQRRAKAAETLSQKGEFQRLLPGYEEPILCKGIRNKEARFNNRQRPAGWLTPTANHLLLTHLNMVKKLQKLLPITDVVLEVNRFAFMAMENPSIRRWQYQQGPLYGKGSVEDAVYAQQDGHCLFCGKPIAHYHHVVPQHKNGSETLENRVGLCNEHHDLVHKDRAWDAKMKETKAGLNKKYHALSVLNQIIPALTEQLTAMFPQHAFVTTGKDTADFREDYGIAKEHHLDAYCIACSVLAEPTKVAAPTGKPHRLMQFRRHDRQVCHKENIKRVYLSEGKAVATNRHKAIEQKDDSLEEFRKTHTQQEVSALTVKDHQPVY

SEQ ID NO: 12769 - protein, 427 aa, Nodularia sp.; identical to SEQ ID NO: 11076

SEQ ID NO: 12770 - protein, 390 aa, unidentified; identical to SEQ ID NO: 4490
  REGION 1..390: note = Human gut metagenome

SEQ ID NO: 12771 - protein, 431 aa, unidentified
  REGION 1..431: note = Human gut metagenome
MPNKVYVINKHGRPLMPCSPAKARHLLDAGKAKVKKRTPFTIQLVYGSSGYTQEVILGVDAGSKTIGLSASAETEELLSAEVKPRNDVVDLLSTHREFRRARRNRKTRYRKPRFDNRVRSKHKGWLAPSVEVKIQEHITSIKRVCRILPVSKVVIETAEFDLQLLKAIADGKPVPQGEDYQKGEMYGHYNVRQYVLWRDNYTCQCCGTHPSKKKEVRLHVHHLESRKVGGDAPDNQVTLCESCHEKLRKGLIAEKDFKKRKRRSTRDATFMGIMRKTLMQRLCSELPIPVVKTRGYITKATREKLLVLPKSHINDALAIAQGKHGFNVGYLPGILQIDKIYTIRPVRHHNRQLHKATILKGGIRKSNQTEKYVFGYRLFDKVQFNGQDCFIWGRRTSGYFVVKTIDGKVIHNSASFKKLNLVERASNYLIA

SEQ ID NO: 12772 - protein, 278 aa, unidentified
  REGION 1..278: note = metagenome
LKVFVLNMRGQPLMPCSPAKARHLLKAGKAAVRRRTPFTIQLRIATGETKQSVTLGVDAGAKHVGLSAATEKEEVFASEVELRQDITGLLAARLSLRRERRQRKTRYRAPRFLNRVRSKHNGWLPPSVENRIQAHLSRIDAICGLLPVTKIVIETASFDIQKIKHPDVEGTDYQQGDQLGFWNVREYVLFRDGHVCQHCHGHAKDKILNVHHLESRQTGGDAPNNLITLCERCHKACHAGKIKLKVKRGQSFREEAFMGIMRWTLLDRVRKAHPGLPV

SEQ ID NO: 12773 - protein, 424 aa, unidentified
  REGION 1..424: note = Human oral metagenome
MLVYVLKQNGQPFMPTERFGKVRRLLKEGKAKVVRREPFTIRLLYEPETDVVQECYCGVDTGSKHIGVAVIGNDRVLYQSQTELRDDIKRKMDIRRMYRRNRRFRKIRYRKPRFLNRRNSIRKDRLPPSVKHKVQAHIDEIEFCKKILPVSDLILEVSQFDTALMKNPSLINEKVKHCGYQQGFDYGYSSRRSAILHRDNYTCQCCGKKNCRLEVHHIKFRRDGGTDDEENLITLCEDCHKGVHAGAVVLNKSPKKSKGLKHATHMSIIRSQLLKEYPNAIETFGFVTSENRNHLKLEKDHFIDACVVASGGLEFKELEVIFYKRRVSKGDYQLTKGIRGEQKLPTGKIYGFRKFDKVEYLGEKYFIKGRMSSGFAILMNIFGEKVDFSSMPKGLKTPKLSNCNRISTRRSRLCIREKITLNIV

SEQ ID NO: 12774 - protein, 414 aa, unidentified; identical to SEQ ID NO: 2588
  REGION 1..414: note = Human gut metagenome

SEQ ID NO: 12775 - protein, 557 aa, unidentified; identical to SEQ ID NO: 7395
  REGION 1..557: note = Human gut metagenome

SEQ ID NO: 12776 - protein, 449 aa, Anoxybacillus sp.; identical to SEQ ID NO: 3571

SEQ ID NO: 12777 - protein, 421 aa, unidentified
  REGION 1..421: note = Ga0255812_10793133
MLVYVISQDGKPLMPTTPARARKMLRDGKAKCIKRTPFTIKLLYQTTTYTQTITLGVDTGSSHIGSAAVDNKGNVVYLSEVEIRNDVSDKMKQRTKYRRNRRNRKTRYRPARWLNRKNSIKTGRFSPTMVSKIHSHEKEILFAKSLLPISDVILETATFNPHALKNPAVLKNKWLYQRGTNYGFANTKAFVLDRDSYTCRHCKGKSKDSRLEVHHIIFRSNGGSDEKENLITLCKTCHDKVHSGEIKLHGGKVKGQLKHATQMNSIRKQLLLQNPEVHETFGFITKEHRQFMGLPKEHYYDAVAIANLNNLEKYGMLSVDVKTPLLRKKCVSDGDYQQTKGVRSEQPIQTSKIMGFRKFDKVEYAGQEFFIKGRMSTGYAILMGINGMKIPLKPIPKFDRMKRLSARKAWIIQQEIIQNIA

SEQ ID NO: 12778 - protein, 442 aa, unidentified; identical to SEQ ID NO: 5957
  REGION 1..442: note = Human gut metagenome

SEQ ID NO: 12779 - protein, 453 aa, Lactobacillus sp.
MMSEVQKVNYIYVVDSNGTPLMPTSRLGMMRRWLKTGQARWFGNSRKIIQFVRPVTTNTQELTLGVDAGFHLGLAVVGNQREYYASESLRKSEKDRITSRRELRRTRRNRLRHRQARFDNRRRKDGWLAPSMQHRLDFTIKEIKCLYTFLPITKLVVEVTPFNNQKLVDSNIKPWEYTQGKMHGFKTIKDYLLARDNYRDALDGKQYPASQLRVHHLVQRRDGGSNQPDNLVLLSDINHSQANHHNGSLAKLRENRQKELDYRGAYFMSILATRLSDYFARYTTTQGYLTANLRQKYQLEKSHLNDAFIIAGGTNTTLRTNNVYSRQKLRNNNRVLQKFYDAKYIDSRDGKQKTGKELSSGRTRRTRELNYANLRQFRQEKVKKGRVSIRRNHYQLRPHDVVLNTKTNKVETVTGVQNNGTVIKFQTGKTCSLKNVVSLYHVNGMLEKKIEDI

SEQ ID NO: 12780 - protein, 496 aa, unidentified
  REGION 1..496: note = Human gut metagenome
MMAVVYVISKSGKPLMPTTRCGHVRILLKEGKARVVERKPFTIQLTYESAEETQPLVLGIDPGRTNIGMSVVTESGESVFNAQIETRNKDVPKLMKDRKQYRMAHRRLKRRCKRRRRAKAAGTAFEEGEKQRLLPGCFKPITCKSIRNKEARFNNRKRPVGWLTPTANHLLVTHLNVVKKVQKILPVAKVVLELNRFSFMAMNNPKVQRWQYQRGPLYGKGSVEEAVSMQQDGHCLFCKHGIDHYHHVVPRRKNGSETLENRVGLCEEHHRLVHTDKEWEANLASKKSGMNKKYHALSVLNQIIPYLADQLADMFPGNFCVTSGQDTYLFREEHGIPKDHYLDAYCIACSALTDAKKVSSPKGRPYMVHQFRRHDRQACHKANLNRSYYMGGKLVATNRHKAMDQKTDSLEEYRAAHSAADVSKLTVKHPSAQYKDMSRIMPGSILVSGEGKLFTLSRSEGRNKGQVNYFVSTEGIKYWARKCQYLRNSGGLQIYV

SEQ ID NO: 12781 - protein, 442 aa, unidentified; identical to SEQ ID NO: 9877
  REGION 1..442: note = Human gut metagenome

SEQ ID NO: 12782 - protein, 470 aa, Anaerostipes sp.; identical to SEQ ID NO: 2825

SEQ ID NO: 12783 - protein, 452 aa, unidentified
  REGION 1..452: note = metagenome
MVFVLSSTNKKLMPTNEYRARKLLKSGKAAVYKHRPFTIILTKRKDGYTQPIEYCCDTGYQHIGISIKSQKREYVNEERILLKDETERHNDCRKYRRTRRNKLRYRKARWNNRHNNLICKDGFAPSIRNKRDVHINLFKMYHEVCPITSATFEMGQFDTQLLKAVENGDNVPQGTDYQHGERYGYSTLREAVFARDNYKCVCCRKSAIKSGLILKMHHLGYRIGDRSNRMSNLATVCSNCHTSKNHQKGGKLYDLKPKLKTFKGATFMTMVRYDMFSKLKESAPDIKFNMTYGALTKLKRKDYSIKKSHSNDAYCMGVFHPKHRTDFKCYQKLRRNNRILSKFYDAKYIDLRDGTVKSGKQLSCNRTNRRELRNSNKNERIYRGPKISKGKTVVRKQHYQYRPYDFVWYKNVKYAVKGVQDKGKRIALQNHLPVSISKIKRSVHVNGWKLVI

SEQ ID NO: 12784 - protein, 526 aa, Streptomyces sp.; identical to SEQ ID NO: 9559

SEQ ID NO: 12785 - protein, 450 aa, Moorena sp.; identical to SEQ ID NO: 2935

SEQ ID NO: 12786 - protein, 406 aa, unidentified; identical to SEQ ID NO: 4082
  REGION 1..406: note = Human gut metagenome

SEQ ID NO: 12787 - protein, 431 aa, unidentified
  REGION 1..431: note = Human gut metagenome
VEQNLRVFVLNKRGKPLMPCSPAKARLLLKEKKAVVVRRTPFTLQLTIATGEAKQAVSLGVDAGYKHVGLSASTKKAELYASEVELRQDITDLLSARRALRRARRNRKTRYRAPRFDNRIRTKRKSWLAPSVENRINAHLSRIEAVLRLLPVTKITVETASFDTQLLKNPDIAGKEYQEGEQLGFWNVREYVLFRDGHVCQHCHGRSKDPVLNVHHLESRRTGGDSPGNLITLCETCHKALHRSEITLKAKRGQSFRAESFMGIMRWEVLNRLKTSHSELEVHNTYGYRTKHARIANGIDKSHCADAFCIAGNLGAQRLGEFFFQKQTRRNNRQIHKLSILKHGLRKRNQAPFEIKGFRLFDKVACKGEEGFIFGRRSSGFFDVRKLDGTRISAGISYKKLHLLEKRRTYLTEIRKEEALPPLPEGRGLRA

SEQ ID NO: 12788 - protein, 465 aa, Variovorax sp.; identical to SEQ ID NO: 10648

SEQ ID NO: 12789 - protein, 536 aa, Anaerostipes sp.; identical to SEQ ID NO: 4526

SEQ ID NO: 12790 - protein, 416 aa, Parasutterella sp.; identical to SEQ ID NO: 10114

SEQ ID NO: 12791 - protein, 427 aa, Enterococcus sp.; identical to SEQ ID NO: 2410

SEQ ID NO: 12792 - protein, 426 aa, Parasutterella sp.; identical to SEQ ID NO: 3045

SEQ ID NO: 12793 - protein, 419 aa, unidentified
  REGION 1..419: note = Freshwater metagenome
MVYVINKQGTTLMPTERFGKVRRMLKNSLAHVVCRIPFTIQLDYDTTEITQPITLGIDAGSKFIGVCATTDKKELYAANVELRNDIVDKLSTRREQRRTRRNRLRYRKARFNNRVSSKNKGWLAPSVENKIQTHLTVVRNAYRILPISKIVVETASFDIQKIKNPNIDGEDYQNGEQMGFWNIREYVLWRDGHTCQHCHGKSNDSILNVHHLESRKTGGNSPSNLITLCETCHKAYHRGKFELKIKRGKPLRDAAFMGIMRWAFYKRLKKEYPNVSMTFGYITKSTRITNNLPKEHYVDARCISGHPQAKPIGYYFYQKKVRCQNRQIHKANFLKGGRKRLNQAQFLVRGFRLFDLVSYEGSAYYVFGRRTSGYFDIRKLDGTKVNKGSINCKKLKLINTQKTILIERRNSSSIPPTSL

SEQ ID NO: 12794 - protein, 423 aa, unidentified; identical to SEQ ID NO: 4062
  REGION 1..423: note = Human gut metagenome

SEQ ID NO: 12795 - protein, 414 aa, unidentified
  REGION 1..414: note = Human gut metagenome
MVYVINKQGQALMPTERFGKVRRLLKNSLAHVVCRIPFTIQLDYDTTDYTQPVSLGVDAGSKHIGISATTSEKELYAADVELRNDIVDKLSTRRELRRTRRSRLRYRKARFNNRVSSKRKGWLAPSVENKIQTHLTVVEKIHKFLPITNIVVEIASFDIQKINNPIISGSEYQQGEQLDFFNVREYVLFRDNHICQHCKGKSKDKVLNVHHIESRKAGGDSPNNLITLCETCHKAYHRGEFELNVKRGKSFRDAAFMGIMRWSFYDRLKNIYPNVSMTFGYITKNTRITNNLPKEHYVDARCISGNPVAKPLGYYFYQKKVRCQNRQIHKANFLKGGRKKLNQAPFLVKGFRLFDLVEYQKDLYYIFGRRDSGFFDIRKLDGTKVNKGSINCKYLRLVDKRKSILIEKRMQVNL

SEQ ID NO: 12796 - protein, 413 aa, unidentified; identical to SEQ ID NO: 2636
  REGION 1..413: note = Human gut metagenome

SEQ ID NO: 12797 - protein, 415 aa, Bacillus sp.; identical to SEQ ID NO: 2431

SEQ ID NO: 12798 - protein, 427 aa, Nostoc sp.
MSKVFVLDTEKRPLDPIHSAQARQLLRNKKAAVYRRFPFTIILKESRADASVSDLRIKLDPGAKITGIALVNDSTGEVVFAADLKHRGFAIIDALISRRQLRRSRRNRKTRYRKPRFLNRTRPEGWLAPSLMSQVHNVETWVNRLRKFAPITAISTELVKFDMQLMRNPEIEGKEYQQGTLAGYETREFLLEKWNRQCAYCGIKDIPLQIEHIHPRSKGGSNSITNLTLSCEKCNVKKGTKDIKDFLKKDPTRLQKILAQAKKPLADAAAVNATRYKLLEVLKSTDLPVECGSGGLTKFNRTNQQLQKTHWLDAACVGQSTPILIIKGIKPLLITANGHGTRQMCRTDKFGFPNRYVPKLKFIKGFQTGDIVKAVVTNGKKIGEYIGRVAVRSTGSFNISAQRGLIQGINYKFCKSIHKKDGYSYSS

SEQ ID NO: 12799 - protein, 419 aa, unidentified; identical to SEQ ID NO: 6954
  REGION 1..419: note = Human gut metagenome

SEQ ID NO: 12800 - protein, 452 aa, Pseudoalteromonas sp.; identical to SEQ ID NO: 5364

SEQ ID NO: 12801 - protein, 552 aa, Streptomyces sp.
MTTFPVGEQTHQAVLPQRPALESVGADTPGSRDETAHGLPATARDTGGEHGRGETGGRGTGARRRHAKSAATAAEAAENRSGDAPEHHRSYTGGVGASRVFVLARDGRPLMPCHPARARELLGRGRAVVARQVPFTIRLKDRALAGSEVGGVQLRIDPGSKGTGLVITDEKKEERRKGSTVIVRRGLIAVELQHRGDQIHLCMRQRAGYRRRRRSANCRYRAPRSHNRPRPAGWLPPSLRHRVETVLSLATRLCRYAPVSEVHVERAAFDTHSMSAGRPLSEADYGQGPLAGATARTHLRAKWNNACAYCDVSGVPLNIEHLRPRSRGGSDRVSNLVLACVPCNEAKGSTPVEAFLADRPDRLARILGQTKAPLHDAAAMNATRWQLTEALGTLGRPVHAWSGRRTKGNRSAMGLAKTHTLDALSVGRLNHERGDAIVRYPERVLVARATGRGSYARTTPDRFGFPRLRRARTKQHFGYVTGDLVRATMPSGKWAGTWTGRISVRARGQHSLATPRGRVNVSHRNLRLLQRGDGYGYGDRPEPAPSTSRKSG

SEQ ID NO: 12802 - protein, 413 aa, unidentified; identical to SEQ ID NO: 2636
  REGION 1..413: note = Human gut metagenome

SEQ ID NO: 12803 - protein, 512 aa, unidentified; identical to SEQ ID NO: 5238
  REGION 1..512: note = Human gut metagenome

SEQ ID NO: 12804 - protein, 430 aa, Nostoc sp.
MSNFVFLIDANKQPLDPIPPGQARRLLNQGHAAVYRRYPFMLILKKIIYDPKVKPHQLKIDPGSKVSGLAILQEDKVIWGAELTHRGQQIKNDLESRRAIRCNRRNRKTRYRQPRFLNRTRQKGWLPPSLESRIKNTLTWVNRIIRYVPITGISQELVKFDLQATENPEISGKEYQQGTLAGYETREYLLEKWNRKCAYCGVENVPFEIEHIHPKSKGGTDRVSNLTLACHECNQAKGNLDIKEFLAKKPAILSRILSQAKQPLKDAAAVNSTRWALFDRLKKTELPIEIGTGGRTKYNRVRLGLPKKHWIDAAAVGMVESLQLLASQPLLITAKGWGSRQMCTPNKYGFPMRHKTRCKTFFGFQTGDMVRAILPSGKFAGTHIGRLTVRKSGVFEMRTPKEKVSPVRYKYCKSVHRNDGYMYFFSTNVQ

SEQ ID NO: 12805 - protein, 413 aa, unidentified; identical to SEQ ID NO: 3023
  REGION 1..413: note = Human gut metagenome

SEQ ID NO: 12806 - protein, 323 aa, unidentified
  REGION 1..323: note = Human gut metagenome
LRVFVWNKRRKPLMPCSPAKARHLLKEKKAAVVRRTPFTIQLTIATGETKQPVSLGVDAGYKHVGLSASTENAELYASEVELRQDVSDLLSARRALRQSRRNRKTRYRAPRFDNRIRTKRKSWLAPSVENRINAHLSRIEAVLRLLPVTKITVETASFDMQLLKNPDISGKEYQEGEQLGFWNVREYVLFRDGHVCQHCHGRSKDPVLNVHHLESRRTGGDSPGNLITLCETCHKALHRSEITLKTKRGQSFRAEAYMGLMRWEVLNRLKTSHPGLEVHNTYGYRTKYTRIVNGIDKSHCADAFCIASNLGAERLGEFFFQKQ

SEQ ID NO: 12807 - protein, 431 aa, unidentified
  REGION 1..431: note = Human gut metagenome
MPDKVYVISRLGHPLMPCSPAKARHLLDDKKAKVVKRMPFTIRLLYGSTKYIQPIILGVDAGSKTIGLSASTAKEEVFAAEVMPRNDVVENLSTRREFRRARRNRTTRYRKPRSDNRVRSNHERRLAPSVKVKIQEHITSIKRVCTILPISKVVIETAEFDLQLLKAIQEGKPIPEGEDYQKGEMYGSYNVCQYVLWRDNYTCICCGVRGTPKNPVRLHVHHFESRKYGGNAPDNHGTLCDDCHKKFHLGIITDVKLKTRRRQSTRDAAFMGIMRKTLMWRLRTELFIPVAETKGYITKATREKLLALPKSHTRDALAIAQGRHGFCIKEYAYVEPANHIYTVRPVRHHNRQLHKASILKGGIRKRNQASKYVFGFRLYDKVLYQGKACFVWGRRTSGTFLLRTIDGIKVKDGVSYRNLTLLERSSNYLIA

SEQ ID NO: 12808 - protein, 424 aa, unidentified; identical to SEQ ID NO: 3351
  REGION 1..424: note = Human gut metagenome

SEQ ID NO: 12809 - protein, 453 aa, Moorena sp.
MSVAVLSSTGRKLMPTSNYRARKLLKSHRAAIECYRPIFTIRLTDRKGGNTQPIEYACDTGYQHVGVSIKSEKHEFVHAQYDMLSDETERHNDCRKYRRTRRNRLRYRKPRFDNRSKKNKEMPPSLRHRKENQISLFESFCKVMPITSATFEMGKFDTQLLQAIANGKPLPEGKDYQQGSKYLYQTEREAVFGRDHYTCQVCGKSVKDGVILNTHHIGYWKGYRSNRISNLLTVCEHCHTAKNHRPGGKLWGLEPKSTNLAPAAYMSTVRWAMYRDLVLMHPEIDIHIQYGAKTSVTRKSLHLAKTHANDAYCIGSLRPKHRAAELVYQKKRRNNRILSRFYDAKYIDIRDGKKKSGSALSCGRTNRRESRRSDKNQRIYRGKKCSSGRTSIRKRRYAYQPGDAILFRSQRFAVNGAHCNGTRVILNTGKSVKTADLTCIKKEGGWRFLPAQA

SEQ ID NO: 12810 - protein, 442 aa, unidentified; identical to SEQ ID NO: 2903
  REGION 1..442: note = Human gut metagenome

SEQ ID NO: 12811 - protein, 470 aa, unidentified; identical to SEQ ID NO: 2825
  REGION 1..470: note = Human gut metagenome

SEQ ID NO: 12812 - protein, 406 aa, unidentified; identical to SEQ ID NO: 4271
  REGION 1..406: note = Human gut metagenome

SEQ ID NO: 12813 - protein, 451 aa, unidentified; identical to SEQ ID NO: 5203
  REGION 1..451: note = Human gut metagenome

SEQ ID NO: 12814 - protein, 416 aa, unidentified; identical to SEQ ID NO: 9947
  REGION 1..416: note = Freshwater metagenome

SEQ ID NO: 12815 - protein, 388 aa, Scytonema sp.; identical to SEQ ID NO: 2683

SEQ ID NO: 12816 - protein, 526 aa, Streptomyces sp.; identical to SEQ ID NO: 8021

SEQ ID NO: 12817 - protein, 430 aa, unidentified; identical to SEQ ID NO: 4504
  REGION 1..430: note = Human gut metagenome

SEQ ID NO: 12818 - protein, 420 aa, unidentified
  REGION 1..420: note = metagenome
MVYVISKSGKPLMPCENVVARLLLKDGKAKVKKRCPFTIQLTYDSTEYTQDVVLGQDTGSKYIGTACVGNNKVLYQSNVKLRDDIKSKMDSRRQARRNRRNRKTRYRESRFLNRNNSTKLNRLPPSVKHKVQAHIDEIEFCKKILPISKIVLEVSQFDTHLMKNPSLILEKVKHWGYQKGFNYEWASRREAILNRDGYTCQICGKKHTRLEVHHIVFKSQSGTDDESNLITLCEDCHTGVHSGKIALNKKPKKMNLKYATHMSIIRSRLLKVYPDAIETFGFVTKTNRESLHLPKDHFIDACVISSGGKEFTLNDTIYQKRRVSKGNYQLTRGVRGEQKIPVGKIQGFRKFDKVKYFGKEYFIKGKMSSGFAILMDIFNNQIDFSYMPRGYKTPKLSNCNRISARRSCLYISQNIINSQD

SEQ ID NO: 12819 - protein, 425 aa, Moorena sp.; identical to SEQ ID NO: 9937

SEQ ID NO: 12820 - protein, 424 aa, Moorena sp.; identical to SEQ ID NO: 8180

SEQ ID NO: 12821 - protein, 416 aa, unidentified
  REGION 1..416: note = Human gut metagenome
MVYVLSQNGQPLMPTENHAKVRVFLKQGKAKVVQRCPFTIQLLYESTTHTQKINLGIDAGSKTIGISATTDSKVLYEAEVVLRNDIVELLSGRRALRRSRRNRKTRHRKPRFDNRKKPDGWLAPSIRQKIETHVTVVENITKILPMTKIIVETASFDIQKIKNPEIEGAEYQHGEQLDFWNVREYVLFRDGHTCQCCKGKSKDNILNVHHIESRKTGGNAPNNLITLCETCHKAYHKGVITLPKEIHRGMRFRDAAFMGVMRWAFYDRLKELYNLLGVEVINTYGYITKNTRITYDLPKEHYVDARCISGNPAAKPMDYYYLQKKVRCHNRQIHKCKINKGGTRKRNQAAYEVKGFRLYDQVLWKGQKCFIFARRSTGRMDLRLLDGTHVNASVGYKNLKLLSMRKNYLIEQRKAG

SEQ ID NO: 12822 - protein, 414 aa, unidentified
  REGION 1..414: note = Human gut metagenome
MPCSPAKARLLLKEKKAIVKRRTPFTIQLTIATGETKQPVGLGVDAGYKHVGLSASTDKAELYASQVELRQDITDLLSARRALRRARRNRKTRYRAPRFNNRIRTKRKGWLAPSVENRINAHLSRIEAVLRLLPVTKITVETASFDMLLLKNPDIAGKEYQEGEQLGFWNVREYVLFRDGHVCQHCYGRSKDPVLNVHHLESRRTGGDSPDNLITLCETCHEALHRGEIALKTKRGHSFRAEAFMGMMRWEVLNRLKASHSELEVNNTYGYRTKHARIVNGIDKSHCADAICIAGNLGAERLCEFFFQKQTRRNNRQIHKLSILKGGIRKRNQAPFEIKGFRLFDKVACKGEESFIFGRRSSGYFDVRKLDGTRISAGISYKKLRLLEKRRTYLTEIRKEEALPPLPEGRGLRA

SEQ ID NO: 12823 - protein, 413 aa, unidentified
  REGION 1..413: note = Human gut metagenome
MTSYSFVLDANGKQLAPTKEPKAWFLIRKKRAALVSKYPMVIQLMKEIPENEICQDEIRCGIDDGGLHVGIALVQKCKTKNKVVFKGTMEQRNDVKHLMEVRRGYRRYHRYHKRYRQARFDNRKSSKREGRIAPSILQKRQATIRVIHWINKWINITNYWLEDVSVDIRALTDGYQSYRWQYQKSNRLDENIRKAAILRDGGKCMECGKSNCRLEVHHIKPKRRNGSDTLDNLITLCESCHQKTEGQEELYMDRYFSLLKSSDNKNLNYAQHVMIGKMWLRKQLSGLGVLYLTSGGDTANKRIDWNIEKSHANDAVCITNLQPDTYDMKEWTVKPMRRQSKAKTDNVLGIKHRDLVEYTFKNGETHRGYVTALYPEQKAINFQSPTKHCKKVNARKCKLLWKYSKIYWFENAS

SEQ ID NO: 12824 - protein, 442 aa, unidentified; identical to SEQ ID NO: 2903
  REGION 1..442: note = Human gut metagenome

SEQ ID NO: 12825 - protein, 415 aa, unidentified
  REGION 1..415: note = Human gut metagenome
MIYVRSKEGKALMPSERGGRIGYLLRHGKAHVVSRVPFIVQLDYESTIYTQEVSLGIDAGSKHIGVSASSEKRELLAAQVELRSDVVNLLSTRRELRRARRNRKTRYRKVRFDDRKKKDSWLAPSIEQKVESHLKVIRLVHKLLPITKTTIEVAQFDAQKIKNPDIKGEEYQQGEQMGFWNVREYVLARDGHKCIHCKGKSKDPILNVHHLESRKTGGNSPSNLVTLCETCHKAYHCGEFELKIKRGTTLRDAAVMNIMRWAVYEQAKEEFRNVHLTYGYVTKHTRIENGITKTHAADAFCIAKNVHAIRLGTFFMCRCVPRHTRALHVANPKKGGIRRSCIASHKIGKSRFQRFDMVRWKGKECFIFGSTHGRPILRDVEGKQIAGQPSVNIKTIKFLNRLRNNILVEERTSES

SEQ ID NO: 12826 - protein, 427 aa, Moorena sp.; identical to SEQ ID NO: 12706

SEQ ID NO: 12827 - protein, 408 aa, unidentified; identical to SEQ ID NO: 6232
  REGION 1..408: note = Human gut metagenome

SEQ ID NO: 12828 - protein, 434 aa, Escherichia sp.; identical to SEQ ID NO: 5780

SEQ ID NO: 12829 - protein, 396 aa, unidentified; identical to SEQ ID NO: 4508
  REGION 1..396: note = Human gut metagenome

SEQ ID NO: 12830 - protein, 420 aa, unidentified; identical to SEQ ID NO: 5988
  REGION 1..420: note = Human gut metagenome

SEQ ID NO: 12831 - protein, 415 aa, unidentified; identical to SEQ ID NO: 6534
  REGION 1..415: note = Human gut metagenome

SEQ ID NO: 12832 - protein, 367 aa, Microcoleus sp.
MSKTPNQVFVLDSDKKPLTPCLPVIARKLLNAGKAKVFRLYPFAIILKKSVNDSPVPIEIRIDPGSKTTGIALVQGTQVIWCAELTHRGQAIKSRLETRRAVRRGRRNRKTRYRKARFLNRTRLKGWLPPSLQHRVLTTMTWVSRLRKLAPIQSIAFELVNFDTQKMQNPEISGVEYQQGELQGYEVREYLLEKWKRKCAYCGSENLPLQVEHINPRAKGGTNRVSNLCLACEKCNLKKGTQDLRDFLKKKPEILKKIMSQAKTSLKDAAAVNATKSALFQALKDTAIEPIYVGRGSLTKFNRTNLKFPKAHWIDAACCRDVSQGLTLAINQPLLIKAMGLGSRQVVQTDKYGFPRRGYKPKKKVAG

SEQ ID NO: 12833 - protein, 425 aa, unidentified; identical to SEQ ID NO: 6631
  REGION 1..425: note = bioreactor sludge metagenome

SEQ ID NO: 12834 - protein, 451 aa, Moorena sp.; identical to SEQ ID NO: 3199

SEQ ID NO: 12835 - protein, 470 aa, unidentified; identical to SEQ ID NO: 2825
  REGION 1..470: note = Human gut metagenome

SEQ ID NO: 12836 - protein, 413 aa, unidentified; identical to SEQ ID NO: 10591
  REGION 1..413: note = Human gut metagenome

SEQ ID NO: 12837 - protein, 431 aa, unidentified
  REGION 1..431: note = Human gut metagenome
MPNKVYVINKHGRPLMPCSPAKARHLLDEGKAKVKKRTPFTIQLVYGSSGYTQEVILGVDAGSKTIGMSASTTKEELLSAEVKPRNDVVDLLSTRREFRRAQRNRKTRYRKPRFDNRVRSKHKGWLAPSVEVKIQEHITAIRRVCGILPVSKVVIETAEFDLQMLKAIADGKPVPQGEDYQQGEMYGHYNVRQYVLWRDGYTCQCCGAHTTKKKEVRLHVHHLESRKVGGDAPDNQVTLCESCHEKLHKGLIAEKDFKKRKRRSTRDATFMGIMRKTLMQRLCSELPIPVVKTRGYITKATREKLLVLPKSHTNDALAIAQGKQGFNVGYLPGIVQINKIYTIRPVRHHNRQLHKATILKGGIRKSNQTEKYVFGYRLFDKVQFNGQDCFIWGRRTTGIFTIKTINGKMIKDGISFKKLKLVEKSTSYLIA

SEQ ID NO: 12838 - protein, 465 aa, unidentified
  REGION 1..465: note = Human gut metagenome
MSTCVCVLSNSGERLMPTFRLGKVRHLLKDGKTKIVKHHPFTIQLLYDSKTNTQPIEICEDVGYNYIGISVKSQSHEYVSAQYDTLQDEKACHDSCRKYRRTRRNRLRYRKPRFDNRKRSEGWLAPSLRHKKELNVNVVKMYCAVMPITHATVEVGSFDTMLVKAIQEGKAIPEGADYQKGPRYNLATLREAVFYRDNYVCKVCGRKATEGAILHVHHMFYWKGRHGNSLSELITVCEKCHTPANHQKGGKLYGFGENVKFADLSGAAFMNTVRWQIVNELYAAFGKDFVTVTYGAMTKEKRIALRLEKSHNNDAYAMGEFHPNCRCTFEHYEKVRRNNRILEKFYDSRYIDIRTGEIATGKELFNGRINRNHKKDSENLHRYRGKRTYAGHRALLRKKVNLNPGDLVSLNGEVLVVHSTHTNKKGAVNVEFKTPGKSGQKSASLKKLKIVKAADSMHSAWEKIS

SEQ ID NO: 12839 - protein, 348 aa, unidentified
  REGION 1..348: note = Human gut metagenome
MVYVQDIDGSPLMPTTRHGKVRRLLKANKATVISLCPFTIKLLYKTTDYKQEIVLGVDAGAKHVGLSATTKSKELYASEVILRSDIVDLISTRRDLRRARRSRLRYRKPRFMNRVKTKKRGWVAPSVRQRIDSHIRVIKFVYSILPISKLTIEVAQFDTQKIKNPEISGKEYQKGDQLGFWNVREYVLARDGHKCQHCRGKSKDPILNIHHIESRKTGGDSPSNLITLCETCHKEYHKGNIDLKVKRGKSLRDAAVMGIMKWELYDELKLLYPNIKMTFGYITKYNRINHGIGKSHVSDAFVISRNFNSCRLGYYYKQKLVRRHNRQIHKMKILKGGIKKPNQAPFKV

SEQ ID NO: 12840 - protein, 420 aa, unidentified; identical to SEQ ID NO: 8301
  REGION 1..420: note = Human gut metagenome

SEQ ID NO: 12841 - protein, 431 aa, unidentified
  REGION 1..431: note = Human gut metagenome
MPNKVYIINKHGRPLMPCSPAKARHLLDEGKAKVKKRTPFTIQLVYGSSGYTQEVILGVDAGSKTIGMSASTTKEELLSAEVKPRNDVVDLLSTRREFRRAQRNRKTRYRKPRFDNRVRSKHKGWLAPSVEVKIQEHITAIRRVCGILPVSKVVIETAEFDLQLLKAIADGKPVPQGEDYQQGEMYGHYNVRQYVLWRDGYTCQCCGAHATKKKEVRLHVHHLESRKVGGDAPDNQVTLCESCHEKLHKWLIAEKDFKKRKRKSTRDATFMGIMRKTLMQRLCSELPIPVIETRGYITKATREKLLVLPKSHTNDALAIAQGKQGFNVGYLPEIAQIDKIYTIRPVRHHNRQLYKATILKGGIRKSNQTKKYVFGYRLFDKVQFNEQDCFIWGRRTTGIFTIKTINGKMIKDGISFKKLKPVEKSTGYLIA

SEQ ID NO: 12842 - protein, 457 aa, unidentified; identical to SEQ ID NO: 4299
  REGION 1..457: note = Human gut metagenome

SEQ ID NO: 12843 - protein, 512 aa, unidentified; identical to SEQ ID NO: 4031
  REGION 1..512: note = Human gut metagenome

SEQ ID NO: 12844 - protein, 418 aa, unidentified
  REGION 1..418: note = Human gut metagenome
MVYVLNIDGQPLMPTTRHGKVKHLLKDGKAKVVKRCPFTIKLLYETPNCTQDLTLGVDTGSGAIGTAVSTDDGEIVYMSEVVVRNDITDKMTQRAKYRRNRRSRKTRYRKARWLNRKNSIKKDRFSPTMVSKLHSHVKEIEYIKSILPITTMVFETGTFDTYLMKNLSLVNENVRHWGYQKGTNYGFENTKAMVLNRDNYTCQYCKGKHKDSKLEVHHIVFRSKHGSDEESNLITLCHTCHKALHSGKISLKLEGKVKGNLKYATQMNSIRKQLSRIYPEAIETFGYITKANRLKLGVDKEHFYDACVIATHGNKFSVRCNLYKKKCVSDGDFQQTKGVRSEQRIPTCKIQGFRKFDKVRYFGKEYFIKGRLSTGYAILMDIDGNKSDFSYMPKGFKTPKIINLKRLEARSSWIVIFK

SEQ ID NO: 12845 - protein, 383 aa, Sutterella sp.; identical to SEQ ID NO: 6831

SEQ ID NO: 12846 - protein, 335 aa, Enterococcus sp.
MDQRRMYRRNRRNRKTRYRKARFNNRKNSKRKNRFSPTMTSKLHSHQKEIEFIKSILPIAKLILETGTFDPHLMKNPSLANLKVKPWGYQQGPNYGFENMKARILARDNHTCQICKKKPKNERLEVHHIIFRSQGGSDEENNLVTVCHSCHVELHKGLIHPNFEGSLKNALKYATQMNSIRVQLLKLYPDAIETFGYVTKANRLNLGLPKEHYVDAAVIATAGNQVNFACNLMIKRCIPKGDFQRTKGIRSEKIIPKGKIDGFKKYDKVRYFGNEYFVKGRMTTGYIQLMNIYGEKISFNHMPKGFKTPKTKNCQRISARKTWITTTEPLIKNIA

SEQ ID NO: 12847 - protein, 360 aa, unidentified
  REGION 1..360: note = Human gut metagenome
VIKQGLYLGSGVACTKHVGLSATTKSKELYASEVILRSDVVDLLSTRRELRKIRRYRLRYRKPRFMNRIKSKKRGWIAPSIRQKIDSHIRIIGFVYSILPVSKLIIEVAQFDTQKIKNPEISGKEYQEGEQLGFWNVREYVLARDEHKCQHCKGKSKDPVLNVHHIESRKTGGDSPSNLITLCKTCHKEFHKGNIKLKVNRGESLRDAAVMSIMKWELYDELKSLYPNVKMTFGYITKYNRINHGIEKSHVSDAFVISRNFDSERLGYYYKRKLVRRHNRQIHKMKAPKGGNKRMNQSPFKVFGFRLFDKVMFQGKERFIYARRLRGIFNIRDINGENKKDISYKKLEYVSHGLISIVAG

SEQ ID NO: 12848 - protein, 465 aa, unidentified; identical to SEQ ID NO: 3856
  REGION 1..465: note = Human gut metagenome

SEQ ID NO: 12849 - protein, 445 aa, unidentified
  REGION 1..445: note = Human gut metagenome
MHTGLQQCEGVTMRYVYVLDMDGKPLMPTCRFGKVRRMLRSGQAKAVDTLPFTIQLTYKPKTRILQPVTIGQDPGRTNIGMAAVRSDGTELYRARIETRNKEIVSLMNERRSFRQASRRGERLARKRLAKRLHTTAKHLNGRILPGCKEPLAVKDIINTESRFNNRLRPEGWLTPTATQLLRTHLEAIRKLSGILPVTEVVLEVNRFAFLQLDNPEMRKKDIDFCHGPLYGTGGVKAAVSLQQDGYCLLCRKQDIGHYHHIVPRSRRGSNTIQNIAGLCPKCHELVHKDADAAQKLATIKTGLTKKYGGTSVLNQIIPFLTRELAALYPRHTHVTNGWNTREFREKHGLGKDHDIDAYCIAASILEDMQPVMQTETYKIKQFRRHDRALINHQTERTYRYDGKIIAKNRKKRMDQKTDSLEDWFTDMAKQHGHATASRMLSRVTL

SEQ ID NO: 12850 - protein, 504 aa, unidentified
  REGION 1..504: note = Human gut metagenome
MSIIYVQDRHGKPLAPTTRGGHVRRLLDSKQARVVCGNPFTIRLMYGVDPCTQGFILGIDPGRTNIGVTVAAADGTCVFSAKAETNNKDVPKRMKERKDHRQASRQGERKRRQRRARKNGTCFGERKRILPGCKEPITNHYITNTEARFMNRARTKGWLTPTANQLLQSTISLVRKVCKFLPVTDVVLELNEFAFMAMDDPGIQRWEYQKGPLYGYGSVEAAVYTQQDGHCIFCEQAIAHCHHVIPASKGGSDTLENRAGLCGGHHDLVHKEQSWTDKLAELKAGMNKRYAALSVVNQIIPRLADELGKMFPGHAFATNGWSTKQFRDAHGIPKDHNTDADCIACSILENPTIKLPEKVYELRKFRRHDRAQISRMEDRNYYLPGADPKTGKPKKVLAAKNRHKRTEQKTDSLEEFRAAHPNDVGRLMVARGGPKHKDPNRVLPGAIFQVETSSGNVEQLVLQGSHGRDKNGQPLYMEFVGQGNFRPNTVSYTHLRAHETSLHL

SEQ ID NO: 12851 - protein, 413 aa, unidentified; identical to SEQ ID NO: 2636
  REGION 1..413: note = Human gut metagenome

SEQ ID NO: 12852 - protein, 450 aa, unidentified
  REGION 1..450: note = Human gut metagenome
VGDFGRGAAPQTTACSCLHYLLSQIKNTIERIAYQMVYVLNVNGVPLMPTDRHGKVRRLLKSKQARVVKRTPFTIQLLYDTPTCVQPLTLGVDAGSKHIGLSVSSENKEVYAGQIEPRQDVSKKLDERRQYRRSRRNRLRYRKPRFNNRTASKPKGWIAPSIACKIESHVAVIGQLHQILPITEIVVEVADFDTQKILNPDIQGKEYQTGPLSNSNLRQYTFARDGYTCQWCKGKSKNKILHVHHWNYWRGDHTDKPSSVITLCDVCNDSKNHKKDGFLYGWEPKITNNLKDAAFMNISRWALYNRLKEIYPNFRLTYGYITKVVRSDHGLEKSHVNDALCIANHPNATRLLYCYLIKKNRVHNRQLHKANKLKGGRLKLNQAPHLVKGYRLNDIVKCNGQNYVITARRRTGYFQLKNFITGEKLPSVSYKKLELLEKAKNYTTERIARN

SEQ ID NO: 12853 - protein, 447 aa, unidentified
  REGION 1..447: note = Human gut metagenome
VPAYRFKHITKKEVPYMVYVLDIDGQPLMPTSRHGKARRLLNSHLAKVVKRCPFTIQLLYQSTKETQPVSLGVDAGSRHIGLSATTEREVVYQEELVPRNDIVKLLSARRALRRSRRNRKTRYRRVRFNNRVHSKHKGWLAPSVEVKIQEHITATKRICQILPIFDIHVETAEFDLQRLKAMEEGRLLPAGTDYQLGEQYDFYNTRQYVLHRDEYTCQCCGTHDNNVKLHVHHVESRQTGGEAPNNLITLCEHCHKSIHAGKMMLPKGKKRGKSYRDAAFMGIMRNTLLERLRKEVNVPVTMTYGYITKYWREKAGLEKSHINDAICISKHPYARPLETYYLTKAVRHHNRQIHKTKFSKGGIRKRNQAPYLVKGFRLFDKVLYQGESYFIFGRRITGYFDIRTLDGTKVNKGSTSYKKLRIQDTAEAYLTEVRAIPHMNEFTCVLA

SEQ ID NO: 12854 - protein, 427 aa, Parasutterella sp.; identical to SEQ ID NO: 3787

SEQ ID NO: 12855 - protein, 422 aa, unidentified; identical to SEQ ID NO: 11357
  REGION 1..422: note = metagenome

SEQ ID NO: 12856 - protein, 325 aa, unidentified
  REGION 1..325: note = Human gut metagenome
RKTRYRAPRFDNRIRTKRKGWLAPSVENRINAHLSRIEAVLRLLPVTKITVETASFDLQLLKNPDISGKEYQEGEQLGFWNIREYVLCRDGHVCQHCYGRSKDPVLNVHHLESRRTGGDSPGNLITLCETCHKALHRGEITLKAKRGQSFRAEAFMGIMRSEVLNRLKASHPELEVNNTYGYRTKHARIANDIAKSHCADAFCIAGNLGAERLGEFFFQKQTRRNNRQIHKLSILKGGIRKRNQAPFEVNGFRLFDKVACKGEEGFIFGRRSSGFFDVRKLDGTRISAGISCKKLHLLEKRRTYLTEIRKEEALPALPEGRGLRA

SEQ ID NO: 12857 - protein, 438 aa, unidentified; identical to SEQ ID NO: 4848
  REGION 1..438: note = Human gut metagenome

SEQ ID NO: 12858 - protein, 422 aa, unidentified; identical to SEQ ID NO: 5333
  REGION 1..422: note = metagenome

SEQ ID NO: 12859 - protein, 327 aa, unidentified
  REGION 1..327: note = Human gut metagenome
MPTVYVLNRHGRPLMPCTPAKARHLLDAGKAKVRHRTPFTIQLLYGSTGYTQEVILGVDAGSKTIGLSAATETEELFSAEVKPRNDVVELMSARRQFRRARRNRTTRHRKLRFDNRVRSKHKGWLAPSVEVKIQEHMTAIRRVCVILPVSKVVVETAEFDLQLLKAVAEGKPVPQGEDYQKGEMYGHYNVRQYVLWRDGYTCQCCGAHGSVRKGVPLHVHHLESRRVGGDAPDNLVTLCTACHDKLHKGIIMAADIKKRKRRSTRDATFMGIMRMTLLRRLREQLPVPVVETRGYITKATRENLLVLPKRHANDALAIAHGPQGFRA

SEQ ID NO: 12860 - protein, 456 aa, Halomonas sp.
MAVFVLDKHKQPLMPCSEKRARLLLERGRAVVHKRYPFTIRLKDRMGGDTQPLRLGIDPGSKTTGLALMRETNDGQRHVLCLFDLVHRGYSIRKAMEQRAAFRRRRRSKNLRYRAPRFDNRTKPKGWLAPSLQHQVDTVMAWVNRFSRLTPITAISQELVRFDTQKLENPEISGVEYQQGTLLGYEVREYLLEKWGRECAYCGTKDTPLEIEHVVPRTRQGSNRVSNLTLSCHDCNQAKDALPLADFFATDRGLRKRLKANGHTAETQLERVERQLKQPLRDASAVNAIRWSLFSALKTTGLPMAVGTGGRTKYNRQRLTIPKTHALDAACVGAFDTLHDWAVPTLTIKATGRGSYKRTRLTKHGFPRGFLMRQKQVQGFQTGDMVKAIVPTGKKAGTHTGRVAVRKTGSFNIQTEHGAVQGISHKYCAVTQRSDGYGYHLTSTNRQKGGAGQTVA

SEQ ID NO: 12861 - protein, 343 aa, unidentified
  REGION 1..343: note = Human gut metagenome
LRVFILNKRGKPLMPCSPAKARLLLKEKKAIVKRRTPFTIQLTIATGEAKQPVSLGIDAGYKHVGLSASTEKAELYASEVELRQDITDLLSARRALRQSRRNRKTRYRAPRFDNRIRTKRKGWLAPSVENRINAHLSRIEAVLRLLPVTKITVETASFDLQLLKNPDISGKEYQEGEQLGFWNIREYVLCRDGHVCQHCYGRSKDPVLNVHHLESRRTGGDSPGNLITLCETCHKALHRGEITLKAKRGQSFRAEAFMGIMRWEVHNRLRALHPGIEVSNTYGYRTKHARIANGIAKSHCADAFCIAGNLGAKRLGEFLFQKQTRRNNRQIHKLSILKGGIRK

SEQ ID NO: 12862 - protein, 515 aa, unidentified; identical to SEQ ID NO: 5111
  REGION 1..515: note = Human gut metagenome

SEQ ID NO: 12863 - protein, 430 aa, Desulfobacter sp.
LNVFVLDTNKKPQNPVHPAKARLLLTEGKAAVFRQFPFTIILKETVLDVASNPLRIKIDPGSRETGIAVINDDSGEIVFAMELRHRGQQIKNNLESRRAIRRSRRNRKTRYRKPRFDNRTRAEGWLPPSLKSRVHNIETWVNRLCRFCNIQAISMELVRFDMQKIQNPEISGVAYQQGELMGYEVREYLLEKWDRTCAYCGKTDIPLEIEHIVPRSKGGSNRVSNLTLACTACNRKKGNKSLEQFLSRKPRLLKRIQKQSKVPLKDAGAVNTTRWDLFRTLKKTGLPVETGSGGLTKFNRTTRGLHKTHWLDAACVGKSTPEKMFQIDKAVLIVKADGHGSRQMCRVNKFGFPRTTAKSTEKKVKGFQTGDIVKAVVTSGKKVGTYTGRVAVRKSGSFNIKTVDKTVQGISWKYCRLLHASDGYSYNTTC

SEQ ID NO: 12864 - protein, 426 aa, Scytonema sp.; identical to SEQ ID NO: 2729

SEQ ID NO: 12865 - protein, 457 aa, Moorena sp.; identical to SEQ ID NO: 4365

SEQ ID NO: 12866 - protein, 442 aa, unidentified
  REGION 1..442: note = Human gut metagenome
MVTVQQSTHHLPFGRVFIRRNLFMVYVISQDSKPLMPCSNPIARLLLKQGKAKVKRREPFTIKLIYETTDYTQDLTLGVDTGSGTIGAAVSKDNGDIVYMSEVVVRNDITDKMTQRAKYRRNRRNRKTRYRKARWLNRSNSIKKDRFSPTMQSKLHSHVKEIEYIQSILPITEMVFETGQFDMHLMKDPSLANPKVRPWGYQKGTNYGFENTKAMVLNRDNYTCQCCKGKHKDSKLEVHHIVFRSQGGSDEESNLITLCHTCHKNLHSGKINLKLSGKVKGNLKYATQMNSIRKQLFRLYPNAIETFGYVTKANRLHLGVDKEHYYDACTIATQGNTFNVKSNLYKKKCVSDGDFQKTKGICSEQPIVTDKICSFRKFDKVRYFGKDYFIKGRMSTGYAILMDIDGNKIDFSTMPRGYKTPKLSNCKRITARSTVMTQVKVV

SEQ ID NO: 12867 - protein, 450 aa, Moorena sp.; identical to SEQ ID NO: 6279

SEQ ID NO: 12868 - protein, 440 aa, unidentified
  REGION 1..440: note = metagenome
VFPPQGEIIFSERKLFMVFVLDKSKKPLNMISHAKARILLKNRLAVVHKVYPFTIRLKDNSAVLKDRSYTVKLDPGSRTTGVAITDNNDSVVMLAEIEHRGHVIKRNLDKRRAVRNSRRQRKTRYRPARFLNRTRPQGWLAPSVKSRADNVINFIKKYKKLINIDKVMIENVNFDTAQMTSDIKLWGTSYQQGPLYQTKLRSYLFKKYNGQCVYCGNKAEEIEHINPKSKGGTNSPHNLVIACKKCNKLKGKLSLKEFGELMNKDYSHLEPKKLPKDAAIVQSARNYMVKEITKLVPNTTTHDAWMTQYNRDELGLPKEHYYDALSVGNVKNYKFLTDKVLQISAKGRGLRQMCRMDKYGFPKTKPKGSKSVKGFQTGDMVKAIVPKGLKQREYLGRVMVHSRGYFDIKTKNGLAQSIGYKYCHLIQRGDGYSYNYKERF

SEQ ID NO: 12869 - protein, 433 aa, unidentified
  REGION 1..433: note = Bovine gut metagenome
VVYITNQNGQPLMPTTRHGFVRRALKEGKAKVIRRCPFTIQLLYDTGDVVQPVSLGVDAGSKHIGLSATTETKELYAADIEVRNDIVKLQSARREFRRSRRNRKTRYRKPRFNNRTKAKHKGWLAPSVEAKIGSHIQAVKNACKILPVKRIVVEAASFDLQKLKADEAGLAAPKGAEYQQGEMLGFWNAREYVLFRDGHTCQCCKGKSGDKRLNVHHIQSRQIGGDAPNNLITLCETCHTKYHAGLVNLPKSIKRDKPQKDAVFMGVMRWIFYNRLQALYPGMVSMTYGYITKNTRITNGIEKTHTADARCISGNPKAEPADCVYFQRKVRCHNRQLHKATILKGGVRKRNQAAYAVYGYRLFDKVLYQNQECFITGRRTSGSFKLVKFDGTVLSEGVSYKKIILLERAKHIITERLAASSPCLKAGASAAVF

SEQ ID NO: 12870 - protein, 471 aa, Microcoleus sp.
MRSQFLALSFAIKQTYRVEVSVVNPKSFRNIAKANITRKETQALSKVFVLDTNKQPLNPIHSGRARMLLSQGKAAVFRRYPFTVILNKEVVNPKVESLRVKIDPGAKTTGLALVNDSTGEVVWAAQLQHRGFQIRDALTSRRQLRRSRRNRKTRYRKPRFLNRTRPEGWLPPSLNSRVANILTWVNRLSSISQITAISQELVRFDTQQMEDAEISGIGYQQGTLFGYEIREFLLEKWNRTCAYCGAKDKPLEIEHINARSKGGSNRISNLCLACTSCNQKKGNQDIKDFLKGKPDLLKCILSQAKRPLADTAAVNATRWNLYYNLKKTGLPVEVGTGGRTKYNRTIRGLDKTHYWDAACVGASTPEQLITSEVKPLLIAAKGHGTRQQCRTDKFGFPSRYCKRTKFHKGFQTGDIVKAVVTSGKKIGTYVGRLATRATGSFNISTTDGLVQGISHKYCLPLHKKDGYSYIQ

SEQ ID NO: 12871 - protein, 470 aa, unidentified; identical to SEQ ID NO: 2825
  REGION 1..470: note = Human gut metagenome

SEQ ID NO: 12872 - protein, 456 aa, unidentified
  REGION 1..456: note = Human gut metagenome
MSTCVCVLSNSGERLMPTFRLGKVRRLLKDGKAKIVKHHPFTIQLLYDSKTNTQPIEICEDVGYNYIGISVKSESHEYVSAQYDTLQDEKACHDSCRKLRRARRNRLRYRKPRFDNRKRSEGWLAPSLEHKKQLNISLIERYVSVIPITRATVEVGSFDTILLQAIQKGKSKPEGVDYQKGPRYNLATLREAVFYRDNYTCQVCGRKIADGAILHMHHMFYWKGRHGYQLDELVTACEKCHTPANHQKGGKLFGFGEDKEFANLSGAAFMNAVRWQIVDALHATYGKEFVTITYGAMTKEKRIILGIEKTHNNDAYAMGDYHPVHRCVFRHYQKRRRNNRVLEKFYDATYIDTRTGNKAKGKELFNGRISRNHKKNSEDLHKYRSKKVSKGRRSIRRQRYAIQPYDTVRLESKTYITSGCHNKGTRLLIPANGKSKSVAISKVQVVCHAGAWIQII

SEQ ID NO: 12873 - protein, 512 aa, unidentified; identical to SEQ ID NO: 5174
  REGION 1..512: note = Human gut metagenome

SEQ ID NO: 12874 - protein, 406 aa, unidentified
  REGION 1..406: note = Human gut metagenome
MVYVQDIDGRPLMPTTRHGKVRRLLKSKKATVVNLCPFTIRLLYDTTGYKQEITLGVDTGTKHVGLSATTKSKELYASEVILRSDVVDLLSTRRELRKIRRYRLRYRKPRFMNRIKSKKRGWIAPSIRQKIDSHIRIIGFVYSILPVSKLIIEVAQFDTQKIKNPEISGKEYQEGEQLGFWNVREYVLAGDGHKCQHCKGKSKDPVLNVHHIESRKTGGDSPSNLITLCKTCHKEFHKGNIKLKVNRGESLRDAAVMGIMKWELYDELKSLYPNVKMTFGYITKYNRINHGIEKSHVSDAFVISRNFDSERLGYYYKRKLVRRHNRQIHKMKAPKGGNKRMNQSPFKVFGFRLFDKVMFQGKERFIYARRLRGIFNIRDINGENKKDISYKKLEYVSHGLISIVAG

SEQ ID NO: 12875 - protein, 426 aa, Scytonema sp.; identical to SEQ ID NO: 2766

SEQ ID NO: 12876 - protein, 445 aa, unidentified
  REGION 1..445: note = Marine metagenome
MPCRPARARQLLRDGKAAVFRRYPFTIVLKERQGGETQPVALNVDPGSKTTGIALVALFQRDQVAVYGQHIVHRGQQIRDALESRRTIRRSRRHRKTRYRKPRFLNRTRPAGWLPPSLMSRVYNVETWTKRLSRFVPITSANVETVRFDTQLIENPDIAGKEYQQGSLFGWELREYLLYRHQHICAYCHGLTKDLVLEKEHVTPKALGGSNRLANHVISCRECNVDKGSLHPNAWMSLCKQRGDKLNLTRARNMQRIMDGYRPSLRDAAAVNATRYAVGNSIKYIIPNTQFWSGGLTKKNRSEQGHTKDHWIDAACIGQNGSAVVLECHHILVASAKGHGSRQMCRVDKYGFPRTSAKTSSVVYGFRTGDLVTANVPTGKKQGLHIGRVAVRKNGYFNIQSESGAVQGISHKHCRIIQRSDGYNFNYGAAIPPGTKVPGFLVLTR

SEQ ID NO: 12877 - protein, 413 aa, unidentified
  REGION 1..413: note = Human gut metagenome
MTNYAFVLDANNKQLTPTKEQKAWFLIRKKRATLVSKYPMVIQLKKKIPDKEICKDEVRCGIDDGGLHVGVALVQKCQTRNKVVFKGVIEQRNDVKHLIDVRCGYRRYHRYHKRYRSARFNNRNSSKREERIAPSILQKRQATIRVINQLNKWINITNYWLEDVAIDIRALTDGYKPYRWQYQKSNRLDENIRKAVILRDGCKCMECGKSNCRLEVHHIKPRRLKGSSTLDKLITLCTKCHQKTESVEELYMDRYFALLNSSDNKNLNYAQHVMIGKKWLREQLSNLGMLYLTNGGDTANKRIDWDIAKSHSNDAICITDLRPDTCEIKEWAIKPMRRQSKAKTDNVLGIKHRDLVEYTFRNGETHRGYVTALYPEQNAINFQSPTKHCKKVNAKKCKVLWKYSKIYWLDNVG

SEQ ID NO: 12878 - protein, 456 aa, unidentified
  REGION 1..456: note = Human metagenome
MSTCVCVLSNSGERLMPTIRLGKVRRLLKDGKAKIVKHHPFTIQLLYDSKTNTQPIEICEDVGYNYIGISVKSESHEYVSAQYDTLQDEKACHDSCRKLRRTRRNRLRYRKPRFDNRKRGEGWLAPSLEHKKQLNIRLIERYVSVIPITHATVEVGSFDTMLLQAIQKGKSKPEGVDYQKGPRYNLATLREAVFYRDNYTCQVCGRKIADGAILHMHHMFYWKGRHGYQLDELVTACEKCHTPANHQKGGKLFGFGEDKEFANLSGAAFMNAVRWQIVDALHATYGKEFVTITYGAMTKEKRIILGIEKTHNNDAYAMGDYHPVHRCVFRHYQKRRRNNRVLEKFYDATYIDTRTGNKAKGKELFNGRISRNHKKNSEDLHKYRSKKVSKGRRSIRRQRYAIQPYDTVRLESKTYITSGCHNKGTRLLIPANGKSKSVAISKVQVVCHAGAWIQII

SEQ ID NO: 12879 - protein, 532 aa, Nocardiopsis sp.; identical to SEQ ID NO: 4278

SEQ ID NO: 12880 - protein, 455 aa, unidentified
  REGION 1..455: note = Human gut metagenome
VPRTDKTPSNIGEGFQPVARPRSQILRVFVLNKRGQPLMPCSPAKARLLLKEKKAIVKRRTPFTIQLTIATGEAKQPVALGVDSGYKHIGLSATTEKAELYASEVELRQDITDLLSARLALRRSRRSRKTRYRAPRFDNRVASKRKGWLAPSVENRIAAHMSRVEAVMRVLPVTAITVETAAFDTQLLKNPDIAEAAYQQGEQLGFWNVREYVLFRDGHVCQHCRGKSKDPILNVHHIESRRTGGDAPNNLITLCETCHKAFHRGEIKLKVKRGKSFKAETFMGIMRWTLFERLKKAHPELRVRNTYGYLTKHKRISHGIAKSHCADAYCIADNLGAKRLEGFFFQKQTRKHNRQIHKLSILKGGLRKKNQAPYEVKGFRLFDKVICKGEEAFIFGRRTSGSFDVRRLDGTRISAGINYKKLRLLEPRTTYLTEFKKEAALPPLHECRGFCAEFL

SEQ ID NO: 12881 - protein, 406 aa, unidentified; identical to SEQ ID NO: 2752
  REGION 1..406: note = Human gut metagenome

SEQ ID NO: 12882 - protein, 425 aa, unidentified; identical to SEQ ID NO: 6912
  REGION 1..425: note = Microcoleaceae bacterium UBA10368

SEQ ID NO: 12883 - protein, 465 aa, unidentified; identical to SEQ ID NO: 3856
  REGION 1..465: note = Human gut metagenome

SEQ ID NO: 12884 - protein, 413 aa, unidentified; identical to SEQ ID NO: 7099
  REGION 1..413: note = Human gut metagenome

SEQ ID NO: 12885 - protein, 442 aa, Lactobacillus sp.; identical to SEQ ID NO: 5571

SEQ ID NO: 12886 - protein, 493 aa, unidentified; identical to SEQ ID NO: 2644
  REGION 1..493: note = Human gut metagenome

SEQ ID NO: 12887 - protein, 430 aa, unidentified; identical to SEQ ID NO: 4504
  REGION 1..430: note = Human gut metagenome

SEQ ID NO: 12888 - protein, 427 aa, Moorena sp.; identical to SEQ ID NO: 7268

SEQ ID NO: 12889 - protein, 421 aa, unidentified; identical to SEQ ID NO: 2846
  REGION 1..421: note = Human gut metagenome

SEQ ID NO: 12890 - protein, 411 aa, unidentified; identical to SEQ ID NO: 3762
  REGION 1..411: note = Human gut metagenome

SEQ ID NO: 12891 - protein, 442 aa, unidentified; identical to SEQ ID NO: 2834
  REGION 1..442: note = Human gut metagenome

SEQ ID NO: 12892 - protein, 465 aa, unidentified
  REGION 1..465: note = Human gut metagenome
MSTCVCVLSNNGERLMPTIRLGKVRHLLKDGKAKIIKHHPFIIQLLYDSETNIQPIEICEDVGYNYIGISVKSQSHEYVSAQYDTLQDEKSCHDACRRMRRTRRNRLRYRQKRFDNRKRDKGWLAPSLKHKKELNVNVIKMYCEVVPITHATVEVGSFDTMLVKAIEEGKATPEGADYQKGPRYNLATLREAVFYRDNYTCQVCGREASEGAILHVHHMFYWKGRHDNSLSELITVCEKCHTPANHQKGGKLYGFGEDIKFANLSGAAFMNTVRWQIVNELYAAFGKPFVTFTYGAMTKEKRIALHLEKSHNNDAYAMGEFHPNCRCTFEHYEKVRRNNRLLEKFYDSRYIDIRTGEIATGKELFNGRINRSHKKDSENLHKYRGKRIRKGYRALRRKKVALNPGDLVSLNGEILTVHGTHTKKNGSVNVEFKTPSKSGKKSTSLKKLKIIKTISPMRSAWDKVS

SEQ ID NO: 12893 - protein, 442 aa, unidentified; identical to SEQ ID NO: 7655
  REGION 1..442: note = Human gut metagenome

SEQ ID NO: 12894 - protein, 451 aa, unidentified
  REGION 1..451: note = Human gut metagenome
MSVAVISKTGERLMPTSEYRARKLLKSGKAIKYSYHPFTIQLTERKTGNIQPIELCMDTGYIHIGISVKSEKHEYLAEQIDTLTDERIRHDACRMYRRQRRGRKRYRKPRFNNRKRDKGWIAPSLKHKKDIHVQAISRINKVMPLTDITMEMGNFDTQVLKAKEEGKPLPQGACYQHGERYGTATLREAVFSRDGYKCQCCGRTIRDGAMLHVHHVKYRSQGGTNSMANLATVCDKCHTPKNHKPGGKLYNWKPKLPDFKGATFMTTIRWQLYNEVKSLFPDINVHITYGAATKEQRRELNIDKSHVNDAFAMGKFHPKHRANAVLYKKKRRNNRCLEKFYDAKYIDSRDGSKKTGQELFNGRINRNHKKDSENLHQYRLQKIKAGKRTIRKQHYSIQPHDIIMYKNRKRETSGCHCNGTRVVLLPDKKTAAIQKVKIYKYAGGYFKSAFN

SEQ ID NO: 12895 - protein, 429 aa, Petrotoga sp.; identical to SEQ ID NO: 5336

SEQ ID NO: 12896 - protein, 501 aa, Moorena sp.; identical to SEQ ID NO: 9337

SEQ ID NO: 12897 - protein, 466 aa, unidentified
  REGION 1..466: note = Human gut metagenome
LSIKPLINIGEGVIYSSICTGLLLQTYQKRKKVPCMVYVLDINGQPLMPTTRHGKVRRLLNSHLAKVVKRCPFTIQLLYQSTKEIQPVSLGVDAGSKHIGMAATTEKKVVYQEELSPRNDVVKLLSLRRASRSSRRSRKTRYRKPKFNNRVHSKHKGWLAPSVEVKIQEHITAIKRICQILPISEIQVETAEFDFQRLKAMKEWKPLPVGTDYQLGEQYDFYNTRQYVLHRDGYTCQCCGTHDNNIKLHVHHIESRQTGGDAPSNLITLCEHCHKALHKGKLELPKGKKRGKTYRDATFMGIMRKTLLERLRKEVDVPVSGTYGYITKYLREKTDLEKSHINDAICISKYPYAKPLDTYYLTKVVRNHNRQIHKSNFSKGGIRKRNQAPYLIKGFRLFDKVLYQGKEYFIFGRRATGYFDIRTLDGTKVNKGSISYKKLRIQDTAKAYLKEARAIPHMNKFTCVLA

SEQ ID NO: 12898 - protein, 438 aa, unidentified
  REGION 1..438: note = Human gut metagenome
MPTSEYRARKLLKSGKAIKYSYHPFTIQLTERKTGNIQPIELCMDTGYIHIGISVKSEKHEYLTEQIDTLTDERSRHNARRMYRSQRRNRKRYRQPRFNNRKKDKGWIAPSLEHKKNIHVQAISRINNVMPLTDITMEMGNFDTQVLKAKEEGRPLPQGVDYQHGERYSIATLREAVFARDGYKCQCCGRTIKDGAILHVHHIKYRSQGGTNSISNLATVCDKCHTPKNHKPGGKLYGWKPKLPSFKGATFMTTIRWQLYNEAKALFPDIDIHITYGAATKERRRELNIDKSHINDAFVMGQFHPRHRIKAVLYKKKRRNNRCLEKFYDAKYIDSRDGKKRSGQELFNGRINRNHKKDSENLHQYRLQKVTAGKRTVRKQHYSVQPHDIIIYESRKRETTGCHCNGARVMLLPDKKSVSIKKIKIYRYASGYFKSTFN

SEQ ID NO: 12899 - protein, 442 aa, unidentified; identical to SEQ ID NO: 3234
  REGION 1..442: note = Human gut metagenome

SEQ ID NO: 12900 - protein, 416 aa, unidentified; identical to SEQ ID NO: 7823
  REGION 1..416: note = Lachnospiraceae bacterium

SEQ ID NO: 12901 - protein, 413 aa, unidentified; identical to SEQ ID NO: 11236
  REGION 1..413: note = metagenome

SEQ ID NO: 12902 - protein, 425 aa, Ktedonobacter sp.; identical to SEQ ID NO: 6721

SEQ ID NO: 12903 - protein, 411 aa, unidentified; identical to SEQ ID NO: 2867
  REGION 1..411: note = Human gut metagenome

SEQ ID NO: 12904 - protein, 472 aa, unidentified; identical to SEQ ID NO: 4432
  REGION 1..472: note = Human gut metagenome

SEQ ID NO: 12905 - protein, 465 aa, unidentified
  REGION 1..465: note = Human gut metagenome
MSTCVCVLSNSGERLMPTIRLGKVRHLLKDGKAKIVKHHPFTIQLLYDSKTNTQPIEICEDVGYNYIGISVKSQSHEYVSAQYDTLQDEKACHDSCRKLRRTRRNRLRYRKPRFDNRKRGEGWLAPSLEHKKQLNIRLIERYVSVIPITHATVEVGSFDTMLVKAIEEGKATPESADYQKGPRYNLATLREAVFYRDNYICKVCGRKATEGAILHMHHMFYWKGRHGNSLSELITVCEKCHTPANHQKSGKLYGFGENVKFADLSGAAFMNTVRWQIVNELYAAFGKDFVTVTYGAMTKEKRIALHLEKSHNNDAYAMGSFHPVNRCAFEHYEKVKRNNRILEKFYDSQYIDTRTGELTNGKSLFNGRISRSHKKDSENLHKYRGKRICKGHRALRRKKLALNPGDLVSLNGEILVVHGTHTKKNGSVNVEFKTPSRGGKKSASLKKLKIVKTSNLMHSAWTKVS

SEQ ID NO: 12906 - protein, 450 aa, Clostridium sp.; identical to SEQ ID NO: 10358

SEQ ID NO: 12907 - protein, 414 aa, unidentified
  REGION 1..414: note = Human gut metagenome
MPCSPAKARLLLKEKKAIVKRRTPFTIQLTIATGETKQPVSLGVDTGYKHVGLSASTEKAELYASEVELRQDITDLLSARRALRQSRRNRKTRYRAPRFDNRIRTKRKGWLAPSVENRIDAHLSRIEAVLRLLPVTKITVETASFDLQLLKNPDISGKEYQEGEQLGFWNIREYVLCRDGHVCQHCYGRSKDPVLNVHHLKSRRMGGDSPGNLITLCETCHKALHRGEITLKVKRGQSFRAEAFMRIMRWEVLNRLKASHPELEVNNTYGYRTKHARIANDIAKSHCADAFCIAGNLGAERLGEFFFQKQTRRNNRQIHKLSILKGGIRKRNQAPFEVNGFRLFDKVACQGEEGFIFGRRSTGYFDVRKLDGTCISAGISYKKLHLLEKRRTYLTEIRKEEALPPLPEGRGLRA

SEQ ID NO: 12908 - protein, 404 aa, unidentified
  REGION 1..404: note = Human gut metagenome
RRCRRQRRAKANGTISKKCVKQTTAQNGSASKRAKEIGVIKRHLPGCEKDVLCIGIKNKEAKFSNRTRPEGWLTPTTNQLLKTHINLVKKIRKFLPISDVVLEINKFAFMRLDNPNIQKWQYQQGPLYQKASLEEAVSEMQEHHCLFCKQSIVHYHHVVPQSENGSDTIGNIVGLCTKHHDLVHKDTAWQKKLAKKKTGLNKKYGALSVLNQIIPALTKELSSLFPKHFFATNGKSTYDYRAAHGVSKDHWLDAYCIACSVLADDVCDNNINSHVPYELKQFRRHDRRALHKENMSRVYTLDGKKVATNRHKAIKQTTDSLEEFRQRQPNDVCKLKVKEHHPEYRNPERNFPGCVFLVGKHTHVMQGTSGSHNGKADGYYDTNGNSYPSGKCKFVAKNKGIVFA

SEQ ID NO: 12909 - protein, 420 aa, unidentified; identical to SEQ ID NO: 10196
  REGION 1..420: note = Human gut metagenome

SEQ ID NO: 12910 - protein, 465 aa, unidentified
  REGION 1..465: note = Human gut metagenome
MSTCACVLSKNGERLMPTIRLGKVRHLLKDGKAKIIKHHPFTIQLLYDSETNIQPIEICEDVGYNYIGISVKSQSHEYVSAQYDTLQDEKACHDSCRKLRRSRRNRLRYRKPRFDNRKRGEGWLAPSLRHKKELNVNVVKMYCAVMPITHATVEVGSFDTMLVKAIEEGKATPESADYQKGPRYNLATLREAVFYRDNYVCKVCGRKATEGAILHVHHMFYWKGRHDNSLSELITVCEKCHTPANHQKGGKLYGFGEDIKFANLSGAAFMNTVRWQIVNELYAAFGKPFVTFTYGAMTKEKRIALHLEKSHNNDAYAMGSFHPVNRCAFEHYEKVKRNNRILEKFYDSQYIDTRTGELTNGKSLFNGRISRSHKKDSENLHKYRGKRIRKGYRALRRKKVALNPGDLVSLNGEILTVHGTHTKKNGSVNVEFKTPSRGGKKSASLKKLKIVKTSNLMHSAWTKVS

SEQ ID NO: 12911 - protein, 417 aa, unidentified
  REGION 1..417: note = metagenome
MPCSPAKARLLLKERKAIVKRRTPFTIQLTIATGEAKQPVTLGVDSGYKHIGLSATTEKAELYASEVELRQDITDLLSARLALRRSRRSRKTRYRAPRFDNRVASKREGWLAPSVENRIAAHMSRVEAVMRVLPVTAITVETAAFDTQLLKNPDITGAAYQQGEQLGFWNVREYVLFRDGHVCQHCRGKSKDPILNVHHIESRRTGGDAPNNLITLCETCHKAFHRGEIKLKVRRGKSFKAETFMGIMRRTLFERLKKAHPELNVRNTYGYLTKHKRISHGIAKSHCADAYCIADNLGAKRLEGFFFQKQTRKHNRQIHKLSILKGGLRKKNQAPYELKGFRLFDKVICKGEEAFIFGRRTSGSFDVRRLDGTRISAGINYKQLRLLEPRTTYLTEFRKEAALPPLHECRGFRAEFL

SEQ ID NO: 12912 - protein, 442 aa, Lactobacillus sp.
MKHENANRVFLLNKDGKPLMPCRPRKARLLLTSGKAFVVKKYPFTIQLKYGSYGYKQKVSLGVDTGQRHIGFAIVSQNKVLHQSEVELRQDVHKNLYTRKIYRRSKRNRKTRYRQARFLNRVHGKRDGLWLPPSIKGKVSHNIAWIKRYLAVLPNPDLHIEVGKFDMAKMVNPEISGKQYQEGSLKDWKNYEYYVLARDEYTCQLCHKHGEGVKLVVHHIVYRSQGGTDRVDNLITLCTNCHTTKNHQPGGKLYKWMKAKKKVIKQLKGATFMNILRKRIMTAFPEASFQYGSQTYVDRKNLLLPKGHFMDAIAISGIKSVGQLSDTVTMISQFRKKKRSLHEATARKGRKQPNTSSKRNEKNTKHARGLWLNDYVRVIGNHAKGYVKGFKSNGYYVYLTDGLGNYVLNNGKNYINGQQCRLIMHNVNWQKAEQKLSLYKFK

SEQ ID NO: 12913 - protein, 414 aa, unidentified; identical to SEQ ID NO: 7107
  REGION 1..414: note = Human gut metagenome

SEQ ID NO: 12914 - protein, 494 aa, unidentified; identical to SEQ ID NO: 5675
  REGION 1..494: note = Human gut metagenome

SEQ ID NO: 12915 - protein, 413 aa, unidentified
  REGION 1..413: note = Lachnospiraceae bacterium
MTNYAFVLDANGKQLAPTKEQKAWFLIRKKRAALVSKYPMVIQLKKEISDGQICKDEICCGIDDGGLYVGLALVQQCKTKNKVVFKGTIEQRNDVKHLIEVRKGYRNYHRFHKRYRQARFNNRKSSKQKERIAPSILQKRQATIRVIKQLNKWINIANYLLEDVAIDIRALTDGYKPYRWQYQQSNRLDENIRKAVILRDGCKCMECGKSNCRLEVHHIKPRRLNGSNTLGNLISLCEKCHQRTEGQEELYMDRYFSILSSTDNKNLDYAQHVMIGKKWLREQLSELGTLILTTGGDTANKRIDWNIEKSHANDAICITDLQPDACNVKEWTIKPMRRQSKAKTDNVLGIKHRDLVEYTFKNGETHRGYVTALYPKQNAINFQSPTKHCKKVNAKKCKLIWKYSKIYWLDNVL

SEQ ID NO: 12916 - protein, 317 aa, Lamprocystis sp.
MAVFVLDRRGKPLMPCSEKRARLLLTRGRARVHRVVPLQNPQISGVAYQQGTLAGYEVREYLLEQWGRRCAYCTGDGVPLEIDHITPRSRGGSDRVTNLTLACHPCNQAKGNRSAAEFGHPEIEAKAKQSLGDAAAVNSTRWSLLNALTATGLAVETGTGGRTKWNRTRLGVPKTHALDAACVGVVEGVTGWVAPVLLIRCTGRGAYQRTRVTQDGFPRGYLMRHKQVRGFQTGDLVRATVPSGKKAGIHMGRVAVRATGRFNIQTPQGVVQGIGYRHCCVIQRGDGYGYAQLGATALPSPAIRSRPEGRGFSRRNG

SEQ ID NO: 12917 - protein, 459 aa, Petrotoga sp.
MSKVFVLDTKKRPLLPCHPAKARILLKQGRAAIYKRYPFTIILKQEIANPEVQPLRLKIDPGSKVTGLAVVNDATGEVIFAGELHHRGEQIKAKLATRRTLRRARRNRKKRHRAPRFLNRKKKDGWLPPSLQSRIANVLTWVNRIRRYCPIQSITVELVKFDLQRIENPGIQGIEYQQGTLYGYKIREYLLEKYDHQCAYCRGKSGDSVLEVEHVVPKKPRHGPAGTNRVNNLVIACETCNKSKGNLRPEEWLNYLQASTNSLDQERAKNLLQVLQQLEQPLKDATVVNTIRWILFKRLKELELPLEASSGGRTKYNRVQMGLPKAHWIDAACTGASTPEHINIDKVVVLEIKATGHGRRQRCRTDKYGFPIQHAPRAKTYLGYQTGDIVKAIIPKGKYAGIHIGRIAIRHKPSFKLIRFDVHPKYLRLLQKADGYEYMLREGSNASSPGVNSGAPGVA

SEQ ID NO: 12918 - protein, 418 aa, Moorena sp.; identical to SEQ ID NO: 11905

SEQ ID NO: 12919 - protein, 557 aa, unidentified; identical to SEQ ID NO: 5771
  REGION 1..557: note = Human gut metagenome

SEQ ID NO: 12920 - protein, 496 aa, unidentified; identical to SEQ ID NO: 2063
  REGION 1..496: note = metagenome

SEQ ID NO: 12921 - protein, 512 aa, unidentified; identical to SEQ ID NO: 4350
  REGION 1..512: note = Human gut metagenome

SEQ ID NO: 12922 - protein, 418 aa, Moorena sp.; identical to SEQ ID NO: 10459

SEQ ID NO: 12923 - protein, 427 aa, Moorena sp.; identical to SEQ ID NO: 9943

SEQ ID NO: 12924 - protein, 431 aa, unidentified
  REGION 1..431: note = Human gut metagenome
MPNKVYVINKHGRPLMPCSPAKARHLLDDGKAKVKKRTPFTIQLVYGSSGYTQEVILGVDAGSKTIGVSALTKKEELFAANVIPRNDVVDLLSTRREFRRARRNCKTRYRKPRFDNRVRSKHKGWLAPSVEVKIQEHITTIRRVYGILPVSKVVVETAEFDLQLLKAIADGKPVPQGEDYQKGEMYGHYNVRQYVLWRDDYTCQCCGAHATKKKEVRLHVHHLESRKVGGDAPDNQVTLCESCHEKLHKGLIAEKDFKKRKRRSTRDATFMGIMRKTLMQRLYSELPIPVIETRGYITKATREKLLVLPKSHTNDALAIAQGKRGFNVGYLPEIAQIDKIYTIRPVRHHNRQLHKAAILKGGIRKSNQAGKYVFGYRLFDKVQFNGQDCFIWGRRTTGIFTIKTINGKMIKDGISFKKLKPVEKSTSYLIA

SEQ ID NO: 12925 - protein, 515 aa, unidentified
  REGION 1..515: note = Human gut metagenome
MEYLDFTLVVDKNDKPCVPISNGRAGYLLRNNKAKIINHDPLVIKRIDDYQSDFENRDIFELKIDSGYLNIGFSVSDNYHEYLAGQVELLKGMSDRLTNRNGYRRTRRSRIRYRKNKNIDYKTIHNPTYKNGNEEGWFAPSIQHKIDSHIRLIDKIASWIPVDKVIVEVAKFDIQMIKALADGKEISGKDYQNGEMKGYENAAAYVRDRDKHTCRLCGANKNVVIEVHHIQPRSKGGTDKPSNLISLCHSCHRKVHSNNNDNKYFEKVKSMKLSDTYKDSTYMNMVRWELFERLSGKYDVKVGYGYQTKINRRNTGLRKFHYTDAVCINDYKDVTLTENIYIVDQKRCNDRSMETFSDAKYIDVRDGKEKSGNTLYKERLPNAPSKRVTQKEYINNMRQFRGKKIKPGKRTFVCNSYCLKCGDLIYINSGKHKGNIAEVESMQKLPNGNFKIRFTYKAQTVKYPSINIKQEEYELLKSNLLDKVKIVRTRRGMIWRKYNRLEYEATHTDQEGMAV

SEQ ID NO: 12926 - protein, 442 aa, unidentified; identical to SEQ ID NO: 4533
  REGION 1..442: note = Human gut metagenome

SEQ ID NO: 12927 - protein, 420 aa, unidentified
  REGION 1..420: note = Human gut metagenome
MQYVYVLNKHGNPLMPCSPRKARLLLKQKKACVIRRTPFTVKLLYGSTGYKQPVTLGVDAGSKHIGISATTEKHELYREEATPRNDVVDLLSARRAFRRSRRNRKTRYRAPRFDNRVHSKHKGWFAPSVEVKIQEHITLIEHVCRILPVTLVRVETAEFDTQRLKAMLEGKPLPVGTDYQLGEMYDEYNVRQYVLKRDNYTCQCCGAHSTKTKGVKLHVHHIETRRTGGNAPNNLITLCTACHKALHAGKVTLDGKKRGKPLKDAAFMGIMRKTLMERLRKELKIPVQGTYGYITKCLREKNGIPKSHTNDARCISKNPLAIPCDTCYYTKAVRHHNRQLHKATILKGGIRKANQAPYIVKGYRLWDKVSCNGTECFITGRRTSGYFALKKLDGTVVSNSISYKKLRLLEAATNYITERK

SEQ ID NO: 12928 - protein, 502 aa, Eubacterium hallii; identical to SEQ ID NO: 6776

SEQ ID NO: 12929 - protein, 417 aa, unidentified
  REGION 1..417: note = Human gut metagenome
MPCSPAKARLLLKEKKAIVKRRTPFTIQLTIATGEAKQPVTLGVDSGYKHIGLSATTEKVELYASQVELRQDITDLLSARLALRRSRRSRKTRYRAPRFDNRVASKRKGRLAPSVENRIAAHMSRVEAVMRVLPVTAITVETAVFDTQLLKTPDIAGAAYQQGEQLGFWNVREYVLFRDGHVCQHCRGKSKDPILNVHHIESRRTGGDAPNNLITLCETCHKAFHRGEIKLKVRRGKSFKAETFMGIMRWTLLERLKKAHPELRVRNTYGYLTKHKRISHGIAKSHCADAYCIADNLGAKRLEGFFFQKQTRKHNRQIHKLSILKGGLRKKNQAPYEVKGFRLFDKVICKGEEAFIFGRRTSGSFDVRRLDGTRISAGINYKKLRLLEPRTTYLTEFKKEAALPPLHKCRGLRAEFL

SEQ ID NO: 12930 - protein, 442 aa, Lactobacillus sp.; identical to SEQ ID NO: 5571

SEQ ID NO: 12931 - protein, 414 aa, unidentified
  REGION 1..414: note = Human gut metagenome
MVYVINKQGQALMPTERFGKVRRLLKNSLAHVVCRIPFTIQLDYDTTDYTQPVSLGVDAGSKHIGISATTSEKELYAADVELRNDIVDKLSTRRELRRTRRSRLRYRKARFNNRVSSKRKGWLAPSIENKIQTHLTVVEKIHKFLPITNIVVETASFDIQKINNPSISGSEYQQGEQLDFFNVREYVLFRDNHTCQHCKGKNKDKVLNVHHIESRKAGGDSPNNLITLCETCHKAYHRGEFELNVKRGKSFRDSAFMGIMRWSFYDRLKNIYPNVSMTFGYITKNTRTTNNLPKEHYVDARCISGNPVAKPLGYYFYQKKVRCQNRQIHKANFLKGGRKKLNQAPFLVKGFRLFDLVEYQKELYYIFGRRSSGSFDIRKLGGTKVNKGSINCKYLRLIATRKSILTEKRMQVNL

SEQ ID NO: 12932 - protein, 418 aa, unidentified
  REGION 1..418: note = Human gut metagenome
MVYVTNRQGKALMPTDRHGKVRRLLKGGLAHVVRRIPFTIQLDYDTTEITQPITLGIDAGSKFIGVCATTDKKELYAANVELRNDIVDKLSTRREKRRTRRSRLRYRKARFNNRVSSKHKGWMAPSVENKIQTHIIVVRNAYRILPISRIVVETASFDIQKIKNPNVEGEDYQNGEQMGFWNIREYVLWRDGHTCHHCHGKSGDKILNVHHLESRKTGGNSPSNLITLCETCHKAYHRGEFELKVKHGASFRDAAFMGIMRWAFFERLKQMYPNVSMTYGYITKNTRIDNGLPKEHYVDARCISGNPQAKPLGYYFYQKKVRCQNRQIHKANILKGGKKKLNQAPFMVKGFRLFDLVEYQKELFYVFARRKSGYFDIRRLDGSKANKGSVNCKKLRLVEIRRTLLTERRNSSSIPPRG

SEQ ID NO: 12933 - protein, 413 aa, unidentified; identical to SEQ ID NO: 10403
  REGION 1..413: note = Human gut metagenome

SEQ ID NO: 12934 - protein, 310 aa, unidentified
  REGION 1..310: note = Human gut metagenome
TKRKGWLAPSVENRINAHLSRIEAVLRLLPITKITVETASFDMQRLKNPDISGKEYQEGEQLGFWNVREYVLFRDGHVCRHCHGRSKDPVLNVHHLESRRTGSDSPDNLITLCETCHKALHRGEITLKAKRGQSFRAQAFMGIMRREVLNRLKASYPELKVHETYGYLTKHARIANGIVKSHGADAFCIAGNLGAERLGEFFFQKQTRRNNRQIHKLSILKGGIRKRNQAPFEAKGFRLFDKVACQGEEGFIFVRRSSGSFDVRKLDGTRISAGISCKKLRLLEKRRTYLTEIRKEEALPPLPEGRGLRA

SEQ ID NO: 12935 - protein, 451 aa, unidentified
  REGION 1..451: note = Human gut metagenome
VTTILKTCFAAFNLAKVVVLMDAWDIIVVLNKRGKPLMPCSPAKARLLLKEKKAIVVRRTPFTIQLTIATGETKQPVSLGVDAGYKHVGLSASTEKAELYASEVELRQDITDLLSARRALRQSRRNRKTRYRAPRFDNRIRTKRKGWLALSLENRINAHLSRIEAVLRLLPVTKITVETASFDLQLLKNPDISGKEYQEGEQLGFWNIREYVLCRDGHVCQHCYGRSKDPVLNVHHLESRRTGGDSPGNLITLCETCHKALHRGEITLKAKRGQSFRAEAFMGIMRSEVLNRLKASHPELEVNNTYGYRTKHARIANDIAKSHCADAFCIAGNLGAERLGEFFFQKQTRRNNRQIHKLSILKGGIRKRNQAPFEVKGFRLFDKVACQGEEGFIFGRRSSGFFDVRKLDGTRISAGISCKKLHLLEKRRTYLTEIRKEEALPPLPEGRGLRA

SEQ ID NO: 12936 - protein, 427 aa, Parasutterella sp.; identical to SEQ ID NO: 4733

SEQ ID NO: 12937 - protein, 462 aa, Moorena sp.; identical to SEQ ID NO: 4520

SEQ ID NO: 12938 - protein, 496 aa, Moorena sp.
MIRVYVINKNGNPLMPCKPAKARHLLRDGKAKVVKRKPFTIQLLWDCEKNVQEIRCGIDKGCKVTGIACVGNGEILYSASIKHRNPVAVQQKNGCKTFVQVRAERRRSRRNRHRWYRKPRFDNRASSKRSGKLPPTIKMNVMEVVRGVRKIDLPISHITVEDVAVDIRRLSNPDVQGSEYQQSNRLDENLRLACLIRDDFTCQKCSRSLSRLHRGSPTTSSYGKKQRPESRDSRGKREAKLQAHHVVWTSKGGKDSIYNLITLCENCHDKVHKTGESGKVQLKRNKVVTGMSGFSDKITQRTMQGKTLMYQELKKIAPLSCVFGYQTSAFRKALDLPKEHWIDAVCLTCLQTGEVVVSLDNSNHYDIWFRAKQTRRIFNTQPSKGGEIKQWQKYLGLASNGKDCILIDKRDKTFVLPLGYTLYKKGDVISIVGEVANTFPTEIASINGKGKGFYYWKYQSDDSRKYASVSHTKVKLIEYAKTINYVHVSNAAFIPS

SEQ ID NO: 12939 - protein, 420 aa, unidentified
  REGION 1..420: note = Human gut metagenome
MQYVYVLNKHGEPLMPCSPRKARLLLKQKKACVVKRTPFTIKLLYGSTGYKQPITLGVDAGSKHIGISAATEKYELYCEEATPRNDVVDLLSARRAFRRSRRNRKTRYRAPRFNNRVHSKHEGWLAPSVEVKIREHITLIKRVCRILPVTLVRVETAEFDTQRLKAMLEGKPLPVGTDYQLGEMYDEYNVRQYVLKRDNYTCQCCGAHPTKAKAVKLHVHHIETRRTGGNAPNNLITLCTACHKALHAGKVTLDGKKRGRSLKDAAFMGVMRKTLMERLLKELKIPVQGTYGYITKYLREKHSIPKSHTNDARCISKNPLAIPCDTCYYTKAIRHHNRQLHKATILKGGIRKANQAPYTVKGYRLWDKVSYNGSECFITGRRTSGYFALKKLDGTVVSNSASYKKMRLLEVATNYITERR

SEQ ID NO: 12940 - protein, 477 aa, Blautia sp.; identical to SEQ ID NO: 2707

SEQ ID NO: 12941 - protein, 443 aa, unidentified; identical to SEQ ID NO: 5962
  REGION 1..443: note = Human gut metagenome

SEQ ID NO: 12942 - protein, 515 aa, unidentified
  REGION 1..515: note = Human gut metagenome
MIPNERRHLMPYIYVIGMDGKPQMPTKRRRHVQKLLDTGKARITERVPFTIQLLYDNDPVLQPVILAEDPGRTNIGLAALDLKGNLLLSAAVETRNKEIAKLMEKRRQCRRASRNGERKARQRLAKKYGTMIRGGMRMRKLPQYAADAFIICKVIRNTQARFCNRRRLDGWLTPSARHLVQTHINLVHKVQKYLPVTDVAIEVNRFAFMQLEDPAICGVDFQTGPLKGYDDRDAAVYDLQDGKCLMCKHEITQYHHIVPRSRNGSNTIGNIAGLCDQCHDRVHKDADFAEQMKEKKEGMDKKYGALSVLNQAIPFICKQLETEFGRGHVHYCTGRETSLVRQSTGYQKTRKNQLHEVDAWCIGALALAEIPENVPDFKEIHLIRQFRRQDRSLVNAQTERVYKLGGKMVAKNRKKRTGQEIYALEDWYNRQVETYGKQEADCMRSRLKITKSRRRYNNPNRMMPGAVFLYEGVRYVMRGQHSKGAYLQAVGMENRDFPVRKCKILTRNTGLVFVS

SEQ ID NO: 12943 - protein, 510 aa, Streptomyces sp.
VLPQRQALEPTAADNPGSRGETGCGRTAFSGSAAGMEHGRGETVRMSPPSVRRHPDIAADAAVEGVQAARKGGIGGADQAATGAQMVAVLDRHGHPLMPCHPARARALLAKGRAVVVKSTPFAIRLKDRVLEDSEVVGVAVRIDPGPKGTGIAVTTDNTHADPVSGEVTTDRHGLYAMELRHRGEQIRNSMRRRANHRRRRRTENLRYRAPRFDNRSRPAVFPVTELHVERVSFGTHALSLGREDLESWEYQQGTFVGYEVREYLLEKWGRTCAYCGIKNVPLHVEHIHPRARGGSSRISNLTLACKACNQVKAARPVKEFLADRPARLAHLLSHAKAPLADAAAMNATRWQLWQRLKSLGIPIHAWSGGRTKYNRIMQGIAKSHTLDALAVGEIADAGRIVRYPEDMLVTLACGRGSHARTRTDKHGFPRLYLPRQKKHHGFATGDLVQARIPRGKYQGKYTGRVTVRATGIHRVPVPGGYADTSHSNLRLLQRGDGYAYTTRKEEARP

SEQ ID NO: 12944 - protein, 460 aa, unidentified; identical to SEQ ID NO: 7594
  REGION 1..460: note = Human gut metagenome

SEQ ID NO: 12945 - protein, 346 aa, unidentified
  REGION 1..346: note = Human gut metagenome
LYSQSKIAQSAQEYGVCRGGIENRRSRRNRKTRYRPPRFDNRVHSKHKGWLAPSVEVKIQEHITVIKRICRILPITLVRVETAEFDTQRLKAMLEGKPLPVGTDYQLGEMYDEYNVRQYVLKRDNYTCQCCGAHTTAKKAVKLHVHHLESRKMGGNAPGNLITLCITCHDALHKGKVSLDNKKRGKPMRDAAFMGIMRRTLMSRLREELPITVQGTYGYITKMQREQNDIKKSHVNDARCISKHPLAEPCSVCYRTKAIRHHNRQTHKANFSKGGIRKRSQMPYVVEGYRLWDKVLYKGQECFVSGRRTSGSFTLKKLDGTRISKGVTFKKMRLLEPATNYLIERM

SEQ ID NO: 12946 - protein, 429 aa, Moorena sp.
MQKVFVLDVKKMPLMPCHPARARELLNKGRAAVYKRYPFTIILKDRVGGDVQPVELKFDPGSKTTGIALVGHFERGLEIVFGANLNHRGQKIKQDLESRRANRRGRRNRKTRYRPSRFNNRCRSEGWLPPSLMSRVFNVETWAERLQSLIPITSIAVETVRFDTQKMLNSKVSGVEYQQGELAGYEVREYLLEKWGRKCAYCGAENIPLEIEHIQPKSKGGSNRISNLTIACVRCNQKKGNKSIENFLKRKPIILKRIKAQTKKSLKDTAAVNATRYAIGNALKTFDLPVTFWSGGRTKFNRTQQKYTKDHWIDAACVGETGAKVYIPNTLKPLTITAVGHGSRQMCRVDQYGFPRTTAKKQKVVKGFQTGDIVKAVVTKGKKIGTYIGRVAIRASGSFNISTKNGTTQGISWKYCQRIQAVDGYNYFT

SEQ ID NO: 12947 - protein, 309 aa, Moorena sp.; identical to SEQ ID NO: 11513

SEQ ID NO: 12948 - protein, 515 aa, unidentified
  REGION 1..515: note = Human gut metagenome
VAYMSTVYVLNKNGKPLMPTTRCGRVRHLLKEQKARVVTSNPFTIQLLYETDDVVQPLYLGIDPGRTNIGVAVVKTDGTAVFTAHLETRNKEIPKLMQGRKKARRARRTNGRRCRRQRRAKANDTISKKCVKQDTAQSGSASKRAKKIGVIKRHLPGCEKGVLCIGIKNKEAKFSNRTRPEGWLTPTANQLLQTHINLVKKIRKFLPISDVVLEINKFAFMQLDNPNIQKWQYQQGPLYQKASLEEAVSEMQEHHCLFCKKPIAHYHHVVSQSENGSDTIGNIIGLCTKHHDLVHKDTAWQKKLAKKKTGLNKKYGALSVLNQIIPALTKGLGSRFQGYFYVTTGKSTYDYREVHGVSKDHWLDAYCIACSVLPNDVYDSDINNRVPYELKQFRRHDRRALHKANINRVYTLNGKSVATNRHKAIKQTTDSLEEFRQCQPDDVCKLKVKEHHPEYRNHERNFPGCVFLVGKHTHVMQGTSGSHNGQADGYYDTNGNSYSSGKCKFVAKNKGIVFA

SEQ ID NO: 12949 - protein, 431 aa, unidentified; identical to SEQ ID NO: 3801
  REGION 1..431: note = Human gut metagenome

SEQ ID NO: 12950 - protein, 437 aa, Clostridium sp.; identical to SEQ ID NO: 9645

SEQ ID NO: 12951 - protein, 408 aa, unidentified; identical to SEQ ID NO: 3192
  REGION 1..408: note = Human gut metagenome

SEQ ID NO: 12952 - protein, 415 aa, Bacillus sp.; identical to SEQ ID NO: 6255

SEQ ID NO: 12953 - protein, 396 aa, unidentified; identical to SEQ ID NO: 4508
  REGION 1..396: note = Human gut metagenome

SEQ ID NO: 12954 - protein, 448 aa, Clostridium sp.; identical to SEQ ID NO: 8899

SEQ ID NO: 12955 - protein, 414 aa, unidentified
  REGION 1..414: note = Human gut metagenome
MPCSPAKARLLLKEKKAIVKRRTPFTIQLTIATGETKQPVSLGVDAGYKHVGLSASTEKAELYASEVELRQDITDLLSARRALRQSRRNRKTRYRAPRFNNRLCTKRKGWLAPSVENRINAHLSRIEAVLRLLPVTKITVETASFDLQLLKNPDISGKEYQEGEQLGFWNIREYVLCRDGHVCQHCYGRSKDPVLNVHHLKSRRMGGDSPGNLITLCETCHKALHRGEITLKAKRGQSFRAEAFMGIMRSEVLNRLKASHPELEVNNTYGYRTKHARIANDIAKSHCADAFCIAGNLGAERLGEFFFQKQTRRNNRQIHKLSILKGGIRKRNQAPFEVNGFRLFDKVACQGEEGFIFGRRSSGFFDVRKLDGTRISAGISYKKLHLLEKRRTYLTEIRKEEALPPLPEGRGLRA

SEQ ID NO: 12956 - protein, 420 aa, unidentified; identical to SEQ ID NO: 6067
  REGION 1..420: note = Human gut metagenome

SEQ ID NO: 12957 - protein, 413 aa, unidentified; identical to SEQ ID NO: 2636
  REGION 1..413: note = Human gut metagenome

SEQ ID NO: 12958 - protein, 413 aa, unidentified; identical to SEQ ID NO: 5705
  REGION 1..413: note = Human gut metagenome

SEQ ID NO: 12959 - protein, 442 aa, unidentified; identical to SEQ ID NO: 3218
  REGION 1..442: note = Human gut metagenome

SEQ ID NO: 12960 - protein, 442 aa, unidentified; identical to SEQ ID NO: 3161
  REGION 1..442: note = Human gut metagenome

SEQ ID NO: 12961 - protein, 423 aa, Moorena sp.; identical to SEQ ID NO: 11977

SEQ ID NO: 12962 - protein, 482 aa, unidentified
  REGION 1..482: note = Human gut metagenome
LVGNVQAPWDVYPSPTLCGLCLKVLRGRNGDADKKPIPTLTKDENRPSGRTTGLRAEQAEPAGIRKGDTLKVFVLNMRSKPLMPCSPAKARHMLKAGKAVVVRRTPFTIKLTIATGETKQDVTLGVDAGARHVGISATTEKEEVFASEVALRQDITGLLADRLAFRRARRNRKTRYRAPRFNNRVRSKHKGWLAPSVENRIQAHISRIEAVCRLLPVTKIVIETASFDIQKIRNPEVEGTGYQQGDQLGFWNVREYVLFRDGHICQHCRGRSKDPILNVHHLESRKTGGDAPNNLITLCETCHKAYHAGKIKLKVKRGQSFRAEAFMGIMRWTLLDRVRKTHPKLPVENTYGYLTKHKRIALGLPKTHCADAFCIAGNLKALRRGDFLFQQQTRKHNRQIHKCSILKGGVRKLNQAPFLVKGFRLFDKVRIGGQIGFVFGRRVRGTFNIRRLDKTVIGTDINCKKLSLLETRKTFLTELRKE

SEQ ID NO: 12963 - protein, 279 aa, unidentified
  REGION 1..279: note = Human gut metagenome
VVVETAEFDLQLLKAIADGKPVPQGEDYQKGEMYGHYNVRQYVLWRDDYTCQCCGAHATKKKEVRLHVHHLESRKVGGDAPDNQVTLCESCHEKLHKGLIAEKDFKKRKRRSTRDATFMGIMRKTLMQRLCSELPIPVVKTRGYITKATREKLLVLPKSHTNDALAIAQGKQGFNVGYLPGIVQIDKICTIRPVRHHNRQLHKATILKGGIRKSNQTEKYVFGYRLFDKVQFNGQDCFIWGRRTTGIFTIKTINGKMIKDGISFKKLKLVEKSTSYLIA

SEQ ID NO: 12964 - protein, 493 aa, unidentified; identical to SEQ ID NO: 9964
  REGION 1..493: note = Human gut metagenome

SEQ ID NO: 12965 - protein, 415 aa, unidentified
  REGION 1..415: note = Human gut metagenome
MENKIEYCFVIDKNNKPLTPTKVNKGWYLIRKGRAKLKSKYPMVIQLEKEVKSDEYDESHMVCGIDDGSTHVGLAIVQKCLTKNKVVFKGTIEQRQDVKRLMDVRRGYRRYHRYHKRYRQARFNNRSSSKRTCRLAPSIKQKKDSILRVLYQLNKWVNIQEYYLEDVCIDIRAMTDDYKPYRWQYQKSNRLDENLRKATILRDGCRCQECGKSNCILEVHHIRARRYGGANTIGNLITLCKKCHDKTESREKDFEERYFNMIKSKPKRFDYAMHVMQGKTYLREKISELGILHLTNGGETANKRIEWNIVKSHSNDAICIADGIPDTCDIKEWIIKPMRRKSKAKTDNVLGIKHRDLVSYTYKSGETHTGYVTALYPEQLALNFQSKTKHCKKVNARKCRLLWKFNKIYWLEQCV

SEQ ID NO: 12966 - protein, 423 aa, unidentified
  REGION 1..423: note = Human gut metagenome
VWNKRRKPLMPCSPAKARHLLKEKKAAVVRRTPFTIQLTIATGESKQPVTLGVDAGYKHVGLSASTEKAELYASEVELRQDVSDLLSARRALRQSRRNRKTRYRAPRFDNRIRTKRKSWLAPSVENRINAHLSRIEAVLRLLPVTKITVETASFDMQLLKNPDISGKEYQEGEQLGFWNVREYVLFRDGHVCQHCHGRSKDPVLNVHHLESRRTGGDSPGNLITLCETCHKALHRSEITLKTKRGQSFRAEAYMGLMRWEVLNRLKTSHPGLEVHNTYGYRTKYTRIVNGIDKSHCADAFCIAGNLGAERLGEFFFQKQTRRNNRQIHKLSILKGDIRKRNQAPFEVNGFRLFDKVACKGEEGFIFGRQSSGFFEVRKLDGTCISAGISYKKLHLLEKRRTYLTEIRKEEALPPLPEGSGLRA

SEQ ID NO: 12967 - protein, 458 aa, Scytonema sp.
MMMTNSVFVLSKNGKILKPTTPVRARILQAQRKAKKLKLFPFTLILESMVDENVEPYLELRIDPGSRYTGMSLVDLKKNEVVWAMELEHRGLAIKMELINRSGVRRSRRSRRLRYRKKRFDRKKPLGWLAPSLRHRLLTTQTWIKRLLKVAPIKSIAIESVKFDLQKLETPEIEGIEYQQGTLWGYTLREALLEHWGRECVYCGKTDVPLQMEHINPRSKGGSDRFSNLTLSCEKCNQKKGNKPVEQFLKNKGEILQKIKANQKKSLSDAAAVNSTRKAIFEMAQQFGLPVISGDGASTKMIRIKSGLPKQHWIDSACVGTLEIVKLRVCQPLRVTCTGHGTRQIQRVNAKGFPAIASVKKNPLTGKKEVKLVSKNQKYTHATAGDYVICNLVKDRKLVRSGIYRARVKTPTPKGVEVLISTRRIAVARHYVKLIHRADGYEYSFTTIDQDLLRFRAI

SEQ ID NO: 12968 - protein, 446 aa, Pseudomonas sp.
VAVYVLDKTGTPLMPCSEKRARLLLERGRARIHRQVPFVIRLVDRRQADSALQSLTLKFDPGSKFTGIALVRQKGQRVSVLSLMELAHRGAAIRQAMQQRAAFRRRRRGQNLRHRAPRFDNRTRPEGWLPPSLRHRLDTTLGWVGRMRNWAPISDLAVERVKFDMQAIQNPEISGVQYQQGELAGYEVREYLLEKWGRCCAYCDAENTPLEIEHIVPRSAGGSDRVPNLTLACRPCNQRKGNQPVEVFLKARPELLARIKAKAKAPLRDAAAVNATRNALFRGLLDTGLSVTTGTGAQTKYNRRRLDLPKTHALDAACVGEIRAIEHWHRPTLAIKATGRGDYQRTRLTTHGFPRGYLTRQKRHFGFQTGDQVRAEVPTGKKAGTHLGRVAVRKTGSFNIQTSDGVVQGVHHRHFTLIQRADGYAYSHIQTDSPQSQKEAARAEVR

SEQ ID NO: 12969 - protein, 477 aa, unidentified
  REGION 1..477: note = Human gut metagenome
MIIALDKYKRPLGFLTERRCRILMERKRAVLYRVFPTVVILMDVDARTIPGLPSFRIKIDPGSKYTGIAIIRNDTDEFVYAMQIEHRGDAVRAALNKRKNARRNRRSRETGYRRAKWGNRCLSEKDKRSYDSSREDGWPPPSIRSAADNVISWVRRLGRWINLTECSFEAVRFDTQLMEDPDIEGEEYQHGTLFGLEIKEYLMEKFGHTCQYCGGKSGDPVLEWEHMRPKSRGGSDRVKNALLSCSSCNKDKGNRTPEEWLELIKARLPREKGKRKELDEERVELIQKVIDGKPQGGALRYAAWVSSSRRYLEKALFGIFGNVECSSGGRTKYNRTELGYPKEHHYDALCVGTVPEKGYHDRTNGYYLYAKAAGRGTRLRGHLNKCGMIVTKWTDRKNGFFGFQTGDIVVAEVPHKTPKPYKYEGRFVGRVMVRATGSFDIKTTDGKLVTVKEQYCRLLQANSGYQYTMKRAIPLGH

SEQ ID NO: 12970 - protein, 415 aa, Bacillus sp.; identical to SEQ ID NO: 2431

SEQ ID NO: 12971 - protein, 421 aa, unidentified
  REGION 1..421: note = Human gut metagenome
MQYVYVLNKHGEPLMPCSPGKARLLLKQQKACVVKRTPFTIKLLYGSAGYKQPVALGIDAGSKHVGLSASTEKRELYREEFTPRNDVVELLSTRRQNRRSRRNRKTRYRAPRFDNRVHSKHKGWLAPSVEVKIQEHITVIKRICRILPITLVRVETAEFDTQRLKAMLKGKPLPVGTDYQLGEMYDEYNVRQYVLKRDNYTCQCCGAHPTEKKPIRLHVHHIESRHVGGNAPNNLITLCVACHKALHEGKITLDKGKKRGKPLRDAAFMGIMRNTLLARLKDELNIPVKQTYGYITKLLREKNKIPKSHVNDARCIAKAPNAKPCDTMLYTRALRHHNRQIHKAKILKGGIRKKNQAPYLVKGFRLWDKVRYNGEECFITGRRSSGYFALKKYDGTVISNSASYKKLMLLEAATNYITERS

SEQ ID NO: 12972 - protein, 512 aa, unidentified; identical to SEQ ID NO: 5549
  REGION 1..512: note = Human gut metagenome

SEQ ID NO: 12973 - protein, 512 aa, unidentified
  REGION 1..512: note = Human gut metagenome
MSTVYVLNKDGKPLMPTTRGGHVRYLLKEKKARVVTSKPFTIQLLYETDDVVQPLYLGIDPGRTNIGVAVVKTDGTAVFTAHLETRNKEIPKLMQGRKKARRARRTNGRRCRRQRRAKANGTISKKCVKQTTAQNGSVSKRAKKICVIKRHLPGCEKKVLCIGIKNKEAKFSNRTRPEGWLTPTANQLLQTHINLVKKIQKFLPISDVVLEINKFAFMQLDNPNIQKWQYQQGPLYQKASLEEAVSEMQEHHCLFCKKPIAHYHHVVPQSENGSNTIGNIVGLCTKHHDLVHKDATWQKKLAKKKTGLNKKYGALSILNQIIPALTKELSSLFPKHFFATNGKSTYDYRAAHGVSKDHWLDAYCIACSVLANDVCDSNINSHVPYELKQFRRHDRRALHKENMSRVYTLDGKKVATNRHKAIKQTTDSLEEFRQRQPNDVYKLKVKEHHPEYRNPKRNFPGCVFLVGKHTHVMQGTSGSHNGKADGYYDTNGNSYSSGKCKFVAKNKGIVFA

SEQ ID NO: 12974 - protein, 413 aa, unidentified; identical to SEQ ID NO: 2636
  REGION 1..413: note = Human gut metagenome

SEQ ID NO: 12975 - protein, 470 aa, Blautia sp.; identical to SEQ ID NO: 2925

SEQ ID NO: 12976 - protein, 295 aa, unidentified
  REGION 1..295: note = Human gut metagenome
HMTAIRRACAILPVSKVVVETAEFDLQLLKAVAEGKPVPQGEDYQKGEMYGHYNVRQYVLWRDSYTCRICGMHGSVRKGVPLHVHHLESRRVGGDAPDNLVTLCTACHDKLHKGIIMVADIKKRKRRSTRDTTFMGIMRMTLLRRLWEQLPVPVVETRGYITKATRENLLVLPKSHTNDALAIAHGPQGFRAEYLPNIRQADRLYTIRPVRHHNRQLHKATILKGGVRKANQAEKYICGFRLYDKVLYNGIECFVWGRRTSGSFLLRQLNGEKVKDGVSYKHLKLLERSQSYLVA

SEQ ID NO: 12977 - protein, 427 aa, Enterococcus sp.; identical to SEQ ID NO: 5630

SEQ ID NO: 12978 - protein, 509 aa, unidentified; identical to SEQ ID NO: 4834
  REGION 1..509: note = Human gut metagenome

SEQ ID NO: 12979 - protein, 427 aa, Parasutterella sp.; identical to SEQ ID NO: 4733

SEQ ID NO: 12980 - protein, 417 aa, unidentified
  REGION 1..417: note = Human metagenome
MVYVLSIDKQPLMPIRRHGKVRRLLKEGKARVVRREPFTIQLLFETDNNVSHLVLKIDTGSKYIGAGVTNDNACVYYASEVEIRNDIHTKMVRRGMYRRARRSRKLRYRKVRFLNRRNSIKKDRFSPTMVSKYDSHQREIEFVKSILPIADLVFETGTFDTNLLNHAGEAFNRHWGYQKGPNYGYKNAQEACFNRDNYTCQCCKTKRGTLNAHHIIYRSKGGADTLDNLITLCVDCHKKLHRGELKEFELTISGKRRGNLKHATQMNSIRVQLLKHYPNAIETFGFVTKANREWLGLEKSHWMDAVSMGLNKKPTFLIDRIYKKKHVSKGQYQLYRGKNSNKKQPRGKVCGFLNRDIVKYRGQLYLIKGLISPCYCVFSDINGVEQKFKKPKTVKLSSIKRVSARSTTRCISQKIIY

SEQ ID NO: 12981 - protein, 427 aa, Parasutterella sp.
LRVLVWNKRGKPLMPCSPAKARLLLKEKKAIVVRRTPFTIQLTIATGEAKQPVSLGVDAGYKHVGLSASTEKAELYASEIELRQDITDLLSARRELRRARRNRKTRYRAPRFDNRIHTKRKGWLAPSVENRINAHLSRIEAVLRLLPVTKITVETASFDMQLLKNPDISGKEYQEGEQLGFWNVREYVLFRDGHVCQHCHGRSKDPVLNVHHLESRRTGGDSPGNLITLCETCHKALHRGEITLKAKRGQSFRAEAFMGIMRWEVLNRLKASHPELEVNNTYGYRTKHARISNGIAKSHCADAFCIAGYLGAKRLGKFFFQKQTRRNNRQIHKLSILKHGLRKRNQAPFEIKGFRLFDKVASKGEEGFIFGRRSSGYFDVRKLDGTRISAGISYKKLHLLEKRQTYITEIRKEKALPPLPEGRGLRA

SEQ ID NO: 12982 - protein, 430 aa, unidentified; identical to SEQ ID NO: 4504
  REGION 1..430: note = Human gut metagenome

SEQ ID NO: 12983 - protein, 408 aa, unidentified; identical to SEQ ID NO: 9683
  REGION 1..408: note = Human gut metagenome

SEQ ID NO: 12984 - protein, 426 aa, unidentified
  REGION 1..426: note = Human oral metagenome
MLVYVLKQDGQPFMPTERFGKVRRLLKEGKAKVVCREPFTIRLLYEPETDVVQECYCGVDTGSKYIGVAVIGNDKVLYQSQTELRDIKKKMDRRRAFRQNRRSRKTRYRKPRFLNRRNSIKKDRLPPSVRHKVQAHIDEIESCKKILPVSDLILEVSQFDTALMKNPSLINEKIRHWGYQKGFNYGYSSRQKAVLHRDNYICQCCGKKNCRLEVHHIKFRRDGGTDDEENLITLCEDCHKGVHAGTVELNKKPKKSKNLKYATHMSIIRSKLLKKYPDAIETFGFVTSENRNHLKLEKDHYIDACVVASGGLEFKELDVVYRKRRVPVQDRILIKCTRCKMMKSAGKINGLNRYDKVQYLGEVCFIKGRRAKGSVVLMDIDNNMLDFRGMGGCANPSYKTIKRLQARKSVLCISKAIRRDDDLTLC

SEQ ID NO: 12985 - protein, 426 aa, unidentified
  REGION 1..426: note = Human gut metagenome
MVYVQDIDGKPMMPTTRYGKVRRLLKNKKAVVVNLCPFTIRLTYVTSDYKQEIVLGVDAGTKHVGLSATTKSKELYSSEVILRNDIVDLLSTRRELRRARRNRLRYRKPRFNNRIKSKRPGWIAPSVKYKIDAHIRVVENVCSILPISRIVIEVAQFDTQKIKNPNISGKEYQEGDQLGFWNTREYVLARDGHKCQYCKGKSKDKILNVHHIESRKTGGDSPSNLITLCETCHKEYHKGNIDLKIKRGKSLRDAAVMGIMKWRLYEEIKSKYDRVSMTFGYVTKYNRINHGFEKSHVSDAFVISKNFNAIRLGYYYKVRLVRRHNRQIHKQKIQKGGIKRLNQSPFEVFGFRLFDRVMFENSYYFIFGRRKTGSFDIRYIDGKNQKNVTYKKLKLSRCKRFMIQMELNKKTRTCFENERNSDRDAA

SEQ ID NO: 12986 - protein, 419 aa, unidentified
  REGION 1..419: note = Human gut metagenome
MVYVISKDGKPLMPCSNVIARLLLKQGKAKVKRREPFTIKLLGETTEYKQNLTLGVDTGSGTFAAAVSMDNGDIVYMSEVTVRNDITKKMLLRAAYRRNRRNRKTRYRKARFLNRRNSIRKGRFSPTMQSKLQSHVKEIEYIKSILPITKTVIETGKFDTHRLKNPDITRWGYQKGPNYGFENTKAMVLNRDGYICQHCKGKRKDSRLEVHHIVYRSQGGSDEAENLITLCHTCHTELHHRKINLKQNGKVKGILKYATQMNSIIKQLLEKYPAAIETFGYVTKANRIMLEVSKEHYNDACTIASQGNAFQIKSNLYKKKCIPKGDFQQTKGACSQQPIITDKILGFRKFDKVRYLGESYFVKGRMSTGYAVLMDIDGKKADFSAMAKGFKTPKMKNLKRLAARSAWMVTTEEATQNIA

SEQ ID NO: 12987 - protein, 431 aa, unidentified; identical to SEQ ID NO: 8901
  REGION 1..431: note = gut metagenome

SEQ ID NO: 12988 - protein, 449 aa, Thiorhodospira sp.
MAVFVLDKKQQPLMPCSEKRARLLLQRNRAVVVRLHPFTIRLKDRIGGTAQPLRLQLDPGSKTTGLALVREVENIDPDTGEVRSEAVVLWLGELTHRGAAIRDALTARRAIRRNRRNRKTRYRAPRFLNRAKPKGWLPPSLRHRLETTLSWVKRLQRLAPLTCIRQELVRFDTQAMQTPEISGVEYQQGELAGYELREYLLEKWHRTCAYCGAKDVPLEIEHIIPRSKGGSDRVSNLTLACTHCNQQKGNQDIDVYLKDRPSVLRRIQTHVKTPLQDAAAVNATRWALFNHLKATGLPVTTGSGGRTKYNRRRLEIPKTHALDAACVGEIDALHGWNRPALAIKATGRGSYQRTLLSRFGFPRGYLTRQKRIKGFQTGDRVIAQVATGKKAGTHSGRVAVRASGSFNIQTAHGVVQGISHRHCRVVQRADGYGYTFQPQPKTEEARRAA

SEQ ID NO: 12989 - protein, 451 aa, unidentified
  REGION 1..451: note = Human gut metagenome
MSVAVISKTGERLMPTSEYRARKLLKSGKAIKHSYHPFTIQLTEREAGDIQPIELCMDTGYIHIGISVKSEKHEYLAEQIDTLTDERSKHDACRMYRRQRRNRKRYRQPRFNNRKKDKGWIAPSLEHKKKIHIQAISRISRVMPVTDITMEMGNFDTQILKSKEEGRPLPHGADYQHGERYGIATLREAVFSRDSYKCQCCGRTIKDGAILHIHHIKYRSQGGTNSMSNLATVCDKCHTPKNHKPGGKLYNWKPKLSSFKGATFMTAIRWQLYNEVKALFPDIDIHITYGAATKERRRELDIDKSHVNDAFVMGQFHPKHRIKAVLYKKKRRNNRCLEKFYDAKYIDSRDGKKRSGQELFNGRINRNHKKDSENLHQYRLQKVTAGKRAVRKQHYKIQPHDIVIYESRKRETAGCHCNGTRVMLLPDKKSISVKKVKIYKYAGGYFKSAFN

SEQ ID NO: 12990 - protein, 427 aa, Moorena sp.
MVYVVSQSGKALMPTSRYGKVRHLLREGKARVVRREPFTIQLLYDSKEYTQPVTLGVDAGTGHVGLSATTEKAELFAAEVTLRRDIQELMSTRRAARRTRRFRKTRYRAPRFDNRRRPDGWLAPSVEQAVQSHLSLIRKVHSFLPIAKTVIEVAQFDTQLLKNPDIQGEQYQQGEQLEFWNVREYVIFRDGHTCQHCHGKSKDKVLNVHHIESRQTGGNAPNNLITLCETCHKAYHRGEIKLKIKRGVSLRDAALMSIMRWTVYNWAKEEFGNVRLTYGYITKNIRIRHGLDKSHAVDARCISGHPLAKPSETLWQMRQIRRHNRQLYKANTLKGGIRKKNQAPRLVKGFRLFDKIRYNGIDCFVFGRRSSGSFDIRKFDGSKVNAGISYKKLTFKSISKSFLINQFKRLAAIPPTNKFVGSLADLP

SEQ ID NO: 12991 - protein, 506 aa, unidentified
  REGION 1..506: note = Human gut metagenome
MVAVLSNVGKPMMPTTEYKARKLIEKGRAIPYQYKPMFTIMILDRSGGYTQPIELKEDTGYEHIGISVCSQKHEYERKEIITLLDEPEKHHDARMHRRTRRNRLGYRPPRFDNRKRENGWIPPSLQHKIDIHLYWFNQYAEVLPITDAVFEIGTFDTQRLNAIEKGEKLPYGEDYQKGEQANFYTLRDAVFARDDYTCVVCGKGIQDGAVLRTHHVGYRHGDRSNRMSNLVTVCDHCHTTKNHQEGGALYNLKSPTKKKANAAFMNVARQRIIDCAKKSHPEINISCAFGSETKMSRKNLQIEKSHTNDAYAMGEFHPKHRCNEKIFQKVRRNNRILSRFYDAKYIDRRDGLTKTGKQLSSGRTNRNHKLDSENFRVYRGKKIQKGRTATRQQVYEFKTKDIVLYQGKRYVVKGTNNKGQNVQLYLNMTADLKDLTIKTKNKRKTADPNRIEVGDKVFTEFNGKKKVFTVKNIDPTTNQVSLQADLSTKPSELKLVKYSNGYKQIK

SEQ ID NO: 12992 - protein, 413 aa, unidentified; identical to SEQ ID NO: 5215
  REGION 1..413: note = Human gut metagenome

SEQ ID NO: 12993 - protein, 427 aa, Enterococcus sp.; identical to SEQ ID NO: 5630

SEQ ID NO: 12994 - protein, 424 aa, unidentified; identical to SEQ ID NO: 3351
  REGION 1..424: note = Human gut metagenome

SEQ ID NO: 12995 - protein, 431 aa, Lyngbya sp.; identical to SEQ ID NO: 10800

SEQ ID NO: 12996 - protein, 413 aa, unidentified; identical to SEQ ID NO: 3621
  REGION 1..413: note = Human gut metagenome

SEQ ID NO: 12997 - protein, 431 aa, unidentified; identical to SEQ ID NO: 2746
  REGION 1..431: note = Human gut metagenome

SEQ ID NO: 12998 - protein, 473 aa, unidentified; identical to SEQ ID NO: 3562
  REGION 1..473: note = uncultured beta proteobacterium

SEQ ID NO: 12999 - protein, 512 aa, unidentified; identical to SEQ ID NO: 4350
  REGION 1..512: note = Human gut metagenome

SEQ ID NO: 13000 - protein, 448 aa, unidentified
  REGION 1..448: note = Human gut metagenome
MSTGLRAVQAEPAGIRKGDALKVFVLNMRGRPLMPCSPAKARHLLKAGKAAVRRRTPFTIQLRIATGETKQSVTLGVDAGAKHVGLSAATEKEEVFASEVELRQDITGLLAARLSLRRERRQRKTRYRAPRFLNRVRSKHKGWLAPSVENRIQAHMSRIDAICGLLPVTKIVIETASFDIQKIKHPDVEGTNYQQGDQLGFWNVREYVLFRDGHVCQHCHGHAKDKILNVHHLESRQTGGDAPNNLITLCETCHKAYHAGKIKLKVKRGQSFRAEAFMGIMRWTLLDRVRKAHPGLPVENTYGYLTKNTRITLGLPKAHCVDAYCIAGNLKAVRRGVCLHQRQVRKHNRQIHKCTVLSKTLKDGTKIGYRKLNQTPHLVKNFRLFDKVRCLGQTGFIFGRRSSGYFDVRRLDGVKISSCISYRKLTLLEKRSTCLTELRKEDGAFSPV

SEQ ID NO: 13001 - protein, 335 aa, Moorena sp.
MNVYVLNKNGKPLMPCKPAKSRKLLRSGKAQVVNRCPFTIKLSWNYEENVQEITVGLDKGSHLTGFSCVAKGQILMSGEIHHRTDIKDKMDARRANRRNRRSRKWYRKKRFNNRASSRRSGRLPPSIKANIEEVIRVVCRIPLPISQIIVEDVQVDIARLNNPNLIGKAYQESDRLDENLRIATLMRDGYQCTQCEKKKSGSRSNRAKPQLDAHHIIWKEDGGKDTIENLITLCKECHRKAHKGKLKLSVSGVSGFKDRIAQRTMQGKSYLYQVLSKMSALSKIFGYQTSFLRKSLSLPKAHDIDALCVAILYTGEVIPHHRENFYRKPKASVYS

SEQ ID NO: 13002 - protein, 512 aa, Halomonas sp.
MLAQGKTPKVLIAADSSIVGRSRLSTFPRGDWAQAPRYQTRKGSILGGNRMAVFVLDKQKQPLMPCSEKRARLLLERGRAVVHKRYPFTLRLKDRVGGDTQPLRLSIDPGSKTTGLALMREADGAEPDDQQRHVLCLFDLVHRGFQIRKALEQRRGFRRRRRSKNLRYRAPRFDNRTRKAGWLPPSLQHRVDTVMAWMERLSRLAPITAISQELVRFDTQRMENPEISGVEYQQGTLLGYEVREYLLEKWGRECAYCGATETHLEIEHVVPSSSGGSDRVSNLTIACHDCNQAKDSLPLATFFASDKGLKKRLKANGLSADARLERVQRELKRPLRDASAVNATRWALFNALNATGLPVAVGTGGRTKFNRERLDIPKTHALDAACVGAFDMLHDWRVPTLTIKCTGRGSYQRTRLTKHGFSRGYLMRQKQVHGFQTGDMVKAIVPTGKKAGTHTGRVAVRKTGSFNIQTDHGAVQGILHKHCTVIQRGDGYGYHLTPTIHQLKGGAGQAVA

SEQ ID NO: 13003 - protein, 490 aa, unidentified
  REGION 1..490: note = Human oral metagenome
MYVVYVLDRQGKPLMPTKRFGHVRRMLKTGKAKAISTKPFVIQLQYASTDFVQPLYGGTDPGRTNIGEAVLNNKGEVVYAAHLVTRNKEIPKLMADRAAHRRASRRGERLRRKRRAKANGTMTCFPEGRKLPGYKDGVLKLKGIINTESRFNNRKRPAGWLTPTARQCIQTHLNMVRNICKILPVTDWTLEYNRFAFMQLEDGSVRGWDFQNGRLKGYASKEDYIYALQGGVCACCGTPIEHYHHIKPRHKGGSNTPENLVGLCSVCHAEIHTGKRSLDRIGKHKEYAGASIVNIAIPFIWDGIARMFGDKAHICEGQETAELRRANNIPKEHFADAVCIASIGSGITPQYDNNQPFELRQFRCHDRSRINAQVERTYMDGKTIVAKNRKPRFEQKWDALFDLQSKMTKEHGELAARRAVSKLVAKKSYRRYNASERIKPSAVFIFNNKKYLLRGQLTNGMYYRAFGEGTKNFPSRNCEVVSSRCSLTYM

SEQ ID NO: 13004 - protein, 414 aa, unidentified
  REGION 1..414: note = Human gut metagenome
MPCSPAKARLLLKEKKAIVVRRTPFTIQLTIATGEAKQPVSLGVDAGYKHVGLSASTEKAELYASEVELRQDITDLLSARRALRQSRRNRKTRYRAPRFDNRIRTKRKGWLAPSVENRINAHLSRIEAVLRLLPVTKITVETASFDMQLLKNPDISGKEYQEGDQLGFWNVREYVLFRDGHVCQHCHGISKDPVLNVHHLESRRTGGNSPGNLITLCETCHEALHRGEIALKTKRGHSFRAEAFMGMMRWEVLNRLKASHPELEVNNTYGYRTKHARIANDIAKSHCADAFCIAGNLGAERLCEFFFQKQTRRNNRQIHKLSILKGGIRKRNQAPFEIKGFRLFDKVACKGEEGFIFGRRSSGYFDVRKLDGTRISAGISCKKLHLLEKRRTYLTEIRKEEALLALPEGRSLRT

SEQ ID NO: 13005 - protein, 442 aa, Sutterella wadsworthensis; identical to SEQ ID NO: 2834

SEQ ID NO: 13006 - protein, 427 aa, unidentified
  REGION 1..427: note = Wastewater metagenome
MSNKPNYAFVLDTNRKPLAPCKPSVARKLLNAGKAKVFRLYPFTIILNKEVSDTPKPLTLKIDPGSKTSGLAILSGCNLLWVAELTHRGQTIKASLDSRRSLRRSRRNRHTRYRQPRFMNRTRPKGWLAPSLQHRVETTLTWVNKLSKFAPISTIYQELVRFDLQQIENPEITGVEYQQGVLLGYEVREYLLNKWGRKCAYCGVENTLLQVEHIHPKAKGGTNRISNLCLACEPCNIKKGTQDIQVFLKKKPEVLKRVLAQAKRPLKDAVAVNLTRWALFSRLKETGLEVNTGSGGLTKFNRTRLCLPKTHFFDAACVGNTPELLVLASQPLSIKATGHGSRQMCRTDKFGFPSRYVPQFKFVKGFQTGDIVKAIVTSGKKNGTYVGRVAVRSTGSFNISAKQGLIQGISHKYCQQIHQKDGYGYGF

SEQ ID NO: 13007 - protein, 413 aa, Blautia sp.; identical to SEQ ID NO: 3476

SEQ ID NO: 13008 - protein, 415 aa, unidentified
  REGION 1..415: note = Human gut metagenome
MIYVRSKEGKALMPSERGGRIGYLLRHGKAHVVSRVPFVVQLDYESTAYTQEVSLGIDAGSKHIGVSASSEKRELLAAQVELRSDVVNLLSTRKELRRARRNRKTRYRKVRFDNRKKEDGWLAPSIEQKVESHLKVIRLVHKLLPITETTIEVAQFDAQKIKNPDIKGDEYQQGEQMGFWNVREYVLARDGHKCVHCKGKSKDPILNVHHLESRKTGGNSPSNLVTLCETCHKAYHRGEFDLKIKRGNSLRDAAVMNIMRWAVYERAKAEFGNVHLTYGYITKHTRIENGIAKTHAADAFCIAKNVHAMRLSSFFMCRCVPRHTRALHVVNPKKGGIRRSTIASHKIGKSRFQRFDMVRWKGEECFIFGSTKGRPVLRDIEGIKMHDKQAVNIKTIKFLKRLRNDILVEEKTSES

SEQ ID NO: 13009 - protein, 424 aa, unidentified
  REGION 1..424: note = Human gut metagenome
MVYVISKDGNPLMSCCNVIARLLLKQGKAQVKKREPFTIKLNYETTNYLQNLTLGVDTGSRTIGTAVSNDNGDILYMSEVVVRNDITEKMTQRAKYRRNRRNRKTRYRKARWLNRANSIKNDRFSPTMRSKLYSHVKEIECIKSILPITQMVFETGQFDTHLMKNPSLANPRIRRWGYQKGPNYGYENTKAMVLNRDNYTCQCCKGKHKDSKLEIHHIVFRSKGGSDEASNLITLCHTCHKDLHSGKINPKLKGRIKGNLKFATQMNTIRKQLFRLYPNAIETFGYITKANRLQLGVNKEHYYDACTIATQGNRFTIKSNLYKKKCISDGDFQQTKGICSKQPIVTNKIHGFRKFDKVRYLGKNYFIKGRMSTGYAVLMDINGKKADFSNMPKGFKTPKMANFKRIEARTTWMTTTVVLTSNIA

SEQ ID NO: 13010 - protein, 431 aa, unidentified; identical to SEQ ID NO: 3235
  REGION 1..431: note = Human gut metagenome

SEQ ID NO: 13011 - protein, 414 aa, unidentified; identical to SEQ ID NO: 2588
  REGION 1..414: note = Human gut metagenome

SEQ ID NO: 13012 - protein, 442 aa, unidentified; identical to SEQ ID NO: 2903
  REGION 1..442: note = Human gut metagenome

SEQ ID NO: 13013 - protein, 464 aa, Moorena sp.; identical to SEQ ID NO: 10255

SEQ ID NO: 13014 - protein, 409 aa, unidentified
  REGION 1..409: note = Ga0315284_10028622
MLVYILNKDGMPLMPCSPKVARNLLRDDKAKAVQRTPFTIQLLYGSSGYKQYIILGVDTGSKVIGLSATTNRKEVFSAEVQLRTDIVRNIANKKQFRRVRRSRKTRYRQARFLNRRKPIGWLAPSIRQKIDTHLTIIDRVHGLLPITNIIVEVAAFDIQKIKDPNISGTEYQEGEQLDFSNTREYILYRDNHTCQHCNGKSKDKILNVHHIESRKTGGDSPGNLVTLCKTCHDAYHTGNVDLNIRRGSSYRDATFMGIMRRILYNKLLVLYPNVSMTYGYITKNTRIVNNLPKEHRSDALCITGNPDIIRDNMWYFYRKVRCQNRKIHMMTINKGGTRKLCQSPYIIHGFRLFDKVRYDSTDYFIFARRLSGSFNISLLDGVTLSRDIIYKKLTLLERRNTILIERNYR

SEQ ID NO: 13015 - protein, 470 aa, unidentified; identical to SEQ ID NO: 2949
  REGION 1..470: note = Human gut metagenome

SEQ ID NO: 13016 - protein, 465 aa, unidentified; identical to SEQ ID NO: 6446
  REGION 1..465: note = gut metagenome

SEQ ID NO: 13017 - protein, 431 aa, unidentified; identical to SEQ ID NO: 7057
  REGION 1..431: note = metagenome

SEQ ID NO: 13018 - protein, 375 aa, unidentified
  REGION 1..375: note = Human gut metagenome
LRPMVKSSERQERCCRLETPSNIGEGSQPGERPRRQNLRVVVLNKRGKPLMPCSPAKARLLLKERNAIVVRRTPFTVQLTIATGETKQLVSLGVDAGYKHVGLSASTEKAELYASEIELRQDITDLLSARRELRRARRNRKTRYRGPRFDNRIRTKRKEWFAPSVENRINAHLSRIEKVLRLLPVTTITVETASFDTQLLKNPDISGKEYQEGEQLGFWNIREYVLCRDGHVCQHCYGRSKDPVLNVHHLESRRTGGDSPGNLITLCETCHKALHRGEITLKAKRGQSFRAEAFMGIMRWEVLDRLKASHPELEVQNTYGYRTKHVRIANGIAKSHCADAFCIGGNLGAERLGEFFFQKQTRRNNRQIHKLSILK

SEQ ID NO: 13019 - protein, 406 aa, unidentified; identical to SEQ ID NO: 2752
  REGION 1..406: note = Human gut metagenome

SEQ ID NO: 13020 - protein, 463 aa, Moorena sp.
MAVFVLDRSGSSLMPCTEKRARLLLERGRARVHKMLPFTIRVVDLETEECEFQALRVKLDPGSKTTGMALVRETAENGVAVINLFELMHRGKQISEALTARRGHRKVRRSHLRYRAPRFLNRGNQKPGWLAPSLLHRVNTTLAWVSRIRRYAPVSAISTELVRFDMQALENPEIEGAQYQQGTLAGYEVREYLLEKWHRTCAYCGAKNVPLQIEHIHPKSKSGSDRISNLTLACQCCNAKKAALPVEVFLAKQPERLKRIQAQAKRPLKDAAAVNATRWALVNVLKATGLTVETASGGRTKFNRMALGIPKTHALDAACVGDVNSMTGWHKPTLCLKAMGRGSYQRTRLDKYGCVRGYLTRSKSIQGFQTGDMVKAEVTQGKKTGSYTGRVAVSASGSFNIQTRDGLVQGVSHRYCTVVQRSDGYGYQLVAKTDATGTPPKQGDASHPALYLPGLKAGVSRAN

SEQ ID NO: 13021 - protein, 425 aa, unidentified
  REGION 1..425: note = Human gut metagenome
MVYVISQDGQPLMPTDRHGKIRRLLKSDKAKVVKHCPFTIQLLYGSTDYTQEISLGIDAGSKYIGISATTQNRVLYESDVELRNDIVSLLSARRQNRRTRRNRKTRYRKPRFNNRISCKKKGWLAPSVRQRVNTHLTVVAKVHQILPVTRIIVETASFDIQKIKNPTISGTDYQQGDQLGFWNVREYVLFRDGHVCQCCKGKSKDKILNVHHIESRKTGGDSPDNLITLCKTCHTGYHRGTIKLPKTIHRGMSFRDASFMGIMRWSFYDELKTLYPDVNLTFGYITKNTRIKNNLPKEHYIDARCISGHPLAVSDETYYYQKKVRCHNRQIHKNTILKGGVRKRNQAPYFVKGFRLFDKVMYQGQECFIFGRRSTGRMDLRLLDRTHINASVSYKKLKLIESRKNYITERRTAVPPTGKSVDFPA

SEQ ID NO: 13022 - protein, 408 aa, unidentified; identical to SEQ ID NO: 6795
  REGION 1..408: note = Human gut metagenome

SEQ ID NO: 13023 - protein, 465 aa, unidentified
  REGION 1..465: note = Human gut metagenome
MSTCVCVLSNSGERLMPTIRLGKVRRLLKDGKAKIIKHHPFTIQLLYDSKTNTQPIEICEDVGYNYIGISVKSQSHEYVSAQYDTLQDEKACHDSCRKLRRTRRNRLRYRKPRFDNRKRGEGWLAPSLEHKKQLNIRLIERYVSVIPITHATVEVGSFDTMLVKAIEEGKATPESADYQKGPRYNLATLREAVFYRDNYICKVCGRKATEGAILHMHHMFYWKGRHGNSLSELITVCEKCHTPANHQKSGKLYGFGENVKFADLSGAAFMNTVRWQIVNELYAAFGKDFVTVTYGAMTKEKRIALRLEKSHNNDAYAMGEFHPNCRCTFEHYEKVRRNNRILEKFYDSRYIDIRTGEIATGKELFNGRINRNHKKDSENLHRYRGKRTYAGHRALLRKKVNLNPGDLVSLNGEVLVVHSTHTNKKGAVNVEFKTPGKSGQKSASLKKLKIVKAADSMHSAWEKIS

SEQ ID NO: 13024 - protein, 471 aa, Acidithiobacillus sp.
MAVFVLDKRHKPLMPCSEKRARILLERGRARVHRMVPFTIRLVDRLQKDSVLQDLRLSITPGSKTSGLALVREKEIVDQSTGEVIKARVVLMLLELQHRGHAIRDKLTSRRAFRRRRRNQLRYRAPRFLNRTKPQGWLAPSLQHRVDTTMAWVTRLQRWAPIASLSTMLHRFDTQALQKPEISGAEYQQGELLGYEVREYLLEKWGRKCAYCDAEHTALTIDHIHPKSKGGSDRVSNLTLACFPCNQRKNNQDVQDFLVKDPKRLARIEAVRKAPLRDAAAVNSTRWALWERLKETGLDVEVGTGGRTKWNRKRLGIPKAHCLDAACTGRVDAVQHWQQPVLTIKATGRGRYQRTHLTKYGFPRSYLTRSKSAFGFQTGDMVKAVVTKGKKVGTYWGRIVIRTSGSFNVGAGKEAVQGIHHRFCTLIQRADGYGYAWTKIASDKGDAGTGAACAAVLSLPGMNAGDSRATG

SEQ ID NO: 13025 - protein, 452 aa, Lactobacillus sp.; identical to SEQ ID NO: 5473

SEQ ID NO: 13026 - protein, 515 aa, unidentified
  REGION 1..515: note = Viral metagenome
MQYLDFTLVVDKNNKSCVPILNGRAGYLLRNNKAKIINHDPLVIKRIDDYKSDFENRDIFELKIDSGYLNIGFSVSDNYHEYLAGQVELLKGMSDRLTNRNGYRRTRRSRIRYRKNKNVDYKTVHNPTYKNGNEEGWFAPSIQHKIDSHIRLIDKIASWVPVDKVIVEVAKFDIQMIKALADGKEISGKDYQNGEMKGYENAAAYVRDRDKHTCRLCGANKNVVIEVHHIQPRSKGGTDKPSNLISLCHSCHRKVHSNNNDNKYFEKVKSMKLSDTYKDSTYMNMVRWELFERLSGKYDVKVGYGYQTKINRRNAGLRKFHYTDAVCINDYKDVTLTENIYIVDQKRCNDRSMETFSDAKYIDVRDGKEKSGNTLYKERIPNAPSKRVTQKEYINNMRQFRGKKIKPGKRTFVCNSYCLKCGDLIYINSGKHRGNIAEVESMQKLPNGNFKIRFTYKAQTVKYPSISIKPEEYELLKNNLLDKVKIVRTRRGMIWRKYNRLEYEATHADQEGMAV

SEQ ID NO: 13027 - protein, 400 aa, Moorena sp.; identical to SEQ ID NO: 3930

SEQ ID NO: 13028 - protein, 415 aa, unidentified; identical to SEQ ID NO: 2764
  REGION 1..415: note = Human gut metagenome

SEQ ID NO: 13029 - protein, 518 aa, Anaerostipes sp.; identical to SEQ ID NO: 2751

SEQ ID NO: 13030 - protein, 533 aa, unidentified; identical to SEQ ID NO: 8207
  REGION 1..533: note = Human gut metagenome

SEQ ID NO: 13031 - protein, 447 aa, unidentified; identical to SEQ ID NO: 12853
  REGION 1..447: note = Human gut metagenome

SEQ ID NO: 13032 - protein, 419 aa, unidentified
  REGION 1..419: note = Human gut metagenome
MVYVISQDGKPLMPCSDPIARLLLKQGKAKVKKREPFTIKLTYETTNHTQGLTLGVDTGSGTIGTAVSKDNGDIVYMSEVVVRNDITDKMTQRAKYRRNRRNRKTRYRKARWLNRASSIKKDRFSPTMQSKLHSHVREIEYIQSILPVTEMVFETGQFDMQLMKNPSLANPKVRPWGYQKGANYGFENTKAMVLNRDNYTCQCCKGKHKDSKLEVHHIVFCSQGGSDEESNLLTLCHTCHKDLHSGKINPKLSGKVKGNLKYATQMNSIRKQLFRFYPNAIETFGYVTKANRLHLGVDKEHYYDACTIATQGNAFNVKSNLYKKKCVSDGDFQKTKGIRSEQPIVTDKICGFRKFDKVRYFGNDYFIKGRMSTGYAILMDIDGNKIDFSTMPRGYKTPKLSNCKRITARSTVMTQVKVV

SEQ ID NO: 13033 - protein, 415 aa, Ruminococcus sp.; identical to SEQ ID NO: 2438

SEQ ID NO: 13034 - protein, 490 aa, unidentified
  REGION 1..490: note = Human gut metagenome
MNYVYVLDPDGKPMMPTTRFGKVRRMLRSGEAKAVTTRPFTIRLTYWPKTHETQPVVAGFDPGRANIGLCTVRDDGRPLYLAHCETRNKEIKNLMSARKGHRQASRRGERLARKRIARRLGTTVKGLLRRILPGCREPLCLKDIINTEARFNNRLRPKGWLTPTARHLLLTHVNLLKQMQKILPVSDVVVEINRFAFMQLDNPGVKKKDIDFQHGQLFGFSGVREAVRLQQNGLCLCCKKREIEHYHHIIPRSKRGSDTLPNIAGLCKACHEKVHTSEEAAKKLASKKAGLTKKYGGTSVLNQIIPKLFDTLKEMFPGHTYATTGQTTKAFREEHGLLKDHTVDAYSIACSILEKPVVSIPDTYYEIHQFRRHDRAIIHHQTERTYYLNGKAVCKNRHKRFEQKGDSLEEFAVAHPDLVSKLTVKKSRRYYNDPDRILPGAIFIYEGKQYVLTGRSSGGKQYRAFGYGTRNFPAGKSTIVWQNTGLVYVG

SEQ ID NO: 13035 - protein, 432 aa, Calothrix sp.; identical to SEQ ID NO: 5934

SEQ ID NO: 13036 - protein, 486 aa, unidentified
  REGION 1..486: note = metagenome
MQQLEERNTYTPTDIPHVSGNCDLSLNREETLSVIGLKTSSNNSDAALIATEHAKQNTSVSAVYVLNMRGQPLMPTTPGKAKKLLKEGKAKVVKRTPFTIQLKYATGEAKQPVILGIDSGFLHIGVSATTEKKEVYSAEANLRSDIVKLNSERRQYRRSRRNRKTWYRAPRFLNRKKPEGWLAPSIQHKLDSHIKLINKVKELLPITKTVIEVAAFDIQKIKNPEISGTEYQNGVQKDSWNAREYVLHRDNHTCKACKGKSKDPILQTHHIVSRQIGGDAPDNLLTLCQTCHEKVTKGKLKLDIKVPTGFKPETFMLIVRWKLVNMLRDAGNIVNHTYGYITKFDRITLCLDKSHNTDAFVIAGGTIQERSTSYFIIQQVRKCNRKLFKGDRSHIKNTAARIIHGFQRFDKVLWNKIECFVFGRRKTGYFELRKLDGTKIHASAKAKELTLLETADTLLIANLRRGTLLHTLKSVVSDTPAPHGVL

SEQ ID NO: 13037 - protein, 442 aa, unidentified; identical to SEQ ID NO: 4522
  REGION 1..442: note = Human gut metagenome

SEQ ID NO: 13038 - protein, 476 aa, unidentified
  REGION 1..476: note = Human gut metagenome
LEAAGTEGVSHPGLPGKYKHKGGQLMSVAVISKTGERLMPTSEYRARKLLKSGKAIKHSYHPFTIQLTERKTGDIQPIELCMDTGYMHIGVSVKSEKHEYLAEQIDTLTDERSRHDACRMYRRQRRNRKRYRQPRFNNRKKDKGWIAPSLEHKKNIHIQAISRINNVMPLTDITMEMGNFDTQVLKAKEEGNPLPQGADYQHGERYGIATLREAVFTRDDYKCQCCGRTIKDGAILHVHHIKYRSQGGTNSMSNLATVCDKCHTPKNHKPEGKLYNWKPKLPSFKGATFMTTIRWQLYNEVKTLFPDIDIHITYGAATKERRRELDIDKSHVNDAFVMGQFHPKHRIKAVLYKKKRRNNRCLEKFYDAKYIDSRDGKKRSGQELFNGRINRNHKKDSENLHQYRLQKVTAGKRTVRKQHYGIQPHDIIVYENRKRETTGCHCSGTRVMLLPDKKSVSIKKIKIYKYAGGYFKSAFN

SEQ ID NO: 13039 - protein, 431 aa, unidentified
  REGION 1..431: note = Human gut metagenome
MPNKVYIINKHGRPLMPCSPAKARHLLDEGKAKVKKRTPFTIQLVYGSSGYTQEVILGVDAGSKTIGMSVSTTKEELLSAEVKPRNDVVDLLSTRREFRRARRNRKTRYRKPRFDNRVRSKHKGWLAPSVEVKIQEHITSIKRVCRILPVSKVVVETAEFDLQLLKAIADGKPVPQGEDYQQGEMYGHYNVRQYVLWRDGYTCKCCGAHTTKKKEVRLHVHHLESRKVGGDAPDNQVTLCESCHEKLHKGLIAEKDFKKRKRRSTRDATFMGIMRKTLMQRLCSELPIPVIETRGYITKATREKLLVLPKSHTNDALAIAQGKQGFNVGYLPGIVQINKIYTIRPVRHHNRQLHKATILKGGIRKSNQTEKYVFGYRLFDKVQFNGQDCFIWGRRTTGIFTIKTINGKMIKDGISFKKLKPVEKSTSYLIA

SEQ ID NO: 13040 - protein, 452 aa, Moorena sp.; identical to SEQ ID NO: 5473

SEQ ID NO: 13041 - protein, 449 aa, Thiorhodospira sp.; identical to SEQ ID NO: 12988

SEQ ID NO: 13042 - protein, 421 aa, unidentified; identical to SEQ ID NO: 4238
  REGION 1..421: note = Human gut metagenome

SEQ ID NO: 13043 - protein, 435 aa, Sutterella wadsworthensis
MSTSVFVLDKKHRPLMPCRPARARRLLRAGRARVVKRFPFVIRLVDRTVEQSEVQPVLIKLDPGSRETGAAVVRDDEKKRHHALAFFVIEHRGGAIRDALKARSAFRRRRRSQNLRCRSPRFLNRVKPKGWLPPSLRHRVETTLSFVRRMCRYLPVSGIATELVKFDSQKLQTPEVSGIEYQQGTLFEYEVREYLLEKFGRKCVYCGAEGVPLNIDHVVPRAKGGSNRVSNLVLACVSCNQKKGARSLEDFLKGKPEVLARVRRELKTPLRDAAAVNATRWVLFNELKATGLPVETGSGALTKLNRHAFGVEKEHWLDALCVGRLNGVVTRKGLNVLEIRCMGRGSRQRTRLTKYGFPRGYLMRQKCVHGFATGDMVEANVPKGKKAGLWRGRVAVRVSGSFNIQTPKGVIQGVGWKHCRLISHNDGYGYAWLGH

SEQ ID NO: 13044 - protein, 592 aa, unidentified
  REGION 1..592: note = Candidatus Poribacteria bacterium
MSKRSFEPVFVIDAEKTPLEPCHPAVARRLLKSGQAAVFKTYPFTIILKRRIEDPQTDERLLCVDPGSKITGMALVNRRTNQIERAFEVEHRHLSIKDGLTIRKGYRRSRRHRHCRYREARWQHRKRAVAMPHLEGNRICWTYQRISVKNAKRGYGDGKGWIAPSLMSRVFNITTWANRLRAVCPIRGFVLENVKFDTQLMRNPDIKGVAYQRGTLWHTELREYVLHRDKHRCRYCGTKEGPFNTDHVIPESKGGPTRHDNLVTACIPCNRKKDNKLPDELKGKMGEVVRKIVNDGIPILKDAAAVNTIRWKIFEALQTTGLPVHCVTGGQTKFNRTRAGLPKTHYYDAACTCGTPAPVKGLRVMRIKALGYGTRDLFSFRSPFPKNQNMDADARKAWRAELDAKRSKTRERMEKKLKTAKTPEKRREILAAQEKNPNANWTLFNYGKRKRIERMGFKKFDHVVGMKSYQGKTTRVTGTINCFNNTPTQTVRVKFGLESKARKPFKTSELRRIQHRDGYAYFYETAAPQKHFARPAPETAQQADVTQISSGAALSPTLTPLSETTLGGKPIVLPQTKRRRQKAVDVSQLRLW

SEQ ID NO: 13045 - protein, 420 aa, unidentified; identical to SEQ ID NO: 3504
  REGION 1..420: note = Human gut metagenome

SEQ ID NO: 13046 - protein, 415 aa, unidentified; identical to SEQ ID NO: 10041
  REGION 1..415: note = Human gut metagenome

SEQ ID NO: 13047 - protein, 512 aa, unidentified
  REGION 1..512: note = Human gut metagenome
MSTVYVLNKDGKPLMPTTRGGHVRHLLKEQKARVVRTKPFTIQLLYETDDVVQPLYLGIDPGRTNIGVAVVKADSTAVFTAHLETRNEEIPKLMQGRKKARRARRTNGRRCRRQRRAKANGTISKKCVKQTTAQNGSASKRAKEIGVIKRHLPGCEKDVLCIGIKNKEAKFSNRTRPEGWLTPTTNQLLKTHINLVKKIRKFLPISDVVLEINKFAFMQLDNPNIQKWQYQQGPLYQKASLEEAVSEMQEHHCLFCKKSIAHYHHVVPQSENGSDTIGNIVGLCTKHHDLVHKDTAWQKKLAKKKTGLNKKYGALSILNQIIPALTKELSSLFPKHFFATNGKSTHDYRAAHDVSKDHWLDAYCIACSILPNDTCDKNINGRVPYKLKQFRRHDRRALHKENMSRVYTLDGKKVATNRHKAIKQTTDSLEEFRQRQPNDVCKLKVKEHHPEYRNPERNFPGCVFLVGKHTHVMQGTSGSHNGKADGYYDTNGNSYSSGECKFVAKNEGIVFA

SEQ ID NO: 13048 - protein, 399 aa, Moorena sp.; identical to SEQ ID NO: 6633

SEQ ID NO: 13049 - protein, 406 aa, unidentified; identical to SEQ ID NO: 3980
  REGION 1..406: note = Human gut metagenome

SEQ ID NO: 13050 - protein, 440 aa, Moorena sp.
LSNVFVLDTNKQALHPVHPGRARRLLSLGQAAVFKRYPFTIILKSAASSPHVWPLRVKLDPGSKTTGLAIVNDASGEVVFAASLIHRGDAIRERLEKRRAARRSRRQRKSRYRQSRFDNRGTKKKGWIAPSVQSRVCNVITWVKRLVRLCPITAISQELVKFDLQQMDHPEISGVNYQQGTLSGYEVREYLLDKWGRQCAYCGAKDVPLEVEHINPRSKSGDDRVCNLTLACEPCNTKKGTQDIRVFLAHQPELLAKLLAQAKSPLKDAAAVNITRWVLHAQLKAFGLPLECGSGGRTKFNRITRGLEKTHWCDAACVGASTPEVLHIGQVRPLSIAAYGHGRRQMCLMNKSGFPRTNPKQKKFKHGFRTGDLVKAVVPPHLKHAGTHVGRMSAKASGAFTIATAGGTVTDIGKKYCRMLQRADGYGYTQKGELAFPPVP

SEQ ID NO: 13051 - protein, 425 aa, unidentified
  REGION 1..425: note = Human gut metagenome
LRVFVLNKRGKPLMPCSPAKARLLLKEKKAIVKRRTPFAIQLTIATGETKQPVSLGVDAGYKHVGLSASTEKAELYASEVELRQDITDLLSARRALRQSRRNRKTRYRAPRFDNRIRTKRKGWLAPSVENRINAHLSRIEAVLRLLPVTKITVETASFDLQLLKNPDISGKEYQEGEQLGFWNVREYVLFRDGHVCQHCHGRLKDPVLNVHHLKSRRTGGDSPGNLITLCETCHKALHRGEITLKAKRGQSFRAETFMGIMRREVLDRLKASHPKLEVQNTYGYRTKHARISNGIAKSHCADAFCIAGNLGAKRLGEFLFQKQTRRNNRQIHKLSILKGSLRKRNQAPFEVKGFRLFDKVAYQGEEGFIFGRRSSGFFDLRRLDGTRISAGINYKKLRLLEKRRTYLTEIRKEEARRPLPEGRGL

SEQ ID NO: 13052 - protein, 449 aa, Moorena sp.
MTTFVISAEGEKLMPTTNIKKIRKLLRSGRAKIVKHAPFTVQLLYESGNAVQPIEFTEDTGYQYIGVSLKSEKHEYVSAEYTLLKNEKQHHDDQRREVRRPRRNRKRYRKARFDNRRKSEGWLAPSLRNKADRHVDIFKMYCEVCPITSVTLEIGQFDPAVLDAVEQGKPLPEGVDYQYGPRYGYDTLREAVFARDGYRCLCCGKSVIEDGTALRLHHVGFRTGDRSNRLGNLASVCEKCHSPKNHKPGGKLWDMAPPKGTASAAYMNIVRWHIYEGVKAFGVDTHITYGAVTKRTRRDLNIGKSHANDAYCIGSMRPKRRTKTQYFEKRRRNNRILEKFYDAKYLDIRDGKTKKAAELGCNRTSRSIPRSNPQNERVFRGEKVSNGRRSIRAQRYLYQPDDIIIFGGKKRMVKGTHNKGSSVQLIGGGDISPRKIKLHHHAGGWRQVV

SEQ ID NO: 13053 - protein, 392 aa, unidentified
  REGION 1..392: note = Human gut metagenome
LRVFVLNKRGKPLMPCSPAKARLLLKEKKAIVVRRTPFTIQLTIATGESKQPVSLGVDAGYKHVGLSASTEKAELYASEVELRKDITDLLSARRALRQSRRNRKTRYRAPRFDNRIRTKRKGWLAPSVENRINAHLSRIEAVLRLLPITKITVETASFDMQRLKNPDISGKEYQEGEQLGFWNVREYVLFRDGHVCRHCHGRSKDPVLNVHHLESRRTGSDSPDNLITLCVTCHKALHRGEITLKAKRGQSFRAQAFMGIMRREVLNRLKASYPELKVHETYGYLTKHARIANGIVKSHGADAFCIAGNLGAERLGEFFFQKQTRRNNRQIHKLSILKGGIRKRNQAPFEAKGFRLFDKVACQGEEGFIFGRRSSGFAKPEAASSVATVLPE

SEQ ID NO: 13054 - protein, 419 aa, Geobacillus sp.; identical to SEQ ID NO: 3993

SEQ ID NO: 13055 - protein, 424 aa, Planktothrix sp.; identical to SEQ ID NO: 12649

SEQ ID NO: 13056 - protein, 470 aa, unidentified; identical to SEQ ID NO: 2925
  REGION 1..470: note = Human gut metagenome

SEQ ID NO: 13057 - protein, 373 aa, unidentified
  REGION 1..373: note = gut metagenome
LGVDAGYKHVGLSASTEKAELYASEVELRQDVSDLLSARRALRQSRRSRNTRYRAPRFDNRIRTKRKGWLAPTVENRINVHLSRIETVLRLLPVTKITVETASFDTQLLKNPDIAGKEYQEGEQLGFWNVREYVLFRDGHVCQHCHGRSKDPVLNVHHLESRRTGGDSPGNLITLCETCHKALHRGEIKLKAKRGRSFRAETFMGIMRWGVLNRLKASHPKLEVHNTYGYRTKHARIANGIAKSHCADAFCIAGNFGAKRLGEFFFQKQTRRNNRQIHKLSILKGGIRKRNQAPFEVKGFRLFDKVAYQGEEGFIFGRRSTGYFDVRKLDGTCISAGISYKKLHLLEKRRTYLTEIRKEEALPPPPEGRGLRA

SEQ ID NO: 13058 - protein, 461 aa, unidentified
  REGION 1..461: note = Human gut metagenome
MSVLVIGRNGRALMPTNPRKARLLLKKKTASVVCRHPFTIQLLYKTGCATQEGCIGIDTGSQHIGVGITCGDRVILKDEHALRSSMEKRSLLATRTVMRRGRRYRKVRYRKPKWRHHTKRMYFEKANRRGQHWRKVKTTTQSPRLKGWLPPSLQSKCDHHFRIIDRYLKYLPDPITRNLVIEAGRFDMARMNDPTIHGEMYQRGPMYDAENLRAYIFARDNYQCACCKAKAGTTRKADGTTVKLVAHHILFRSRGATDNPKYIISVCDHCHTKAHQPGGILYSWMENNKKVARGLRDATFMNILRKRLFARYPQAAFTYGNITAADRKQLRLPKSHANDAVAISLFGKEASTVKNICQTMHYKQIRKSKRSLHEAIPRKGRKNPNTKAVRNKKNTTQANGFKLWDSVLADGKKLFICSFTGTSAYLIDKNGCYISQPGKTYKQWPLSKLKRLHPNGNWLMA

SEQ ID NO: 13059 - protein, 437 aa, unidentified
  REGION 1..437: note = Wastewater metagenome
MPCSEKRARLLLARGRACVHRLVPFVIRLTDRQLDTCTLQPLRIKLDPGSKTTGLALVRDTEHLNTDTGEIQRGVAVLSLIELVHRGRQISEALTARRQMRRRRRGCLRYRAPRFLNRGNKQRGWLAPSLQHRINTTTAWVARFRRWSPVTALSAELVRFDMQRLQNPEISGVEYQQGTLAGYEVREYLLAKWSRKCAYCGVENVPLQIDHVHPKAKGGTNRVSNLTLACGPCNARKSAQPVDAFLAKDPKCLTALLAQAKRPLKDAAAVNATRWALVGALKATGLPVETASGGCTKFNRSRLAIPKTHALDAVCVGAVSVVTNWQKPSLTIKCTGRGSYQRTRLDKYGFPRGYLMREKSVKGFKTGDLVRAIVPTGKKAGRHTGRVAIRKSGSFNIQTLAGVVQGIGYRHCRLLQRADGYGYFFNKAACDTAQKRE

SEQ ID NO: 13060 - protein, 442 aa, unidentified; identical to SEQ ID NO: 2903
  REGION 1..442: note = Human gut metagenome

SEQ ID NO: 13061 - protein, 420 aa, unidentified; identical to SEQ ID NO: 6507
  REGION 1..420: note = Human gut metagenome

SEQ ID NO: 13062 - protein, 417 aa, unidentified
  REGION 1..417: note = Human gut metagenome
MPCSPAKARLLLKEKKAIVKRRTPFTIQLTIATGEAKQPVTLGVDSGYKHIGLSATTEKVELYASQVELRQDITDLLSARLALRRSRRSRKTRYRAPRFDNRVASKRKGRLAPSVENRIAAHMSRVEAVMRVLPVTAITVETAVFDTQLLKTPDIAGAAYQQGEQLGFWNVREYVLFRDGHVCQHCRGKSKDPILNVHHIESRRTGGDAPNNLITLCETCHKAFHRGEIELKIKRGKSFKAETFMGIMRWTLFERLKKAHPELNVHNTYGYLTKHKRISYGIAKSHCADAYCIADNLSAKRLKGFFFQKQTRKHNRQIHKLSILKGGLRKKNQAPYEVKGFRLFDKVICKGEEAFIFGRRTSGSFDVRRLDGTRISAGINYKKLRLLEPRTTYLTEFRKEAALPPLHKCRGFRAEFL

SEQ ID NO: 13063 - protein, 420 aa, unidentified; identical to SEQ ID NO: 6507
  REGION 1..420: note = Human gut metagenome

SEQ ID NO: 13064 - protein, 406 aa, unidentified; identical to SEQ ID NO: 6612
  REGION 1..406: note = Human gut metagenome

SEQ ID NO: 13065 - protein, 411 aa, unidentified; identical to SEQ ID NO: 6901
  REGION 1..411: note = Human gut metagenome

SEQ ID NO: 13066 - protein, 470 aa, unidentified; identical to SEQ ID NO: 2825
  REGION 1..470: note = Human gut metagenome

SEQ ID NO: 13067 - protein, 396 aa, unidentified
  REGION 1..396: note = Ga0373630_0005241
MKFQSQALRLSEEEYSLQVIEEGKRSVTNANVSGRCALVNFDEEHRYVYGIDDGLEAGVAIVDMIRSMVVFKGIIHLRDDVKRLMMYRREHRRARRNRLRYREVRFDNRRRSVGWIPPSVKVKRDNIIRVVGKLAKKFPPSKIVYEENSFDVKKLMFPDIEGREYQLNLWYALLSRAGNKCEVCRQEGKLEKHHVVPISEGGTNQVTNILIVHEKCHKKIHEGKVKVIAAKNIVVPYVNYGKTYFKAELSKIAPLEVVYGYQTRIWRERMGLEKNHWNDAIAMVSRGEKLVDTETICYCLAKRRRLYYRSKGLRCVMGFMRGDIVRYNCIDGSGIIGCITSLYKSGFCKIGAWDGKGSFERTGPCSLSRCDFLSRDSIIILAPNKKYVNEFKELIV

SEQ ID NO: 13068 - protein, 400 aa, Moorena sp.
MLVYVLNKDGKPLMPCKPQKARKLLESKKAKVVKREPFTIQLLYGSSGYKQEITLGVDSGSKNIGLSATTENSELYSAEIQLRSDIVDLLSTRRQNRRTRRNRLRYRKPRFLNRVRSKNKGWLAPSIEHKIATHLRVIENAHKILPISKIIVEVASFDIQKIKNPDIQGIEYQQGEQLNFWNVREYVLFRDNHTCQCCKGKKKDKILNVHHIESRKTGGDAPNNLITLCETCHNGYHKGTVKLPKTIKRGMSFKDTTFMGIMRWSFYNRLKSQYSNVSLTYGYITKNTRIQSGLEKSHRIDARCISGNPLAKPLECWYFSKQVRNHNRQIHKANILKGGKKKLNQAPYEVKGFRLFDKVEYVGKEGFIFGRRSTGYFDIRTLDGISIHKSASYKKLKLID

SEQ ID NO: 13069 - protein, 242 aa, unidentified
  REGION 1..242: note = Human gut metagenome
MPNKVYVINKHGRPLMPCSPAKARHLLDDGKAKVKKRTPFTIQLVYGSSGYTQEVILGVDAGSKTIGMSVSTTKEELLSAEVKPRNDVVDLQSTRREFRRARRNRKTRYRKPRFNNRVRSKHKGWLAPSVEVKIQEHITSIKMVCRILPVSKVVVETAEFDLQLLKAIEEGKPVPQGEDYQKGEMYGYYNVRQYVLWRDNYTCQCCGAHATKKKEVRLHVHHLESRKVGGNAPGNLVTLWRC

SEQ ID NO: 13070 - protein, 465 aa, unidentified
  REGION 1..465: note = Human gut metagenome
MSTCVCVLTNNGKRLMPTFRLGKVRHLLKDGKAKIVKHHPFTIQLLYDSKTNTQPIEICEDVGYNYIGISVKSESHEYVSAQYDTLQDEKEHHDDCRMHRRTRRNRLRYRKPRFDNRKRGEGWLAPSLKHKKELNVNVVKMYCTVMPITHATVEVGSFDTMLVKAIQEGKAIPEGADYQKGPRYNLATLREAVFYRDNYVCKICGRKATEGAILHMHHMFYWKGRHGNSLDELLTVCEKCHTPANHQKNGKLYGFGENVKFADLSGAAFMNTVRWQIVNELYAAFGKPFVTITYGAMTKEKRIALQLEKSHNNDAYAMGEFHPNHRCTFEHYEKVRRNNRILEKFYDSRHIDIRTGEIATGKELFNGRINRNHKKDSENLHKYRGKRVYKGHRALLRKKVNLNPGDLVSLNGEVLIVHGTHTDKKGAVNVEFKTPAKNGRKSASLKKLKIVKATGSIHPACEKVS

SEQ ID NO: 13071 - protein, 456 aa, unidentified
  REGION 1..456: note = Human gut metagenome
MTNIYILDINGKPLMPCHNGAFVRCRLKNKEAKVVKRKPFTVQLMYEVKNNYKQDIYLGVDAGYKYVGFSASASNQELFSGELEQDCGMVERNKERRMYRRQRRSRLRYRKARFNNRKAGKPQGWTAPSLQRKRDTHLRFIMMLSSIMPITDINVEIGLFDPALMKATAEGRTIKGTDYQHGEAEGFENMKSYIRYRDSYTCQNPDCKCHKMKKEDREKLKLHIHHIGYYKHDRSNRPGNLITLCELSHTPETHQPGNLLYGWKPKMKSLRETAFMNTVRKEIVDTLKVIYPDKTVRYTYGYKTNLTRREWHVPKNHHNDAFCIAGQYSLKRAETVYFNQQRRNNRSLEIFHDAKYIDSRDGKRKTGKELYCGRNTRNKNFNKENLHQYRSKKVSRGKRNIRKQRHKYQPNDIVVFEGQKYKIRGSHCKGSRVILDTKKSVSVKKIHILKHCSGIC

SEQ ID NO: 13072 - protein, 434 aa, Anoxybacillus sp.; identical to SEQ ID NO: 3808

SEQ ID NO: 13073 - protein, 423 aa, Moorena sp.
MRVFVLNSNLQPLDPCKPARARILLSAGKAKVYRRYPFTIVLTEEIKNPVTHEHQFKIDPGAKTSGLAIVQGFRVVWGAELTHRGFQIREALSSRRQLRRSRRNRKTRYRKPRFLNRTRPKGWLAPSLTSRVQNILTWVKKLIRFCPITGISQELVRFDTQKLQNPEISGIEYQQGTLFGYELREYLLEKWNRKCAYCGVTGTQLEIEHIKPLSKGGSNRVSNLTIACHACNQAKSNQDIELFLSKNPSILKRILSQAKRPLADAASVNTTRWKLYHDLKSIGLPVEVGSGGLTKFNRCRQSLPKTHWLDAANVGKVETLIVEVALPLVITAKGHGTRQLCRTNKYGFPIRHCSRIKLHKGFQTGDIVRAVVTKGKKIGTYVGRVATRKSGSFNISTLGGLVQGISHKYCRFIHRKDGYAYTI

SEQ ID NO: 13074 - protein, 415 aa, unidentified
  REGION 1..415: note = metagenome
MIYVRNKEGKALMPSDRGGRIGYLLRHGKAHVVSRVPFVVQLDYESTTYTQEVSLGIDAGSKHIGVSASSEKKELLAAQVELRSDVVNLLSTRRELRRARRNRKTRYRKVRFDNRKRKDGWLAPSIGQKVESHLKVIRLVHKLLPITKTTIEVAQFDAQKIKNSDIKGEEYQRGEQMGFWNVREYVLARDGHKCVHCKGKSKDPILNVHHLESRKVGGNSPSNLVVLCETCHKAYHRGEFDLKIKRGTTLRDAAVMNIMRWSVYERAKAEFGNVYLTYGYITKHTRIENDIEKTHAADAFCIAKNVHARRSRTFFMCRCVPRHTRALHVANPKKGGIRRSCIASHKIGKSRFQRFDMVRWKGKECFIFGSTHGNVVLRKIDGVKVHETQAVSAKTIKFLKRIRNNILMEERTSES

SEQ ID NO: 13075 - protein, 459 aa, unidentified; identical to SEQ ID NO: 3944
  REGION 1..459: note = Human gut metagenome

SEQ ID NO: 13076 - protein, 533 aa, Actinomadura sp.; identical to SEQ ID NO: 3190

SEQ ID NO: 13077 - protein, 451 aa, Moorena sp.; identical to SEQ ID NO: 5203

SEQ ID NO: 13078 - protein, 494 aa, unidentified
  REGION 1..494: note = Human gut metagenome
MTMVYVQNKDGKPLMPTTRYCYVRLLLKEKKARVVCTTPFTIQLNYDTPDITQDLILGIDPGRTNIGVAVVKEDGQCVFSAHLETRNKDVPLLMQKRAGFRKQHRTLDRRRKRQRRAKAAGTTITDGSVERLLPGYEKPIVCHHIRNKEARFNNRCRPVGWLTPTANHLLQTHINLIAKVAKFLPITKVVVELNRFAFMAMDNPNIRRWEYQQGPLYGLGSVEDAVYAQQDGHCLFCKKPIDHYHHVVPRHKGGSETLANRCGLCAKHHDLVHTDKAWAEKLVTRKGGMNKKYHALSVLNQIIPHLMEYLGNETLYDVYATDGRSTKGFRIAKNVPKEHYTDAYCIACSILDTDIEVSTPVEPFELKQFRRHDRQSCIRQMVDRKYILDGKVVAANRHKAFEQESDSLQEFREAYGDAAVSQLTVKPHSPQYKDMARIMPGAVMDFGGAVGIFQGSEGFHNGKPDYYKSTKGERVLTRRCALLAQNAGMVFIPA

SEQ ID NO: 13079 - protein, 425 aa, unidentified
  REGION 1..425: note = Human gut metagenome
LANDLYRSIDREETNLRVYVLNKRGEPLMPCSAAKARILLKEKKAVVKRRTPFTIQLTIATGETKQPVSLGVDAGYKHIGLSASTEKAELYASEIELRQDVSELLAGRRALRHARRSRKTRYRAPRFDNRKREKGWLAPSVENRIGAHVSRVEAVLRILPVTKIVVETASFDVQRLKNPDIQGVEYQQGEQLGFWNVREYVLFRDGHECQHCHGKSKDKVLNVHHIESRRTGGDAPNNLITLCETCHKAFHRSEIELRVKRGRSFQAEAFMGVMRWTFFERLRASHPEIEVRNTFGYLTKNTRISHGIEKTHCADAFCIAGNLKAKRLGYYFFQKQTRRHNRQIHKLTIKGGVRKRHQTPYEIKGFRLYDKVLYRGKVAFIFGRRSSGYFDIRTLDGERISASVSYKKLRLLEKRRTYLIELRRN

SEQ ID NO: 13080 - protein, 465 aa, unidentified; identical to SEQ ID NO: 6728
  REGION 1..465: note = Human gut metagenome

SEQ ID NO: 13081 - protein, 416 aa, unidentified
  REGION 1..416: note = Human gut metagenome
MQYVYVVGSNGKPLMPCSPAKARKLLKSKSAAVLQRTPFTIKLLHHAGGYKQPITLGVDAGSKHVGLSACTDTEELYRNDVVKLLSARRECRRGRRHRKTRYRAPRFNNRVHSKHKGWLAPSVEVKIQEHITAIHRICRRLPITKIVVETAEFDTQRLKAMLEGKPLPVGIDYKRGEMYDEYNVRQYVLKRDNYTCQHCGARGSAEKGIKLHVHHLETRQTGGNAPNNLITLCKDCHTALHDGKITLKLDKKKRGKPLRDSAFMGIMRKTLLSRIRKEVAIPVVETQGYITKLLREENHIQKSHTNDARCIAGCPKALPCDTTYHTKAIRHHNRKIHKINILKGGVRKLNQAPYKVFGFRIWDKVKYKGQECFITGRRSSGYFALKKLGGTTISNSANYKKIHFLEPANHYIIERS

SEQ ID NO: 13082 - protein, 451 aa, unidentified
  REGION 1..451: note = Human gut metagenome
VTTILKTCFAAFNLAKVVVLMDAWDIIVVLNKRGKPLMPCSPAKARLLLKEKKAIVKRRTPFTIQLTIATGETKQPVSLGVDAGYKHVGLSASTEKAELYASEVELRQDITDLLSARRALRQSRRNRKTRYRAPRFDNRIRTKRKGWLAPSVENRINAHLSRIEAVLRLLPVTKITVETASFDLQLLKNPDISGKEYQEGEQLGFWNIREYVLCRDGHVCQHCYGRSKDPVLNVHHLESRRTGGDSPGNLITLCETCHKALHRGEITLKAKRGQSFRAEAFMGIMRWEVHNRLRALHPGIEVSNTYGYRTKHARIANGIAKSHCADAFCIAGNLGAERLCEFFFQKQTRRNNRQIHKLSILKGGIRKRNQAPFEVKGFRLFDKVACQGEEGFIFGRRSSGFFDVRKLDGTRISAGISCKKLHLLEKRRTYLTEIRKEEALPPLPEGRGLRA

SEQ ID NO: 13083 - protein, 442 aa, unidentified; identical to SEQ ID NO: 3218
  REGION 1..442: note = Human gut metagenome

SEQ ID NO: 13084 - protein, 514 aa, Moorena sp.
VPTDNFGSVVLTLAIGDFSMLNKNSVFVLDCNKTPCDLIHPAAARKLLFAKKAAILNRYPFTIILKEEARAKKQYRIKIDPGARFSGLALLSDANIVWCAELEHRGFQISEALTKRRTLRSSRRNRKTRYRQPRFLNRKRRKGWLPPSLISRVNNIKSWVNKLIKYAPVDSISMELVKFDSQKIVNPEIQGTEYQKGELFGYEVRQYLLEKFNHTCVYCGTKDAALNLDHFHPKSRGGSDRVSNLVLSCVDCNQAKSNKLPEDFLSDKPKLLELINKQRKQPLADVAAVNATRWKLKEILESTGLPVEVGSGALTKYNRKRLGISKSHWTDAACVGKSTPDTLNIRNYQPLLIKAMGHGSRQMVKPDKYGFPRTSPKLRQKSFYGFQTGDIVKAVVTKGKKIGTYIGRVAVRQTGNFNIKTKTETVQGISYKYCQHLHKSDGYTYSFGELVKQKSVNFVQGTLYATSLEQVLETPVQLNLFDISELTTETKPKTKRAKRTKQFDSFDGEQLSLF

SEQ ID NO: 13085 - protein, 493 aa, unidentified; identical to SEQ ID NO: 3781
  REGION 1..493: note = Human gut metagenome

SEQ ID NO: 13086 - protein, 423 aa, unidentified; identical to SEQ ID NO: 3951
  REGION 1..423: note = Human gut metagenome

SEQ ID NO: 13087 - protein, 442 aa, unidentified; identical to SEQ ID NO: 8269
  REGION 1..442: note = Human gut metagenome

SEQ ID NO: 13088 - protein, 447 aa, unidentified; identical to SEQ ID NO: 4762
  REGION 1..447: note = Human gut metagenome

SEQ ID NO: 13089 - protein, 465 aa, unidentified
  REGION 1..465: note = Human gut metagenome
MNTCVCVLSNSGERLMPTFRLGKVRRLLKDGKAKIIKHHPFTIQLLYDSKTNTQPIEICEDVGYSYIGISVKSESHEYVSAQYDTLQDEKEHHDDCRMHRRTRRNRLRYRKPRFDNRKRGEGWLAPSLKHKKELNVNVVKMYCAVMSITHATVEVGSFDTMLVKAIQEGKVIPEGADYQKGPRYNLATLREAVFYRDNYVCKICGRKATEGAILHMHHMFYWKGRHGNSLDELLTVCEKCHTPANHQKNGKLYGFGEDVKFADLSGAAFMNTVRWQIVNELYAAFGKPFVTITYGAMTKEKRIALQLEKSHNNDAYAMGEFHPNHRCTFEHYEKVRRNNRILEKFYDSRYIDIRTGEITTGKALFNGRINRNHKKDSENLHKYRGKRTYAGHRALLRKKVNLNPGDFVSLNGETLVVHSTHTKKNGAVNVEFETPAKSGQKSASLKKLKIVKAANSIHPAWKKIS

SEQ ID NO: 13090 - protein, 443 aa, unidentified
  REGION 1..443: note = Human gut metagenome
MSVAVISKTGERLMPTSEYRARKLLKSGKAIKYSYHPFTIQLTERKTGNIQPIELCMDTGYIHIGISVKSEKHEYLTEQIDTLTDERSRHNARRMYRSQRRNRKRYRQPRFNNRKKDKGRIAPSLEHKKNIHVQTISRINNVMPLTDITMEMGNFDTQVLKAKEEGRPLPQGVDYQHGERYSIATLREAVFARDGYKCQCCGRTIKDGAILHVHHIKYRSQGGTNSISNLATVCDKCHTPKNHKPGGKLYGWKPTLPSFKGATFMTTIRWQLYNEAKALFPDIDIHITYGAATKERRRELNIDKSHINDAFVMGQFHPRHRIKAVLYKKKRRNNRCLEKFYDAKYIDSRDGKKRSGQELFNGRINRNHKKDSENLHQYRLQKVTAGKRTVRKQHYSVQPHDIIIYESRKRETTGCHCNGARVMLLPDKKSVSIKKIKIYRYAG

SEQ ID NO: 13091 - protein, 466 aa, unidentified
  REGION 1..466: note = Human gut metagenome
MSTCACVLSKNGERLMPTIRLGKVRHLLKDGKAKIIKHHPFTIQLLYDSKTDTQPIEICEDVGYNYIGISVKSESHEYVSVQYDTLQDEKDCHDSCRKMRRIRRNRLRYRKPRFDNRKRNKDWLAPSLEHKKELNVNVIKMYCEVVPITHVTVEVGSFDTMLVKAIQEGKAIPEGADYQKGPRYNLATLREAVFYRDNYTCKVCGRKAKNDSAILHVHHMFYWKGRHGNSLNELLTVCEKCHTPANHQKGSKLYGFGENIKFANLSGAAFMNTVRWQIVNELYATFGKLFVTFTYGAMTKEKLIALHLEKCHNNDAYAMGNFHPVDRCAFEHYKKVKRNNRILEKFYDSRYIDIRTGKVANGKSLFNGRINRNHKKDSENLHKYRGKRIRKGYRALRRKKVSLNPDDLVSLNGEILVVHGTHTRKNGPVSVEFKVPSKNGKKSASLKKLKIVKTSNSMHSAWTKVS

SEQ ID NO: 13092 - protein, 423 aa, unidentified; identical to SEQ ID NO: 3951
  REGION 1..423: note = Human gut metagenome

SEQ ID NO: 13093 - protein, 417 aa, unidentified
  REGION 1..417: note = Human gut metagenome
MIYVRSKEGSVLMPTERCGKIGYLLRHGKAHVVSRVPFVVQLDYDSTTYTQDVSLGIDAGSKHIGVSASSEKKQMLAAQVELRSDIVNLLSTRRELRQTRRNRKTRYRKARFDNRKKKDGWLAPSVEQKIESHLKVIRLVHKILPITKTTIEVAQFDAQKIKNPYIKGDEYQQGEQMGFWNVREYVLARDGHKCVHCKGKSKDPILNVHHLESRKTGGNSPSNLVTLCETCHKAYHRGEFDLKIKRGSSLRDAAVMNIMRWAVYERAKAEFGNVHLTYGYITKHTRIENGIAKTHASDAFCIAKNVHAMRLSSFFMCRCVPRHTRALHVANPKKCGIRRNTIASHKIGKSNFQRFDMVRWMGKECFIFGSTHGRPVLRDIDGLQVANQPSVNIKTIKFLKRLKNNILMEEKNFRRLN

SEQ ID NO: 13094 - protein, 424 aa, unidentified; identical to SEQ ID NO: 6692
  REGION 1..424: note = Human gut metagenome

SEQ ID NO: 13095 - protein, 435 aa, Desulfovibrio sp.
LAKETLTDHLAEVYMNKVFVLNQFGKPLMPYHPGKVRILLKEKKAFVKRKTPFTIQLTIPVKEKLYPITLGVDAGYRHIGLSATTEKEELYASEIETRADVSALLSTRRQCRRGRRNRKTRYRAPRFNNRVHSKHKGWLAPSVENIIAAHISRIEDVLKLLPVTRIVIETASFDIQLIRNPEISGAQYQQGEQLGSWNTREYVLCRDGHTCQHCHGKSKDQILQVHHLESRRTGGDAPNNLITLCKTCHEALHRGKIELKAKRGRSFRAETFMNIMRWTVLERLKVAHKELEIQHTYGYITKHTRISLGLEKTHRADAFCIAGNLHAQRLDCCLYQKQIRRHNRQIHKMKILKGGIRKLNQAPYEVYGFRLYDKVLCNGEAGFIFGRRTSGYFDVRRLDGTRISASISFRKLRLIERRKTYLTEIRKEEGVSSPA

SEQ ID NO: 13096 - protein, 413 aa, unidentified
  REGION 1..413: note = metagenome
LKVFVLNMRGKPLMPCSPAKARHMLKAGKAFVVRRTPFTIKLTIATGETKQDVTLGVDAGARHVGISATTEKEEVFASEVALRQDITGLLADRLAFRRARRNRKTRYRAPRFNNRVRSKHKGWLAPSVENRIQAHMSRIEAVCRLLPVTKIVIETASFDIQKIRNPEVEGTGYQQGDQLGFWNVREYVLFRDGHICQHCRGRSKDPILNVHHLESRKTGGDAPNNLITLCETCHKAYHAGKIKLKVKRGHSFRAEAFMGIMRWTLLNRMRKAHPSLPVENTYGYLTKHKRIALGLPKTHCADAFCIAGNLKALRRGDFLFQQQTRKHNRQIHRCSILKGGVRKLNQAPFLVKGFRLFDKVRIGGQIGFVFGRRVRGIFNIRRLDKTVIGTDINCKKLSLLETRKTFLTELRKE

SEQ ID NO: 13097 - protein, 404 aa, unidentified
  REGION 1..404: note = Human gut metagenome
RRCRRQRRAKANGTISKKCVKQATAQNGSVSKRANEIGVIKRHLPGCEKEVLCIGIKNKEAKFSNRTRPEGWLTPTANQLLQTHINLVKKIQKFLPISDVVLEINKFAFMRLDNPNVQKWQYQQGPLYQKASLEEAVSEMQEHHCLFCKNTIDHYHHVVPQHKNGSNTIGNVVGLCAKHHNLVHKDTSWQEKLAKKKTGLNKRYGALSVLNQIIPALTKELSSLFPKHFFATNGKSTYDYRAAHGVSKDHWLDAYCIAGSVLPNDACDNNINNRVPYELKQFRRHDRRALHKENMSRVYTLNGKSVATNRHKAIKQTTDSLEEFRQRQPNDVCKLKVKEHHPEYRNPKRNFPGCVFLVGKHTHVMQGTSGSHNGKADGYYDTNGNSYSSGKCKFVVKNEGIVFT

SEQ ID NO: 13098 - protein, 411 aa, unidentified
  REGION 1..411: note = Mouse gut metagenome
MPCSQRKARLLLKNKKAKIYSYHPFTIQLFYASGETIQMCHIGVDTGSRHIGLAITSENKVLLKGEIDLRQDVKSNLDTRRTYRRNRRNRKTRYRKARFFNRVKSKQKNWLPPSIESKIHHTFHWMNKLENLVADSNLHIEVGKFDMAKMIRPDIQGKEYSQGQCYGYFDTRYFVFARDDYTCQCCKKKNKILRTHHIRYRSNGGTDRADNLITVCTDCHTSKNHKKGGILYEWQQRHKKGKPYKEPPFMNIIRKRIYQKYPDAVISYGSQTTPKRKERNLDKTHYNDAIIISGIEDIKENPKEWLRIKQFRKKKRSLHEAAARKGRKEHNRTQKRNRKNTSYDKGWYLNDYVEVFGQKGYISGFTNCGVYIKNINGDYITMPDKKYKQVSLCNIVRICHNNNWQYEIQKI

SEQ ID NO: 13099 - protein, 421 aa, unidentified
  REGION 1..421: note = Human gut metagenome
MRGQPLMPCSPAKARHLLKAGKAVVKRRTPFTIQLRIATGETKQNVTLGVDAGAKHVGLSATTEKEEVFASEVELRQDITGLLAARLSLRRDRRHRKTRYRAPRFLNRVRSKHKGWLAPSVENRIQAHMSRIDAVCRLLPVTKIVIETASFDIQKIKDPSVEGTDYQQGDQLGFWNVREYVLFRDGHVCQHCHGRSKDKILNVHHLESRQTGGDAPNNLITLCETCHKAYHAGKIKLKVKRGQSFRAEAFMGIMRWTLLDRVRKAHPGLPVENTYGYLTKHTRITHGLPKTHCVDAYCIAGNLKAVRRGVYLHQRQMRKHNRQIHKFTVLSKRLEDGTKIGYRKLNQSPYLVHGFRLFDKVRCLVQIGFIFGRRSSGYFDVRRLDGVKLFPSISWRKLTLLEKRSTYLTELRKEDGASSPV

SEQ ID NO: 13100 - protein, 470 aa, Anaerostipes sp.; identical to SEQ ID NO: 2825

SEQ ID NO: 13101 - protein, 536 aa, unidentified
  REGION 1..536: note = Human gut metagenome
VLRPRYQYPTRWYPSREQGSGNGCLSGEENTDLKQEVSGTLSKGDHSHPGEQDFCVPAITIQGGPAMSVFVVGLNGCRLMPTSERKARLLLKHGKASVYRKVPFTIKLNYKTGSTTQSGYLGIDTGSQHIGVSVVREDGTVLHKEEIGLRDSMSKRKLMQSRASSRRGRRHRKTRYRHPKWRPKAKRVYCEIPDRKRRHWKKKEITFTSKRPKGWLPPSLQSKTDHHIRWIKKLQDLLPEGYRLSIELGRFDPARLKDPEIHGELYQKGPQYDYENVRAYVLDRDRYTCQVCGKKGGRLHVHHILYRSHGATDDPQYMATVCSDCHNTENHQQGGILYQWMQKQKKFTRGLRDATFMNILRKRLIEAFPGATFTYGNITKADRERLRLPKSHGNDATAIAIVKTGIMTVKDKEPVIYIQQVRRKKRSLHEETPRKGRKEPNRKASRYDKNTKAVTVTKRKNKKKISITGCLFDRVELNGKKGWISGFTDKSCYVKDENDQYIRTSPKYKQVSLSKLKILHHCGNWAIGARRSLGKG

SEQ ID NO: 13102 - protein, 443 aa, unidentified
  REGION 1..443: note = Human gut metagenome
LTKDENRPSGRTTGLRAEQAEPAGIRKGDTLKVFVLNMRGKPLMPCSPAKARHMLKAGKAFVVRRTPFTIKLTIATGETKQDVTLGVDAGARHVGISATTEKEEVFASEVKLRQDITGLLADRLAFRRARRNRKTRYRAPRFNNRVRSKHKGWLAPSVENRIQAHMSRIEAVCRLLPVTKIVIETASFDIQKIRNPEVEGTGYQQGDQLGFWNVREYVLFRDGHICQHCRGRSKDPILNVHHLESRKTGGDAPNNLITLCETCHKAYHAGKIKLKVKRGQSFRAEAFMGIMRWTLLDRVRKTHPKLPVENTYGYLTKHKRIALGLPKTHCADAFCIAGNLKALRRGDFLFQQQTRKHNRQIHKCSILKGGVRKLNQAPFLVKGFRLFDKVRIGGQIGFVFGRRVRGTFNIRRLDKTVIGTDINCKKLSLLETRKTFLTELRKE

SEQ ID NO: 13103 - protein, 457 aa, unidentified
  REGION 1..457: note = Human gut metagenome
VWLYQAVYNLGEGFLPSSEERTAFYWLLIYRKEHGIMQYVYVLNKHGEPLMPCLPGKARLLLKQQKACVVKRTPFTIKLLYGSAGYKQPITLGVDAGSNHVGLSASTEKRELYREEFTPRNDVVDLLSTRRQNRRSRRNRKTRYRAPRFDNRVHSKHKGWLAPSVEVKIQEHITVIKRICRILPITLVRVETAEFDTQRLKAMLKGKPLPVGTDYQLGEMYDEYNVRQYVLKRDNYTCQCCGAHPTEKKPVRLHVHHLESRHVGGNAPNNLITLCVACHKALHEGKITLDKGKKRGKPLRDAAFMGIMRNTLLARLKDELNIPVKQTYGYITKLLREKNKIPKSHVNDARCIAKAPNAKPCDTMLYTRALRHHNRQIHKAKILNGGIRKKNQAPYLVKGFRLWDKVRYNGEECFITGRRSSGYFALKKYDGTVISNSASYKKLMLLEAATNYITERS

SEQ ID NO: 13104 - protein, 427 aa, Moorena sp.; identical to SEQ ID NO: 4087

SEQ ID NO: 13105 - protein, 456 aa, unidentified
  REGION 1..456: note = Human gut metagenome
MSTCVCVIGSNGERLMPTFRLGKVRRLLKDGKAKIIKHHPFTIQLLYDSKANTQPIEICEDVGYNYIGISVKSQSHEYVSAQYDTLQDEKACHGSCRKLRRTRRNRLRYRKPRFDNRKRGEGWLAPSLRHKKELNVNVVKMYCEVMPVTHAIVEVGSFDTMLVKAIEEGKTTPEGAGYQKGPRYKLATLREAVFYRDNYTCQVCGRKANEGAILHVHHMFYWKGRHGNSLSELVTVCEKCHTPANHQKGGKLYGFGEDIKFANLSGAAFMNTVRWQIVNELYAAFGKPFVTFTYGAMTKEKRIALHLEKSHNNDAYAMGSFHPVDRCAFEHYEKMKRNNRILEKFYDSRYINIRTGEVASGKELFNGRINRNHKKDSENLHKYRGKRIRKGYRALRRKKVALNPGDLVSLNGEILTVHGTHTKKNGSVNVKFKTPSKSGKKSVSLKNLKIINFFVV

SEQ ID NO: 13106 - protein, 421 aa, unidentified
  REGION 1..421: note = Human gut metagenome
MRGRPLMPCSPAKARHLLKAGKAVVRRRTPFTIQLRIATGETKQSVTLGVDAGAKHVGLSATTEKEEVFASEVELRQDITGLLAARLSLRRERRQRKTRYRAPRFLNRVRSKHNGWLPPSVENRIQAHLSRIDAICGLLPVTKIVIETASFDIQKIKHPDVEGTDYQQGDQLGFWNVREYVLFRDGHVCQHCHGHAKDKILNVHHLESRQTGGDAPNNLITLCETCHKACHAGKIKLKVKRGQSFREEAFIGIMRWTLLDRVRKAHPGLPVENTYGYLTKNTRITQGLPKAHCVDAYCIAGNLKAVRRGVYLHQRQVRKHNRQIHKCTVLSKTLKDGTKIGYRKLNQTPHLVKNFRLFDKVRCLGQTGFIFGRRSSGYFDVRRLDGVKISSCINYRKLTLLEKRGTCLTELRKEDGASSPV

SEQ ID NO: 13107 - protein, 420 aa, unidentified; identical to SEQ ID NO: 6507
  REGION 1..420: note = Human gut metagenome

SEQ ID NO: 13108 - protein, 442 aa, unidentified; identical to SEQ ID NO: 2903
  REGION 1..442: note = Human gut metagenome

SEQ ID NO: 13109 - protein, 518 aa, unidentified
  REGION 1..518: note = Human gut metagenome
LANLKLIDELLEKTEYIYVLGTDGKPQMPTNRKVRVRSLFKSGLAKIVDTVPFTIRLLYENDAVLQPITIAEDPGRTNIGAAVLTQLGDLVFSAVVETRNKSIKKLMSDRKAYRQASRRGERKARQRLAKRHGSMIKAGMIMRKLPQYAADKFVTCKIIKNTEARFCNRKRMPDWLTPTVNHLVQTHINLIKKVEKYLPITDVAIEVNRFAFMQMENLDASGVDFQNGPLKGFDDVKAAICEQQHGKCLMCKNDIEHFHHIVPRSKGGSDTIQNQAGLCKKCHAKVHTDAEFQAKFKDKKEGLIKKYGALSALNQAIPFICKELLEIYSVEHVHFCTGKDTSLIRSSLGYEKTKDNQMHEVDAYCIGLAAIGADKAKRPDFNNVFKIKQFRRQDRQLVHYQKERTYYLDGKKIATNRNPRFEQKGDALSDWYKEQIKIYGQYEAEKMRSRLTVKKSKRSYNTTKRLMPGCVFYYDGQRHVMTGQSSYGRYLRAYNCGTKDFPASKCQVIQFNAGLVFV

SEQ ID NO: 13110 - protein, 436 aa, unidentified
  REGION 1..436: note = Human gut metagenome
MYWLTALNISYRKEVPYMVYVLDINGQPLTPTARHGKVRRLLNSHLAKVVKRCPFTIQLLYKSTNEIQPVSLGVDAGSKHIGLAATTEKKVVYQEELIPRNDVVKLLSARRTLRRSRRNRKTRYRKVRFNNRVRSKHKGWLAPSVEVKIQEHITAIKNICKILPVSEIHIETAEFDLQRLKAIEEGKPLPVGTDYQLGEQYDFYNTRQYVLHRDGYTCQCCGTHDNDVKLHVHHIESRQTGGNAPNNLITLCEHCHKALHEGKIELPKNKKRGRSYRDAAFMGIMRNTLLERLKKEIDVPVMMTYGYITKYWREKAGLEKSHINDAICISKHPYAKPLDTYYLTKAVRHHNRQIHKANFSKGGTRKRNQAPYLVKGFRLFDKVLYQGKECFIFGRRVSGRMDVRLLDGTRVNASVGYKNLKLLESRKAYLIERRTC

SEQ ID NO: 13111 - protein, 425 aa, Ktedonobacter sp.; identical to SEQ ID NO: 6721

SEQ ID NO: 13112 - protein, 479 aa, Streptomyces sp.; identical to SEQ ID NO: 11682

SEQ ID NO: 13113 - protein, 511 aa, unidentified
  REGION 1..511: note = Human gut metagenome
MATVYVLSKTGKPLMPTTRCDHVRILLKQKKARVVNLKPFTIQLLYDCKEGTQPIVLGIDPGRTNIGLSAVRKDTGEPVFTAQMETRNKEIPKLMRDRKAFCQKHRCFGRRKVRQRRASAHNTNSSKCAKQEVAQNGGVSKQAQKVGVIKRQLPGCEKPVLCIGIKNKEARFNNRLRPKGWLTPTANHLFQTHINVVNKAKKFLPITDVVLEVNKFVFMALDNPHIQKWMYQRGPLKGYGSVEEAVSVQQGGHCIFCKKEITNYHHIVPQGKRGSNTISNIIGLCSMHHDLVHKDSTWEQKLKTKKQGMNKKYGALSVLNQIIPKLCDSLSAEFSEHFYVTDGRSTKAFRDAYNIKKDHYLDAFCIACSILSVEDVKVPCESNVFLILQFRRHDRRACHQERVDRKYYLDGKRVATNRHKAIEQMNDSLEEYVTNGGCVDKLTAPKHPPLYRRKSRIMPGTVFLVGNKTKVMIASQGTHNGVPNYYRFTNGLRATPKNCKPIYQNTGIVFV

SEQ ID NO: 13114 - protein, 442 aa, unidentified
  REGION 1..442: note = Candidatus Anoxychlamydiales bacterium
CDLSLNREETLSVSDLKTPSNNPEVDNSSIQEAIAAYVYVISKNGKALMPCSKAKARKLLKEEKALIVCHKPFTIKLVFKCENQVQKITLGIDPGYENIGLSAISEKGELFSAEAKLRNNISNLLAKKKSYRRNRRNKLWYRKPRFLNRKKTKNLPPSLEHKLDSHLRMVKKVLSFIPISKINIEVANFDIQKIKNPQIESFQYQRGDLYGYQNLKAYLVEREMAKCQLCSKKSTKGNSFRIHHIIPRNEGGTNKTNNLSLLHEKCHDKLHSKNLLHILKKNRQFKPETFMSSIRWKLVSELKKLCSDTVLSFGYITKIKRNSFKLEKDHHTDAFVIANGSSEKRAQPSLFLQKRKNNRSLQLNRKGLKLSIRRQRYKIQPKDEVQVKNKKYAVIGIFNKGSWLRVRDKAKTFNFQISRVEKHFYNNGWQFIHSLKERVFLP

SEQ ID NO: 13115 - protein, 475 aa, Blautia sp.; identical to SEQ ID NO: 4128

SEQ ID NO: 13116 - protein, 418 aa, Anoxybacillus sp.
SRSLAPCHEAVARKLLKQGKAAIYRRFPFTIILKKSVDESEIKATYRLKIDYGSRHTGLAILRGQEVVWLGQLDHRTDIKERIDKRRAFRRARRNRKTRYRKPRFLNRKRKEGWLPSSLESRVQNIQTWVNRLKKLCPIGYISYENAKFDTQLMRNPEINGVEYQQGTLQGYEVREYLLEKFGRKCCYCGKENVPLEVEHIIPKSRGGTDRVDNLCLACHDCNQRKGSKTAEEFGYSHIQEMVKKTLKDASVVNATRWKVYEVLKQTGLDVECGTGARTKMNRIRLDLPKTHYFDACCVGESTTNHLYFKTKEVLFIKAKGRGSRSRTNLDRYGFPRGYLARQKFFFGFQTGDMVKAVVPRGKYQGVWFGEVACRKTGSFDIKGKDGKRIAQGINYRYVQVIQRFDGYAYGKGVAELA

SEQ ID NO: 13117 - protein, 427 aa, Moorena sp.
MCKVFVLDSEKRPLDPIHSARARQLLRNKKAAIYRRFPFVIILKDSHPDSSVTTLRLKLDPGAQTTGIALVSDATGEVVFAAELKHRGFAIREALTSRRQLRRSRRTRKTRYRQPRFLNRKRSEGWLAPSLQSRVHNIKTWVKKLCKFALIAAISQELVRFDMQLMRNPDLQGKEYQQGLLAGYETREYLLEKWGRQCAYCGVKNVPFQVEHIHPRAKGGTNSVTNLTLSCEKCNTKKGTKDIKEFLKKEPRLLSQILAQAKRPLADAAAVNTTRFALLFVLKATGLPVETGSGGLTKFNRNNQNLPKTHWLDAACVGASTPILNIKGVKPLSIVANGHGSRQSCRTDRFGFPNRHVPREKIHFNFQTGDIVKAVVTTGKKVGNYVGKVAIRSSGSFNISTKNGLVQGISHKFCQRIHAKDGYSYAQ

SEQ ID NO: 13118 - protein, 442 aa, unidentified; identical to SEQ ID NO: 12525
  REGION 1..442: note = Human gut metagenome

SEQ ID NO: 13119 - protein, 278 aa, unidentified
  REGION 1..278: note = Human gut metagenome
MVYVVANDGQPLMPTERHGKVCRMLKSGMAKVVKKCPFTIQLQYESERNVQPVSLGVDAGSKHIGISATTKTKVLYESDVELRDDIVKLLATRRQLRLSRRSRKTRYRPVRFDNRKRKEGWLAPSIRQKIGSHLTVVANVCKILPINQIIVETASFDIQKIKDPEIQGIEYQQGEQMDFWNIREYVLFRDGHTCQCCKGRSKDKILNVHHIESRKTGGNAPNNLITLCETCHKGYHNGTVILPKNIKHGMQFKDAAFMGIMRWTFYNTLKEQYEPDIP

SEQ ID NO: 13120 - protein, 512 aa, unidentified; identical to SEQ ID NO: 3720
  REGION 1..512: note = Human gut metagenome

SEQ ID NO: 13121 - protein, 430 aa, unidentified
  REGION 1..430: note = Human gut metagenome
MPKVYVLNRHGRPLMPCTPAKARHLLDAGKAKVRHRTSFTIQLLYGSTGYTQEVILGVDAGSKTIGLSAATETEELFSAEVKPRNDVVELMSARRQFRRARRNRTTRYRKPRFDNRVRSKHKGWLAPSVEVKIQEHMTAIRRACAILPVSKVVVETAEFDLQLLKAVAEGKPVPQGEDYQKGEMYGHYNVRQYVLWRDSYTCCICGVHGSVRKGVPLHVHHLESRRVGGDAPDNLVTLCTACHDKLHKGIIMAADIKKRKRRSTRDATFMGIMRMTLLRRLREQLPVPVVETRGYITKATRENLLVLPKSHANDALAIAHGPQGFRAEHLPNIRQADRLYTIRPVRHHNRQLHKATILKGGVRKTNQAEKYICGFRLYDKVLYNGIECFVWGRRTSGSFLLRQLNGEKVKDGVSYKHLKLLERSQSYLVA

SEQ ID NO: 13122 - protein, 408 aa, unidentified; identical to SEQ ID NO: 8155
  REGION 1..408: note = gut metagenome

SEQ ID NO: 13123 - protein, 324 aa, Lactobacillus sp.
MKGVQTMQNRVFVINKHGKALMPCKPRKARILLRDGKAKVLKKEPFTIQLLYGSTGYKQDVSIGIDSGQRHIGLAVTSQDKVLFQGEVELRQDVKKLIDTRRIYRRSRRNRKTRYRKARFLNRIAKKKDNWLPPSVASKVNHNINWIKRLLSVLPKADLHIEVGKFDMQKMKNPAINGEGYQQGDLYGYQTVKQFVLARDNYTCQVCKKKGGKLKIHHIIYRSLGGTNTVDNLITVCSNCHTTKNHQTGILAKWCKDKKKVNKSYKGATFMNILRRRLYTAFPQAKFQYGAWTTLQRADLRLTKSHYNDAVAISGIRKIKAKPI

SEQ ID NO: 13124 - protein, 431 aa, unidentified
  REGION 1..431: note = Human gut metagenome
MPNKVHVINKHGCPLMPCSPAKARHLLDAGKAKVKKRTPFTIQLVYGSSGYTQEVILGVDAGSKTIGISASTKKEEVFAADVTPRNDVVDLLSTRREFRRARRNRKTRYRKPRFDNRVRSKHKGWLAPSVEVKIQEHITAIRRVCGILPVSKVVVETAEFDLQLLKAIEEGKPVPQGEDYQQGEMYGHYNVRQYVLWRDNYTCQCCGAHATKKKEVRLHVHHLESRKVGGDAPDNQVTLCDRCHEKLHKGLITEKDLKKRKRRSTRDATFMGIMRKTLMQRLCSELPIPVIETRGYITKATREKLLVLPKSHTNDALAIAQGKHGFNVGYLPGIEQIDKIYTIRPVRHHNRQLHKAAILKGGIRKSNQVEKYVFGYRLFDKVQFNGQDCFIWGRRTSGYFAVKTIDGKVIHNSASFKKLNLVERASNYLIA

SEQ ID NO: 13125 - protein, 516 aa, Streptomyces sp.; identical to SEQ ID NO: 6398

SEQ ID NO: 13126 - protein, 450 aa, unidentified
  REGION 1..450: note = Human gut metagenome
LGRTTGLRAEQAEPAGIRKGDTLKVFVLNMRGKPLMPCSPAKARHMLKAGKAVVVRRTPFTIKLTIATGETKQDVTLGVDAGARHVGISATTEKEEVFASEVELRQDITGLLADRLAFRRARRNRKTRYRSPRFNNRVRSKHKGWLAPSVENRIQAHMSRIDAVCRLLPVTKIVIETASFDIQKIRNPEVEGTGYQQGDQLGFWNVREYVLFRDGHICQHCRGRSKDPILNVHHLESRKTGGDAPNNLITLCETCHKAYHAGKIKLKVKRGQSFRAEAFMGIMRWTLLDRVRKAHPGLPVENTYGYLTKHTRITHGLPKTHCVDAYCIAGNLKAVRRGVYLHQRQMRKHNRQIHKFTVLSKRLEDGTKIGYRKLNQSPYLVHGFRLFDKVRCLGQIGFIFGRRSSGYFDVRRLDGVKLSSGISYRKLTLLEKRSTYLTELRKEDGASSPV

SEQ ID NO: 13127 - protein, 431 aa, unidentified
  REGION 1..431: note = Human gut metagenome
MPNKVYVINKHGRPLMPCSPAKARHLLDAGKAKVKKRTPFTIQLVYGSSGYTQEVILGVDAGSKTIGMSASTTKEELLSAEVKPRNDVVDLLSTRREFRRARRNRKTRYRKPRFDNRVRSKHKGWLAPSVEVKIQEHITSIKRVCRILPVSKVVIETAEFDLQLLKAIEEGKPVPQGEDYQQGEMYGHYNVRQYVLWRDGYTCQCCGAHATKKKEVRLHVHHLESRKVGGDAPDNQVTLCESCHEKLHKGLIAEKDFKKRKRKSTRDATFMGIMRKTLMQRLCSELPIPVIETRGYITKATREKLLVLPKSHTNDALAIAQGKHGFNVGYLPGIEQIDKIYTIRPVRHHNRQLHKAAILKGGIRKSNQAEKYVFGYRLFDKVQFNGQDCFIWGRRTTGIFTIKTINGKMIKDGISFKKLKLVEKSTSYLIA

SEQ ID NO: 13128 - protein, 419 aa, unidentified; identical to SEQ ID NO: 5271
  REGION 1..419: note = Human gut metagenome

SEQ ID NO: 13129 - protein, 456 aa, unidentified
  REGION 1..456: note = Human gut metagenome
MSTCVCVLSNNGERLMPTFRLGKVRHLLKDGKAKIVKHHPFTIQLLYDSKTNTQPIEICEDVGYNYIGISVKSESYEYVSAQYDTLQDEKEHHDDCRRYRRTRRNRLRYRKRRFDNRKRNKGWLAPSLEHTKQLNISLIERYVSVIPITHATVEVGSFDTMLLQSIQKGEAKPEGADYQEGPRYNLATLREAVFYRDNYTCQVCGRKIADGAILHMHHMFYWKGRHGYKLDELVTACEKCHTPANHQKGGKLFGFGEDKEFADLSGAAFMNAVRWQIVNALHTTYSKEFVTITYGAMTKEKRIALQLEKSHNNDAYAMGDFHPVHRCGFRHYQKRRRNNRVLEKFYDATYIDTRTGNKAKGKELFNGRISRNHKKDSENLHKYRSKKVSKGRCSIRRRRYAIQPYDTVRLEGKTYITSGCHNKGTRLLIPVNGKSKSVAISKVQVVCHAGPWIQII

SEQ ID NO: 13130 - protein, 424 aa, Anoxybacillus sp.
KRPLAPCHEAVARKLLKQGKAAIYRRFPFTIILKKSVDESEIVDESEIKATYRLKIDYGSRHTGLAILRGQEVVWLGQLDHRTDIKERIDKRRAFRRARRNRKTRYRKPRFLNRKRKEGWLPSSLESRVQNIQTWVNRLKKLCPIGYISYENAKFDTQLMRNPEINGVEYQQGTLQGYEVREYLLEKFGRKCCYCGKENVPLEVEHIIPKSRGGTDRVDNLCLACHDCNQRKGSKTAEEFGYPHIQKQVKESLKDTSAINSTRWKVYEVLKQTGLDVECGTGARTKMNRIRLDLPKTHYFDACCVGESTTNHLYFKTKEVLFIKAKGRGSRSRTNLDRYGFPRGYLARQKFFFGFQTGDMVKAVVPRGKYQGVWFGEVACRKTGSFDIKGKDGKRIAQGINYRYVQVIQRFDGYAYGKGVAELA

SEQ ID NO: 13131 - protein, 417 aa, unidentified
  REGION 1..417: note = Human gut metagenome
VYVLNKHGEPLMPCSPRKARLLLKQKKACVIKRTPFTVKLLYGSTGYKQPVTLGVDAGSKHIGISATTEKHELYREEATPRNDIVDLLSARRAFRRSRRNRKTRYRAPRFDNRVHSKHKGWLAPSVEVKIQEHITLVEHVCRILPVTLVRVETAEFDTQRLKAMLEGKPLPVGTDYQLGEMYDEYNVRQYVLKRDNYTCQCCGAHSTKTKGVKLHVHHIETRRTGGNAPNNLITLCTACHKALHAGKVTLDGKKRGKPLKDAAFMGIMRKTLMERLRKELKIPVQGTYGYITKCLREKNGIPKSHTNDARCISKNPLAIPCDTCYYTKAVRHHNRQLHKATILKGGIRKANQAPYIVKGYRLWDKVSCNGTECFITGRRTSGYFALKKLDGTVVSNSISYKKLRLLEAATNYITERK

SEQ ID NO: 13132 - protein, 442 aa, Ktedonobacter sp.
MNDASLGGPCIGENRKETMSRVLIVDQQRRPLMPCTPARARLLLKQKKAAVLRRCPFTLILHESRPEAVVQPLRLKIDPGSKVSGLALVNDTSGEVVWAAEVTHRGGQVHKDLQKRAGVRRGRRQRHTWYRPARYLNRRRPKGWLPPSLESRVQNVETWTQRLIFWAPVGSLSYEAVRFDTQALQNPEIEGTQYQHGTLAGLEVKEYLLLKWGQRCAYCEKMGLPLQLEHIIPKIRGGSNRVTNLTLACEQCNGKKGNQTAEEFGFPHLQAQAKAPLKDAAAVNSTRRVLHQRLMRTGLPIEASSGGRTKWNRGERDIAKTHWLDAANVGPSTPARLLFQHVRPWLIEANRRQDRQLCLVNALGFPRSKPKKKSPKHDFRTGDIVRAVVPAHLENPGIYVGRMAAKASGAFTITTKQRKVSDIGYRYCTRLQHTDGYSYLIK

SEQ ID NO: 13133 - protein, 435 aa, unidentified
  REGION 1..435: note = Anaerobic digester metagenome
MVFVLDKHKKPLMPCSEKRARQMLERKRAVIHRMEPFTIRLKDRTAEESKIQPLRLKLDPGSRVTGMAALDESIPEHGKVIFIGEIHHKKGIKQRLDSRRALRSGRRGRKTRYRKPRFLNRVKPKGWLPPSLEARVNQTMNAVAKLRKLLPITAISTEHVKFDTQLMQNPDMSGIEYQQGELMGYEVREYLLEKWKRKCAYCGKENVPLEVEHIIPRARGGSDRISNLAIACTKCNQKKGTKTAEEFGYPEVQKQAKKPLRDAAMMNATRWKLFERLKETGLPVECGTGARTKKQRIEHGLPKTHYYDACCVGASTPDKLTIEPRYVSIWMAMGRGLRQMCRTDKYGFPRAHRSNKKLRFGFQTGDIVVANVPKGKYKGKWRGRVTCRASGSFDIRNGERKMICNTNHKNFRVIQRGDGWDYAKVIAQRCCQDLS

SEQ ID NO: 13134 - protein, 448 aa, unidentified
  REGION 1..448: note = Human gut metagenome
MSTGLRAVQAEPAGIRKGDALKVFVLNMRGQPLMPCSPAKARHLLKAGKAAVRRRTPFTIQLRIATGETKQSVTLGVDAGAKHVGLSAATEKEEVFASEVELRQDITGLLAARLSLRRDRRHRKTRYRAPRFLNRVRSKHKGWLAPSVENRIQAHMSRIDAVCRLLPVTKIVIETASFDIQKIKDPSVEGTDYQQGDQLGFWNVREYVLFRDGHVCQHCHGRSKDKILNVHHLESRQTGGDAPNNLITLCETCHKAYHAGKIKLKVKRGQSFRAEAFMGIMRWTLLDRVRKAHPGLPVENTYGYLTKHTRITHGLPKTHCVDAYCIAGNLKAVRRGVYLHQRQMRKHNRQIHKFTVLSKRLEDGTKIGYRKLNQSPYLVHGFRLFDKVRCLGQIGFIFGRRSSGYFDVRRLDGVKLSPSISWRKLTLLEKRSTYLTELRKQDGASSPV

SEQ ID NO: 13135 - protein, 512 aa, unidentified
  REGION 1..512: note = Human gut metagenome
MSTVYVLNKDGKPLMPTTRGGHVRHLLKEQKARVVRAKPFTIQLLYETNDVVQPLYLGIDPGRTNIGVAVVKANGTAVFTAHLETRNKEVPKLMQDRKKARRARRTNGRRCRRQRRAKANGTISKKCVKQDTAQSKNPSKRAKEIGIIKRRLPGYKKDVLCIGIKNKEAKYTNRTRPEGWLTPTANQLLQTHINLVRKMQKFLPISDVVLEVNKFAFMRLDNPDIQKWQYQQGPLYQKGSLENAVSEMQEHHCLFCDKPIDHYHHVVPQSENGSNTIANIVGLCAEHHNLVHKDAAWQKKLAEEKVGLNKKYGALSVLNQIIPALTNKLSVLFPKHFFVTAGKSTHDYRAAHGVSKDHWLDAYCIACSVLPSNVCDSNINNHMPYELKQFRRHDRRVLNNENMNRVYTLDNKAVAINRHKATEQEAASLEEFRKEHPNDVCKLKVKEHHPTYRNMNRNYPGSIFLVGKHVHIMQGIAGSKDGKATTYKDSNANSITASKCKFVAKNSGILFV

SEQ ID NO: 13136 - protein, 279 aa, unidentified
  REGION 1..279: note = Human gut metagenome
VVIETAEFDLQLLKAIADGKPVPQGEDYQQGEMYGHYNVRQYVLWRDGYTCQCCGAHATKKKEVRLHVHHLESRKVDGDAPDNQVTLCESCHEKLHKGLIAEKDFKKRKRKSTRDATFMGIMRKTLMQRLCSELPIPVIETRGYITKATREKLLVLPKSHTNDALAIAQGKQGFNVGYLPEIAQIDKIYTIRPVRHHNRQLYKATILKGGIRKSNQTKKYVFGYRLFDKVQFNEQDCFIWGRRTTGIFTIKTINGKMIKDGISFKKLKPVEKSTGYLIA

SEQ ID NO: 13137 - protein, 465 aa, unidentified; identical to SEQ ID NO: 10727
  REGION 1..465: note = Human gut metagenome

SEQ ID NO: 13138 - protein, 414 aa, unidentified
  REGION 1..414: note = gut metagenome
MPCSPAKARLLLKEKKAIVVRRTPFTIQLTIATGESKQPVSLGVDAGYKHVGLSASIEKAELYASEVELRKDITDLLSARRALRQSRRNRKTRYRAPRFDNRIRTKRKGWLAPSVENRINAHLSRIEAVLRLLPITKITVETASFDMQRLKNPDISGKEYQEGEQLGFWNVREYVLFRDGHVCRHCHGRSKDPVLNVHHLESRRTGSDSPDNLITLCETCHKALHRGEITLKAKRGQSFRAQAFMGIMRREVLNRLKASYPELKVHETYGYLTKHARIANGIVKSHGADAFCIAGNLGAERLGEFFFQKQTRRNNRQIHKLSILKGGIRKRNQAPFEAKGFRLFDKVACQGEEGFIFGRRSSGSFDVRKLDGTRISAGISYKKLRLLEKRRTYLTEIRKEEALPPLPEGRGLRA

SEQ ID NO: 13139 - protein, 442 aa, unidentified; identical to SEQ ID NO: 3161
  REGION 1..442: note = Human gut metagenome

SEQ ID NO: 13140 - protein, 415 aa, unidentified; identical to SEQ ID NO: 6883
  REGION 1..415: note = Human gut metagenome

SEQ ID NO: 13141 - protein, 294 aa, Parasutterella sp.
AHLSRIEAVLRLLPVTKITVETASFDLQLLKNPDISGKEYQEGEQLGFWNIREYVLCRDGHVCQHCYGRSKDPVLNVHHLESRRTGGDSPGNLITLCETCHKALHRGEITLKVKRGQSFRAEAFMRIMRWEVLNRLKASHPELEVNNTYGYRTKHARIANDIANSHCADAFCIAGNLGAERLSEFFFQKQTRRNNRPIHKLSILKGGLRKRNQAPYEIKGFRLFDKVACQGEEGFIFGRRSSGYFDVRKLNGTHISAGISYKKLRLLEKRQTYLIEIRKEEALPPLPEGRGLRA

SEQ ID NO: 13142 - protein, 420 aa, unidentified
  REGION 1..420: note = Human gut metagenome
MQYVYVLNKHGEPLMPCSPGKARLLLKQQKACVVKRTPFTIKLLFGSAGYKQPITLGVDAGSKHVGLSASTEKRELYSEEFTPRSDVVELLSTRRQNRRSRRNRKTRYRVPRFDNRVHNKHKGWLAPSVEVKIQEHITVIKHICKILPISLVRVETAEFDTQRLKAMLAGKPLPVGTDYQLGEMYDEYNVRQYVLKRDHYTCQCCGTHNTAKKVVKLHVHHLESRKTGGNAPSNLVTLCTTCHKNLHKGRVTLDGKERGKPLRDAAFMGIMRKTLMVRLKEELPIPVQGTYGYITKMRREQNNIKKSHTNDARCISKHPLAEPCSVCYRTKAIRHHNRQTHKANFSKKGIRKRSQMPYLVEGFRLWDKVLYKGQECFVSGRRSSGSFALKKLDGTSISKGVTFKKLRLLEPATNYLIERM

SEQ ID NO: 13143 - protein, 414 aa, unidentified; identical to SEQ ID NO: 2588
  REGION 1..414: note = Human gut metagenome

SEQ ID NO: 13144 - protein, 420 aa, unidentified
  REGION 1..420: note = Human gut metagenome
MQYAYVLSKHGEPLMPCSPGKARLLLKQQKACVVKRTPFTIKLLYGSAGYKQPITLGVDAGSRHVGLSASTEKRELYREEFSPRNDVVKLLSTRKQNRCSRRYRKTRYRPPRFDNRVHSKHKGWLAPSVEVKIQEHITVIKHICKILPISLVRVETAEFDTQRLKAMLAGKPLPVGTDYQLGEMYDEYNVRQYVLKRDHYTCQCCGAHNTAKKVVKLHVHHLESRKTGGNAPGNLITLCATCHENLHKGKVTLDGKERGKPLRDAAFMGVMRKTLMARLKEELPIPVQGTYGYITKMRREKNDIKKSHTNDARCISKHPLAEPCSVCYRTKAIRHHNRQTHKVNFSKGGYRKRSQTPYLVEGYRLWDKVLYKGQECFVSGRRSSGSFALKKLDGTTISEGVTFKKLRLLEPATNYLIERM

SEQ ID NO: 13145 - protein, 476 aa, unidentified; identical to SEQ ID NO: 3164
  REGION 1..476: note = Human gut metagenome

SEQ ID NO: 13146 - protein, 413 aa, Moorena sp.; identical to SEQ ID NO: 2636

SEQ ID NO: 13147 - protein, 419 aa, unidentified; identical to SEQ ID NO: 6355
  REGION 1..419: note = Human gut metagenome

SEQ ID NO: 13148 - protein, 461 aa, unidentified
  REGION 1..461: note = Human gut metagenome
MRKSLYIIVELKSEQLYGNSITVQQSTHHLPFGRVFIRRNLFIVYVISQDSKPLMPCSNPIARLLLKQGKAKIKSREPFTLKLIYETTDYTQDLTLGVDTGSGTIGTAVSKDNGDIVYMSEVVVRNDITDKMTQRAKYRRNRRNRKTRYRKARWLNRSNSIKKDRFSPTMQSKLHSHVREIEYIQSILPITEMVFETGQFDMHLMKNPILANPKVRSWGYQKGANYGFENTKAMVLNRDNYTCQYCKGKHKDTKLEVHHIVFRSQGGSDEESNLITLCHTCHKDLHSGKINFKLSGKVKGNLKYATQMNSIRKQLFRLYPNAIETFGYVTKMNRLHLGIDKEHYYDACTIATQGNAFNVKSNLYKKKCVSDGDFQKTKGIRSEQSIVTDKICGFRKFDKVRYFGNDYFIKGRMSTGYAILMDIDGNKIDFSTMPRGYKTPKLSNCKRITARSTLMTQVKVV

SEQ ID NO: 13149 - protein, 413 aa, unidentified
  REGION 1..413: note = Human gut metagenome
LKVFVLNMRGKPLMPCSPAKARHMLKAGKAFVVRRTPFTIKLTIATGETKQDVTLGVDAGARHVGISATTEKEEVFASEVALRQDITGLLADRLAFRRARRNRKTRYRAPRFNNRVRSKHKGWLAPSVENRIQAHMSRIEAVCRLLPVTKIVIETASFDIQKIRNPEVEGTGYQQGDQLGFWNVREYVLFRDGHICQHCRGRSKDPILNVHHLESRKTGGDAPNNLITLCETCHKAYHAGKIKLKVKRGHSFRAEAFMGIMRWTLLNRMRKAHPSLPVENTYGYLTKHKRIALGLPKTHCADAFCIAGNLKALRRGDFLFQQQTRKHNRQIHKCSILKGGVRKLNQAPFLVKGFRLFDKVRIGGQIGFVFGRRVRGTFNIRRLDKTVIGTDINCKKLSLLETRKTFLTELRKE

SEQ ID NO: 13150 - protein, 432 aa, unidentified; identical to SEQ ID NO: 6070
  REGION 1..432: note = Human gut metagenome

SEQ ID NO: 13151 - protein, 447 aa, unidentified
  REGION 1..447: note = Human gut metagenome
LKGLSRTCGSLRFKEKTLKVFVINKRGKPLMPCKPAKARHLLRDGKARVVRRTPFTIQLTIATGENVQSIHLGVDAGSKHIGLSATTEKEELFSSEVELRKDITDLLSSRREMRRARRNRKTRYRAPRFDNRVHAKNKGWLAPTLENKISAHLSRIKAIRAILPVSRITIEVASFDIQKIKNPEIEGEQYQQGEQLGFWNVREYVLFRDGHKCCHCHGKSKDPILNVHHIESRKTGGDAPNNLITLCETCHKAYHAGKIQLTSKRGKKFTDATHMGILRWELLKRAKEANLGIPVKATFGYITKARRIQFGIAKTHCADAFCIAGNLNAKRLGEYLYQKQTRKHNRQIHKMAILKGGYRKRNQAPFEVFNFRLFDKVRFGGNVGFVFGRRTSGSFAVRTLFGEKLSEGVSYKKLSLLERRTTFLTQLVKEGAIPPVSKDTGFLARFL

SEQ ID NO: 13152 - protein, 431 aa, Moorena sp.; identical to SEQ ID NO: 2831

SEQ ID NO: 13153 - protein, 427 aa, unidentified
  REGION 1..427: note = Human gut metagenome
MPCRPARARRLLRAGRARVVKRFPFVIRLVDRTVEQSEVQPVLIKLDPGSRETGAAVVRDDEKKRHHALAFFVIKHRGGAIRDALKARSAFRRRRRSQNFRCRSPRFLNRVKPKGWLPPSLRHRVETTLSFVRRMCRYLPVSGIATELVKFDSQKLQNPEVSGVKYQQGTLFEYEVREYLLEKFGRKCVYCGAEGVPLNIDHVVPRAKGGSNRVSNLVLACVSCNQKKGARSLEDFLKGKPEVLARVRRELKTPLRDAAAVNATRWVLFNELKATGLPVETGSGALTKLNRHAFGVEKEHWLDALCVGRLNGVVTRKGLNALEIRCMGRGSRQRTRLTKYGFPRGYLMRQKCVHGFATGDMVEANVPKGKKAGLWRGRVAVRVSGSFNIQTPKGVIQGVGWKHCRLISHNDGYGYAWLGHAPHSSPA

SEQ ID NO: 13154 - protein, 529 aa, Moorena sp.
LEVAAADKPRVGTKRAATGELTLTLCCTTWSRGAAPQGARHQARKGNAPDVFRRHNKELGLAVCVLDRSGKALMPCSEKRARLLLARGRARVHRVVPFIIRLVDRRAHASRFQPLRIKVDPGSRTTGLALVRDTQLVDATSGEIQRGAAVLNLFELVHRGRQISEALSARRAMRRRRRGNLRYRAPRFLNRTRPAGWLAPSLEHWVATTMAWVNRLMDWTPVAALSSELVRFDMQALENPEIASVEYQQGTLAGYEVREYLLAKWGRRCAYCDQEHVPLQIEHILARASGGTNRISNLTLACACCNAKKAARPIEAFLARDPKRLAVILAQAKRPLKDAAAVNATRSALANALRATGLPVELASGGCTQFNRKQLGLPKTHALDAVCVGKVASVSVWYKPTLAVKCTGRGSYQRTRLDRYGFPRGYLTRSRRVHGFQTGDLVRAEVPTGKKAGRHTGRVAVRATGSFNIQVAGNVVQGIAHRHCRLIQRSDGYGHSRIALLKGDASDGTASLSALSLPAVNDGVSRAAG

SEQ ID NO: 13155 - protein, 422 aa, unidentified
  REGION 1..422: note = Human gut metagenome
MSLVYVLNEKGLPLMPTHRCGKVRHLLKDGKAKIVKRNPFTIQLLYKCKDQTQPITLGVDAGSKHIGLSASTTKEELYSSDIKIRNDIVNLLSTRREARRTRRNRLRYRKPRFNNRVSTKKEGWLAPSVEHKIESHLKVIENVYKILPISKLIVEVASFDTQLLKAQELDLPLPEGKDYQNGEMLGYNTREYVLFRDNHKCQHCHGKSKDKVLNVHHLESRKTGGNAPNNLITLCETCHNLYHQGKVELKIKRGAKYNDATFMGIMRWSLYNRLNEIYSNVQLTYGYITKHNRIRLGLSKEHYNDAYCIAGNFEAKPLDTTLHQKKVRCHNRQIHKSNFLKGGKKKLNQAPYIVKGFRLFDKVLYENQELFIFGRRQRGYFKIRNLSNTISFGDVNCKKLELLSTRKNYLQEERRRQFRSTL

SEQ ID NO: 13156 - protein, 477 aa, Blautia sp.; identical to SEQ ID NO: 2707

SEQ ID NO: 13157 - protein, 460 aa, unidentified
  REGION 1..460: note = Human gut metagenome
MVAVVDLFGKPLMPTNEYRARRLLKQKKAKIFGYRPFTIQLTERKSTEIQPIELCMDTGYIHIGISAKSERHEYLGMQIDTLTDEKLKRDDKRQYRRQRRNRKRYRAPRFDNRRRKEGWIAPSLEHKKEIHIDAIQRICKVMPITDITLEMGNFDTHVLKAVEEGKPLPQGSDYQHGERYGIATLREAVFLRDGYKCQCCEKSVKDGAILHVHHIKYRSQGGTNRMSNLITVCDKCHTPKNHKPGGKLWNWKPKLAEFKGVSYMTSIRWTLYNEVTALLPNSSVHITYGAKTKESRRKLDIKKSHVNDAYVMGLFCPKHRTKPVYFKKKRRNNRVLEKFYDAKYIDSRDGKKQSGQELFNGRISRNHRKDSENLHLYRKQKVTKGKRSIRNKHYPIQPHDILLYQKKKYENAGCHNNGSRVILLPEKKSVALKQLTIYQYAGGYYRVPYESNKKEERTGS

SEQ ID NO: 13158 - protein, 498 aa, unidentified
  REGION 1..498: note = Human gut metagenome
MAVVYVLSVGGEPLMPTTRCGHVRILLKEKKARVVERNPFTIQLAYETEGVTQHLYLGIDPGRTNIGAAVVREDGECMFTAQLTTRNKDVPKLMKARKQYRMVHRRLKRRCKRQRRAKAAGTISPQKEIQRLLPGCEEPIICKGIQNKEARFNNRTRPAGWLTPTANHLLQTHINLVKKLQKFLPITDVVLEANRFAFMAMENPRIQRWQYQRGPLFCKGSVEEAVYAAQDGHCLFCEKGIDHYHHVVPRRKNGSETLENRVGLCEEHHRLVHTEDAWTKRLAAKKAGMNKKYHALSVLNQIIPSLTEQLAELFPQHAFVTTGQDTYYFREDHDIPKDHYLDAYCIACSVLSNAQKVSPPKREPYDIRQFRRHDRQACHKANITRKYYDADGKLVAANRHKAMEQKSDSLVEYRENHSEVEVSQLSVKDHFPQYKEMSRPMPGSLLVNNGGKLFALMRSDGKHNGKADYFVDTQGIKHLAKRCILLQNNQGIIFAGIG

SEQ ID NO: 13159 - protein, 424 aa, unidentified
  REGION 1..424: note = Human gut metagenome
MRVFVFNMRGVPLMPCTQRKARILLKEGKAVIYKYNPFTIQLTHATGENTQDCHVGIDTGAKHVGVAITSEGKVLFKGEIELRQDVKSNLDTRRIYRRSRRNRKTRYRQPRFLNRRKADKWLPPSLQNRLDHTFHWIDTLRGLVPSPTLHIEVGKFDTAKMIDPEIHGVDYQHGQTYGFFDERYYVFARDNYTCQCCGKSKGKILQTHHIIYRSNGGTDRADNLITVCTDCHTSKNHQKGGILYKWQEQHKKVRQYKEPPFMNTLRRRIFAKYPDAAITYGSKTTPKRKEKGLDKTHYNDAIIISGVQTISENPDEWLFIRQFRKKKRSLHEGIPRKGRKEPNRTQKRNSKNTPYYCGYHLNDKVRVLGKTGYISGFTGGAAYVKDSDNQYITLPNKSYKQVGISNLQHVCHNNNWQYITKTTA

SEQ ID NO: 13160 - protein, 576 aa, unidentified
  REGION 1..576: note = Human metagenome
MDFVLIVDKNNKPCIPIKNGKAGYLLREHKAEIINHEPLVIKRTDDYNSDLENRDIFELKVDSGYLNIGFSVSDNEHEYIAGQVEMLNGMSNRLLERKSMRSFRRNRLRYRKNKNIDYKTVHNPTYKNGNEDGWFAPSIVHKMETHIRIIEQLKQWVPIDKVIVEVANFDIAAMDAYLKDGTILNGKDYQNGEMKGYENVVSYVRARDNYSCYFCNKKKKKDGTLKEKPKRIEVHHKIPRSWGGTNNPGNLICVCQGCHQKIHSNNNNNKYFKELLEQALQENTFKDSTYMNIVRWELLNRLTEKYPELDIEAEYGYNTKINRKEAGLRKFHYNDAVCIKEFKNITLSKKVFIVEQKRCNDRKMESFADAKYIDSRDGKKKKGNDLKVIRHSTKSKRSTNKEHIDNERIFRKEKVSKGKIQFECHLYCVKPGDLIYIKEGKHKGKIAEVSTIQIVGEKIPNPIIDINEINNKKIDFNRELKKRKTTSNMTDYQKRFAKYQIRFTYKESDADGPSITLTQKEYEKLKENKSDRVKIIRTRRGLVWREYDRLTYEAENMDQEEKKLEVKNKKQELKAA

SEQ ID NO: 13161 - protein, 416 aa, unidentified; identical to SEQ ID NO: 8117
  REGION 1..416: note = Human gut metagenome

SEQ ID NO: 13162 - protein, 447 aa, unidentified
  REGION 1..447: note = Human gut metagenome
VPAYRIKHITKKEAPYMVYVLDIDGQPLMPTSRHRKVRKLLNSHLAKVVKRCPFTIQLLYQSTKETQPVSLGVDAGSRHIGLAATTEQKVVYQEELVPRNDVVKLLSARRALRSSRRSRKTRYRKPRFNNRVHSKHKGWLAPSVEVKIQEHITAIKRICQILPISDIHVETAEFDLQRLKAMEEGRPLPVGTDYQLGEQYDFYNTRQYVLHRDEYTCQCCGTHDNNVKLHVHHIESRQTGGDAPNNLITLCEHCHKLLHAGKTILPKGKKRGKSYRDATFMGIMRKTLLERLKKEIDVPVEGTYGYITKYWRERAGLEKSHINDAICISKHPYARPLETYYLTKAVRHHNRQIHKAKFSKGGIRKRNQAPYLVKGFRLFDKVLYQGESYFIFGRRITGYFDIRTLDGTKVNKGSTSYKKLRIQDTAEAYLTEVRAIPHMNEFTCVLA

SEQ ID NO: 13163 - protein, 442 aa, unidentified; identical to SEQ ID NO: 4418
  REGION 1..442: note = Human gut metagenome

SEQ ID NO: 13164 - protein, 449 aa, Desulfobacter sp.; identical to SEQ ID NO: 4619

SEQ ID NO: 13165 - protein, 464 aa, unidentified
  REGION 1..464: note = Human gut metagenome
NDVVQPLYLGIDPGRTNIGVAVVKADGTAVFAAHLETRNKKIPKLMQDRKKARRARRTNGRRCRRQRRAKANGTISKKCVKQDTAQSKNPSKRAKEIGVIKRHLPGCKKDVLCVGIKNKEAKYTNRARLEGWLTPTANQLLQTHINLVKKIQKFLPISDVVLEVNKFAFMRLDNPNIQKWQYQRGPLYQKGSLENAVSEMQEHHCLFCEKPIEHYHHVVPKSENGSNTIANIVGLCAEHHNLVHKDVAWQEKLVEEKTGLNKKYGALSVLNQIIPALTKELSFLFPKHSFMTNGKSTHDYRAAHGISKDHWLDAYCIACSVLPIDVCDSTINNCVPYELKQFRRHDRRALNNENMNRVYTLNDKVVATNRHKATEQEAASLEEFRKEHPNDVCKLKVKEHHPTYRNMNRNYPGSVFLVGKQIHVMQGIASSKDGKATKYNDTRATTIAAGKCKFVAKNSGILFV

SEQ ID NO: 13166 - protein, 413 aa, unidentified; identical to SEQ ID NO: 2605
  REGION 1..413: note = Human gut metagenome

SEQ ID NO: 13167 - protein, 424 aa, Calothrix sp.
MSNYVFVIDTNKKPCNPVHPAVARKLLKEKQAAVFRRFPFTLILKIKLTEPTREIQLKIDPGSKTTGIALTQGSYVIWGAELTHRGGIIKDALQSRRSLRRSRRNRHTRYRQPKFLNRTRRDDWLAPSLQHRVETTITWVNKLIKFVPITGISQELVRFDLQQIENPEISGTEYQQGELVGYEVREYLLNKWDRKCSYCGIQNVPLQIEHIRCIAKGGTNRISNLCLACESCNLKKGTQDIEDFLVKKPLVLKQILSQAKRPLKDAAAVNSTRWALFNRLKKTGLLVTTGSGGLTKFNRTRLNLEKTHWLDAACVGKVDTLKVLTKKPLIIKSTGHGTRQQCRTDKFGFPSRYCSINKFHFGFQTGDIVKAIVKTGKKIGNYIGRIATRSTGSFNISTSNGLVQGISHKYCKAIHKKDGYNYSN

SEQ ID NO: 13168 - protein, 524 aa, unidentified
  REGION 1..524: note = Human gut metagenome
MEILRIDWKDICPTGQSGLPQKELFMRPVYVLDMNGKPLMPTCRFGKVRRMLKSGEAKVVDTLPFTIQLDRPTKTHVVQSVTLGCDPGRTNIGLAAVRSDGTDLYRSHCETRNKEVVDLMDTRRAARRASRRGERLARKRLAAKHETATTFPDGRKLPGYEKPIMLKDIINTEARFNNRVRPAGWLTPTATQLLRTHLNLIKRISRILPVSDIALEINKFTFMQLDEPDKNKWNIDFQHGPLYGTGGLKAAVRQLQNDTCLLCQENVIEHFHHLIPRSKRGDNTINNIAGLCQKCHEAVHKSADTAEKLSTLKKGQTKRYGGTSVLNQIIPKLVEELGKTYHEHLHLTYGWQTKEFRTKHKLEKTHDTDAYCIAAGTMQTVKPNIRTDVYEIKQFRRHNRANIHHQTERTYKLNGQTVARNRRKRTDQKTDSLAEWFENTVKQYGQQKAEHLRAGLKVRKSTRYYNSKDRVMPGAVFQYEGNRYVVTGQLSGGQYYRAYGKGNQNFPVKKIRIISLNRGLVYVA

SEQ ID NO: 13169 - protein, 414 aa, unidentified
  REGION 1..414: note = Human gut metagenome
MPCSPAKARLLLKEKKAIVVRRTPFTIQLTIATGETKQPVSLGVDAGYKHVGLSASTEKAELYASEVELRQDITDLLSARRALRQSRRNRKTRYRAPRFDNRIRTKRKGWLAPSVENRINAHLSRIEAVLRLLPVTKITVETASFDLQLLKNPDISGKEYQEGEQLGFWNIREYVLCRDGHVCQHCYGRSKDPVLNVHHLESRRTGGDSPGNLITLCETCHKALHRGEITLKAKRGQSFRAEAFMGIMRWEVLNRLKASHPELEVNNTYGYRTKHARIANDIAKSHCADAFCIAGNLGAERLGEFFFQKQTRRNNRQIHKLSILKGGIRKRNQAPFEVNGFRLFDKVACKGEEGFIFGRRSSGFFDVRKLDGTCISAGISYKKLHLLEKRRTYLTEIRKEEALPPLPEGRGLRA

SEQ ID NO: 13170 - protein, 358 aa, unidentified
  REGION 1..358: note = Human gut metagenome
TEKAELYASEVELRQDITDLLSARRALRQSRRNRKTRYRAPRFDNRISTKRKGWLAPSVENRINAHLSRIEAVLRLLPVTKITVETASFDLQLLKNPDISGKEYQEGEQLGFGNIREYVLCRDGHVFQHCYGGSKDPVLNVHHLESRRTGGDSPDNLLTLCETCHKALHRGEITLKTKRGQSFRAETFMGIMRWEVLNRLKASHSELKVHNTYGYLTKHARIENGIAKSHGADAFCIAGNLGAERLGEFFFQKQTRRNNRQIHKLSILKGALRKRNQAPFEVKGFRLFDKVACQGEEGFIFGRRSSGFFDVRKLDGTRISAGISYKKLHLLEKRQTYLMEIRKEEAFPPLPEGRGLRA

SEQ ID NO: 13171 - protein, 438 aa, Clostridium sp.; identical to SEQ ID NO: 4933

SEQ ID NO: 13172 - protein, 483 aa, Moorena sp.
MQKLRERRLTNTPQGIPQALCNCGLSLNSPEGRDSAAGLKTSLNSPDAALTARGHAGQNLRVSVVYVLNKRGKPLMPCSPGKTKVLLKENKAKVVKRTPFTIQLTMATGEVRQSITLGVDSGYSRIGLSAVTDKQEIYSAQVNLRTNMVKLNSERRQYRRFRRHRKTWYRKPRFLNRRKPEGWLAPSIQNKFDTQIKLIGKVGEILPISQINIEVAAFDIQKIRNPDISGIEYQNGEQKGFWNVREYVLHRDNHTCQRCKGESKDLVLEVHHIVSRQIGGNRPDNLITLCSTCHEKVSKAELKLNISPSKEFKAETFMSTVRWMLVNELKGLGNVVFPTYGYITKQKRRELKFPKSHINDAFLIAGGTIQNRVGVEYLIQQVRKCNRKLFKGARSHIKNTAERFIYGFQRFDKVLWKGIECFIIGRRKTGYFDLRKLDGTKIHASAKAKELSLLERAKTLLIERKATFLPSLTEGVSAPRFLR

SEQ ID NO: 13173 - protein, 447 aa, unidentified
  REGION 1..447: note = Human gut metagenome
VPAYRIKHITKKEVPYMVYVLDIDGQPLMPTSRHRKVRKLLNNHLAKVAKRCPFTIQLLYQSTKETQPVSLGVDAGSRHIGLTATTEQKVVYQEELVPRNDVVKLLSARRALRSSRRSRKTRYRKPRFNNRVHSKHKGWLAPSVEVKIQEHITAIKRICQILPISDIHVETAEFDLQRLKAMEEGRPLPVGTDYQLGEQYDFYNTRQYVLHRDEYTCQCCGTHDNNVKLHVHHIESRQTGGDAPNNLITLCEHCHKLLHAGKTIIPKGKKRGKSYRDATFMGIMRKTLLERLKKEIDVPVEGTYGYITKYWRERAGLEKSHIHDAVCISKYPYAKTLDIYYLTKTVRHHNRQIHKSNFSKGGIRKRNQAPYLVKGFRLFDKVLYQGKSYFIFGRRATGFFDIRTLNGAKVNKGSISYKKLRIQDTANAYLKEIKAIPHMNKFTCVLA

SEQ ID NO: 13174 - protein, 461 aa, Eubacterium sp.; identical to SEQ ID NO: 13148

SEQ ID NO: 13175 - protein, 479 aa, Acidithiobacillus sp.; identical to SEQ ID NO: 8867

SEQ ID NO: 13176 - protein, 413 aa, unidentified
  REGION 1..413: note = Human gut metagenome
MTSYAFVLDANGKQLAPAKEQKAWFLIRKKRAALVSKYPMVIQLKKEIPENEICKDEIRCGIDDGGLHVGIALVQKCKTKNKVVFKGTIEQRNDVKHLMEVRRNYRRYHRYHKRYRQARFDNRKSSKREGRIAPSILQKRQATIRVIHWLNKWINITNYWLEDVSVDIRALTDGYQSYRWQYQKSNRLDENIRKAAILRDDGKCMECGKSNCRLEVHHIKPRRRNGSNTLDNLITLCESCHQKTEGQEELYMDRYFSLLKSSDNKNLNYAQHVMIGKMWLRKQLSGLGVLYLTSGGDTANKRIDWNIEKSHANDAVCITDLQPDTCDMKEWTMKPMRRQSKAKTDHVLGIHHRDLVEYTFKNGETHRGYVTALYPEQKAINFQSPTKHCKKVNARKCKLLWKYSKIYWFENAS

SEQ ID NO: 13177 - protein, 442 aa, unidentified; identical to SEQ ID NO: 2903
  REGION 1..442: note = Human gut metagenome

SEQ ID NO: 13178 - protein, 494 aa, unidentified
  REGION 1..494: note = Human gut metagenome
MTMVYVQNKDGKPLMPTTRYCYVRLLLKENKARVVSTTPFTIQLNYDTPDITQDLILGIDPGRTNIGVAVVKEDGQCVFSAHLETRNKEVPLLMKKRAAFRRQHRTQDRRRKRQRRAIAAGTTVESNTIERLLPGYEKPIVCHHIRNKEARFNNRCRPAGWLTPTANHLLQTHINLIAKVAKFLPITKVVVELNRFAFMAMDNPNIRRWEYQQGPLYGLGSVEDAVYAQQDGRCLFCKKPIDHYHHVVPRHKGGSETLANRCGLCREHHALVHTDKVWADKLVTRKEGVNKKYHALSVLNQIIPHLMEYLGSETRYDVYATDGRSTKGFRVAKNVPKEHYTDAYCIACSILDTDIEVSTPVEPFELKQFRRHDRQACHQQRVDRKYYLDGKQVATNRHKAIEQKSDSLQEFRESYGDTAVSQLTVKPHPPQYKDMTRIMPGAVMNFCGAVGILLGSDGFHNGKPDYYKSTKEEKVRMRRCALLAQNAGMVFIPA

SEQ ID NO: 13179 - protein, 494 aa, unidentified; identical to SEQ ID NO: 7601
  REGION 1..494: note = Human gut metagenome

SEQ ID NO: 13180 - protein, 443 aa, Anoxybacillus sp.
MVEENMTCFMQRKGENPMVFVLDTNKRPLAPCHEAVARKLLKQGKAAIYKRFPFTIILKKSVDESEIKATYRLKIDYGSRHTGLAILRGQEVLWLAQLDHRTDIKERLDKRRAFRRARRKRKTRYRKPRFLNRRRKDGWLPPSLESRVQNIQTWVERLRKICPIEHISYENAKFDTQLMRNPEINGVEYQQGTLQGYEVREYLLEKFGRKCCYCGKENVPLEVEHIIPKSRGGTDRVDNLCLACHDCNQRKGSKTAEEFGYPHIQKQVKESLKDTSAINSTRWKAYEVLKQTGLDVECGTGARTKMNRIRLDLPKTHYFDACCVGESTTNHLYFKTKEVLFIKAKGRGSRSRTNLDRYGFPRGYLARQKFFFGFQTGDMVKAVVPRGKYQGVWFGEVACRKTGSFDIKGKDGKRIAQGINYRYVQVIQRFDGYAYGKGVAELA

SEQ ID NO: 13181 - protein, 405 aa, Moorena sp.; identical to SEQ ID NO: 5151

SEQ ID NO: 13182 - protein, 515 aa, unidentified
  REGION 1..515: note = Human gut metagenome
MTALEEKLSKTEYIYVLGFDGKPQMPTRRKRHVLKLLKTGRARIAEDIPFTIRLTYRNAPVLQPVTLAEDPGRTNIGAAVLSPLGDLLFAAVIETRNKEIKKLMTDRRKSRQASRRGERKARQRLAKRYGSMVKSGMVMRKLPMYAADRFVTCKFIRNTQARFCNRKRCPDWITPTVQHLMQTHLNIIRKISRYLPVTDIAFEVNRFAFMHMENPEAMGVDFQNGPLKGYGDVKEAIRTQQHGKCLMCKKPISHFHHIVPRSRGGSDTIQNLAGLCPECHTKVHTDTAFRKDFDEKKSGQLKKYGALSALNQAVPFICKKLLEEYGEEHVHFCRGLDTSLIRTALGFEKTKKNQMHEVDAYCIGLAALEVNEVETPAFDHTFQIRQFRRQDRSIIHHQTGRSYYQGKEKVAQNRKPGFEQKTTALSQWYKEQVRIHGEKEAEKLRSQLWVEKSCRHYNDMDRFLPGAVFLYEGKRYVLSGRITNGKYLRACGQGMKNFPAAECTFIRHNAGLVFI

SEQ ID NO: 13183 - protein, 475 aa, unidentified
  REGION 1..475: note = Human gut metagenome
MVAVVTSTGKPLMPTSAYRARKLLKKGRAVIFKYRPYFTIQLVDRADGEVQEVEYKSDTGSVHVGISVCTEKKELLSEQRDLLENEPEHHNDRKKNRRTRRNRKRYRKPRFDNRKKKPQEGHEKWLPPTLLHKMEVQVRLFREFCRVVPVTSACFEMGKFDTQALKAVSKGEPVPEGEGYQKGERYGTDTLRAAIFLRDGHTCRFCGRSVKDGAILHVHHVGYWKGDRTNRPANLASACEQCHTPANHGKNGLLYGKEPEFKTLKDASYMTSVRWIMLDEIKKAAPGVQVSVTYGVTTKRKRQELHLPKSHVNDAFSMASFHPKKRSDTEYWKKIPRHDRVLQKFYDAIYLDTRDGSEKKGSELSNGRISRNHKKDSENLHQYRGHKVSKGHNSIRRGASSLKPGSIVMYKGEKMTVHGTHTRYVKGKDGKTAKKVNVQFTCPASDGKKSASLEKCTPVSRVYNTGWKRYWPDKK

SEQ ID NO: 13184 - protein, 504 aa, unidentified
  REGION 1..504: note = Human gut metagenome
MAWEAIQTRRIKPHDIGEGTLRRHAAGTVSFPVLCKNRKETLMSVLVIGRNGRALMPTNPRKARLLLKKKTASVVCRHPFTIQLLYKTGCATQEGCIGIDTGSQHIGVGITCGDRVILKDEHALRSSMEKRSLLATRTVMRRGRRYRKVRYRKPKWRHHTKRMYFEKANRRGQHWRKVKTTTQSPRLKGWLPPSLQSKCDHHFRIIDRYLKYLPDPITRNLVIEAGRFDIARMNDPTIHGEMYQRGPMYDAENLRAYIFARDNYQCACCKAKAGTTRKADGTTVKLVAHHILFRSRGATDNPKYIISVCDHCHTTKAHQPGGILYSWMENNKKVARGLRDATFMNILRKRLFARYPQAAFTYGNITAADRKQLRLPKSHANDAVAISLFGKEASTVKNICQTMHYKQIRKSKRSLHEAIPRKGRKNPNTKAVRNKKNTTQANGFKLWDSVLADGKKLFICSFTGTSAYLIDKNGCYISQPGKTYKQWPLSKLKRLHPNGNWLMA

SEQ ID NO: 13185 - protein, 518 aa, Moorena sp.; identical to SEQ ID NO: 7410

SEQ ID NO: 13186 - protein, 389 aa, Tolypothrix sp.
IILKVTFKTDVEIEPLRLKIDPGAVISGIALVNDSTGEVVFAAEIKHRGFAIRDSLISRRQLRRSRRNRKTRYRQPRFNNRIRPKGWLAPSLQSRVDNIKTWVERLRKVAPIEAISQELVRFDMQLIRNPDIEGKEYQQGTLFGYETREYLLEKWNRQCAYCGVKDVPFQIEHIHCRAKGGSNSITNLTLSCEKCNKKKGTKDIRDFLKKDSARLEKILKQAKQPLTDAAAVNSTRFALLKTLQSTGLPVETGSGGLTKFNRTQQGLEKTHYFDAACVGQSTPEKLIVKGVKPLLITANGHGTRQMCRTDKFGFPNRHCSRTKFHFGFQTGDIVKAVVLSGKKVGEYVGRIATRSTGSFNISTKNGLVQGISHTYCQQIHKKDGYSYAF

SEQ ID NO: 13187 - protein, 406 aa, unidentified
  REGION 1..406: note = Human gut metagenome
MVYVQDIDGKPLMPTTRHGKVRRLLKDKKAVVVNLCPFTIKLTYVTSDYKQEIVLGVDAGTKHVGLSATTKSKELYSSEVILRNDIVDLLSTRRELRKTRRNRLRYRKPRFDNRVKSKRPGWIAPSVKYKVDAHIRVVENVCSILPISRIVIEVAQFDTQKIKNPEISGKEYQEGDQLEFWNTREYVLARDGHKCQYCKGKSKDSILNVHHIESRKTGGDSPSNLITLCETCHKEYHKGNIDLKIRRGKSLRDAAVMGIMKWRLYEELKSRYDRVFMTFGYITKHNRIKYGIEKSHTSDAFVISKNINAKRIERQYLKRLIRRHNRQIHKMKILKGGKKKNNQAPFEVFGFRLFDKVLYNNKIFFVYGRRKSGSFNIRDFNGENSKDVSRKKFKLIRGKRHPIILK

SEQ ID NO: 13188 - protein, 447 aa, Petrotoga sp.; identical to SEQ ID NO: 4357

SEQ ID NO: 13189 - protein, 466 aa, unidentified
  REGION 1..466: note = Human gut metagenome
LSIKPLINIGEGVIYSSICTGLSLQTYQKRKEVPYMVYVLDIDGQPLMPTTRHGKVRRLLNNHLAKVVKRCPFTIQLLYQSTKETQPVSLGVDAGSKHIGMAATTEKKVVYQEELSPRNDVVKLLSARRTLRRTRRNRKTRYRKPRFNNRVHSKHKGWLAPSVEVKIQEHITAIKRICQILPISEIHVETAEFDLQRLKAMDEGRTLPVGTDYQLGEQYDFYNTRQYVLHRDGYTFQCCGTHDNNIKLHVHHIESRQTGGDAPSNLITLCEHCHKALHKGKLELPKGKKRGKTYRDATFMGIMRKTLLERLRKEVDVPASGTYGYITKYWRERAGLEKSHINDAICISKYPYAKPLDTYYLTKAVRNHNRQIHKSNFSKGGIRKRNQAPYLVKGFRLFDKVLYQGKEYFIFGRRATGYFDIRTLDGTKVNKGSISYKKLRIQDTAKAYLKEARAIPHMNKFTCVLA

SEQ ID NO: 13190 - protein, 423 aa, unidentified; identical to SEQ ID NO: 3951
  REGION 1..423: note = Human gut metagenome

SEQ ID NO: 13191 - protein, 427 aa, unidentified
  REGION 1..427: note = Human gut metagenome
LRVFVLNKRGKPLMPCSPAKARLLLKEKKAIVVRRTPFTIQLTIATGESKQPVSLGVDAGYKHVGLSASTEKAELYASEVELRKDITDLLSARRALRQSRRNRKTRYRAPRFDNRIRTKRKGWLAPSVENRINAHLSRIEAVLRLLPITKITVETASFDMQRLKNPDISGKEYQEGEQLGFWNVREYVLFRDGHVCRHCHGRSKDPVLNVHHLESRRPGSDSPDNLITLCETCHKALHRGEITLKAKRGQSFRAQAFMGIMRREVLNRLKASYPELKVHETYGYLTKHARIANGIVKSHGADAFCIAGNLGAKRLGEFFFQKQTRRNNRQIHKLSILKGGIRKRNQAPFEAKGFRLFDKVACQGEEGFIFGRRSSGSFDVRKLDGTRISAGISCKKLRLLEKRRTYLTEIRKEEALPPLPEGRGLRA

SEQ ID NO: 13192 - protein, 408 aa, unidentified; identical to SEQ ID NO: 4614
  REGION 1..408: note = Human gut metagenome

SEQ ID NO: 13193 - protein, 476 aa, unidentified
  REGION 1..476: note = Human gut metagenome
LEVVGTEGVSHPGLPGKYKHKGGQLMSVAVISKTGERLMPTSEYRARKLLKSGKAIKHSYHPFTIQLTERETGDIQPIELCMDTGYIHIGISVKSEKHEYLAEQIDTLTDERGRHDACRMYRRQRRSRKRYRQARFNNRKRDQGWIAPSLEHKKKIHIQAISRINNVMPITDITLEMGNFDTQVLKAKEEGKPLPHGADYQHGGRYGIATLREAVFSRDGYKCQCCGRTIKDGVILHIHHIKYRSQGGTNSMSNLATVCDKCHTPKNHKPGGKLYNWKPKLSSFKGATFMTAIRWQLYNEVKALFPDIDIHITYGAATKERRRKLDIDKSHVNDAFVMGQFHPKHRIKAILCKKKRRNNRCLEKFYDAKYIDSRDGKKRSGQELFNGRINRNHKKDSENLHQYRLQKVTAGKRTVRKQHYSVQPHDIIIYESRKRETTGCHCNGARVMLLPDKKSVSIKKIKIYRYASGYFKSTFN

SEQ ID NO: 13194 - protein, 470 aa, Blautia sp.; identical to SEQ ID NO: 2925

SEQ ID NO: 13195 - protein, 423 aa, Moorena sp.; identical to SEQ ID NO: 2887

SEQ ID NO: 13196 - protein, 408 aa, unidentified
  REGION 1..408: note = Candidatus Thiomargarita nelsonii
MKVYVINKNGNPLMPCKPAKARKLLRDGKAKPVKRVPFTIQLTWDCEENVQPITIGMDKGSKITGFCAIANGEILISGYINHRTDVKKNMETRAANRRQRRSRLWYRPPRFNNRASSSRRGRLPSSIKANADEVIRVVNKLPLPITSVIIEDVLIDIARLNDPNLKGSAYQKSNRLHENLRLATLLRDDFRCQQCRVKNTRLEAHHIKLTSEGGKDTINNLITLCSECHSKVHSGKIHLRKQGVSGFKDKIAQRTMQGKHYLYTSLSQKYGFSRVFGYQTAEFRKELGLPKDHDSDALAIATLGTGELINLHRDNFYNINFRPVQTRRRYHLLPTSKRGRVKYQINESSGSFRKGDLVLVKDRYVKQVNSIYSTGALAFKRVKGEPGSSMPKNCRLLERQSSIVFSSI

SEQ ID NO: 13197 - protein, 504 aa, unidentified; identical to SEQ ID NO: 3854
  REGION 1..504: note = Human gut metagenome

SEQ ID NO: 13198 - protein, 442 aa, unidentified
  REGION 1..442: note = Ga0315298_1039911
MVYVISQEGIPLMPTEKHGMVRHFLKEGLAKVVRRKPFTIQLQYKSKTYVQPTTFGIDSGYTYIGYSVVANKKELICGELTLLKDMSERLKKRRDYRKLRRARLRYRKPRFNNRKKSDGWLAPSIQHKFDSHIRFINLLRTFLPLTTINIEVGSFDTQKIKDSTIQGKDYQNGEQKGFFNLREYILYRDNYKCKLCGNSDVPLVVHHIGYWKGDRTNRPDNLITLCTQCHSPANHAQRGKLYGMESDTRTLKEATFMSTVKKKLAEELNKTFIVNTTYGYETKSKRIALGLDKTHYNDAFVIAGGTEEHKRVEPINFVQTRRNNRSLETFVDAKYIDTRTGKVASGKELFNGRTTRNKELNTENLRKYRGTKKSAGQRRIRKQHYFYQAGDLVWFNNKVYKVSSNEGGNSKYNYISLVGSKKLAKPNQVKIYKFRRGICVDE

SEQ ID NO: 13199 - protein, 509 aa, unidentified; identical to SEQ ID NO: 7892
  REGION 1..509: note = Human gut metagenome

SEQ ID NO: 13200 - protein, 438 aa, unidentified
  REGION 1..438: note = Human gut metagenome
LTKDENRPSGRTTGLRAEQAEPAGIRKGDTLKVFVLNMRGKPLMPCSPAKARHMLKAGKAFVVRRTPFTIKLTIATGETKQDVTLGVDAGARHVGISATTEKEEVFASEVALRQDITGLLADRLAFRRARRNRKTRYRAPRFNNRVRSKHKGWLAPSVENRIQAHISRIEAVCRLLPVTKIVIETASFDIQKIRNPEVEGTGYQQGDQLGFWNVREYVLFRDGHICQHCRGRSKDPILNVHHLESRKTGGDAPNNLITLCETCHKAYHAGKIKLKVKRGQSFRAEAFMGIMRWTLLNRMRKAHPSLPVENTYGYLTKHKRIALGLPKTHCADAFCIAGNLKALRRGDFLFLQQTRKHNRQIHKCSILKGGVRKLNQAPFLVKGFRLFDKVRIGGQIGFVFGRRVRGTFNIRRLDKTVIGTDINCKKTESSRNTQNFFD

SEQ ID NO: 13201 - protein, 512 aa, unidentified; identical to SEQ ID NO: 7699
  REGION 1..512: note = Human gut metagenome

SEQ ID NO: 13202 - protein, 465 aa, unidentified; identical to SEQ ID NO: 3603
  REGION 1..465: note = Human gut metagenome

SEQ ID NO: 13203 - protein, 460 aa, Lactobacillus sp.; identical to SEQ ID NO: 5005

SEQ ID NO: 13204 - protein, 431 aa, Moorena sp.
IRVFVLNKNRQPLDPCKPARARILLSTGKAKVYRSYPFTIILTEERKEPVTHEHQLKIDPGAKTSGLAIVQGKRVIWGAELTHRGFQIRDALISRKQLRHSRRNRKTRYRKPRFLNRTRPKGWLAPSLMSRVQNILTWVKKLTRLCPVAGISQELVRFDTQKLQNPEISGIEYQQGTLYGYELREYLLEKWNRKCAYCGATGIQLEIEHIKPLSKGGSDWPLATLRDRASNLTIACHPCNQAKSNQDIELFLSKKPSILKRILSQAKRSLVDAASVNSTRWKLYHDLKSIGLPVEVGSGGLTKFNRCRQNLPKTHWLDAANVGKVETLIVEITHPLIITAKGHGTRQLCRTNKYGFPIRHCSRIKFHKGFQTGDIVRAVVTKGKKVGTYVGRVATRKSGYFNISTKLGLVQGISHKYCQFIHRKDGYAFTN

SEQ ID NO: 13205 - protein, 442 aa, unidentified; identical to SEQ ID NO: 3218
  REGION 1..442: note = Human gut metagenome

SEQ ID NO: 13206 - protein, 408 aa, unidentified; identical to SEQ ID NO: 5560
  REGION 1..408: note = Human gut metagenome

SEQ ID NO: 13207 - protein, 431 aa, Petrotoga sp.; identical to SEQ ID NO: 11592

SEQ ID NO: 13208 - protein, 421 aa, unidentified; identical to SEQ ID NO: 4235
  REGION 1..421: note = Human gut metagenome

SEQ ID NO: 13209 - protein, 456 aa, unidentified
  REGION 1..456: note = Human gut metagenome
MSTCVCVLTNNGERLMPTFRLGKVRHLLKDGKAKIVKHHPFTIQLLYDSKTNTQPIETCEDVGYNYIGISVKSESHEYVSAQYDTLQDEKEHHDDCRKYRRTRRNRLRYRKSRFDNRKRDKGWLAPSLEHKKQLNISLVERYVSVIPITHVTVEVGSFDTMLLQSIQKGEAKPEGADYQKGPRYNLATLREAVFYRDNYTCQVCKRKIADGAILHMHHMFYWKGRHGYQLDELVTVCEKCHTPANHQKGGKLYGFGKDKKFANLSGAAFMNAVRWQIVNALYATYGKEFVTITYGAMTKEKRIALQLEKTHNNDAYAMGDYHPAHRCKFRHYQKRRRNNRVLEKFYDATYVDTRTGNKAKGKELFNGRISRNHKKDSENLHKYRSKKVSKGRRSIRRQRYAIQPYDTVRLEGKTYITSGCHNKGTRLLIPVNGKSKSVAISKIQVVCHAGAWIQII

SEQ ID NO: 13210 - protein, 443 aa, Anoxybacillus sp.
MVEENMTCFMQRKGENPMVFVLDTNKRPLAPCHEAVARKLLKQGKAAIYKRYPFTIILKEIVDNFRPKTPYRLKIDYGSKHTGLAIVRGEEVLWLAQLDHRTDIKERLDKRRAFRRARRKRKTRYRKPRFLNRRRKDGWLPPSLESRVQNIQTWVERLRKICPIEHISYENAKFDTQLMRNPEINGVEYQQGTLQGYEVREYLLEKFGRKCCYCGKEGVPLEIEHIIPKSRGGTDRVDNLCLACHDCNQRKGSKTAEEFGYPHIQEMVKKTLKDASVVNATRWKVYEVLKQSGCEVECGTGARTKMNRIRLGLPKIHYFDACCVGESTPLQLHFKTKEALFIKAKGRGSRSRTNLDKYGFPRGFLARQKFFFGFQTGDMVKAVIPRGKYQGGWFGEVACRKTGSFDIKGKDGKRIAQGINYRYVQVIQRFDGYTYRREGMNIA

SEQ ID NO: 13211 - protein, 434 aa, Marinobacter sp.
MPCTERRARLLLDRGRAVVVRAYPFTIRLKDRTGGITQPVRIKIDPGSKTTGIAVVRENGQKQHVLALMELAHRGRQISKSLEQRRAFRRRRRNQLRYRAPRFLNRTKPKGWLAPSLQHRVDTTKSLVNRLWALAPVTAVSQELVRFDTQKMENPEVSGVEYQQGTLLSYEIREYLLEKWGRECAYCTEKDTPLQIEHIDPKANGGSNRISNLTLACRPCNREKNRKSLVSFFATSKRLKNHQARLDRILKQCKKPLRDASAVNSTRWALHQALKQTGLPVEVSTGGRTKFNRCQLRIPKTHALDAACVGEVEIVEGWDIPTLAIKATGRGSYQRTRLTRYGFPRGYLMRQKKVQGFQTGDMVRAVVPTGMKAGTWLGRVAVRKTGSFNIQTPGGAIQGISYRHCTLTQRADGYGYHIQPNQRKEEGDRKNESR

SEQ ID NO: 13212 - protein, 442 aa, unidentified; identical to SEQ ID NO: 2903
  REGION 1..442: note = Human gut metagenome

SEQ ID NO: 13213 - protein, 406 aa, unidentified; identical to SEQ ID NO: 6445
  REGION 1..406: note = Human gut metagenome

SEQ ID NO: 13214 - protein, 502 aa, unidentified; identical to SEQ ID NO: 6049
  REGION 1..502: note = Human gut metagenome

SEQ ID NO: 13215 - protein, 367 aa, unidentified
  REGION 1..367: note = Human gut metagenome
KINLGIDAGSKTIGVSATTESKVLYESEVVLRNDIVELLSGRRALRRSRRNRKTRYRKPRFDNRRRPDGWLTPSIRQKIKTHVTVVENVMKILPVTKIIVETASFDIQKIKNPKIEGAEYQYGEQLDFWNVREYVLFRDGHTCQCCKGKSKDNILNVHHIESRKTGGNAPNNLITLCETCHQAYHKGVITLPKEIHRGMRFRDAAFMGIMRWAFYDRLKELYTPFGVEVINTYGYITKNTRIEHGLPKEHYVDARCISGNPAAKPLGHYYFQKKVRCHNRQIHKNTILKGGIRKRNQAAYLVKGYRLFDKVKYQNQEYFIFGRRSSGFFDIRTLDGTKVNKGSISCKKLQLVEKSKHYLTEQRKVAA

SEQ ID NO: 13216 - protein, 417 aa, unidentified
  REGION 1..417: note = Human gut metagenome
MPCSPAKARLLLKERKAIVKRRTPFTIQLTIATGEAKQPVALGVDSGYKHIGLSATTEKAELYASEVELRQDITDLLSARLALRRSRRSRKTRYRAPRFDNRVASKRKGRLAPSVENRIAAHMSRVEAVMRVLPVTAITVETAAFDTQLLKNPDIAGAAYQQGEQLGFWNVREYVLFRDGHVCQHCSGKSKDPILNVHHIESRRTGGDAPNNLITLCETCHKAFHRGEIELKIKRGKSFKAETFMGIMRWTLFERLKKAHPELSVRHTHGYLTKHKRISHGIAKSHCADAYCIAGNLGAMRLNSYLFQKQTRKHNRQIHKLSILKGGLRKKNQAPYEVKGFRLFDKVICKDEEAFIFGRRTSGSFDVRRLDGTRISAGISYKKLRLLEPRTTYLTEFRKEAALPPLHKCRGFRAEFL

SEQ ID NO: 13217 - protein, 431 aa, unidentified; identical to SEQ ID NO: 2952
  REGION 1..431: note = Human gut metagenome

SEQ ID NO: 13218 - protein, 415 aa, unidentified; identical to SEQ ID NO: 5047
  REGION 1..415: note = Human gut metagenome

SEQ ID NO: 13219 - protein, 412 aa, unidentified; identical to SEQ ID NO: 4932
  REGION 1..412: note = Human gut metagenome

SEQ ID NO: 13220 - protein, 436 aa, unidentified
  REGION 1..436: note = Human gut metagenome
MSVFVLDKKHEPLMPCHPARARKLLKAGRARVVKTYPFTIRLVDRLLENSAVQPVAVKVDPGSKQSGMAVVRDDGKAHHHALFFINLVHRGQVIQERMTARSAFRRRRRGANLRYRAPRFNNRKRPEGWLPPSLQHRVDTTMSWVKKLRKLVPVTALWVENVKFDTQKLQNPEVSGVEYQQGTLFGFEVREYSLEKFERRCVYCGAENTPLNIDHVVPRAKGGSDRVSNLVLACTECNQKKGAQPLEVFLKGKPEQFERIRRQLKAPLRDAAAVNATRWALFNALKQTGLPVATGTGAQTKFNRKAFGIPKEHWLDALCVGRINGADYPEGMGVMQVRCTGRGSYQRTRLNKYGFPRGYLMRQKRVHGFATGDIVKAVKKGVTFQGRVAVRARGSFVLQTPDGKVDGIHWRHCHLISRNDGYGYAWLRPAPHSSPV

SEQ ID NO: 13221 - protein, 472 aa, unidentified; identical to SEQ ID NO: 8020
  REGION 1..472: note = Human gut metagenome

SEQ ID NO: 13222 - protein, 417 aa, unidentified
  REGION 1..417: note = Human gut metagenome
MPCSPAKARLLLKERKAIVKRRTPFTIQLTIATGEAKQPVALGVDSGYKHIGLSATTEKAELYASEVELRQDITDLLSARLALRRSRRSRKTRYRAPRFDNRVASKREGWLAPSVENRIAAHMSRVEAVMRVLPVTAITVETAAFDTQLLKNPDIAGAAYQQGEQLGFWNVREYVLFRDGHVCQHCSGKSKDPILNVHHIESRRTGGDAPNNLITLCETCHKAFHRGEIELKIKRGKSFKAETFMGIMRRTLFERLKKAHPELNVRNTYGYLTKHKRISYGIAKSHCADAYCIADNLGAKRLDGFFFQKQTRKHNRQIHKLLILKGGLKKKNQAPYEVKGFRLFDKVICKGEEAFIFGRRTSGSFDVRRLDGTRISAGINYKKLRLLEPRTTYLTEFRKEAALPPLHKCRGVCAEFL

SEQ ID NO: 13223 - protein, 424 aa, Moorena sp.; identical to SEQ ID NO: 7441

SEQ ID NO: 13224 - protein, 420 aa, unidentified; identical to SEQ ID NO: 3247
  REGION 1..420: note = gut metagenome

SEQ ID NO: 13225 - protein, 512 aa, unidentified; identical to SEQ ID NO: 9719
  REGION 1..512: note = Human gut metagenome

SEQ ID NO: 13226 - protein, 406 aa, unidentified; identical to SEQ ID NO: 2703
  REGION 1..406: note = Human gut metagenome

SEQ ID NO: 13227 - protein, 430 aa, Moorena sp.; identical to SEQ ID NO: 9911

SEQ ID NO: 13228 - protein, 423 aa, unidentified; identical to SEQ ID NO: 3951
  REGION 1..423: note = Human gut metagenome

SEQ ID NO: 13229 - protein, 425 aa, unidentified; identical to SEQ ID NO: 9663
  REGION 1..425: note = Human gut metagenome

SEQ ID NO: 13230 - protein, 464 aa, unidentified; identical to SEQ ID NO: 3745
  REGION 1..464: note = metagenome

SEQ ID NO: 13231 - protein, 427 aa, Parasutterella sp.; identical to SEQ ID NO: 3787

SEQ ID NO: 13232 - protein, 299 aa, unidentified
  REGION 1..299: note = Human gut metagenome
VEVKIQEHITVIKRVCRILPVSRVVVETAEFDLQLLKAIADGRPVPQGEDYQKGEQAGFYNVRQYVLWRDGYRCQCCKKHGKGIKLHTHHKESRKTGGDAPENLVTLCEVCHRKLHQGLIAEQGLKKRSRMSTRDAAFMGIMRRTLTERLYRELKVPVAGTKGYITKYTRVELLHLPKSHAGDALAIAQGRHGFGIRQATFIKPAERIYQIKPVRHHNRQLHKATILKGGNRKPNQAPKYVKGFQLFDKVLYQGQECFIWGRRTTGSFLLKLLDGTKVKDGVSCKHLKLLERSSQYLAA

SEQ ID NO: 13233 - protein, 417 aa, unidentified
  REGION 1..417: note = Human gut metagenome
MPCSPAKARLLLKEKKAIVKRRTPFTIQLTIATGEAKQPVTLGVDSGYKHIGLSATTEKAELYASQVELRQDITDLLSARLALRRSRRSRKTRYRAPRFNNRVASKRKGWLAPSVENRIAAHMSRVEAVMRVLPVTAITVETAAFDTQLLKDPDIAGGAYQQGEQLGFWNVREYVLFRDGHVCQHCRGKSKDPILNVHHIESRRTGGDAPNNLITLCETCHKAFHREEIELKVKRGKSFKAETFMGIMRWTLFERLKKAHPELSVRNTYGYLTKHKRISHGIAKSHCADAYCIADNLGAKRLEGFFFQKQTRKHNRQIHKLSILKGGLRKKNQAPYEVKGFRLFDKVICKGEEAFIFGRRTSGSFDVRRLDGTRISAGINYKKLRLLEPRTTYLTEFRKEAALPPLHKCRGFRAEFL

SEQ ID NO: 13234 - protein, 414 aa, unidentified; identical to SEQ ID NO: 2588
  REGION 1..414: note = Human gut metagenome

SEQ ID NO: 13235 - protein, 426 aa, Parasutterella sp.; identical to SEQ ID NO: 3045

SEQ ID NO: 13236 - protein, 418 aa, unidentified; identical to SEQ ID NO: 4934
  REGION 1..418: note = Human gut metagenome

SEQ ID NO: 13237 - protein, 438 aa, unidentified
  REGION 1..438: note = Human gut metagenome
LVSGQLIMAWEAIQTRRIKPHDIGEGTLRRHAAGTVSFPVLCKNRKETLMSVLVIGRNGRALMPTNPRKARLLLKKKTASVVCRHPFTIQLLYKTGCATQEGCIGIDTGSQHIGVGITCGDRVILKDEHALRSSMEKRSLLATRTVMRRGRRYRKVRYRKPKWRHHTKRMYFEKANRRGQHWRKVKTTTQSPRLKGWLPPSLQSKCDHHFRIIDRYLKYLPDPITRNLVIEAGRFDMARMNDPTIHGEMYQRGPMYDAENLRAYIFARDNYQCACCKAKAGTTRKADGTTVKLVAHHILFRSRGATDNPKYIISVCDHCHTTKAHQPGGILYSWMENNKKVARGLRDATFMNILRKRLFARYPQAAFTYGNITAADRKQLRLPKSHANDAVAISLFGKEASTVKNICQTMHYKQIRKSKRSLHEAIPRKGRKNPNTKA

SEQ ID NO: 13238 - protein, 419 aa, unidentified; identical to SEQ ID NO: 6119
  REGION 1..419: note = gut metagenome

SEQ ID NO: 13239 - protein, 413 aa, unidentified; identical to SEQ ID NO: 2636
  REGION 1..413: note = Human gut metagenome

SEQ ID NO: 13240 - protein, 493 aa, unidentified; identical to SEQ ID NO: 2644
  REGION 1..493: note = Human gut metagenome

SEQ ID NO: 13241 - protein, 431 aa, unidentified; identical to SEQ ID NO: 3235
  REGION 1..431: note = Human gut metagenome

SEQ ID NO: 13242 - protein, 412 aa, unidentified
  REGION 1..412: note = Human metagenome
MENKIEYCFVVDKDNQPLAPTKVNKGWYLVRKGRARLKSKYPMVIQLEKRVKLDENDKSYMTCGIDDGSAHVGLAIVQKCPIKNKIVFKGTIEQRQDVKHLIDVRRGYRRYHRYHKRYRPMRFNNRSSSKRIGRLAPSIKQKKDAILRILFQLNKWINIKEYYLEDVCIDIRAMTDDYKPYKWQYQKSNRLDENLRKAAIIRDNYKCQECGKSNCKLEVHHIQARKYSGADTIGNLITLCSKCHQKTEGKEQDFEDKYFKIIGSKPKRFDYAMHVMQGKNYLRSKISELGLLHLTNGGETANKRIEWNIEKSHSNDAICITDSIPDSCNIKEWTIKPMRRKSKAKINNVLGIKHRDLVSYTYKNGETHTGYVTALYSKQLALNFQSRTKHCKKVNARKCRLLWQFNKIYWLE

SEQ ID NO: 13243 - protein, 411 aa, unidentified
  REGION 1..411: note = Human gut metagenome
MVYVQDIDGKPMMPTTRHGKVRRLLKDNKAVVVNTCPFTIKLTYKTSDYKQEIVLGVDSGTKHVGLSATTKSKELYASEVILRSDVVDLLSTRRGLRRTRRSRLRYRKQRFNNRVKSKKDGWIAPSVRHKIDSHIRIISFVYSILPVSKLIVEVAQFDTQKIKNPEISGKEYQEGEQLGFWNVREYVLARDGHKCQHCKGKSKDPILNIHHIESRKIGGDSPSNLITLCETCHKEFHKGNIKLKVSRGKSLRDAAVMGIMKWKLYEELKSRYDNVSMTFGYITKYNRINHGIEKSHVSDAFVISRNFNSCRLGYYYKRKLVRRHNRQIHKMKILKGGIRKRNQAPFKVFGFKLFDKVMLQGEEHFIYARRLSGQFNIRDINGENKKDVSCKKLKYVSHGLVSVKTNLFLSQ

SEQ ID NO: 13244 - protein, 357 aa, unidentified
  REGION 1..357: note = Human gut metagenome
LRVFVLNKRGKPLMPCSPAKARLLLKEKKAIVVRRTPFTIQLTIATGETKQPVSLGVDAGYKHVGLSASTEKAELYASEVELRQDITDLLSARRALRQSRRNRKTRYRAPRFDNRIRTKRKGWLAPSVENRINAHLSRIEAVLRLLPITKITVETASFDMQRLKNPDISGKEYQEGEQLGFWNVREYVLFRDGHVCRHCHGRSKDPVLNVHHLESRRTGSDSPDNLITLCETCHKALHRGEITLKAKRGQSFRAQAFMGIMRREVLNRLKASYPELKVHETYGYLTKHARIANGIVKSHGADAFCIAGNLGAERLGEFFFQKQTHRNNRQIHKLSILKGGIRKRNQAPFEIKGFRLF

SEQ ID NO: 13245 - protein, 409 aa, Microcoleus sp.; identical to SEQ ID NO: 6160

SEQ ID NO: 13246 - protein, 419 aa, Moorella sp.; identical to SEQ ID NO: 11908

SEQ ID NO: 13247 - protein, 357 aa, unidentified
  REGION 1..357: note = Human gut metagenome
EKAELYASEVELRQDITDLLSARRALRQSRRNPKTRYRAPRFDNRIRTKRKGWLAPSVENRINAHLSRIETVIRLLPVTKISVETTSFDMQLLKNSDIAEKEYQESEQLGFWNVREYVLFRDGHVCQHCHGRSKDPVLNVHHLESRRTGGDSPGNLIALCETCHKELHRGEITLKAKRGQSFRAETFMGIMRWEVLDRLKASHPKLEVQNTYGYRTKHARIVNGIAKSHCADAFCIAGNLGAERLGEFLFQKQTRRNNRQIHKLSILKGGIRKRNQVPFEVKGFRLFDKVACKGEEGFIFGRRSSGYFDVRKLDGTRISAGISYKKLRLLEKRQTYLTEIRKEEALPPLPEGRGLRA

SEQ ID NO: 13248 - protein, 492 aa, Moorena sp.
MCRYTTLPRGASLLLKRVESSVTRPVRAFFKSDIMAVFVIDKHQKPLMPCSEKRARLLLNRRRARVHSMYPFTIRLVDRTLEKSVLQPTRCKIDPGSQTTGIAIVREKGTRQVVLSLIELTHRGSFIREALQARAAKRRRRRYHLRYRSKRYSNRKKPNGWLAPSLLHRIESTMTWIVRLRKRTPITALTCERVRFDTQKLLNPEIEGIEYQQGTLLGYEIREYLLEKWGRQCAYCDVKNVPLQIDHIHPKSRGGSNSINNLTLACSTCNLKKNNQSLEDFCPKLTKAIRSKPHLQHAAAVNSTRNALWDALSALPLSCEPGTGGQTKYNREQFRIPKTHALDAACTGIVSQLHNWQIPTLQIRSSGRGSYQRTRSDRFGFPRGFLIRQKRVHGFQTGDQIKATVPAGKKKGHYAGRVAIRASGYFNIQTTHSLVQGISSKYCCLNQRADGYHYLNRSSTGETMDSNIQNPLLEEQRFLPALKDWVSALSTG

SEQ ID NO: 13249 - protein, 424 aa, Oscillatoria sp.
MSNFVFVIDTNKQMLNPVHPGEARCLLSQGKAAVFRRYPFTIILQEEAESEIKPLQLKIDPGSKTTGLAILNGSKVIWAAELTHRGQAIKNALLSRRQLRRGRRNRKTRYRAPRFLNRTRAEGWLAPSLMHRVKTTLTWVNRLCRYAPVAGISQELVRFDTQVIQNPEISGTEYQQGTLAGYEVREYLLEKWGRKCAYCKAENTPLQIEHIQPRSKGGSDRVSNLTLACEPCNTAKSNLPVQEFLSGKSDRLKRILAQAKAPLKDAAAVNSTRWALFNALKETGLPVSTGSGGQTKYNRTRLNLPKTHWLDAACVGRVNQLEILTTQPLLIKATGHGTRQMCGTDKYGFPSRHRSRVQIHKGFQTGDIIVANVTAGKKIGSYLGRVLCRASGSFDIATKNGKVAGISHKYCQSIHKRDGYAYAF

SEQ ID NO: 13250 - protein, 429 aa, Moorena sp.
MCNYVFVLDASHKPLNPCRPVTARKLLTAGKAAVYRRYPFTIILKKQVDGSAKPMSLKIDPGSKITGLAVVYSNQVVWSAEIEHRGSKIKSALDYRRGVRRSRRNRKCRYRKPRFNNRKRPEGWLAPSLQHRVATTMTWVLRLMKLTAIGSISQELVRFDTQKLQNPEISGIEYQQGELMGYEVREYLYQKWGRQCVYCGAKSVKLEVEHIIPKSKGGTNRVNNLTLACHRCNQAKGNLDARDFLSGKPDVLKRILGRAKQPLLDAAAVNSTRWQLYQSLKETGLSVAVGTGGRTKYNRIKLGLPKGHWVDAACVGEVATLKIVTRQPLLIKAMGHGCRQVIQMDKYGFPRKGYKPKHPVKGWKTGDIVNVVAGKNAGLKGVRIKTVRAKGNFDLIGADQDSSNKVNSASRNYIQCVHRQDGYYYSFAK

SEQ ID NO: 13251 - protein, 286 aa, unidentified
  REGION 1..286: note = Human gut metagenome
LNKEKEKVVIETAEFDLQLLKAIQEGKPIPEGEDYQKGEMYGSYNVRQYVLWRDNYTCICCGVRGTPKNPVRLHVHHFESRKHGGNAPDNHGTLCDDCHKKFHLGIITDVKLKTRRRQSTRDAAFMGIMRKTLMWRLRTELFIPVAETKGYITKATREKLLVLPKSHTRDALAIAQGRHGFGIKEYAYVEPANHIYTVRPVRHHNRQLHKASILKGGIRKRNQASKYVSGFRLYDKVLYQGKECFMWGRRTSGSFLLRTINGIKVKDGVSYRNLTLLERSSNYLIA

SEQ ID NO: 13252 - protein, 430 aa, unidentified
  REGION 1..430: note = Human gut metagenome
MPKVYVLNRHGRPLMPCTPAKARHLLDAGKAKVRHRTPFTIQLVYGSSGYTQEVILGVDAGSKTIGVSASTKKEELFAANVIPRNDVVDLLSTRREFRRARRNRKTRYRKPRFDNRVRSKHKGWLAPSVEVKIQEHITAIKTVCRILPVSKVVVETAEFDLQLLKAIANGKPVPQGEDYQHGEMYGHYNVRQYVLWRDGYTCQYCGAHSTKKKEIRLHVHHLESRKTGGDAPGNQINLCESCHKKFHKGLILDGTLKKRKRKPNRDAAFMGIMRKTLIVRLRAELPIPIIETRGYITKATREKLLVLPKSQTNDALAIAQGKHGFNVGYLPGIVQTDRIYTIRPVRHHNRQLHKATILKGGVRKANQAEKYICGFRLYDKVLYNGIECFVWGRRTSGSFLLRQLNGEKVKDGVSYKHLKLLERSQSYLVA

SEQ ID NO: 13253 - protein, 420 aa, unidentified
  REGION 1..420: note = metagenome
MFVYVLAKNGQPLMPTSRFGKVRRMLRDKKAKVIKRCPFTIRLLYEPETKIVQDIVLGVDTGSKYVGVACVGNDKVLYQSQTELRDDIKKKMDSRRMYRRNRRARKTRYRKSRFLNRRNSIRKDRYCPTIVSKYYGHEREITFCKKILPIKDIVLETGKFDTQLMEKPWLQEHKWAYQRGVNYGYANAREHALVRDKYTCQCCGKKNCRVEVHHIKFRSDGGSDTLENLITLCEDCHKAIHLGKIELKLKGKHRSNLRYATQMSIIRNMLLKKYPEAIETFGFVTKANRENLGLKKDHYIDACVIASCGLEFEPSDVLYRKRCVPKQSRQLCKGVRGEKKIPTGKIHGFKRYDKIKYLGEICFVKGRRSKGAFELMDINNNTLDFRDMDGNKTPSYKSLKRVNARKSILCISTKIERGIL

SEQ ID NO: 13254 - protein, 446 aa, unidentified; identical to SEQ ID NO: 11087
  REGION 1..446: note = Ga0373625_0001890

SEQ ID NO: 13255 - protein, 427 aa, Oscillatoria sp.; identical to SEQ ID NO: 5140

SEQ ID NO: 13256 - protein, 612 aa, Streptomyces sp.
VTFHSTARLIRRQAFRVFAGLERVRHVRRQSLPGRSGWWLHFRRGALRADQLQSSVKGGALMTTFGVSEPTHPVVLPQRRALESAPADNPGSRDETGRGLRRRSTDGTGIGHERGETPGGSTQRRERHPEALGAQEEPSAEGAVAAREGGTTVRTPTAGAACVPVLDRRGRPLIPTHPARARKLLDQGRAVVANHTPFAIRLKDRLLEQSEVAGVAVRIDPGSKGTGIAITVDQDAVVPSTAPFRVRRGLFAAELVHRGSYISKRMQQRAAYRRRRRSSNLRYRAPRFDNRAREPGWLPPSIQHRVDSTVSIVRRLVRLFPVSEAHMESAAFDTHALSAGRPLEGAEYQQGTLYGYEIREYLLAKWGRACAYCGAVGVPLQIEHIRPRARGGSDRVSNLTLACGPCNQAKGVMPLAEFLADQPDRLARVEAQAKASLRDAAAMNATRQQLCLALSELNMPVRAWSGGRTKYNRTRMRLAKTHTLDALCVGELPEAAIVVRHPEAVLVVTATGRGLYARTTPDKFGFPRLLRPRDKQHYGYSTGDLVSASLPSGRYQGKHTGRVAVRATGRFNIRTAAGLVQGIHHRHLRLLQRADGYGYGQRPEGASVGRRT

SEQ ID NO: 13257 - protein, 375 aa, unidentified; identical to SEQ ID NO: 6686
  REGION 1..375: note = Human gut metagenome

SEQ ID NO: 13258 - protein, 428 aa, Enterococcus sp.; identical to SEQ ID NO: 4335

SEQ ID NO: 13259 - protein, 325 aa, unidentified
  REGION 1..325: note = Human gut metagenome
RKTRYRAPRFDNRIRTKRKGRLALSLENRINAHLSRIEAVLRLLPVTKITVETASFDLQLLKNPDISGKEYQEGEQLGFWNIREYVLCRDGHVCQHCYGRSKDPVLNVHHLESRRTGGDSPGNLITLCETCHKALHRGEITLKAKRGQSFRAEAFMGIMRWEVHNRLRALHPGIEVSNTYGYRTKHARIANGIAKSHCADAFCIAGNLGAERLCEFFFQKQTRRNNRQIHKLSILKGGIRKRNQAPFEVKGFRLFDKVACQGEEGFIFGRRSSGFFDVRKLDGTRISAGISYKKLHLLEKRQTYLTEIRKEEALPPLPEGRGLRA

SEQ ID NO: 13260 - protein, 431 aa, unidentified; identical to SEQ ID NO: 10470
  REGION 1..431: note = Human gut metagenome

SEQ ID NO: 13261 - protein, 452 aa, unidentified
  REGION 1..452: note = Ga0373625_0208338
MSKQTLQREFKNVPTGAPLACSSTSTPLNRDERTSVASKVLSCNNPEVGLRKQTSGPKAIVFVLSITGSPLMPCSFTKARHLLESGKAKVVNLNPFTVKLTFECENKVQEISLGIDSGYSHIGFSAITSDKEVASGEVSLDNKTSKRLTKRRMYRGHRRNRLRYRKPKFSNRKTPKGWLPPSIQRKFDTHINVLYKLKELMPIKKVTVEIGAFDIQKLMNPEILGKEYQQGDMYGYNNLKAFLFSREHGKCQLCGKKIVKGERVHLHHIKPRSQSGTNRPLNMALLHEGCHDKLHKEGLYNKLKAPKQYKAETFMSIVADRFKKVLDCNVTYGYETATKRNILRIEKSHVNDAFIIAGGINQERCLFYKIEQKRINNRVLQVKRKRFIPSIRRQRHEIQNRDLVWIDGRKYLCGGLAGRGSEVYYFDGLEKIRVPIKKMSRFYSTGSLVWIN

SEQ ID NO: 13262 - protein, 431 aa, unidentified; identical to SEQ ID NO: 4463
  REGION 1..431: note = Human gut metagenome

SEQ ID NO: 13263 - protein, 431 aa, unidentified; identical to SEQ ID NO: 5232
  REGION 1..431: note = Human gut metagenome

SEQ ID NO: 13264 - protein, 462 aa, unidentified; identical to SEQ ID NO: 7109
  REGION 1..462: note = Human gut metagenome

SEQ ID NO: 13265 - protein, 442 aa, unidentified
  REGION 1..442: note = Human gut metagenome
MSTSVFVLDKKHRPLMPCRPARARRLLRAGRARVVKRFPFVIRLVDRTVEQSEVQPVLIKLDPGSRETGAAVVRDDEKKRHHALAFFVIKHRGGAIRDALKARSAFHRRRRSQNLRCRSPRFLNRVKPKGWLPPSLRHRVETTLSFVRRMCRYLPVSGIATELVKFDSQKLQNPEVSGVKYQQGTLFEYEVREYLLEKFGRKCVYCGAEGVPLNIDHVVPRAKGGSNRVSNLVLACVSCNQKKSARSLEDFLKGKPEVLARVRRELKTPLRDAAAVNATRWVLFNELKATGLPVETGSGALTKFNRHAFGVEKEHWLDALCVGRLNGVVTRKGLNVLEIRCMGRGSRQRTRLTKYGFPRGYLMRQKCVHGFATGDMVEANVPKGKKAGLWRGRVAVRVSGSFNIQTPKGVIQGVGWKHCRLISHNDGYGYAWLGHAPHSSPA

SEQ ID NO: 13266 - protein, 473 aa, unidentified
  REGION 1..473: note = Ga0315284_10151894
MSKKTLQVKLKNTLRDAPLVPDSVRPALNKEETPSVQDKVRTCNTPEVDLLQHVGGQGSRVTDDMRVFVLNMRKEPLMPVSSRKARLLLKTGRAVVVRRSPFTIQLKYASGEDKQEISCGVDSGYSHIGFSCVSGRQELIRGEVEVDNFTVKHLIEKSMYRRQRRSKLRYREPRFLNRKINNGWLPPSVDRRYQTHIHLITLLKKLLPISDMIVETASFDIQKLNNPEITNIGYQQGSLYEKSNLRSFILAREKNTCQLCKEGYSKTDHWHKHHIIPRSQGGTDKPDNIALLHEKCHDRLHKEGLYEQLEKNKQYKEATFMNIVKGKFKEDLSCKTVFGYETFVKRNELQLTKSHSNDAFVIAGGSIQNRCFEYLVKQKRRNNRSLQLNRKGSKPSVRRQRYHLQPHDLVQVENKDIVEVIGTHCLGTRVMVLNKKNKKVSILIKNISWFFNNKSLIFKKGDVVSSSTGAKAP

SEQ ID NO: 13267 - protein, 281 aa, Moorena sp.
MYPFTIILKTAIRQSRRCANNNPTISPCQIKIDPGSKITGFALVQDGQVIWGMELYHRGGLIKKRLESRRAVRRGRRNRHTRYRKPRFLYRKRPEGWLPPSLEHRILTTQTWVKRLIKFCPVNEVWIERVKFDTQKMRNPEISGVEYQQGELAGYEVREYLLEKWGRECTYCGKQNAPLQIEHIHPKSKGGSNRVSNLCLACEKCNQRKGDKPVEDFLKKKPNLLQKIKTKAKQPLKDAAAVNATRNKLVKVLRSVKPLVTGTGAQTKYNRTKLGLPKQHA

SEQ ID NO: 13268 - protein, 480 aa, Dorea sp.; identical to SEQ ID NO: 2726

SEQ ID NO: 13269 - protein, 442 aa, unidentified; identical to SEQ ID NO: 3218
  REGION 1..442: note = Human gut metagenome

SEQ ID NO: 13270 - protein, 545 aa, unidentified
  REGION 1..545: note = Human gut metagenome
VQFAWWLCHPKPSDNIEDVNHETALMLLQIKAGTETFGTAPCGSGPKAEGVSPERKAMNTVAVVTNTNKPLMPTSPYRARKLLSSGKAKIVKHRPFTILLVNRSDGNVQEIEYKSDTGYLHVGISVCSEKREFVREQRDLLPDEKEKHNDRRKYRRTRRNRKRYRKARFDNRIGKIRKAEKNKHVWLPPSLDHKVDAQVQLFLRLYQVMPVKRAVFEMGQFDPALMKALEKGEAAPQGIDYQMGERYQIATRRAAVFTRDRYACVFCGRSIKDHAILHVHHIGFWKQDRSNRLDNLATCCEQCHTSENHRPGGILYGVEPKLESLASATYMNVVRFELLRRLKEAAPDVEFHISYGAKTSVIRKQRSISKSHTNDAYCLGQYFPKLRAEEIGFQKIRRNDRILQKFYDAEYLDSRDGTTKKGKELTNGRISRNHMKDHKNLHQYRGKKLSKGRVTIRRGRSSLKPGGLVRFDGEVLTVHGTHRSRKKNKAGHIKVSVNVEFERPSKTGRKSAALSKCQIISRSYNTGWKQIQLRKEEQGRIAAVV

SEQ ID NO: 13271 - protein, 430 aa, Pseudoalteromonas sp.; identical to SEQ ID NO: 8414

SEQ ID NO: 13272 - protein, 414 aa, Parasutterella sp.; identical to SEQ ID NO: 3876

SEQ ID NO: 13273 - protein, 424 aa, unidentified; identical to SEQ ID NO: 3434
  REGION 1..424: note = Human gut metagenome

SEQ ID NO: 13274 - protein, 461 aa, unidentified
  REGION 1..461: note = Human gut metagenome
VQPLYLGIDPGRSNIGVAVVKTDGMAVFTAHLETRNKEIPKLMKKRKDSRRARRTNGRRCRRQRRAKANGTISKKCVKQTTAQNGSVSKRAKEIGVIKRHLPGCEKDVLCIGIKNKEAKFNNRTRPTGWLTPTANQLLQTHINLVKKIQKFLPISDVVLEVNKFAFMQLDNPNIQKWQYQKGPLYQKESLKSAVSEMQEHHCLFCKKKIDHYHHVVPQHKNGSNTIDNIVGLCTQHHDLVHKDATWQKRLAKKKTGLNKKYGALSVLNQIIPALTKELSSLFPKHFFVTNGKSTYDYRAAHGVRKDHWLDAYCIACSVLPNDTCDKTINSRVPYELKQFRRHDRRALNNENMSRVYTFNGKMVATNRHKATEQTTDSLEEFRQRQPNDVCNLKVKEHHPTYRNMSRNYPGSIFLVEKQVHIMQGIAGSKDGKATTYKDTNANSIAAGKCKFVAKNSGILFV

SEQ ID NO: 13275 - protein, 533 aa, Actinomadura sp.; identical to SEQ ID NO: 3190

SEQ ID NO: 13276 - protein, 451 aa, unidentified; identical to SEQ ID NO: 11088
  REGION 1..451: note = Human gut metagenome

SEQ ID NO: 13277 - protein, 493 aa, unidentified
  REGION 1..493: note = Human gut metagenome
MAAVYVISASGKPLMPTTRCGHIRGLLNAGKARVVEREPFTIQLKYETPDVTQPLYLGIDPGRTNVGSAVVREDGECVFTAQLTTRNKDVPKLMKARKQFRVAHRRLKRRCKRQRRAKAAETLSQKGEFQRLLPGYEEPILCKGIRNKEARFNNRQRPAGWLTPTANHLLLTHLNMVKKLQKLLPITDVVLEVNRFAFMAMENPSIRRWQYQQGPLYGKGSVEDAVYAQQDGHCLFCGKPIAHYHHVVPQHKNGSETLENRVGLCNEHHDLVHKDRAWDAKMKETKAGLNKKYHALSVLNQIIPALTEQLTAMFPQHAFVTTGKDTADFREDYGIAKEHHLDAYCIACSVLAEPTKVAAPTGKPHRLMQFRRHDRQVCHKENIKRVYLSEGKAVATNRHKAIEQKDDSLEEFRKTHTQQEVSALTVKDHQPVYKDMRRFMPGGVFLFNGKVHTLQRSHGRYKGMPFYYIDTDGSKNHAKGCIFLQQNCGLRWV

SEQ ID NO: 13278 - protein, 427 aa, Thiocystis sp.
MEIASEMNANFVFVLETDKRPLSPCPPARARELLRDGKAAVFRRYPFTIILKRTVPDADPEPCQIKLDPGSKTTGMALVQGEKVIWGGEIAHRGGLIKKQLDRRRASRRLRRSRLRYRAPRFLNRTRAKGWLPPSLQHRVKTTLTWVRRLIRFAPVGELTQELVKFDMQAMQNPEISGVEYQQGELLGFTVKEYLLDKWGRTCAYCGVEHIPLEVEHLHPKSKGGSDRVSNLTLACVKCNRKKGNRPVEDFLAKKPDLLKRLQAKAKAPLKDAAAVNATRWELYRSLEATGLPVTVGTGAQTKFNRKQLGWKKAHWLDAAAVGAVGALTLATEQPLRVTCKGQGGRQKAVLDRNGYPKQHRSLKPIRGWRSGDIASCEGQVGRISPRTTGSFELRPCDGGKPFSRPERTFRSVHRNDGYAYVKMNER

SEQ ID NO: 13279 - protein, 545 aa, Actinoplanes sp.; identical to SEQ ID NO: 2907

SEQ ID NO: 13280 - protein, 415 aa, Bacillus sp.; identical to SEQ ID NO: 2671

SEQ ID NO: 13281 - protein, 538 aa, unidentified
  REGION 1..538: note = Human gut metagenome
MSTVYVLNKDGKPLMPTARCGHVRHLLKEQKARVVTSKPFTIQLLYETDDVVQPLYLGIDPGRTNIGVAVVKADGTAVFTAHLETRNKEIPKLMKKRKDSRRARRTNGRRCRRQRRAKANGTISKKCVKQTTAQNGSVSKRAKEIGVIKRHLPGCEKDVLCIGIKNKEAKFSNRTKSEGWLTPTANQLLQTHINLVKKIRKFLPISDVVLEINKFAFMQLDNPNVQKWQYQQGPLYQKANLEEAVSEMQEHHCLFCKKPIAHYHHVVPQSENGSNTIGNIVGLCTKHHDLVHKDTAWQKKLAKKKTGLNKKYGALSVLNQIIPALTKELGSLFPKHFFATNGKSTYDYRAAHGVRKDHWLDAYCIACSVLPNDVCDKNINSRVLYELKQFRRHDRRALNNENMSRVYTLNENVVATNRHKATKQTTDSLEEFRQNHPDDACKLKVKEHHPTYRNMSRNYPGSVFLVGNQVHVMQGVAGSKDGKATTYKDTNANSIAAGKCKFVAKNSGILFVYYKLKVVKPRKIFNNLCLAKSLNFWR

SEQ ID NO: 13282 - protein, 427 aa, Moorena sp.; identical to SEQ ID NO: 5713

SEQ ID NO: 13283 - protein, 462 aa, unidentified; identical to SEQ ID NO: 2823
  REGION 1..462: note = Human gut metagenome

SEQ ID NO: 13284 - protein, 494 aa, unidentified
  REGION 1..494: note = Human gut metagenome
MTMVYVQNKDGKPLMPTTRYCYVRLLLKEKKARVVCTTPFTIRLNYDTPNIIQDLILGIDPGRTNIGVAVVKEDGSCVFSAHLETRNKEVPLLMKKRAAFRRQHRTQDRRRKRQRRAIAAGTTVESNTIERLLPGYEKPIVCHHIRNKEARFNNRSRPAGWLTPTANHLLQAHINLIAKAAKFLPITKVVVELNRFAFMAMDNPNIRRWEYQQGPLYGLGSVKDAVYAQQDGHCLFCKKPIDHYHHVVPRHKGGSETLANRCGLCEKHHALVHKDKAWAEKLVTRKGGMNKKYHALSVLNQIIPHLMEYLGSETPYDVYATDGKSTKGFRIAKNVPKEHYTDAYCIACSILDADTKVSAPAEPFKLKQFRRHDRQSCIRQMVDRKYLLDGKVVATNRHKSIEQKSDSLEEFREAYGDAAVSQLTVRPHSPQYKDMARIMPGTVMDFDGIVGVFKGSSGRNNGTPNYYNSTKGARVLTKRCALLAKNAGMVFIPA

SEQ ID NO: 13285 - protein, 351 aa, Ferroplasma sp.
  REGION 26..69: note = misc_feature - Xaa can be any naturally occurring amino acid
MVKNMKEKQKLDRRNTYTPTDAPQVXXXXXXXXXXXXXXXXXXXXXXXXXXXXXXXXXXXXXXXXXXXXQTHIRLIEKLKKILPISDIIIEVASFDQQKMKNPEISGIEYQQGELQGYEIREYLLEKFHRKCVYCGKTNIPLEIEHLTLRSRGGPDTVDNLAISCHDCNQKKNNLTAEEFGYPKVRKRTLIPLKNSAFMNIVRWKLAQLTEAAYTFGYITRKNRISLGLDKSHANDAFVIAGGNMQVRSTVFNATQRRRNNRSLQINKKGFMPSIRRRRYPLQPGDVVEFGESRYGAVGVHSYGNYVIIRNGEKKMDVNVKKVKLVRYCKSIQFGAPIPPTLTHGVSLGGS

SEQ ID NO: 13286 - protein, 451 aa, unidentified; identical to SEQ ID NO: 3061
  REGION 1..451: note = Human gut metagenome

SEQ ID NO: 13287 - protein, 431 aa, unidentified; identical to SEQ ID NO: 6230
  REGION 1..431: note = Human gut metagenome

SEQ ID NO: 13288 - protein, 424 aa, Enterococcus sp.; identical to SEQ ID NO: 8879

SEQ ID NO: 13289 - protein, 524 aa, unidentified
  REGION 1..524: note = Freshwater metagenome
MDCVALTSEPKTDRRVLPQPAALEPAVADKPKGLVRNGRRDAAADNVGRAKARPRGQQARGETMAAVAAMASPAKAERGVSHTFKRQNRVFVLGHSGEPLMPCHPARARKFLAAGRARVHRLHPFTIRLTDRAGGSVQPILVKLDPGSKHTGIAIVRQDGDDQLVLHLSELDHRGATIRKHMTQRAMFRRRRRTANLRYRAPRFNNRTRRDGWLPPSLMSRVDNIQSWIGRFRRMVPIAGLAQELVRFDMQIMQNPEISGVEYQQGDLAGYECREYLLEKWGRKCAYCGAENTPLQVEHIHPKARGGSNRVSNLTLACRDCNERKGSQPIEAFLARKPEVLRRILATAKRPLSDAAAVNATRWELWRRLTATGLPVRTGSGGRTKWNRSRLSVPKSHCLDAACVGKVDAVLDWDRQPLSIKATGRGSYQRTRLDSFGFPRGFLMRRKMVHGFQTGDLVQAVVPTGKKAGNHTGRAAVRETGSFNIQAQSGTVQGIAHRHCRLLMRADGYSYFHQPRKGGVSSRP

SEQ ID NO: 13290 - protein, 502 aa, unidentified
  REGION 1..502: note = Human gut metagenome
LFLQIPQAFGCLLRLSIFPVDSSARVALSRTIPLTANTQPRETQPPVSAGETYSKRRVAYMPTVYVLNKDGKPLMPTTRCMHVRHLLKNGKARVVKSKPFTIQLLYETDDVVQPLYLGIDPGRTNIGVAVVKADGAAVFTAHLETRNKEVPKLMKKRKESRCARRTNGRRCRRQRRAKTNGTISKKCVKQTTAQNGSVSKRAKEIGVIKRHLPGCEKDVLCIGIKNKEAKFTNRARPEGWLTPTANQLLQTHINLVKKIQKFLPISDVVLEVNKFAFMQLDNPNIQKWQYQQGPLYQKGSLENAVSEMQEHHCLFCEKPIEHYHHVVPKSENGSNTIANIVGLCTEHHNLVHKDATWQKKLVKEKVGLVKKYSALSVLNQIIPALTKEMNSLFPKHFFVTNGKSTYDYRTAHGVSKDHWLDAYCIACSVLPNDVCDSNINSHVPYELKQFRRHDRRVLHKANMSRVYTLNGKTVATNRHKAIKQTTDSLEEFRQSHPGDVCK

SEQ ID NO: 13291 - protein, 413 aa, unidentified
  REGION 1..413: note = Human gut metagenome
MTSYSFVLDANGKQLAPTKEPKAWFLIRKKRAALVSKYPMVIQLKKKIQENEICKDEIRCGIDDGGLHVGIALVQKCKSKNKVVFKGTIEQRNDVKHLMEVRRNYRRYHRYHKRYRQARFDNRKSSKRKGRIAPSILQKRQATIRVINRLNKWINITNYWLEDVAIDIRALTDGYKPYRWQYQKSNRLDENIRKATILRDGGKCMECGKSNCRLEVHHIKPRRRNGSNTLDNLIILCESCHQKTEGQEELYMDRYFSLLKSSDNKNLNYAQHVMIGKMWLRKQLSGLGVLYLTSGGDTANKRIDWNIEKSHTNDAVCITDLQPDTCDIKEWAIKPMRRQSKAKTDHVLGIHHRDLVEYTFKNGETHRGYVTALYPDQKAINFQSQTKHCKKVNARKCKLLWNYSKIYWFENAS

SEQ ID NO: 13292 - protein, 263 aa, unidentified
  REGION 1..263: note = Human gut metagenome
MVYVQDINGKPMMPTTRHGRVRRLLKDKKAVVVNLCPFTIKLMYVTSDYKQEIVLGVDAGTKHVGLSATTKSKELYSSEVILRNDIVDLLSTRRELRRTRRNRLRYRKPRFNNRIKSKRPGWIAPSVKYKVDAHIRVIDNVCSILPISRIVIEVAQFDTQKINNPNISGKEYQEGDQLGFWNVREYVLARDGHKCQYCKGKSKSKILNVHHLESRKTGGDSPSNLITLCETCHKEYHKGNIDLKIKRGSSLRSRNGNYEMEVV

SEQ ID NO: 13293 - protein, 356 aa, Arthrospira sp.
  SITE 169: note = misc_feature - Xaa can be any naturally occurring amino acid
  SITE 350: note = misc_feature - Xaa can be any naturally occurring amino acid
  SITE 356: note = misc_feature - Xaa can be any naturally occurring amino acid
MSNHIFVLDTNRKPLTPCKPGMARSLLKAGKASVFRRYPFTIILNKEVDANPEPLELKLDPGSKVTGIALKQGNHIIFAAELQHRGQQIKEALLSRRQLRRSRRNRKTRYRPARFLNRTRPEGWLAPSWQHRVDTLMTWVHRFRRLAPVGRITQELVRFDLQLMENPEXSGVEYQQGELQGYEIREYLLEKWGRTCAYCGAQNVLLEVEHIQPRSKGGSDRVSNLTMACHSCNQAKGNGDIRDFLSGQPDVLSRLLRQAKSPLKDAAAVNSTRWALFKALKATGLPVTTGTGGQTKFNRLRLNLPKAHWLDAACVGPVESLEVLTSKPLLILAKGHGTRQMCGTNKYGFXTRHRSX

SEQ ID NO: 13294 - protein, 423 aa, unidentified; identical to SEQ ID NO: 4062
  REGION 1..423: note = Human gut metagenome

SEQ ID NO: 13295 - protein, 440 aa, Clostridium sp.; identical to SEQ ID NO: 8484

SEQ ID NO: 13296 - protein, 512 aa, unidentified
  REGION 1..512: note = Human gut metagenome
MSTVYVLNKDGKPLMPTTRCGHVRHLLKEQKARVVTSKPFTIQLLYETDDVVQPLYLGIDPGRTNIGVAVVRTDGTAVFTAHLETRNKEIPKLMKKRKDSRRARRTNGRRCRRQRRAKANGTISKKCVKQDTAQNGSVSKRAKKIGVIKRHLPGCEKEVLCIGIKNKEAKFSNRTRPEGWLTPTANQLLQTHINLVKKIQKFLPISDVVLEINKFAFMRLDNPNIQKWQYQQGPLYQKASLEEAVSEMQEHHCLFCKKPIAHYHHVVPQSENGSDTIDNIVGLCTKHHDLLHKDTAWQKKLAKKKTGLNKKYGALSVLNQIIPALTKELSSLFPKHFFATNGKSTNDYRAAHDVSKDHWLDAYCIACSILPNDTCDKNINGRVPYKLKQFRRHDRRALHKENMSRVYTLDGKKVATNRHKAIKQTTDSLEEFRQRQPNDVCKLKVKEHHPEYRNPERNFPGCVFLVGKHTHVMQGTSGSHNGKADGYYNTNGNSYPSGKCKFVAKNKGIVFA

SEQ ID NO: 13297 - protein, 442 aa, Lactobacillus sp.; identical to SEQ ID NO: 7095

SEQ ID NO: 13298 - protein, 443 aa, unidentified
  REGION 1..443: note = Human gut metagenome
LTKDENRPSGRTTGLRAEQAEPAGIRKGDTLKVFVLNMRGKPLMPCSPAKARHMLKAGKAFVVRRTPFTIKLTIATGETKQDVTLGVDAGARHVGISATTEKEEVFASEVALRQDITGLLADRLAFRRARRNRKTRYRAPRFNNRVRSKHKGWLAPSVENRIQAHMSRIEAVCRLLPVTKIVIETASFDIQKIRNPEVEGTGYQQGDQLGFWNVREYVLFRDGHICQHCRGRSKDPILNVHHLESRKTGGDAPNNLITLCETCHKAYHAGKIKLKVKRGQSFRAEAFMGIMRWTLLDRVRKTHPKLPVENTYGYLTKHKRIALGLPKTHCADAFCIAGNLKALRRGDFLFQQQTRKHNRQIHRCSILKGGVRKLNQAPFLVKGFRLFDKVRIGGQIGFVFGRRVRGTFNIRRLDKTVIGTDINCKKLSLLETRKTFLTELRKE

SEQ ID NO: 13299 - protein, 420 aa, unidentified; identical to SEQ ID NO: 7206
  REGION 1..420: note = Human gut metagenome

SEQ ID NO: 13300 - protein, 406 aa, unidentified
  REGION 1..406: note = Human gut metagenome
MVYVQDIYGRPLMPTTRHGKVRRLLKSKKATVVNLCPFTIRLLYDTTGYKQEITLGVDTGTKHVGLSATTKSKELYASEVILRSDVVDLLSTRRELRKIRRYRLRYRKPRFMNRIKSKKRGWIAPSIRQKIDSHIRIIGFVYSILPVSKLIIEVAQFDTQKIKNPEISGKEYQEGEQLGFWNVMEYVLARDEHKCQHCKGKSKDPVLNVHHIESRKTGGDSPSNLITLCKTCHKEFHKGNIKLKVNRGESLRDAAVMSIMKWELYDELKSLYPNVKMTFGYITKYNRINHGIEKSHVSDAFVISRNFDSERLGYYYKRKLVRRHNRQIHKMKAPKVGNKRMNQSPFKVFGFRLFDKVMFQGKERFIYARRLRGIFNIRDINGENKKDISYKKLEYVSHGLISIVAG

SEQ ID NO: 13301 - protein, 512 aa, unidentified; identical to SEQ ID NO: 6489
  REGION 1..512: note = Human gut metagenome

SEQ ID NO: 13302 - protein, 414 aa, unidentified
  REGION 1..414: note = Human gut metagenome
MPCSPAKARLLLKEKKAIVVRRTPFTIQLTIATGESKQPVSLGVDAGYKHVGLSASTEKAELYASEVELRPDVSDLLSARRTLRQSRRNRKTRYRAPRFDNRIRTKRKGWLAPSVENRINAHLSRIGAILRLLPVTKITVETASFDTQLLKNPDISGKEYQEGEQLGFWNVREYVLFRDGHACQHCHGRSKDPVLNVHHLESRRTGGDSPGNLLTLCETCHKALHRREIKLKTKRGQSFRAEAFMGIMRWEVLNRLKASHPELEVHNTYGYRTKHTRIVNGIDKSHCADAFCIAGNLGAKRLGEFFFQKQTRRNNRQIHKLSILKHGLRKRNQAPFEVKGFRLFDKVVCQGEEGFIFGRRSSGSFDVRKLDGTRISAGISYKKLRLLEKRRTYLKEIRKEETLPPLPEGRSLRA

SEQ ID NO: 13303 - protein, 417 aa, unidentified
  REGION 1..417: note = Human gut metagenome
MPCHPARARQLLHSKKARVKRLYPFTIQLTHRSDGYIQPVELKFDPGSKQTGIGLVLHGKNRLSAIYAAVLTHRGQEIKSNLDSRRMIRRARRNRKTRYRQARFLNRVRSKHKGWLAPSVQSRVDNIVEWSKRFMRYTPVGFITVESVKFDMQKMENADVEGLEYQRGTLFDYEVKEYLLEKYNYSCVYCGAKNVPFEKEHVIPRSRGGSNRISNLVLSCHDCNQKKDNLPIEVFLKDNPALLKKIKAQLKSPLKDAAAVNITRKQIVKELGNLNVPVLTGTGAETKYNRVSQKYPKEHYIDALCAGTTGTKVYIPSKLKPLLIKKERRNNRQMCLVNKYGFPRGKAKGSKIVHGFKTGDIVKAVVLKGKKKGTYKGKVAVRSSGSFNVNVKQGRVEGIGWKNCVMLYRFDGYSYTY

SEQ ID NO: 13304 - protein, 431 aa, unidentified
  REGION 1..431: note = Human gut metagenome
MPNKVYVINKHGRPLMPCSPAKARHLLDAGKAKVKKRTPFTIQLVYGSSGYTQEVILGVDAGSKTIGMSASTTKEELLSAEVKPRNDVVDLLSTRREFRRAQRNRKTRYRKPRFDNRVRSKHKGWLAPSVEVKIQEHITAIRRVCGILPVSKVVIETAEFDLQLLKAIADGKPVPQGEDYQQGEMYGHYNVRQYVLWRDGYTCQCCGAHATKKKEVRLHVHHLESRKVGGDAPDNQVTLCESCHEKLHKGLIAEKDFKKRKRKSTRDATFMGIMRKTLMQRLCSELPIPVVKTRGYITKATREKLLVLPKSHTNDALAIAQGKQGFNVGYLPGIVQINKIYTIRPVRHHNRQLHKATILKGGIRKSNQTEKYVFGYRLFDKVQFNGQDCFIWGRRTTGIFTIKTINGKMIKDGISFKKLKPVEKSTGYLIA

SEQ ID NO: 13305 - protein, 418 aa, unidentified; identical to SEQ ID NO: 2425
  REGION 1..418: note = Human gut metagenome

SEQ ID NO: 13306 - protein, 420 aa, unidentified
  REGION 1..420: note = Human gut metagenome
MQYVYVLNKHGEPLMPCSPGKARLLLKEKKARVVRRTPFTIKLLYGSAGYKQPITLGVDAGSKHVGLSASTKKRELYREEFTPRNDVVKLLSKRKQYRRSRRNRKTRYRAPRFNNRVHSKHKGWLAPSVEVKIQEHITVIKRICRILPISLVRVETAEFDTQRLKAMLEGKSLPVGTDYQLGEMYDEYNVRQYVLKRDNYTCQCCGAHTTKKKTVKLHVHHLEGRQVGGNAPNNLITLCVDCHKALHAGKVKLDGKKRGKSFKDAAFMGIMRKTLMARLRDELPIPVQGTYGYITKMRREQNDIKKSHVNDARCISKHPLAEPCSVCYRTKAIRHHNRQTHKANFSKGGTRQRSQMPYVVEGYRLWDKVLYKGQECFVSGRRASGSFTLKKLDGTRISKGVTFKKLRLLEPATNYLIERM

SEQ ID NO: 13307 - protein, 507 aa, unidentified
  REGION 1..507: note = Human gut metagenome
MPEYIYVLGMDGKPQMPTRRRRHVNKLLNTGKARIAEHVPFTIQLLYENEPVLQQIMMAEDPGRTNIGAAVVGLKGQLYLPAVVETRNKEICKLMDKRRACRRASRNGERKARQRRAKRFGTMLKAGILMRKLPQYGEDGFITCHVIRNTEARFCNRKRPKDWVTPTVEHLIRTHINLVHKMQKFLPITDVAIEVNRFAFMLLDDPIVAGVDFQKGPLKGYSNVNDAVFDQQDGKCLLCGEPIEHYHHIVPRSKNGSNTLENIVGLCCHCHEAVHKDEDVQKALKDKKSGLMKKYAALSALNQAIPFIYKRLVEDFGEEHVFTCTGRETAMVRKGLGFTKTKKNQLHEVDAYCIALLALGCTDAELPTFEHVYQMTQFRRQNRANINNQRERSYYYEGESVAKNRKDRIEQKDDSLETWYQKMVQQYGEKEADRRRSILQVKKSTRHYNTPGRVMPGAVFYYKGERYIMCGQHSKGQYYRVVGDAKTNYPAKKCRIVKQNEGLVFLG

SEQ ID NO: 13308 - protein, 430 aa, unidentified
  REGION 1..430: note = Human gut metagenome
MPNKVYVINKHGRPLMPCSPAKARHLLDAGKAKVKKRTPFTIQLVYGSSGYTQEVILGVDAGSKTIGVSALTKKEELFAANVIPRNDVVDLLSTRREFRRARRNRKIRYRKPRFDNRVRSKHKGWLAPSVEVKIQEHITTIRRVYGILPVSKVVVETAEFDLQLLKAIADGKPVPQGEDYQKGEMYGHYNVRQYVLWRDDYTCQCCGAHATKKKEVRLHVHHLESRKVGGDAPDNQVTLCESCHEKLHKGLIAEKDFKKRKRKSTRDVTFMGIMRKTLMQMLCSELPIPVVETRGYITKATREKLLVLPKSHINDALAIAQGKQGFNVGYLPGIVQINKIYTIRPVRHHNRQLHKAAILTGGIRKSNQAGKYVFGYCLFDKVQFNGQDCFIWGRTTGIFTIKTINGKMIKDGISFKKLKLVEKSTSYLIA

SEQ ID NO: 13309 - protein, 544 aa, unidentified
  REGION 1..544: note = Human gut metagenome
MKQKKQKVMVYILNKKGKPLMPTTRCGHVRKLLNSKKAVVVNSNPFTIRLKYDTPNGVQDVFAGIDSGRENIGSGASNEDGDCLYLGELKTSNKSIKLKMTERAGFRKERRRHDRQNKQRKARKDHTEIQNGKDDICRATISCKSVQISYPTAEESVTHKIIRGKEGKFANRHRDGDWITPSARQLVQMHMNDLKSICKILPISHVTLERVAFDFQKLENENIKAWEYGKGKLYGYDSPEEYIHDVQNGKCLVCGKPHIDYLHHIIPRSKGGSDKVSNIAGLCYDCHYGPIGVHNCQDTQDRLPELKNEVNKQYKVSLLNSVMPVLIEEIDKFCKANSIMFSICEGHDTAKVRDMYDLQKDHCLDGFAISLVGRNVKSVDVMPDRIHQKQRYKKKSKNIIQKRNCREYYDDKKLVAVNRHKGTDQKADSLEEYMNTYAETHTTDECKKHFDSLVVKPARRTYTFHKEWRICPFHIGDKVRYEKKNKIKGNTKVDTFICEGIYFSKDENKAKVEHNKTKSKKMKFCRAIESGCIPYIDYIKLALI

SEQ ID NO: 13310 - protein, 426 aa, unidentified; identical to SEQ ID NO: 3614
  REGION 1..426: note = Human gut metagenome

SEQ ID NO: 13311 - protein, 414 aa, unidentified
  REGION 1..414: note = Human gut metagenome
MPCSPAKARLLLKEKKAIVKRRTPFTIQLTIATGETKQPVSLGVDAGYKHVGLSASTEKAELYASEVELRQDITDLLSARRALRQSRRNRKTRYRAPRFDNRIRTKRKGWLAPSVENRINAHLSRIEAVLRLLPVTKITVETASFDMQLLKNPDISGKEYQEGEQLGFWNIREYVLCRDGHVCQHCYGRSKDPVLNVHHLKSRRMGGDSPGNLITLCETCHKALHRGEITLKAKRGQSFRAEAFMGIMRSEVLNRLKASHPELEVNNTYGYRTKHARIANDIAKSHCADAFCIAGNLGAERLGEFFFQKQTRRNNRQIHKLSILKGDIRKRNQAPFEVNGFRLFDKVACQGEEGFIFGRRSSGFFDVRKLDGTRISAGISCKKLHLLEKRRTYLTEIRKEEALPPLPEGRGLRA

SEQ ID NO: 13312 - protein, 462 aa, Burkholderia sp.; identical to SEQ ID NO: 10484

SEQ ID NO: 13313 - protein, 415 aa, unidentified
  REGION 1..415: note = Human gut metagenome
MVYVVANDGQPLMPTNRYGKVYRMLRSGMAVVVKKCPFTIQLQYESERNVQPVALGIDAGSKHVGVSATTKAKVLYESDVELRGDIVKLLATRRQLRRSRRSRKTRYRPARFDNRKRKEGWLAPSIQQKIGSHLTVVANVCKILPINQIIVETASFDIQKIKNSDIQGTEYQQGEQMDFWNVWEYVFFRDGHTCLCCKGRSKDKILNVHHIESRKTGGNAPNNLITLCETCHKGYHNGTVILPKNIKHGMQFKDAAFMGIMRWTFYNTLKEQYEPDIPVSMTYGYLTKNTRIEHGLPKEHYIDARCISGNPDAVSDGTYYYQKKVRCHNRQIHKQTILKGGIRKSNQAEYLVKGYRLFDEVRYQGREYFIFGRRKSGFFDIRTLSGEKVNKGSISVKKLTFADTRKNYLIERRTV

SEQ ID NO: 13314 - protein, 515 aa, unidentified
  REGION 1..515: note = Human gut metagenome
MEYLDFTLVVDKNDKPCVPISNGRAGYLLRNNKAKIINHDPLVIKRKDDYQSDLENRDIFELKIDSGYLNIGFSVSDNYHEYLAGQVELLKGMSDRLTNRNGYRRTRRSRIRYRKNKNVDYKTVHNPTYKNGNEEGWFAPSIQHKIDSHIRLIDKIASWVPVDKVIVEVAKFDIQMIKALADGKEISGKDYQNGEMKGYENAAAYVRDRDKHTCRLCGANKNVVIEVHHIQPRSKGGTDKPSNLISLCHSCHRKVHSNNNDNKYFEKVKNMKSSDTYKDSTYMNMVRWELFERLSGKYDVKVGYGYQTKINRRNAGLRKFHYTDAVCINDYKDVTLTENIYIVDQKRCNDRSMETFSDAKYIDVRDGKEKSGNTLYKERLPNAPSKRVTQKEYINNMRQFRGKKIKPGKRTFVCNSYCLKCGDLIYISSGTHKGNIAEVESMQKLPNGNFKIRFTYKAQTVKYPSINIKPEEYELLRSNLLDKVKIVRTRRGMIWRKYNRLEYEATHTDQEGMAV

SEQ ID NO: 13315 - protein, 413 aa, unidentified; identical to SEQ ID NO: 2636
  REGION 1..413: note = Human gut metagenome

SEQ ID NO: 13316 - protein, 456 aa, Halomonas sp.; identical to SEQ ID NO: 2736

SEQ ID NO: 13317 - protein, 475 aa, unidentified
  REGION 1..475: note = Human gut metagenome
MVAVVTSTGKPLMPTSAYRARKLLKKGRAVIFKYRPYFTIQLVDRADGEVQEVEYKSDTGSVHVGISVCTEKKELLSEQRDLLENEPEHHNDRKKNRRTRRNRKRYRKPRFDNRKKKPQEGHEKWLPPTLLHKMEVQVRLFREFCRVVPVTSACFEMGKFDTQALKAVSKGEPVPEGEGYQNGERYGTDTLRAAVFLRDGHTCRFCGRSVKDGAILHVHHVGYWKGDRTNRPANLASACEQCHTPANHGKNGILYGKEPEFKTLKDASYMTSVRWIMLDEIKKAAPGVQVSVTYGVTTKRKRQELHLPKSHVNDAFSMASFHPKKRSDTEYWKKIPRHDRVLQKFYDAIYLDTRDGSEKKGSELSNGRISRNHKKDSENLHQYRGHKVSKGHNSIRRGASSLKPGSIVMYKGEKMTVHGTHTRYVTDKDGKTVKKVNVQFTRPASDGKKSASLEKCTPVSRVYNTGWKRYWPDKK

SEQ ID NO: 13318 - protein, 418 aa, unidentified; identical to SEQ ID NO: 4950
  REGION 1..418: note = Human gut metagenome

SEQ ID NO: 13319 - protein, 452 aa, Moorena sp.
MERRHTVPAFTVDKYGRPGMPTFNVKKIRKLLKSGKAEVFCYRPFTVKLLYADSLDTQPVELCIDAGDRHIGISVKSEKHEFVHAQYNPLPDEKERHDSRRQYRRARRSRKRYRRPRFDNRKKDKGSFAPSVEHKKDLHISIALMYRKVCPLTEITVETASFDTQALEAIERGLPLPEGKGYQQRPRYRLNTLRDAVFFRDGHKCRLCGRTDRPLRVHHLGYWKGDHTDRMSGLATLCTDCHTSANHKKGGALYGWEPGTKPMRGAAFMNQVRYQVVKDLKEKTGLPVHVTFGSATKTARQVLCIEKTHANDAFCMGSFHPKHRQKEEVYIKRRRNNRILSKFYDARYMDIRDGKVKSGQELSCGRTKRSESRHSEKDLRMYRGHKARKGRVSVRRQRYSIQPGTLLMYRGRKVTAKGVHCRGARVMLDTGKSAAVSRVSVVRYPGGWIRTA

SEQ ID NO: 13320 - protein, 515 aa, unidentified
  REGION 1..515: note = Human gut metagenome
MTALEEKLSKTEYIYVLGFDGKPQMPTRRKRHVLKLLKTGRARIAEDIPFTIRLTYRNAPVLQPVTLAEDPGRTNIGAAVLSPLGDLLFAAVIETRNKEIKKLMTDRQKSRQASRRGERKARQRLAKRYGSMVKSGMVMRKLPMYAADRFVTCKFIRNTQARFCNRKRCPDWITPTVQHLMQTHLNIIRKISRYLPVTDIAFEVNRFAFMHMENPEAMGVDFQNGPLKGYGDVKEAIRTQQHGKCLMCKKPISHFHHIVPRSRGGSDTIQNLAGLCPECHTKVHTDTAFRKDFDEKKSGQLKKYGALSALNQAVPFICKKLLEEYGEEHVHFCRGLDTSLIRTALGFEKTKKNQMHEVDAYCIGLAALEVNEVETPAFDHTFQIRQFRRQDRSIIHHQTGRSYYQGKEKVAQNRKPGFEQKTTALSQWYKEQVRIHGEKEAEKLRSQLRVEKSCRHYNDMDRFLPGAVFLYEGKRYVLSGRITNGKYLRACGQGMKNFPAAECTFIRHNAGLVFI

SEQ ID NO: 13321 - protein, 451 aa, Moorena sp.; identical to SEQ ID NO: 3199

SEQ ID NO: 13322 - protein, 419 aa, Anoxybacillus sp.; identical to SEQ ID NO: 5328

SEQ ID NO: 13323 - protein, 498 aa, unidentified; identical to SEQ ID NO: 2448
  REGION 1..498: note = Human gut metagenome

SEQ ID NO: 13324 - protein, 477 aa, Massilia sp.; identical to SEQ ID NO: 12758

SEQ ID NO: 13325 - protein, 470 aa, unidentified; identical to SEQ ID NO: 2925
  REGION 1..470: note = Human gut metagenome

SEQ ID NO: 13326 - protein, 421 aa, Lactobacillus sp.; identical to SEQ ID NO: 5881

SEQ ID NO: 13327 - protein, 414 aa, unidentified
  REGION 1..414: note = Human gut metagenome
MPCSPAKARLLLKEKKAIVVRRTPFTIQLTIATGETKQPVSLGVDAGYKHVGLSASTEKAELYASEIELRQDITDLLSARRELCRARRNRKTRYRAPRFDNRIRTKRKGWLAPSVENRINAHLSRIEAVLRLLPVTKITVETASFDLQLLKNPDISGKEYQEGEQLGFWNIREYVLCRDGHVCQHCYGRSKDPVLNVHHLESRRTGGDSPGNLVTLCETCHKALHRGEITLKAKRGQSFRAETFMGIMRWEVLDRLKASHPKLEVQNTYGYRTKHARIVNGIAKSHCADAFCIAGNLGAERLGEFLFQKQTRRNNRQIHKLSILKGGIRKRNQVPFEVKGFRLFDKVACKGEEGFIFGRRSSGYFDVRKLDGTHISAGISYKKLRLLEKRQTYLIEIRKEEALPALPEGRGLRA

SEQ ID NO: 13328 - protein, 414 aa, unidentified; identical to SEQ ID NO: 2588
  REGION 1..414: note = metagenome

SEQ ID NO: 13329 - protein, 554 aa, Streptomyces sp.; identical to SEQ ID NO: 9809

SEQ ID NO: 13330 - protein, 544 aa, unidentified
  REGION 1..544: note = Human gut metagenome
MKQKKQKVMIYILNKKGKPLMPTTRCGHVRKLLDSKKAVVVNSNPFTIRLKYDTPNGIQDVFAGIDSGRENIGSGASNEDGDCLYLGELKTSNKSIKIKMTERTGFRRERRRHDRQSKQRKAKKDHTEIQNGNDDICRTTISCKSVQISYPVAEESVTHKIIRGKEGKFANRHRDEGWITPSARQLVQMYMNDLKSMCKILPINHVTLERVAFDFQKLENENIKTWEYGKGKLYWYDSPEEYIHDVQDGKCLVCGKPHIDYLHHIIPRSKGGSDKVSNLAGLCYDCHYGPMGVHNCRETQDRLPELKNKANKQYKVSLLNSVMPVLIEEMDKFCKANSIIFSICEGHDTAKVRDMYDLQKDHCLDGFAISLVGRNVKSVDVMPDRIYQKQRYKKKSKNIIQKRNCREYYDGKKLVAVNRHKGTDQKADSLEEYMNTYAETHTADECKKHFDSLTVKPARRTYTFHKKGCICPFHIGDKVRYEKKNKIKGNTKVETFICESIHFYKDENKAKVEHNKTKSKRMKFCRVLEAGCTPYIDYRKLALM

SEQ ID NO: 13331 - protein, 430 aa, unidentified
  REGION 1..430: note = Human gut metagenome
MYVYVINKHGEPLMPCSSRKARTLLNNKKACVVKRTPFTIKLLHGSAGYKQPITLGVDAGSKHIGLSVSTETHEIYREEFAPRNDVVDLLSTRREFRRARRNRKTRHRAPRFNNRVHSKHKGWLAPSVEVKIQEHITVIKHVCQIMPISLVRVETAEFDTQRLKAMIAGKPLPVGTDYQLGEMYDEYNVRQYVLKRDNYTCQCCGAHATKTKQVKLHVHHLESRKVGGNAPNNLITLCPICHKAIHEGKKALGKKKRGKPLRDAAFMGIMRKTLLARLREELSIPVQQTYGYVTKMLREKNNLLKSHMNDALCIAKHPKAAPCENCYRSKAVRHHNRQIHKATILKGGIRKNNQAPYIVKGFRLWDKVLYNRQECFISGRRATGYFALKKLDGTVVTTGASYKKLRLLETTKNYLRERLTIKSQPKCVER

SEQ ID NO: 13332 - protein, 470 aa, Anaerostipes sp.; identical to SEQ ID NO: 2825

SEQ ID NO: 13333 - protein, 406 aa, unidentified; identical to SEQ ID NO: 6445
  REGION 1..406: note = Human gut metagenome

SEQ ID NO: 13334 - protein, 515 aa, unidentified
  REGION 1..515: note = Human gut metagenome
MATVYVLNKDGKPLMPTTRCGHIRHLLKEKKARVVRTNPFTIKLVYETDDVVQPLYLGIDPGRTNIGVAVVKVDGTAVFTAHLETRNKEIPKLMAKRKEHRQGRRHYRRCKRQRRAAAHGTLSKKCKKQDTAQGGNISKRAQTIGVFERNLPGCEKSVLCIGIKNKEARFNNRVRPARWLTPTANQLLLTHVNFVKKICKFLPISDVVLEINKFAFMALDNPNIQKWQYQQGPLYQKGSLENAVSEQQDHHCLFCEKTIEHYHHVILRSENGSDTIANIVGLCAEHHDLIHKDDKLKEELAKKKQGLNKKYGALSVLNQIIPALTYELGSRFQGHFYVTTGKSTYDYRAAHSVSKDHWLDAYCIACSVLPDGCFDNTINSRVPYELKQFRRHDRQVCQQQNVKRKYYLDKKLVATNRHKAIKQETDSLEEYRNNGGTTDKLVVKEHKPTNKRLNRILPGALMAANGKLNVMVASRGLHNGIPDNYVFDNSSKAKPSKCTLINKNKGIVFVSNSVS

SEQ ID NO: 13335 - protein, 431 aa, unidentified; identical to SEQ ID NO: 9814
  REGION 1..431: note = Human gut metagenome

SEQ ID NO: 13336 - protein, 413 aa, Blautia sp.; identical to SEQ ID NO: 9603

SEQ ID NO: 13337 - protein, 414 aa, unidentified
  REGION 1..414: note = Human gut metagenome
MPCSPAKARLLLKEKKAIVVRRTPFTIQLTIATGETKQPVSLGVDAGYKHVGLSASTENAELYASEVELRQDVSDLLSARRALRQSRRSRNTRYRAPRFDNRIRTKRKGWLAPTVENRINVHLSRIETVLRLLPVTKITVETASFDTQLLKNPDIAGKEYQEGEQLGFWNVREYVLFRDGHVCQHCHGRSKDPVLNVHHLESRRTGGDSPGNLITLCETCHKALHRGEIKLKAKRGRSFRAETFMGIMRWGVLNRLKASHPKLEVHNTYGYRTKHARISNGIAKSHCADAFCIAGNLGAERLGEFFFQKQTRRNNRQIHKLSILKGGIRKRNQAPFEVNGFRLFDKVACQGEEGFIFGRRSSGFFDVRKLDGTRISAGISYKKLHLLEKRRTYLTEIRKEEALLALPEGRSLRA

SEQ ID NO: 13338 - protein, 406 aa, unidentified; identical to SEQ ID NO: 2703
  REGION 1..406: note = Human gut metagenome

SEQ ID NO: 13339 - protein, 466 aa, unidentified; identical to SEQ ID NO: 3943
  REGION 1..466: note = Mouse gut metagenome

SEQ ID NO: 13340 - protein, 378 aa, Moorena sp.; identical to SEQ ID NO: 6181

SEQ ID NO: 13341 - protein, 576 aa, unidentified
  REGION 1..576: note = Human gut metagenome
MDFVLIVDKNSKPCIPIKNGKAGYLLREHKAEIINHEPLVIKRTDDYNSDLENRDIFELKVDSGYLNIGFSVSDNEHEYIAGQVEMLNGMSNRLLERKSMRSFRRNRLRYRKNKNIDYKTVHNPTYKNGNEDGWFAPSIVHKMETHIRIIEQLKQWVPIDKVIVEVANFDIAAMDAYLKDGTILNGKDYQNGEMKGYENVVSYVRARDNYSCYFCNKKKKKDGTLKEKPKRIEVHHKIPRSWGGTNNPGNLICVCQGCHQKIHSNNNNNKYFKELLEQALQENTFKDSTYMNIVRWELLNRLTEKYPELDIEAEYGYNTKINRKEAGLRKFHYNDAVCIKEFKNITLSKKVFIVEQKRCNDRKMESFADAKYIDSRDGKKKKGNDLKVIRHSTKSKRSTNKEHIDNERIFRKEKVSKGKIQFECHSYCVKPGDLIYIKEGKHKGKIAEVSTIQIVGEKIPNPIIDINEINNKKIDFNRELKKRKTTSNMTDYQKRFAKYQIRFTYKESDADGPSITLTQKEYEKLKENKSDRVKIIRTRRGLVWREYDRLTYEAENMDQEEKKLEVKNKKQELKAA

SEQ ID NO: 13342 - protein, 416 aa, unidentified
  REGION 1..416: note = Human gut metagenome
MVYVLDKNGQPLMPTDRHRKVRLMLQSGQAKVIKRCPFTIQLNYDSGHQTQEISLGIDAGSKHIGVSTTTKIKVLYEVDVELRNDIVDLLSSRRELRRGRRNRKTRYRQAKFNNRRRGNGWLAPSIRQKIGTHLTVVENICKMLPISRIMVETASFDIQKIKNPDIQGAEYQQGDQLGFWNNREYVLFRDNHTCQCCKGKSKDKILNVHHIESRKTGGNAPNNLITLCETCHTGYHKGTVQLPKAIKRGMRFKDAAFMGIMRWAFYEALKQQYEPVGTPVHNTYGYITKHTRIAYNLPKEHYVDARCISGNPEASSNGEYYYQKKVRCHNRQIHKLTVLKGGIRKQNQATYLVKGYRLFDKVSYQGKGYFVFGRRQSGFFDIRTLSGEKVNKGSLSCKKLKFIATRTYYLTERRAV

SEQ ID NO: 13343 - protein, 427 aa, unidentified
  REGION 1..427: note = Human gut metagenome
MPNKVYVINKHGRPLMPCSPAKARHLLDEGKAKIKKRTPFTIQLVYGSSGYTQEVILGVDAGSKTIGMSASTTKEELLSAEVKPRNDVVDLLSTRREFRRARRNRKTRYRKLRFDNRVRSKHKGWLAPSVEVKIQEHITAIRRVCGILPVSKVVVETAEFDLQLLKAIADGKPVPQGEDYQKGEMYGHYNVRQYVLWRDDYTCQCCGAHATKKKEVRLHVHHLESRKVGGNAPDNQVTLCESCHEKLHKGLIAEKDFKKRKRRSTRDATFMGIMRKTLMQRLCSELPIPVVKTRGYITKATREKLLVLPKSHTNDALAIAQGKRGFNVGYLPEIAQIDKIYTIRPVRHHNRQLHKAAILKGGIRKSNQTEKYVFGYCLFDKVQFNGQDCFIWGRRTTGIFTIKTINGKMIKDGISFKKLKLVEKSTN

SEQ ID NO: 13344 - protein, 419 aa, unidentified; identical to SEQ ID NO: 4877
  REGION 1..419: note = Human gut metagenome

SEQ ID NO: 13345 - protein, 466 aa, unidentified; identical to SEQ ID NO: 2809
  REGION 1..466: note = Human gut metagenome

SEQ ID NO: 13346 - protein, 415 aa, unidentified; identical to SEQ ID NO: 7357
  REGION 1..415: note = Human gut metagenome

SEQ ID NO: 13347 - protein, 512 aa, unidentified
  REGION 1..512: note = Human gut metagenome
MSTVYVLNKDGKPLMPTTRCGHVRHLLKKQKARVVASKPFTIQLLYETDDVVQPLYLGIDPGRTNIGVAVVKTDGTTVFTAHLETRNKEIPKLMQGRKKARRARRTNGRRCRRQRRAKANGTISKKCVKQTTAQNGSVSKRAKKIGVIKRHLPGCEKKVLCIGIKNKEAKFSNRTRPEGWLTPTANQLLQTHINLIKKIRKFLPVNDVVLEINKFAFMQLDNPNIQKWQYQQGPLYQKASLEEAVSEMQEHHCLFCKKPIAHYHHVVPQSENGSDTIGNIVGLCTKHHDLVHKDTSWQEKLAKKKTGLNKKYGALSVLNQIIPALTKELSFLFPKHFFATNGKSTHDYRAAHDVSKDHWLDAYCIACSILPNDTCDKNINGRVPYKLKQFRRHDRRALHKENMSRVYTLDGKKVATNRHKAIKQTTDSLEEFRQRQPNDVCKLKVKEHHPEYRNPERNFPGCVFLVGKHTHVMQGTSGSHNGKADGYYDTNGNSYPSGKCKFVAKNKGIVFA

SEQ ID NO: 13348 - protein, 431 aa, unidentified; identical to SEQ ID NO: 7729
  REGION 1..431: note = Human gut metagenome

SEQ ID NO: 13349 - protein, 431 aa, Petrotoga sp.; identical to SEQ ID NO: 11592

SEQ ID NO: 13350 - protein, 413 aa, unidentified; identical to SEQ ID NO: 3220
  REGION 1..413: note = Human gut metagenome

SEQ ID NO: 13351 - protein, 396 aa, unidentified
  REGION 1..396: note = Clostridiaceae bacterium UBA4819
VKHLLKDGKAKVVRRTPFTIQLLYDSPEYTQPITLGVDAGSKVVGLSATTEKKELFVSEITLRDDITELLSTRRQNRRARRNRLRYRMSRFLNRTSSKKEGWLAPSVKHKVDSHLKVIENVHRILPISRIVIETASFDIQKIRNPEITGAQYQQGEQLGFWNTREYVLWRDNHECQHCHGKSKDRILNVHHKESRKTGGDSPSNLVTLCETCHKNHHAGRIQLKLTSNKSYRHASFMGIMRWYVYNRLQELYPDVSMTYGYITKNNRIRNSIEKTHSADAYCISGNMSAVRSNEIYLQAIKRKHNRQIHKANFLKGGKKKLNQSQYEVKGFRLFDHVRYKEEDCFIFGRRASGYFDLRKLDGTVVHRSANYKELKLLKRQNVILIERKGCNGVLLS

SEQ ID NO: 13352 - protein, 465 aa, unidentified
  REGION 1..465: note = Human gut metagenome
MSTCVCVLSNSGERLMPTIRLGKVRQLLKDGKAKIVKHHPFTIQLLYDSKTNTQPIEICEDVGYNYIGISVKSQSHEYVSAQYDTLQDEKACHDSCRKLRRTRRNRLRYRKPRFDNRKRGEGWLAPSLRHKKELNVNVVKMYCAVMPITHATVEVGSFDTMLVKAIQEGKAIPEGADYQKGPRYNLATLREAVFYRDNYTCQVCGRKVADGAILHMHHMFYWKGRHGDSLNELLTVCEKCHTPANHQKSGKLYGFGENVKFADLSGAAFMNAVRWQIVNELYAAFGKDFVTVTYGAMTKEKRIALRLEKSHNNDAYAMGEFHPNCRCTFEHYEKVRRNNRTLEKFYDSRYIDIRTGEIATGKELFNGRINRNHKKDSGNLHRYRGKRTYAGHRALLRKKVNLNPGDLVSLNGEVLVVHSTHTNKKGAVNVEFKTPGKSGQKSASLKKLKIVKAADSMHSAWEKIS

SEQ ID NO: 13353 - protein, 430 aa, unidentified; identical to SEQ ID NO: 7436
  REGION 1..430: note = Human gut metagenome

SEQ ID NO: 13354 - protein, 436 aa, unidentified
  REGION 1..436: note = Human gut metagenome
MFWLIAKKHATFYERSHIMVYVLNKDGQPLMPTTRYGKVRRMLNTKQAKVVKRCPFTIQLLYETTDIVQPISLGIDAGSKTIGTSVTTETNELYASEVKLRTDVVKNLSSRREYRRSRRNRKTRYRKARFDNRKRNEGWIAPSIQNKIDTHLTVIDKITKILPVSEIHVEVASFDIQKIKNPDIEGVEYQQGEQLNSYNIREYVLFRDDHTCQCCKGKTKDKILNVHHIESRKTGGNAPNNLITLCKTCHDGYHKGMVQLPKTIKRGMSFRDATFMGIMRWAFYNKLKEIYPNVSLTYGYITKNNRIKYGLTKEHYNDAYCITGNFNAKPLDTFIYQKKVRCHNRQIHKANFLKGGRKKLNQASYLVHDFRLFDKVRYQDEDCFIFGRRSSGYFDIRKLDGTVIHRSASYKKLELLEARKNYLQEERSRQFFSPIN

SEQ ID NO: 13355 - protein, 424 aa, unidentified
  REGION 1..424: note = Human gut metagenome
MRVFVFNMRGVPLMPCTQRKARILLKEGKAVIYKYNPFTIQLTHATGENTQDCHVGIDTGAKHVGVAITSEGKVLFKGEIELRQDVKSNLDTRRIYRRSRRNRKTRYRQPRFLNRRKADKWLPPSLQNRLDHTFHWIDTLRGLVPSPTLHIEVGKFDTAKMIDPEIHGVDYQHGQTYGFFDERYYVFARDNYTCQCCGKSKGKILQTHHIIYRSNGGTDRTDNLITVCTDCHTSKNHQKGGILYKWQEQHKKVRQYKEPPFMNTLRRRIFAKYPDAAITYGSETTPKRKEKGLDKTHYNDAIIISGVETISENPDEWLFIRQFRKKKRSLHEGTPRKGRKEPNRTQKRNSKNTPYYRGYHLNDKVRVLGKTGYISGFTGGAAYVKDSDNQYITLPNKSYKQVGISNLQHVCHNNNWQYITKTTA

SEQ ID NO: 13356 - protein, 471 aa, Acidithiobacillus sp.; identical to SEQ ID NO: 3868

SEQ ID NO: 13357 - protein, 416 aa, unidentified; identical to SEQ ID NO: 7280
  REGION 1..416: note = Human gut metagenome

SEQ ID NO: 13358 - protein, 427 aa, Moorena sp.
MKQGNRVFVLNMRGEPLMPCSQRKARVLLKEGKAIINTYNPFTIQLTYATGETKQDCHIGVDTGAKHIGIAVTSEDKVFYKAEVELRQDVSSNLDSKRIYRRGRRSRKCRYRKPRFLNRKRTDKWLPPSLQNRINHTFAWIDEFSVLVPSPVLHIEVGKFDTAKMINPDIHGVDYQLGQTYGFFDERYFVFARDNYTCQVCGKSKGKILQTHHIIYRSNGGTDRVDNLITVCTDCHTSANHKKGGILYKWQAEHKKVKQYKEPPFMNTLRRRIFDKYPNAIITYGSETTLKRKEIGLEKTHYNDAIVISSITAIKANPNEWLLIRQFRKKKRSLHESTARKGRKEPNRTQKRNRKNTPYYKGFWLNDKVSVLDQVGYITGFTSGGAYIKNKNDEYITLPGKSYKQVGISNLRLLSHNNNWQYIRNAV

SEQ ID NO: 13359 - protein, 419 aa, unidentified
  REGION 1..419: note = Human gut metagenome
GQPLMPCSPAKARHLLKAGKAVVKRRTPFTIQLRIATGETKQNVTLGVDAGAKHVGLSATTEKEEVFASEVELRQDITGLLAARLSLRRDRRHRKTRYRAPRFLNRVRSKHKGWLAPSVENRIQAHMSRIDAVCRLLPVTKIVIETASFDIQKIKDPSVEGTDYQQGDQLGFWNVREYVLFRDGHVCQHCHGRSKDKILNVHHLESRQTGGDAPNNLITLCETCHKAYHAGKIKLKVKRGQSFRAEAFMGIMRWTLLDRVRKAHPGLPVENTYGYLTKHTRITHGLPKTHCVDAYCIAGNLKAVRRGVYLHQRQMRKHNRQIHKFTVLSKRLEDGTKIGYRKLNQSPYLVHGFRLFDKVRCLVQIGFIFGRRSSGYFDVRRLDGVKLSSGISYRKLTLLEKRSTYLTELRKEDGASSPV

SEQ ID NO: 13360 - protein, 440 aa, Clostridium sp.; identical to SEQ ID NO: 5468

SEQ ID NO: 13361 - protein, 472 aa, unidentified
  REGION 1..472: note = Human gut metagenome
VVDNRLLSIKPLINIGEGVIYSSICTGLSLQTYQKRKEVPCMVYVLDINGQPLMPTTRHGKVRRLLNSHLAKVVKRCPFTIQLLYQSTKEIQPVSLGVDAGSKHIGMAATTEKKVVYQEELSPRNDVVKLLSARRTLRRTRRNRKTRYRKPRFNNRVHSKHKGWLAPSVEVKIQEHITAIKRICQILPISEIHVEISEFDLQRLKAMEEGRTLPVGTDYQLGEQYDFYNTRQYVLHRDGYTCQCCGTHDNNIKLHVHHIESRQTGGNAPSNLITLCEHCHKALHKGKFELPKGKKRGKTYRDATFMGIMRKTLLERLKKEIDVPVAGTYGYITKYWRERAGLEKSHINDAICISKYPYAKPLDTYYLTKVVRNHNRQIHKSNFSKGGIRKRNQAPYLIKGFRLFDKVLYQGKEYFIFGRRATGYFDIRTLDGTKVNKGSISYKKLRIQDTAKAYLKEARAIPHMNKFTCVLA

SEQ ID NO: 13362 - protein, 456 aa, Halomonas sp.; identical to SEQ ID NO: 8582

SEQ ID NO: 13363 - protein, 440 aa, Moorena sp.
MPTTEMRARKLLKRGRAEIIKYRPFTIRMLDREDGAVQPIEYKCDTGYQTIGISICSAKREFFSEERTLLCGEKERHDDRRKYRAGRRSRKTRHRKPRFSNRRGMICEDGFAPSMRNRRDQHIRLFEIYRAVVPITDAVFEMSEFDTQVLAAVEAGQPLPQGKDYQHGHRYGYNTLRAAVFARDKHTCQVCGRSIAEGAVLRVHHLGFRSGDHTDRMGNLLTVCTNCHTPRHHKKGGKLWDLKPSIKPFTGATFMTSVRWDIIRRLKDAAPDVEFHFVYGAATKEARHRLHLRKTHANDAWAMGRFHPKHRTKTVYWQKLRRNNRILAKFYDAVYIDLRDKKRKKGAELPCGRTRRCESRHGTGNERKCRANKVKKGRVSLRRKRYPIRPGDTVWFGRERFEVRGVQHYGEYVALRGQKKSCPVSDVTKICHAGGWLKTR

SEQ ID NO: 13364 - protein, 419 aa, Moorena sp.
MQNYVFVIDTNFRPLNPMSPKKARRLLDKGKAAVFRMYPFTIILKTAIDNPLLLSCQIKIDPGSKFTGFSLVQNNQVIWAMELQHRGSLIKKKLESRRAVRSRRRGRTTRYRKPRCLNRRRSENWLPPSLEHRILTIQTWVERLIKFAPVSEIWIERVKFDTQKISNPEISGIEYQQGSLAGYEVREYLLEKWDRECTYCGKKDIPLQIEHIQPQSKGGSNRVSNLCLSCDKCNQKKGNKPIEDFLKNKPGLLQKIKSFAKKPLKDSAAVNATTDKLVKVMSRLLPVVTGTGAQTKYNRIRLGLPKQHWIDAACVGEVEFLELLTNQPLLVICKGQGGRQKAALNKYGYPIRHNPLKPIKGWCSGDIARNVLTGDFGRVNPRSSSNSFGFTVEGHKLVNIHCKNLMKVHRKDGYNYSFS

SEQ ID NO: 13365 - protein, 442 aa, Streptomyces sp.; identical to SEQ ID NO: 11564

SEQ ID NO: 13366 - protein, 442 aa, unidentified; identical to SEQ ID NO: 6360
  REGION 1..442: note = Human gut metagenome

SEQ ID NO: 13367 - protein, 414 aa, unidentified
  REGION 1..414: note = Human gut metagenome
VLNIDGQPFMPTERHGKVRRLLKSGKAKVVKRCPFTIQLLYETTNFKQPVTLGVDAGSKHIGLSATTEQKVLYEADVELRNDIVDLMSTRREARRTRRNRKTRYRKIRFDNRAKPKGWLAPSVNQKIGTHLTVIRKLHEILPISKIIVETASFDIQKIKNPDISGEDYQQGDQLGFWNVREYVLFRDNHTCQCCKGKSKDKILNVHHIESRKIGGNAPNNLITLCETCHSGYHDGTVRLPKTIKRGMKFNDAAFMGIMRWTLYDMLKILYPNVSMTFGYITKNTRILSNLPKEHYIDARCISGNPLAKPLGYYFYQKKVRCHNRQIHKFSISKGGNRKRNQAEYEVHGFRLFDKVEYQNSEYFIFGRRKTGYFDIRDLQGNKVNRGNVSYKKLNLMEKSKSYLTERRKSIPSLI

SEQ ID NO: 13368 - protein, 442 aa, unidentified
  REGION 1..442: note = Human gut metagenome
MSTSVFVLDKKHRPLMPCRPARARRLLRVGRARVVKRFPFVIRLVDRTVEQSEVQPVLIKLDPGSRETGAAVVRDDEKKRHHALAFFVIKHRGGAIRDALKARSAFRRRRRSQNLRCRSPRFLNRVKPKGWLPPSLRHRVETALSFVRRMCRYLPVSGIAAELVKFDSQKLQTPEVSGIEYQQGTLFEYEVREYLLEKFGRKCVYCGAEGVPLNIDHVVPRAKGGSNRVSNLVLACMSCNQKKGARSLEDFLKGKPKVLARVRRELKTPLRDAAAVNATRWVLFNELKATGLPVETGSGALTKLNRHAFGVEKEHWLDALCVGRLNGVVTRKGLNVLEIRCMGRGSRQRTRLTKYGFPRGYLMRQKCVHGFATGDMVEANVPKGKKAGLWRGRVAVRVSGSFNIQTPKGVIQGVGWKHCRLISHNDGYGYAWLGHAPHSSPA

SEQ ID NO: 13369 - protein, 437 aa, unidentified
  REGION 1..437: note = Human oral metagenome
MNSHGHWQEGQFSERKAAEMLNNQKEYAFVLDAEGKKLDPTIVQNAWRLVRQKKATLIAKRPMTIQLKKVIDNPNDDEIRIGIDDGAKHVGLALVQKCKTKNKVIFIATMEQRNDVHKLMEQRKNYRRYRRYWKRYRKARFSNRVSVRRKGRIAPTILQKRQAVVHIFDRLNKYIRIDSIYLEDVAIDVRVLTDEKRLYSWQYQQSNRLDENLRKATILRDNCKCQLCGKRNCRLEVHHITPRRMNGANTIGNLITLCSECHSNVTGREIEFAEQLYSKIGKKKNNVSLQYASHVMVGKTWLREELSKRVSVLLTTGGDTANKRIDWNLEKSHEIDAICITNLEPESVGVKSWNIKPLRHQRKTMKVKEILGFRHRDIVCYTFKNGEYHEGYVTALYPSEGKQKEGLNFLSPTKHCKRVNPKKCQRLDRPDKFLWLV

SEQ ID NO: 13370 - protein, 512 aa, unidentified; identical to SEQ ID NO: 6763
  REGION 1..512: note = Human gut metagenome

SEQ ID NO: 13371 - protein, 433 aa, unidentified
  REGION 1..433: note = Cyanobacteria bacterium UBA12227
  REGION 343..413: note = misc_feature - Xaa can be any naturally occurring amino acid
MSKPNYVFVVDTNRKPLTPCKPSIARKLLTVGKAKVFRLYPFTIILNKEVVDTPEPLTLKIDPGSKVTGLAILLDSNLIWVESKSNRGQSIKASLESRRALRRGRRNRHTRYRQARFLNRTRSKGWLAPSLQHRVKTTITWVNRLLRCSPIKVVFQELVRFDLQQIENPEISGVEYQQGELAGYEVREYLLNKWDRKCAYCGAKNVPLQIEHIYPKAKGGSNRISNLCLACEPCNIRKGTKDIKVFLAKKPDVLKRVLAQAKHPLKDAAAVNSTRWTLFNQLKETGREISTGSGGLTKFNRTRLELPKTHFFDAACVGDTPELLVLANQPLNIKATGHGSRQXXXXXXXXXXXXXXXXXXXXXXXXXXXXXXXXXXXXXXXXXXXXXXXXXXXXXXXXXXXXXXXXXXXXXXXSWFKANVSNRQVWFSLSISA

SEQ ID NO: 13372 - protein, 459 aa, Petrotoga sp.; identical to SEQ ID NO: 6495

SEQ ID NO: 13373 - protein, 416 aa, unidentified
  REGION 1..416: note = Human gut metagenome
MVYVLDKNGQPLMPTDRHRKVRLMLQSGQAKVIKRCPFTIQLNYDSGHQTQEISLGIDAGSKHIGVSATTKIKVLYEADVELRNDIVDLLSSRRELRRGRRNRKTRYRQAKFNNRRRGNGWLAPSIRQKIGTHLTVVENICKILPISRIMVETASFDIQKIKNPDIQGAEYQQGDQLEFWNVREYVLFRDGHICQCCKGKSKDKILNVHHIESRKTGGNAPNNLITLCETCHTGYHKGTVQLPKAIKRGMRFKDAAFMGIMRWAFYEALKQQYEPVGTPVHNTYGYITKHTRIAYNLPKEHYVDARCISGNPEASSNGEYYYQKKVRCHNRQIHKLTVLKGGIRKQNQATYLVKGYRLFDKVSYQGKGYFVFGRRQSGFFDIRTLSGEKVNKGSLNCKKLKFIATRTYYLTERRAV

SEQ ID NO: 13374 - protein, 442 aa, unidentified; identical to SEQ ID NO: 4418
  REGION 1..442: note = Human gut metagenome

SEQ ID NO: 13375 - protein, 453 aa, Moorena sp.
MSVAVLSSTGRKLMPTSNYRARKLLKSHRAAIECYRPIFTIRLTDRKEGNTQPIEYACDTGYQHVGVSIKSEKHEFVHAQYDMLSDETERHNDCRKYRRTRRNRLRYRKPRFDNRSKKNKEMPPSLRHRKENQISLFESFCKVMPITSATFEMGKFDTQLLQAIANGKPLPEGKDYQQGSKYLYQTEREAVFGRDHYTCQVCGKSVKDGVILNTHHIGYWKGYRSNRISNLLTVCEHCHTAKNHRPGGKLWGLEPKSTNLAPAAYMSTVRWAMYRDLVLMHPEIDIHIQYGAKTSVTRKSLHLAKTHANDAYCIGSLRPKHRAAELVYQKKRRNNRILSRFYDAKYIDIRDGKKKSGSALSCGRTNCRESRRSDKNQRIYRGKKCSSGRTSIRKRRYAYQPGDAILFRSQRFAVNGAHCNGTRVILNTGKSVKTADLTCIKKEGGWRFLPAQA

SEQ ID NO: 13376 - protein, 420 aa, unidentified; identical to SEQ ID NO: 8472
  REGION 1..420: note = Human gut metagenome

SEQ ID NO: 13377 - protein, 372 aa, unidentified
  REGION 1..372: note = Human gut metagenome
MVYVLSQNGQPLMPTENHAKVRVFLKQGKAKVVQRCPFTIQLLYESTTHTQKINLGIDAGSKTIGISATTDSKVLYEAEVVLRNDIVELLSGRRALRRSRRNRKTRYRKPRFDNRKKPDGWLAPSIRQKIETHVTVVENITKILPMTKIIVETASFDIQKIKNPEIEGAEYQHGEQLDFWNVREYVLFRDGHTCQCCKGKSKDNILNVHHIESRKTGGNAPNNLITLCETCHQAYHKGVITLPKEIHRGMRFRDAAFMGVMRWAFYDRLKELYNLLGVEVINTYGYITKNTRITYDLPKEHYVDARCISGNPAAKPMDYYYLQKKVRCHNRQIHKCKINKGGTRKRNQAAYEVKGFRLYDQVLWKGQKCFIF

SEQ ID NO: 13378 - protein, 512 aa, unidentified
  REGION 1..512: note = Human gut metagenome
MSTVYVLDKDGKPLMPTTRCGHVRHLLKEQKARVVTSKPFTIQLLYETDDVVQPLYLGIDPGRTNIGVAVVKTDGTAVFTAHLETRNKEIPKLMQGRKKARRTRRTNGRRCRRQRRAKANGTISKKCVKQTTAQNGSVSKRAKEIGVIKRHLPGCEKDVLCVGIKNKEAKFSNRTRQEGWLTPTANQLLQTHINLIKKIRKFLPISNVVLEINKFAFMRLDNPNIQKWQYRQGPLYQKASLEEAVSEMQEHHCLFCKKPIAHYHHVVPQSENGSNTIGNIVGLCTKHHDLVHKDTTWQKKLAKKKTGLNKKYGALSVLNQIIPALTKELSSLFPKHFFATNGKSTYDYRAAHSVSKDHWLDAYCIACSVLANDVCDSNINSRVPYELKQFRRHDRRALNNENMSRVYTLNGKVVATNRHKATKQTTDSLEEFRQNHSDDVCKLKVKEHHPTYRNMNRNYPGSVFLIGKQVHVMQGIAGSKNGEATTYKDTNANSIAAGKCKFVAKNSGILFV

SEQ ID NO: 13379 - protein, 398 aa, unidentified
  REGION 1..398: note = Human gut metagenome
VKKRTPFTIQLVYGSSGYTQEVILGVDAGSKTIGVSASTKKEELFAANVIPRNDVVDLLSTRRESRRARRNRKTRYRKSRFNNRVRSKHKGWLAPSVEVKIQEHITSIKMVCRILPVSKVVVETAEFDLQLLKAIEEGKPVPQGEDYQQGEMYGHYNVRQYVLWRDNYTCQCCGAHLTKKKEVRLHVHHLESRKVGGNAPGNLVTLCDSCHEKLHKGLITEKDLKKRKHRSTRDATFMGIMRKTLMQRLCSELPIPVAETRGYITKATREKLLVLPKSHTNDALAIAQGKHGFNVGYLPGIEQIDKIYTIRPVRHHNRQLHKAIILKGGIRKSNQAEKYVFGYRLFDKVQFNGQDCFIWGRRTSGYFVVKTIDGKVIHNSASFKKLRLVERASNYLIA

SEQ ID NO: 13380 - protein, 419 aa, unidentified; identical to SEQ ID NO: 8591
  REGION 1..419: note = Human gut metagenome

SEQ ID NO: 13381 - protein, 512 aa, unidentified; identical to SEQ ID NO: 4329
  REGION 1..512: note = Human gut metagenome

SEQ ID NO: 13382 - protein, 412 aa, unidentified; identical to SEQ ID NO: 4932
  REGION 1..412: note = Human gut metagenome

SEQ ID NO: 13383 - protein, 451 aa, Geobacillus sp.; identical to SEQ ID NO: 4536

SEQ ID NO: 13384 - protein, 450 aa, unidentified
  REGION 1..450: note = Wastewater metagenome
VAVFVLERTGKALMPCSEKRARLLLARGRACVHRLVPFVIRLTDRQLDTCTLQPLRIKLDPGSKTTGLALVRDTEHLNTDTGEIQRGVAVLSLIELVHRGRQISEALTARRQMRRRRRGGLRYRAPRFLNRGNKARGWLAPSLQHRINTTMAWVARIRRWSPVTALSAELVRFDMQRLQNPEISGVEYQQGTLAGYEVREYLLAKWSRKCAYCGVENVPLQIDHVHPKAKGGTNRVSNLTLACGPCNARKSAQSVDAFLAKDPKRLTALLAQAKRPLKDAAAVNATRWALVGALKATGLPVETASGGCTKFNRSRLAIPKTHALDAVCVGAVSVVTNWQKPSLTIKCTGRGSYQRTRLDKYGFPRGYLMREKSVKGFKTGDLVRAIVPTGKKAGRHTGRVAIRKSGSFNIQTLAGVVQGIGYRHCRLLQRADGYGYFFNKAACDTAQKRE

SEQ ID NO: 13385 - protein, 418 aa, unidentified; identical to SEQ ID NO: 2710
  REGION 1..418: note = Human gut metagenome

SEQ ID NO: 13386 - protein, 443 aa, unidentified
  REGION 1..443: note = Human gut metagenome
LTKDENRPSGRTTGLRAEQAEPAGIRKGDTLKVFVLNMRSKPLMPCSPAKARHMLKAGKAVVVRRTPFTIKLTIATGETKQDVTLGVDAGARHVGISATTEKEEVFASEVALRQDITGLLADRLAFRRARRNRKTRYRAPRFNNRVRSKHKGWLAPSVENRIQAHMSRIDAVCRLLPVTKIVIETASFDVQKIKNPTIEGTDYQQGDQLGFWNVREYVLFRDGHVCQHCHGRSRDKILNVHHLESRKTGGDAPNNLITLCETCHKAYHAGKIKLKVKRGQSFRAEAFMGIMRWTLLDRVRKTHPKLPVENTYGYLTKHKRIALGLPKTHCADAFCIAGNLKALRRGDFLFQQQTRKHNRQIHKCSILKGGVRKLNQAPFLVKGFRLFDKVRIGGQIGFVFGRRVRGTFNIRRLDKTVIGTDINCKKLSLLETRKTFLTELRKE

SEQ ID NO: 13387 - protein, 512 aa, unidentified; identical to SEQ ID NO: 9741
  REGION 1..512: note = Human gut metagenome

SEQ ID NO: 13388 - protein, 423 aa, unidentified; identical to SEQ ID NO: 2741
  REGION 1..423: note = gut metagenome

SEQ ID NO: 13389 - protein, 431 aa, unidentified
  REGION 1..431: note = Human gut metagenome
MPNKVYVINKHGRPLMPCSPAKARHLLDAGKAKVKKRTPFTIQLVYGSSGYTQEVILGVDDGSKTIGISASTKKEEVFAADVTPRNDVVNLLSARREFRRARRNRKTRYRKSRFDNRVRSKRKGWLAPSVEVKIQEHITSIKMVCRILPVSKVVIETAEFDLQLLKAIEEGKPVPQGEDYQQGEMYGHYNVRQYVLWRDNYTCQCCGAHATKKKEVRLHVHHLESRKVGGDAPDNQVTLCESCHEKLHKGLITEKDFKKRKRRSTRDATFMGIMRKTLMQRLCSELPIPVVETRGYITKATREKLLVLPKSHTNDALAIAQGKQGFNVGYLPEILQIDKIYTIRPVRHHNRQLHKAAILKGGIRKSNQAGKYVFGYRLFDKVQFNGQDCFVWRRRTTGIFTIKTINGKMIKDGISFKKLKLVEKSTGYLIA

SEQ ID NO: 13390 - protein, 419 aa, Anoxybacillus sp.; identical to SEQ ID NO: 5328

SEQ ID NO: 13391 - protein, 406 aa, unidentified; identical to SEQ ID NO: 3415
  REGION 1..406: note = Human gut metagenome

SEQ ID NO: 13392 - protein, 465 aa, unidentified
  REGION 1..465: note = Human gut metagenome
MSTCACVLSKNGERLMPTIRLGKVRHLLKDGKAKIIKHHPFTIQLLYDSETNIQPIEICEDVGYNYIGISVKSQSHEYVSAQYDTLQDEKSCHDACRRMRRTRRNRLRYRQKRFDNRKRDKGWLAPSLKHKKELNVNVIKMYCEVVPITHATVEVGSFDTMLVKAIEEGKATPEGADYQKGPRYNLATLREAVFYRDNYTCQVCGREASEGAILHVHHMFYWKGRHDNSLSELITVCEKCHTPANHQKGGKLYGFGEDIKFANLSGAAFMNTVRWQIVNELYAAFGKPFVTFTYGAMTKEKRIALHLEKSHNNDAYAMGSFHPVDRCAFEHYEKMKRNNRILEKFYDSRYINIRTGEVASGKELFNGRINRNHKKDSENLHKYRGKRIRKGYRALRRKKVALNPGDLVSLNGEILTVHGTHTKKNGSVNVKFKTPSKSGKKSVSLKKLKIIKTISPMRSAWDKVS

SEQ ID NO: 13393 - protein, 457 aa, Lactobacillus sp.; identical to SEQ ID NO: 6035

SEQ ID NO: 13394 - protein, 431 aa, unidentified; identical to SEQ ID NO: 2977
  REGION 1..431: note = Human gut metagenome

SEQ ID NO: 13395 - protein, 427 aa, Enterococcus sp.; identical to SEQ ID NO: 2410

SEQ ID NO: 13396 - protein, 456 aa, unidentified
  REGION 1..456: note = Human gut metagenome
MSTCVCVLSNSGERLMPTFRLGKVRRLLKDGKAKIVKHHPFTIQLLYDSKTNTQPIEICEDVGYNYIGISVKSKSHEYVSAQYDTLQDEKEHHDDCRKYRRTRRNRLRYRKPRFDNRKRSEGWLAPSLEHKKQLNIRLVERYVSVIPITHATVEVGSFDTMLLQAIQKGESKPEGADYQKGPRYNLATLREAVFYRDNYTCQVCGRKIADGAILHMHHMFYWKGRHSNSLDELLTVCEKCHTPANHQKSGKLYGFGEDVKFANLSGAAFMNTVRWQIVNELYAAFGKPFVTFTYGAMTKEKRIALHLEKSHNNDAYAMGDYHPAHRCEFGHYQKRCRNNRVLEKFYDATYIDTRTGNKAKGKELFNGRISRNHKKDSEDLHKYRSKKVSKGRRSIRRQRYAIQPYDTVRLESKTYITSGCHNKGTRLLIPANGKSKSVAISKVQVVCHAGAWIQII

SEQ ID NO: 13397 - protein, 442 aa, unidentified; identical to SEQ ID NO: 2903
  REGION 1..442: note = Human gut metagenome

SEQ ID NO: 13398 - protein, 438 aa, Moorena sp.; identical to SEQ ID NO: 5230

SEQ ID NO: 13399 - protein, 398 aa, unidentified
  REGION 1..398: note = Human gut metagenome
RLLLKQKKACVIKRTPFTVKLLYGSAGYKQPVTLGVDAGSKHIGISATTEKHELYREEATPRNDVVDLLSARRAFRRSRRNRKTRYRAPRFNNRVHSKHKGWLAPSVEVKIQEHITLIKHACRILPVTLVRVETAEFDTQRLKAMLEGKPLPVGTDYQLGEMYDEYNVRQYVLKRDNYTCQCCGAHSTKTKGVKLHVHHIETRRTGGNAPNNLITLCKACHKALHAEKVTLDGKKRGKPLKDAAFMGIMRKTLMERLRKELKIPVQGTYGYITKYLREKNGIPKSHTNDARCISKNPLAIPCDTCYYTKAVRHHNRQLHKATILKGGIRKANQAPYIVKGYRLWDKVAYNGTECFITGRRTSGYFALKELDGTVVSNSISYKKLRLLEAATNYIIERK

SEQ ID NO: 13400 - protein, 426 aa, unidentified; identical to SEQ ID NO: 6377
  REGION 1..426: note = Human gut metagenome

SEQ ID NO: 13401 - protein, 413 aa, unidentified; identical to SEQ ID NO: 2636
  REGION 1..413: note = Human gut metagenome

SEQ ID NO: 13402 - protein, 462 aa, unidentified; identical to SEQ ID NO: 2823
  REGION 1..462: note = Human gut metagenome

SEQ ID NO: 13403 - protein, 452 aa, unidentified
  REGION 1..452: note = Sediment metagenome
MSMQTLQREFKNVPTDASLVRSSTNLSLNRLETVSERDIVLSCNNPEVNLRKQVSGLTVIVPVLSLEGSPLMSCTPAKARHLLEKRRAYVVKLNPFIIRLNFKCENKIQEISFGMDAGYKNIGYSVITDTKEILSGEIALDNKTKSRMNERKMYRRNRRYRLRYRKPRFNNRIKPDGWLPPSIKRKFDAHINFINGLKKILPIKKVTVEIGNFDIQKINNPDISGIQYQQGDLYGYYNLKFYLLEREKGKCQLCGKKFTKEDRPHMHHIKQRSEGGTSRAEGIALIHKSCHKNLHDKKLFHKLKPARVYKAETFMSIVGGMFKKFLDCDIAYGYKTCAKRKELGLEKSHVNDAFIIAGGTTQSRCLPSMIEQKRINNRTLQTNRKGFSKSIRKQRHKIQNRDFIWIDNKKYLSGGVACRGAQIYYFDGDEKKLISSKRVEKVYSTDSLVWLK

SEQ ID NO: 13404 - protein, 492 aa, unidentified; identical to SEQ ID NO: 4486
  REGION 1..492: note = Human gut metagenome

SEQ ID NO: 13405 - protein, 420 aa, unidentified; identical to SEQ ID NO: 5953
  REGION 1..420: note = Human gut metagenome

SEQ ID NO: 13406 - protein, 436 aa, unidentified
  REGION 1..436: note = Human oral metagenome
MTRTLTKQTTQACVLDQQGKPLMPTTRLGKVYRLLKTQKAHIVSYEPFTIQLDYEPDTHIIQPMTLGVDSGAIHSGYSVANEHREYYNAEVIARDDISKRLSDRRMYRQNRRSRKTRYRKPRFNNRKNKKKGWLPPSLEQKVDVQLNEIDHLHRYFPIETIIVEVAEFDIQKIKNPDISSIEYQQGTLQGYNIRNYLLEKHKRKCFYCGKSVSKFEVEHMIPKTRGGSNRIDNLTLSCHNCNQKKDTLTAEEFIKQTLPAKKAAAKLKQLPNEKRLFEYMAHMNATRWALYNTIDKKYPNVKITYGYITKYKRIQSSLSKAHHIDAKCIADFPTVPSMEQTVVKVKMRRHNRQLHRAIFSKGHVRKAACLPTATFGFQLYDLVLFDNHRYYIKGRRSSGIFALASVEGLKDTNRSYKKLTQLAHTNAYLINRYVNI

SEQ ID NO: 13407 - protein, 393 aa, Anoxybacillus sp.
  SITE 393: note = misc_feature - Xaa can be any naturally occurring amino acid
LFVYVINKHGNPLMPCSPRKARILLKNKKAKVVKRTPFTIQLLYGSSGYKQPISLGVDTGTKHVGLSATTKNQVLLEAEVQLRTDIQELLATRRQFRRSRRNRNTRYRKARFLNRKKPNGWLAPSTQHKVDSHIKLVKWVHSLLPITHITVEVAQFDTQKIKNPDIQGAAYQQGEQLGFWNVREYVLYRDGHTCQWCKGKSKDPVLNVHHIESRKTGGDSPSNLMTLCKTCHDMIHREGLEHEIQRRFSSLKDASHMTVMRWFIWNGLKKVYPHANITYGYITKCIRIANGLPKSHMVDARCISGNPLAKPSGTVYLLKFVRKNNRQLHKATILKGGKRKSNKAPRFVKGFQLFDKVVYEGKECFIFGRRSSGYFDLRLLDGTKVHASASWKX

SEQ ID NO: 13408 - protein, 433 aa, unidentified
  REGION 1..433: note = Human gut metagenome
LGKDFYPLRRREQFLFSCQFIERSMASMQYVYVLNKHCEPLMPCSPGKARLLLKQQKACVVKRTPFTIKLLYGSAGYKQPVALGIDAGSKHVGLSASTEKRELYREEFTPRNDVVELLSTRRQNRRSRRNRKTRYRAPRFDNRVHSKHKGWLAPSVEVKIQEHITVIKRICRILPITLVRVETAEFDTQRLKAMLKGKPLPVGTDYQLGEMYDEYNVRQYVLKRDNYTCQCCGAHPTEKKPIRLHVHHIESRHVGGNAPNNLITLCVACHKALHEGKITLDKGKKRGKPLRDAAFMGIMRNTLLARLKDELNIPVKQTYGYITKLLREKNKIPKSHVNDARCIAKAPNAKPCDTMLYTRALRHHNRQIHKAKILKGGIRKKNQAPYLVKGFRLWDKVRYNGEECFITGRRSSGYFALKKSMELLSRIAQATKN

SEQ ID NO: 13409 - protein, 416 aa, unidentified; identical to SEQ ID NO: 3007
  REGION 1..416: note = Human gut metagenome

SEQ ID NO: 13410 - protein, 493 aa, unidentified
  REGION 1..493: note = Human gut metagenome
MAAVYVISASGKPLMPTTRCGHIRGLLNAGKARVVEREPFTIQLKYETPDVTQPLYLGIDPGRTNVGSAVVREDGECVFTAQLTTRNKDVPKLMKARKQFRVAHRRLKRRCKRQGRAKAAETLSQKGEFQRLLPGYEEPILCKGIRNKEARFNNRQRPAGWLTPTANHLLLTHLNMVKKLQKLLPITDVVLEVNRFAFMAMENPSIRRWQYQQGPLYGKGSVEDAVYAQQDGHCLFCGKPIAHYHHVVPQHKNGSETLENRVGLCNEHHDLVHKDRAWDAKMKETKAGLNKKYHALSVLNQIIPALTEQLTAMFPQHAFVTTGKDTADFREDYGIAKEHHLDAYCIACSVLAEPTKVAAPTGKPHRLMQFRRHDRQVCHKENIKRVYLSEGKAVATNRHKAIEQKDDSLEEFRKTHTQQEVSALTVKDHQPVYKDMRRFMPGGVFLFNGKVHTLQRSHGRYKGMPFYYIDTDGSKNHAKGCIFLQQNCGLRWV

SEQ ID NO: 13411 - protein, 449 aa, Allochromatium sp.
MAVFVLDRQKTPLMPCTEKRARLLLERGRAVVVRLAPFTIRLKDRVGGALQPLRLKLDPGSRVTGLAIVRESEIVDPDTGAVERLEHGLWFGELAHRGQAIREALEQRRHYRRARRARKTHYRAARFLNRTRRAGWLPPSLQHRLDTTLNWVERLRRIAPITMLSQELVRFDTQALQNPEISRVEYQQGELAGYEVREYLLEKWHRTCAYCGATNVPLEIEHIHPKSRGGSDRVSNLTLACRPCNQRKGNRPIEDFLQRQPALLHQIQAQAKAPLKDAAAVNATRWALFAALTATGLPVETGSGGRTKFNRTRLDLPKTHALDAACVGAVDQIRGWNRPVLAIRATGRGAYSRTRTFKNGFPRGYLMREKRVHGFQTGDWVRAEVPTGKKAGVHVGRVAVRQTGSFNIQAQGGTVQGISYRHCRVLQRADGYGYAFQPKPDTEEARRAA

SEQ ID NO: 13412 - protein, 440 aa, Moorena sp.
MSTGLRAEQAEPAGIRKGETLKVFVLNMRGKPLMPCSPAKARHMLKAGKAVVARRTPFTIKLTIATGETKQDVTLGVDAGYKHVGISATTEKEEVFASEVELRQDITGLLADRLAFRRARRNRKTRYREPRFNNRVRSKNKGWLAPSVENRIQAHISRIEAVCRVLPITKIVIETASFDIQKIKNPEVEGTGYQQGDQLGFWNVREYVLFRDGHVCWHCRGRSKDLILNVHHLESRKTGGDAPNNLITLCETCHKAYHAGKIKLKARRGTSFRAEAFMGIMRWTLLDRVRRAHPELPVENTYGYLTKHTRIVLGLSKTHCADAFCIAGNLNALRRGYFLYQRQTRKHNRQIHKCSILKGGVRKLNQAPFLVKGFRLFDKVKCKGRIGIIFGRRSSGSFDVRTLDGARLSAGISSKKLMLLEKRTTFLTQLRKEDGASSPS

SEQ ID NO: 13413 - protein, 278 aa, unidentified
  REGION 1..278: note = Human gut metagenome
LTHQFKKGVPVMVYVLDKNGQPLMPTDRHRKVRLMLQSGQAKVIKRCPFTIQLNYDSGHQTQEISLGIDAGSKHIGVSATTKIKVLYEADVELRNDIVNLLSSRRELRRGRRNRKTRYRQAKFNNRRRGNGWLAPSIRQKIGTHLTVVKNICKMLPISRIMVETASFDIQKIKNPDIQGAEYQQGDQLEFWNVREYVLFRDGHTCQCCKGKSKDKILNVHHIGSRKTGGNAPNNLITLCETCHTGYHKGTVQLPKAIKRGMRFKDAAFMGIMRWAFYE

SEQ ID NO: 13414 - protein, 426 aa, Moorena sp.
MSLVFVLSSDGQPLDPCHPARARRLLDHGKAAVWRRYPFTIRLNARTAAASVTHPHRLKLDPGSKTTGIAVVAEASGRVVWAGELTHRGQAIRDALLSRRVSRRSRRQRKTRYRQPRFRNRRRPEGWLAPSLQHRVDTTRTWVNRLRRFVPVTAISAELVRFDTQLLENAEISGVAYQQGTLAGYEVREYILEKWGRRCAYCGAKDTPLQIEHIVPRARGGSDRISNLTLACAQCNQQKGMQTAEEFGHSDIQAQARRPLKDAAAVNTTRWALYQQLIATGMPVEVGTGGMTKFNRMRLGLEKSHWHDAACVGASTPDALDVRGVRPLLLRAMGHGTRQMCRMNAFGFPRTGPKGARVVKGFKTGDMVRAIVTTGTKQGVYVGRVAVRTVGSFNITTTTGTTQGLHHRFFRAIQRADGYNYAYEVA

SEQ ID NO: 13415 - protein, 411 aa, unidentified; identical to SEQ ID NO: 8372
  REGION 1..411: note = Human gut metagenome

SEQ ID NO: 13416 - protein, 506 aa, unidentified
  REGION 1..506: note = Human gut metagenome
MANLKLIDELLEKTEYIYVLGIDGKPQMPTNRKVRVRKLFKLGMAKIVDTVPFTMRLLYKNEPVLQPITIAEDPGRTNIGTAVLTQLGDLVFSAVVETRNKSIKKLMADRKAHRQASRRGERKARQRLVKRHGSMIKAGMIMRKLPQYAADKFVTCKIIKNTEARFCNRKRMPDWLTPTVNHLVQTHINLIKKIEKYLPITDVAIEVNRFAFMQMENPNISGVNFQNGPLKGFDDVKAAIREQQHGKCLMCKNDIEHFHHIIPRSKGGSDTIQNQAGLCKKCHTKIHADVEFQAKLKDKKNGLIKKIWRTQRFESSCSVYLQRAHQDLRCRACTFLHWKRYIINQMHEVDAYCICLAAIGADKAKRPNFNNVFKIKQFRRQDRSIVNYQRERTYYLEGKKIATNRKPRFEQKGDALSGWYSEQVKLKDKKYADKLTGRITVKKSTRGYNSKNRVMPGTVFYYNGKRLVLTGQLTGGKYYRAYGDTKINYPVNKCQIYKHNEGLVFV

SEQ ID NO: 13417 - protein, 453 aa, unidentified; identical to SEQ ID NO: 9775
  REGION 1..453: note = Human gut metagenome

SEQ ID NO: 13418 - protein, 304 aa, unidentified
  REGION 1..304: note = Human gut metagenome
VLEINKFAFMRLDNPNVQKWQYQQGPLYQKASLEEAVSEMQEHHCLFCKNTIDHYHHVVPQHKNGSNTIGNIVGLCAKHHDLVHKDTSWQEKLAKKKTGLNKRYGALSVLNQIIPALTKELSSLFPKHFFATNGKSTYDYRAAHGVSKDHWLDAYCIAGSVLPNDACDNNINNHVPYKLKQFRRHDRRALHKENMGRVYTLNGKSVATNRHKAIKQTTDSLEEFRQRQPNDVCKLKVKEHHPEYRNPKRNFPGCVFLVGKHTHVMQGTSGSHNGKADGYYDTNGNSYSSGKCKFVAKNKGIVFA

SEQ ID NO: 13419 - protein, 414 aa, unidentified
  REGION 1..414: note = Human gut metagenome
MPCSPAKARLLLKEKKAIVVRRTPFTIQLTIATGESKQPVSLGVDAGYKHVGLSASTEKAELYASEVELRQDITDLLSARRALRQSRRNRKTRYRAPRFDNRIRTKRKGWLAPSVENRINAHLSRIETVIRLLPVTKISVETTSFDMQLLKNSDIAGKEYQESEQLGFWNVREYVLFRDGHVCQHCHGRSKDPVLNVHHLESRRTGGDSPGNLITLCETCHKELHRGEITLKAKRGQSFRAETFMGIMRWEVLDRLKASHPKLEVQNTYGYRTKHARIVNGIAKSHCADAFCIAGNLGAERLGEFFFQKQTRRNNRQIHKLSVLKHGLRKRNQVPFEVNGFRLFDKVACKGEEGFIFGRRSSGFFDVRKLDGTRISAGISCKKLHLLEKRRTYLTEIRKEEALPPLPEGRGLRA

SEQ ID NO: 13420 - protein, 424 aa, Moorena sp.
MSNQVLVLDTNRKPLTPCTPGTARSLLKAGKAAVFRRFPFSIILKKEVKDVPQPLTLKLDPGSKTTGIALLKGSQLLWVAELIHRGAAIKDAILSRRQLRRGRRNRKTRYREARFLNRTRPQCWLAPSLQHRVDTTLTWVKRLTRYTPVAEVRQELVKFDLQLMQNTEISGIEYQQGELQGYEVREYLLEKFNRQCVYCGAKDMPLEVEHIKPRSRGGSDRVSNLVLACHSCNQSKGNQDIKDFLSNKPDVLKRVISQAKAPLKDATAVNVTRWALFNALKELGLPVVTSSGGKTKFNRSRLGLPKTHFFDAACVGETLELQVCTREPLLIKTTGHGTRQMCGTDKFGFPTRHRSKAIIHKGFKTGDMIKAVVTTGKKAGNYVGRVLCRKSGSFDIATKSGRVTGISYKCCQPIQRKDGYSYAI

SEQ ID NO: 13421 - protein, 451 aa, unidentified; identical to SEQ ID NO: 10609
  REGION 1..451: note = Human gut metagenome

SEQ ID NO: 13422 - protein, 422 aa, unidentified
  REGION 1..422: note = Human gut metagenome
YWHEEKFSERKVSEMTNYAFVLDANNKQLTPTKEQKAWFLIRKKRATLVSKYPMVIQLKKKIPDKEICKDEVRCGIDDGGLHVGVALVQKCQTRNKVVFKGVIEQRNDVKHLIDVRCGYRRYHRYHKRYRSARFNNRNSSKREERIAPSILQKRQATIRVINQLNKWINITNYWLEDVAIDIRALTDGYKPYRWQYQKSNRLDENIRKAVILRDGYKCMECGKSNCRLEVHHIKPRRLKGSSTLDNLITLCIKCHQKTESVEELYMDRYFALLNSSDNKNLNYAQHVMIGKKWLREQLSNLGMLYLTNGGDTANKRIDWDIAKSHSNDAICITDLRPDTCEIKEWAIKPMRRQSKAKTDNVLGIKHRDLVEYTFRNGETHRGYVTALYPEQNAINFQSPTKHCKKVNAKNVKYFGNILKFTG

SEQ ID NO: 13423 - protein, 545 aa, unidentified
  REGION 1..545: note = Human gut metagenome
LSRTIPLTANTQPRETQPPVSAGETYSKRRIAYMPTVYVLNKDGKPLMPTTRCMHVRHLLKNGKARVVKSKPFTIQLLYETDDVVQPLYLGIDPGRTNIGVAVVKADGAAVFTAHLETRNKEVPKLMKKRKESRCARRTNGRRCRRQRRAKTNGTISKKCVKQTTAQNGSVSKRAKEIGVIKRHLPGCEKDVLCIGIKNKEAKFTNRARPEGWLTPTANQLLQTHINLVKKIQKFLTISDVVLEVNKFAFMQLDNPNIQKWQYQQGPLYQKGSLENAVSEMQEHHCLFCEKPIEHYHHVVPKSENGSNTIANIVGLCTEHHNLVHKDATWQKKLAKEKVGLVKKYSALSVLNQIIPALTKEMNSLFPKHFFVTNGKSTYDYRTAHGVSKDHWLDAYCIACSVLPNDVCDSNINSHVPYELKQFRRHDRRVLHKANMSRVYTLNGKTVATNRHKAIKQTTDSLEEFRQSHPGDVCKLKVKEHHPAYRNLNRNYPGSVFLVDGQVHVMQGVSGSHNGKADGYYNTNGNAYPYYKCKFVVKNEGIVFA

SEQ ID NO: 13424 - protein, 539 aa, Nocardiopsis sp.; identical to SEQ ID NO: 8959

SEQ ID NO: 13425 - protein, 416 aa, unidentified
  REGION 1..416: note = Human gut metagenome
MVYVLGQDGHPLMPTCRHGKVRRMLKSGMAKVVKRCPFTIQLQYESTIHTQEINLGIDAGSKTIGISATTDSKVLYEAEVVLRNDIVELLSGRRALRRSRRNRKTRHRKPRFDNRKKPDGWLAPSIRQKIETHVTVVENITKILPMTKIIVETASFDIQKIKNPEIEGAEYQHGEQLDFWNVREYVLFRDGHTCQCCKGKSKDNILNVHHIESRKTGGNAPNNLITLCETCHKAYHKGVITLPKEIHRGMRFRDAAFMGIMRWAFYDRLKELYNPLGAEVINTYGYITKNTRITYDLPKEHYVDARCISGNPAAKHLGHYYFQKKVRCHNRQIHKNTILKGGIRKRNQASYEVKGFRLYDQVLWKGQKCFIFGRRSTGRMDLRLLDGTHINASVGHKNLKLLSMRKNYLIEQRKAG

SEQ ID NO: 13426 - protein, 512 aa, unidentified
  REGION 1..512: note = Human gut metagenome
MSTVYVLNKDGKPLMPTTRCGHVRRLLKEQKAQVVTSKPFTIQLLYETDDVVQPLYLGIDPGRTNIGVAVVKIDGTAVFTAHLETRNKEIPKLMQGRKKARRARRTNGRRCRRQRRAKANGTISKKCVKQTTAQNGSVSKRAKKIGVIKRHLPGCEKEVLCIGIKNKEAKFSNRARPEGWLTPTANQLLQTHINLVKKIQKFLPISDVVLEINKFAFMRLDNPNVQKWQYQQGPLYQKASLEEAVSEMQEHHCLFCKKPIAHYHHVVPQSENGSNTIGNIVGLCTKHHDLVHKDTTWQKKLTKKKTGLNKKYGALSVLNQIIPALMKELSSLFPKRFFATNGKSTYDYRAAHGVSKDHWLDAYCIACSVLANDVCDSNINSHVPYELKQFRRHDRRALHKENMSRVYTLNGKSVATNRHKAIKQTTDSLEEFRQRQPNDVCKLKVKEHHPEYRNPKRNFPGCVFLVGKHTHVMQGTSGSHNGKADGYYDTNGNSYSSGKCKFVAKNKGIVFA

SEQ ID NO: 13427 - protein, 413 aa, unidentified; identical to SEQ ID NO: 2636
  REGION 1..413: note = Human gut metagenome

SEQ ID NO: 13428 - protein, 406 aa, unidentified; identical to SEQ ID NO: 2752
  REGION 1..406: note = Human gut metagenome

SEQ ID NO: 13429 - protein, 431 aa, unidentified
  REGION 1..431: note = metagenome
MPNKVYVINKHGRPLMPCSPAKARHLLDAGKAKVKKRTPFTIQLVYGSSGYTQEVILGVDAGSKTIGMSASTTKEELLSAEVKPRNDVVDLLSTRREFRRARRNRKTRYRKPRFDNRVRSKHKGWLAPSVEVKIQEHITSIRRVCRILPVSKVVIETAEFDLQLLKAIEEGKPVPQGEDYQQGEMYGHYNVRQYVLWRDGYTCQCCGAHATKKKEVRLHVHHLESRKVGGDAPDNQVTLCESCHEKLHKGLIAEKDFKKRKRKSTRDATFMGIMRKTLMQRLCSELPIPVIETRGYITKATREKLLVLPKSHTNDALAIAQGKQGFNVGYLPGIVQINKIYTIRPVRHHNRQLHKATILKGGIRKSNQAEKYVFGYRLFDKVQFNGQDCFIWGRRTTGIFTIKTINGKMIKDGISFKKLKLVEKSTSYLIA

SEQ ID NO: 13430 - protein, 515 aa, unidentified
  REGION 1..515: note = Human gut metagenome
MIPNERRHLMPYIYVIGMDGKPQMPTKRRRHVQKLLDTGKARITERVPFTIQLLYDNDPVLQPVILAEDPGRTNIGLAALDLKGNLLLSAAVETRNKEIAKLMEKRRQCRRASRNGERKARQRLAKKYGTMIRGGMRMRKLPQYAADAFITCKVIRNTQARFCNRRRPDGWLTPSARHLVQTHINLVHKVQKYLPVTDVVIEVNRFAFMQLEDPAICGVDFQTGPLKGYDDRDAAVYDLQDGKCLMCKHEITQYHHIVPRSRNGSNTIGNIAGLCDQCHDRVHKDADFAEQMKEKKEGMDKKYGALSVLNQAIPFICKQLETEFGRGHVHYCTGRETSLVRRSTGYQKTKKNQLHEVDAWCIGALALAEIPENVPDFKEVHLIQQFRRQNRSLVNAQTERVYKLGGRMVAKNRKKRTGQETDALEDWYNRQVETYGKQEADCMRSRLKVTKSERRYNNPGRMMPGAVFLYEGVRYVMRGQHCNGAYLQAVGMGNRDFPARKCKILTRNTGLVFVS

SEQ ID NO: 13431 - protein, 364 aa, unidentified
  REGION 1..364: note = Human gut metagenome
MYVTSDYKQEIVLGVDAGTKHVGLSATTKSKELYSSEVILRNDIVDLLSTRRELRRARRNRLRYRKPRFNNRIKSKRPGWTAPSVKYKIDAHIRVIDNVCSILPIFRIVIEVAQFDTQKIKNPNISGKEYQEGDQLGFWNTREYVLARDGHKCQYCKGKSKDKILNVHHLESRKTGGDSPSNLITLCETCHKEYHKGNIDLKIKRGSSLRDAAVMGIMKWKLYEELRSRYDRVSMTFGYITKHNRIKYGIEKSHTSDAFVISKNINAKRIGCQYLKRLIRRHNRQIHKMKILKGGKKKNNQAPFEVFGFRLFDKVLYNNKICFVYGRRKSGSFNIRDFNGENSKDVSRKKFKLIRGKRHPIILK

SEQ ID NO: 13432 - protein, 431 aa, unidentified
  REGION 1..431: note = Human gut metagenome
MPNKVYVINKHGRPLMPCSPAKARHLLDEGKAKIKKRTPFTIQLVYGSSGYTQEVILGVDAGSKTIGMSASTTKEELLSAEVKPRNDVVDLQSTRREFRRARRNRKTRYRKPRFDNRVRSKHKGWLAPSVEVKIQEHITSIKMVCRILPVSKVVIETAEFDLQLLKAIADGKPVPQGEDYQKGEMYGHYNVRQYVLWRDDYTCQCCGAHATKKKEVWLHVHHLESRKVGGDAPDNQVTLCESCHEKLHKGLITEKDFKKRKRRSTRDATFMGIMRKTLMQRLCSELPIPVVETRGYITKATREKLLVLPKSHTNDALAIAQGKRGFNVGYLPGIIQTDKIYTIRPVRHHNRQLHKAAILKGGIRKSNQAGKYVFGYRLFDKVQFNGQDCFIWGRRTSGYFVVKTIDGKVIHNSASFKKLRLVERASNYLIA

SEQ ID NO: 13433 - protein, 424 aa, Anaerostipes sp.; identical to SEQ ID NO: 11329

SEQ ID NO: 13434 - protein, 442 aa, unidentified; identical to SEQ ID NO: 4418
  REGION 1..442: note = Human gut metagenome

SEQ ID NO: 13435 - protein, 238 aa, unidentified
  REGION 1..238: note = Human gut metagenome
MYDEYNVRQYVLKRDNYTCQCCGAHPTEKKPVRLHVHHLESRHVGGNAPNNLITLCVACHKALHEGKITLDKGKKRGKPLRDAAFMGIMRNTLLARLKDELNIPVKQTYGYITKLLREKNKISKSHVNDARCIAKAPNAKPCDTMLYTRALRHHNRQIHKAKILNGGIRKKNQAPYLVKGFRLWDKVRYNGEECFITGRRSSGYFALKKYDGTVISNSASYKKLMLLEAATNYITERS

SEQ ID NO: 13436 - protein, 512 aa, unidentified; identical to SEQ ID NO: 9077
  REGION 1..512: note = gut metagenome

SEQ ID NO: 13437 - protein, 420 aa, unidentified; identical to SEQ ID NO: 2681
  REGION 1..420: note = Human gut metagenome

SEQ ID NO: 13438 - protein, 451 aa, unidentified
  REGION 1..451: note = Human gut metagenome
MSVAVMSKTGMRLMPTSEYRARKLLKSKKATVYRYNPFTIQLTERETGDVQTVELCMDTGYLHIGTSVKSEKHEYLGVQIDTLTDEKQKHDACRMYRRQRRSRKRYRQSRFNNRKRSDGWIAPSLEHKKDIHIQTISRICNAMPITNITLEMGNFDTQVLKALEENRPLPQGTDYQHGERYGIATLREAVFARDKYTCQCCRKTIADGAILHVHHIIYRSRGGTNRMSNLATVCDRCHTPANHKPGGRLYNWKPKIASFKGATFMTAVRWKMYNEVKSKFSDINIHITYGAETKEQRRAFDITKSHVNDALVMGQFHPKHRSRPVCYKKKRRNNRCLEKFYDAKYIDSRDGKKRSGQELFNGRINRNHKKDSENLHQYRQQKVSAGRRTIRKQHYSIQPHDIIVFNRQQFETFGCHCNGARAILLPQKKSVAIKKLSVHKYAGGYFKSDFT

SEQ ID NO: 13439 - protein, 466 aa, Moorena sp.
VRFEINWLIRGQKGDRKMQKLGERNTYTPTNASQVRSSVVVSLNREETLGEHDLKTCPNNLDGNQLSGKREQDLRVPVLNMRGKPLMPARPAKARHLLKEGKAMVVGRSPFTIQLTTATGEAKQDIALGVDCGYSHVGLSAVSRKQELFSAEVILRGDIVKLNSERRQYRRARRSRLWHRQPRFDNRKKDKGWLAPSIQHKLDSYFKLIGKIKEILPIAKINVEVAAFDIAKIKNPDIEGEGYQNGVQKNFWNTREYVLFRDNHTCQACKGKSKDPVLEVHHLESRKTGGDRPDNLIALCNTCHSKVSKGKFYLNVKIPKGFKAETFMNTVRWKLVNRLKELGNSVSHTYGYITKSKRIEIGLEKNHVNDAFVIAGGTTQERCSSFTVSQTRRNNRRLQTNRKGYRPSIRRKRYELQPNDLVRYDNTEKRVKGVFNYGTWVRLDDGVNTNVKNVEVLKYGKGIQFV

SEQ ID NO: 13440 - protein, 512 aa, unidentified
  REGION 1..512: note = Human gut metagenome
MSTIYVLNKDGKPLMPTTRGGHVRHLLKEQKARVVRAKPFTIQLLYETDDAVQPLYLGIDPGRTNIGVAVVKANGTAVFTAHLESRNKEILKLMQDRKKARRARRTNGRRHRRQRRAKANGTISKKCVKQDTAQSKNPSKRAKEIGVIKRRLPGHKKDLLCIGIKNKEAKYTNRARPEGWLTPTAIQLLQTHINLVKKIQKFLPISDVVLEVNKFAFMRLDNPDIQKWQYQQGPLYQKGSLENAVSEMQEHHCLFCDKPIDHYHHVVPQSENGSNTIANIVGLCSEHHNLVHKDAAWQKKLAEEKVGLNKKYGALSVLNQIIPALTNKLSVLFPKHFFVTTGKSTHDYRESHSVSKDHWLDAYCIACSVSPSNVCDSNINNHVPYELKQFRRHDRRALHKENMSRVYTLNGKAVATNRHKAIKQTTDSLEEFRQSHPGDVCKLKVKEHHPAYRNLNRNHPGSVFFVGEQAHVMQSIVASKDGKATRYKDTNVNKIAAGQCRFVAKNEGIVFT

SEQ ID NO: 13441 - protein, 418 aa, unidentified; identical to SEQ ID NO: 7351
  REGION 1..418: note = metagenome

SEQ ID NO: 13442 - protein, 417 aa, Exiguobacterium sp.
MFVFVLNHHGEPLMPCKPSKARKLLNNGKAKLVKQTPFTIQLLFGSSGYKQEISLGVDAGTKHIGFSATTSTKVLLEGEVQLRTDIQDLLATRRAMRSARRSRKTRYRQARFLNRKKPKGWLAPSVQHKVDAHLKLVRMIHRLLPIKHLTIEVAQFDIQKIKSPDISGDLYQKGDQLGFWNVREYVFFRDKHICQHCKGKSKDKILNVHHIESRHTGGDSPDNLLTFCETCHKKIHKENLEHLFQRKSRSFRDATQMTVMRWFNNAVKETYPYVKLTYGFLTKNIRIQNGLEKRHAVDARCISGNPLSEEPNVSYLFRQVRANNRQLHKMTIGKKGKRKANKAERFVRGYQLFDKVHYEGQTCFVFGRRKTGYFDLRTLQGVRVHKCASHKKLTLLERATTWLVDIQPEGGGGRLRL

SEQ ID NO: 13443 - protein, 458 aa, Moorena sp.; identical to SEQ ID NO: 7647

SEQ ID NO: 13444 - protein, 431 aa, unidentified
  REGION 1..431: note = Human gut metagenome
MPNKVYVINKHGRPLMPCSPAKARHLLDEGKAKVKKRTPFTIQLVYGSSGYTQEVILGVDAGSKTIGMSASTTKEELLSAEVKPRNDVVDLLSTRREFRRARRNRKTRYRKPRFDNRVRSKHKGWLAPSVEVKIQEHITSIKRVCRILPVSKVVIETAEFDLQLLKAIADGKPVPQGEDYQKGEMYGHYNVRQYVLWRDGYTCQCCGAHATKKKEVRLHVHHLESRKVGGDAPDNQVTLCESCHEKLHKGLIAEKDFKKRKRRSTRDATFMGIMRKTLMQRLCSELPIPVVKTRGYITKATREKLLVLPKSHTNDALAIAQGKQGFNVGYLPEIAQIDKIYTIRPVRHHNRQLHKATILKGGIRKSNQTEKYVFGYRLFDKVQFNGQDCFIWGRRTTGIFTIKTINGKMIKDGISFKKLKPVEKSTSYLIA

SEQ ID NO: 13445 - protein, 426 aa, unidentified; identical to SEQ ID NO: 12111
  REGION 1..426: note = Human gut metagenome

SEQ ID NO: 13446 - protein, 330 aa, unidentified
  REGION 1..330: note = Human gut metagenome
LRVFVRNKRGKPLMPCSPAKARLLLKEKKAIVVRRTPFTIQLTIATGETKQPVSLGVDAGYKHVGLSASTEKAELYASEVELRQDITDLLSARRALRQSRRNRKTRYRAPRFDNRIRTKRKGWLAPSVENRINAHLSRIEAVLRLLPVTKITVETASFDLQLLKNPDISGKEYQEGEQLGFWNIREYVLCRDGHVCQHCYGRSKDPVLNVHHLESRRTGGDSPGNLITLCETCHKALHRGEITLKAKRGQSFRAEAFMGIMRWEVLNRLKASHPELEVNNTYGYRTKHARIANDIAKSHCADAFCIAGNLGAERLGEFFFQKQTRRNNRQ

SEQ ID NO: 13447 - protein, 424 aa, unidentified
  REGION 1..424: note = coral metagenome
MRVFVLDKNKKPLDPCQPARARILLKQGRAKVFRRYPFTIMMRDLEELECVTHNHQIKLDPGSQTTGLAIIQEKVVVWGAELTHRGLQIRDGLTSRRKLRRSRRNRKTRYRQPRFLNRKRPDGWLAPSLMSRVYNILTWVKKLTRFCPITGISQELVRFDTQKMENPEISGTEYQQGTLYGYEVREYLLSKWNRKCAYCGVTDTQLEIEHIKPKSKGGSDRVTNLAIACRKCNQIKGNQEIEQFLSGKPDVLKRILSQAKRPLVDAAAVNSTRWKLYNELKALGLPIETGSGGLTKYNRCRQNLPKTHWLDAANVGEVDTLYIESYQPLLISAKGHGTRQMCRTNKFGFPTRYVPRFKFVKGFQTGDIAKAVVTKGKKIGTYTGRIATRKTGSFNISTKHELVQGISHKYCSIVHRKDGYSYSF

SEQ ID NO: 13448 - protein, 380 aa, Bacteroides sp.; identical to SEQ ID NO: 6217

SEQ ID NO: 13449 - protein, 465 aa, unidentified; identical to SEQ ID NO: 3070
  REGION 1..465: note = Human gut metagenome

SEQ ID NO: 13450 - protein, 418 aa, unidentified
  REGION 1..418: note = Human gut metagenome
MVYVISKQGMPLMPTERFGKVRRMLKNSLAHVVRRIPFTIQLDYDTTDFTQPITLGIDAGSKHIGVSSTTTEKELYAADVELRNDIVDKLSTRREQRRTRRNRLRHREPRFYNRVSSKNKRRLAPSVENKVHTHMSVVKNVCKILPVSNIVLETASFDMQKIKRPDIQGEEYQQGEQLGFWNVREYVLWRDGHACQHCHGKSKDHVLNVHHLESRKTGGDAPNNLITLCETCHNAFHRGKFELKIKRGKPLRDAAFMGIMRWVFYKRLKKEHPNVSMTFGYITKNTRITNNLPKEHYVDARCISGHPQAKPMGYYFYQKKVRCQNRQIHKVNFLKGGRKKLNQAPFLVRGFRLFDLVSYEGILYYVFGRRVSGYFDIRKLDGTKANNGSVSYKKLKLINTQKTILTERRNSGSIPPRS

SEQ ID NO: 13451 - protein, 428 aa, unidentified
  REGION 1..428: note = Human gut metagenome
LKVFVLNMRGRPLMPCSPAKARHLLKAGKAVVRRRTPFTIQLRIATGETKQSVTLGVDAGAKHVGLSAATEKEEVFASEVELRQDITGLLAARLSLRRERRQRKTRYRAPRFLNRVRSKHKGWLAPSVENRIQAHMSRIDAVCRLLPVTKIVIETASFDIQKIKDPSVEGTDYQQGDQLGFWNVREYVLFRDGHVCQHCHGHAKDKILNVHHLESRQTGGDAPNNLITLCERCHKACHAGKIKLKVKRGQSFREEAFMGIMRWTLLDRVRKAHPGLPVENTYGYLTKNTRITQGLPKAHCVDAYCIAGNLKAVRRGVHLYQRQVRKHNRQIHKCTVLSKTLKDGTKIGYRKLNQTPHLVKNFRLFDKVRCLGQTGFIFGRRSSGYFDVRRLDGVKISSCINYRKLTLLEKRGTCLTELRKEDGASSPV

SEQ ID NO: 13452 - protein, 418 aa, unidentified
  REGION 1..418: note = Human gut metagenome
MVYILNKHNEPLMPCSERKARLLLKDGMAIVYRKDIFTIKLINGSYGYKQHITLGIDCGSKHIGVSATTDKQELFSANAELRNDVVKLLSDRRMLRRNRRSRKTRYRKPRFNNRIVKNGWIAPSIKQKIQSHFNLVGFLHKLLPITNIVVETAAFDIQKINNPSISGSEYQQGEQLDFFNVREYVLFRDNHTCQHCKGKSKDKVLNVHHIESRKTGGNSPNNLITLCETCHKAYHRGEFELNVKRGKSFRDSAFMGIMRWELYDELKLRYDNVSMTFGYITKYKRIKLGLDKEHYNDAYCICGNLAAKMLSAHHFIRFIPRHSRVLHIQKFSKGGVRRSASAPYWLNGGKPSKSGAMFTMFDKVKFNGIVCFISGSSNGYAALRDINWNKIDGCKTVVTVNKLLLISRKYGGFIVEKK

SEQ ID NO: 13453 - protein, 418 aa, unidentified
  REGION 1..418: note = Human gut metagenome
MVYVLSKTGQPLMPTENHAKVRVLLKQQKAKIVHSCPFTIQLLYDSTDYTQPVSLGIDAGSRHIGVSATTETKVLYEADVTLRNDIVDLLSTRREARRTRRSRKTRYRKPRFNNRTRKDGWLAPSIQQKVDTHLTTVRKVTEILPVNSITVETASFDIQKIKNPDIAGTGYQQGEQLDFWNVREYVLFRDGHKCQCCKGKSKDPVLNVHHIESRKTGGNAPNNLITLCETCHKGYHNGTVSLPKNIRRGMKFNDAAFMGIMRWAFFNRVKETYEPLGIMVNMTYGYITKNTRIEHDLPKDHFIDARCISGHPDATSGGTVFYQKKVRCHNRQIHKQKILKGGIRKRNQAPYLVKGFRLFEKVKYHGKQYFIFGRRSSGFFDIRTLDGTKVNKGSVSCKKIRSLDMPRSYLTEERKVIV

SEQ ID NO: 13454 - protein, 414 aa, unidentified
  REGION 1..414: note = Human gut metagenome
MVYVINKQGQALMPTERFGKVRRLLKNSLAHVVCRIPFTIQLDYDTTDYTQPVSLGIDAGSKHIGISATTSEKEMYAADVELRNDIVDKLSTRREQRRTRRSRLRYRKARFNNRVSSKRKGWLAPSVENKIQTHLTVVEKIHKFLPITNIVVETASFDIQKINNPSISGSEYQQGEQLDFFNVREYVLFRDNHICQHCKGKSKDKVLNVHHIESRKTGGDSPKNLITLCETCHKAYHRGDFELNVKRGKSFRDSAFMGIMRWSFYDRLKNIYPNVSMTFGYITKNTRITNNLPKEHYVDARCISGNPTAKPLGYYFYQKKVRCQNRQIHKANFLKGGRKKLNQAPFLVKGFRLFDLVEYQKELYYIFGRRSSGSFDIRKLDGTKVNKGSINCKYLRLIATRKSILTEKRMQVNL

SEQ ID NO: 13455 - protein, 421 aa, unidentified
  REGION 1..421: note = Human gut metagenome
MQYVYVLNKHGEPLMPCSPGKARLLLKQQKACVVKRTPFTIKLLYGSAGYKQPITLGVDAGSKHVGLSASTEKRELYREEFTPRNDVVDLLSTRRQNRRSRRNRKTRYRAPRFDNRVHSKHKGWLAPSVEVKIQEHITVIKRICRILPITLVRVETAEFDTQRLKAMLKGKPLPVGTDYQLGEMYDEYNVRQYVLKRDNYTCQCCGAHPTEKKPVRLHVHHLESRHVGGNAPNNLITLCVACHKALYEGKITLDKGKKRGKPLRDAAFMGIMRNTLLARLKDELNIPVKQTYGYITKLLREKNKIPKSHVNDARCIAKAPNAKPCDTMLYTRALRHHNRQIHKAKILNGGIRKKNQAPYLVKGFRLWDKVRYNGEECFITGRRSSGYFALKKYDGTVISNSASYKKLMLLEAATNYITERS

SEQ ID NO: 13456 - protein, 478 aa, Simplicispira sp.
MAVFVLDRQGKALMPCTEKRARLLLERGRARVHRLVPMVIRLVDREVASCELQPLRLKLDPGSKTTGLALVRDAQVIDPQSGEVQTSSVVLNLMELVHRGRQISEALTVRRQMRRRRRSNLRYRAPRFLHRGNKKSGWLAPSLQHRVDTCMTWVGRIQRWAPIRAISCELVRFDMQALQNPEISGIQYQQGTLFGYELREYLLEKWGRQCAYCDIKDVPLQIEHIRPKAQGGSNRASNLTLACSCCNQKKAARSIEDFLAKDPKRLANVLASAKKPLRDAAAVNATRWALANALKATGLPVELASGGRTKFNRCTLGIPKTHALDAACVGKIDAIQHWQRPTLTLKATGRGSYQRTRLNKFGFPRGYLMRSKRVQGFGTGDMVRADVPSGAKAGIHTGRVAIRASGSFNIQKHQGGKAVVVQGISHRHCRVIQRGDGYGYFFNRADNTGREQARPTTTDAAHPALYLPALNGGVSRAV

SEQ ID NO: 13457 - protein, 420 aa, unidentified
  REGION 1..420: note = Human gut metagenome
MQYVYVLSKHGEPLMPCSPEKARLLLKRQKACVVKRTPFTIKLLYGSAGYKQPITLGVDAGSKHVGLSASTETRELYREEFSPRNDVVKLLSTRRQNRRSRRYRKTRYRAPRFDNRVHSKHKGWLAPSVEVKIQEHITVIKHICKILPITLVRVETAEFDTQRLKAMLAGKPLPVGTDYQLGEMYNEYNVRQYVLKRDHYSCQYCGAHTTAEKMVKLHVHHLESRKTGGNAPSNLITLCTTCHENLHKGKVTLDGRERGKPLRDAAFMGIMRKTLMVRLKEELPVPVQETYGYITKMRREQNDIKKSHVNDARCISKHPLAEPCSICYRTKAIRHHNRQTHKVNFSKGGYRKRSQTPYIVEGYRLWDKVLYKGQECFISGRRSSGSFALKKLDGTVVINSITFKKLRLLEPATNYLIERM

SEQ ID NO: 13458 - protein, 221 aa, unidentified
  REGION 1..221: note = Human gut metagenome
MPNKVYVINKHGRPLMPCSPAKARHLLDDGKAKVKKRTPFTIQLVYGSSGYTQEVILGVDAGSKTIGMSVSTTKEELLSAEVKPRNDVVDLLSTRREFRRARRNRKTRYRKPRFNNRVRSKHKGWLAPSVEVKIQEHITSIKMVCRILPVSKVVVETAEFDLQLLKAIEEGKPVPQGEDYQQGEMYGHYNVRQYVLWRDNYTCQCCGAHPTKKKEVRLHVH

SEQ ID NO: 13459 - protein, 411 aa, unidentified
  REGION 1..411: note = Human metagenome
MFVYVLDKNGQPLMPTSRFGKVRRLLRDKKAKVVKSCPFTIRLLYEPKTKIAQDVILGVDTGSKYVGIACVGNDKVLYQSQTELRDDIKKKMDSRRMYRRNRRQRKTRYRKCRFLNKRNSIREDRYCPTITSKCFGHIREIEFCKRILPIEHLVFETAKFDTQLMEKPWLQEQKWAYRKGVNYGYANAREHALIRDKYTCQCCGKKNCRIEAHHIVFRSKNGSDDLENYITLCEDCHKAVHLGKIELKLKGKHRSNLRHATQMSIIRSMLLRKYPNVIETFGFVTKANRENLGLKKSHCIDACVIASGGLRFKELGVLYRKKCVPVQSRILARGNRGEQRLPTGKVHGFKRYDKVKYLGVVCFVKARRVGGSFTLMDINSKVLDFRGVGGKNYPPIQVHREIKYPKQCFMY

SEQ ID NO: 13460 - protein, 512 aa, unidentified; identical to SEQ ID NO: 2990
  REGION 1..512: note = Human gut metagenome

SEQ ID NO: 13461 - protein, 420 aa, unidentified
  REGION 1..420: note = Human gut metagenome
MQYVYVLNKHGEPLMPCFPGKARLLLKQQKACVVKRTPFTIKLLYGSAGYKQPITLGVDAGSKHVGLSASTEKRELYREEFTPRNDVVELLSTRRQNRRSRRNRKTRYRAPRFDNRVHSKHKGWLAPSVEVKIQEHITIIKRICKILPISLVRVETAEFDTQRLKAMLAGKPLPVGTDYQLGEMYDEYNVRQYVLKRDHYTCQCCGAHNTAKKVVKLHVHHLESRKTGGNAPSNLVTLCTTCHKNLHKGKVTLDGKERGKPLRDAAFMGIMRKTLMARLKEELPIPVQGTYGYITKMSREQNDIKKSHTNDARCISKHPLAEPCSVCYRTKAIRHHNRQTHKANFSKGGYRKRSQTPYIVEGYRLWDKVLYKGQECFVSGRRSSGSFALKKLDGTTISKGVTFKKLRLLEPATNYLIERM

SEQ ID NO: 13462 - protein, 513 aa, unidentified; identical to SEQ ID NO: 3179
  REGION 1..513: note = Human gut metagenome

SEQ ID NO: 13463 - protein, 406 aa, unidentified; identical to SEQ ID NO: 3980
  REGION 1..406: note = Human gut metagenome

SEQ ID NO: 13464 - protein, 453 aa, Lactobacillus sp.; identical to SEQ ID NO: 4050

SEQ ID NO: 13465 - protein, 431 aa, unidentified
  REGION 1..431: note = Human gut metagenome
MPNKVYVINKHGRPLMPCSPAKARHLLDAGKAKVKKRTPFTIQLVYGSSGYTQEVILGVDAGSKTIGMSASTTKEELLSAEVKPRNDVVDLLSTRREFRRARRNRKTRYRKPRFDNRVRSKHKGWLAPSVEVKIQEHITSIKRVCRILPVSKVVIETAEFDLQLLKAIEEGKPVPQGEDYQQGEMYGHYNVRQYVLWRDGYTCQCCGAHATKKKEVRLHVHHLESRKVGGDAPDNQVTLCESCHEKLHKGLIAEKDFKKRKRRSTRDATFMGIMRKTLMQRLCSELPIPVIETRGYITKATREKLLVLPKSHTNDALAIAQGKRGFNVGYLPEIAQIDKIYTIRPVRHHNRQLHKATILKGGIRKSNQTEKYVFGYRLFDKVQFNGQDCFIWGRRTTGIFTIKTINGKMIKDGISFKKLKLVEKSTSYLIA

SEQ ID NO: 13466 - protein, 430 aa, unidentified
  REGION 1..430: note = Human oral metagenome
MLVYVLKQNGQPFMPTARFGKIRRLLKAKKAKVVRKEPFTIRLLYEPKTDVVQECYCGVDTGSRHIGVAVVSNDKVLYQSQTELRSDIKRKMDARRVCRRNRRNRKTRYRKPRFLNRGNSTKSDRLPPSVKHKVQAHIDEIEFCKKILPISDSNLIIEVSQFDTALMKDPRLFSEKVKHWGYQQGFNYGYSSRREAILHRDHYTCQCCGKKNCRLEVHHVKFKSNGGTDDEENLITLCEDCHKGVHAGTVVLSKKPKKSKNLKYATHMSIIRSYLLKKYPNAIETIGFVTSENRNHLNLEKDHYIDACIIASGGLEFKELDVIYYKRRVSKGNYQLTKGFRGEQKIPKGKICGFKRFDKVEYFDNEYFIESRKSSGFATLIDIFGNQIDFSYMPRGMKTPKLSNCKRISARRSCLCISQIRKERAIHVLS

SEQ ID NO: 13467 - protein, 378 aa, unidentified
  REGION 1..378: note = Human gut metagenome
QLQYESTIHTQEINLGIDAGSKTIGVSATTEKKVLYESEVILRNDIVELLSGRRALRNSRRSRKTRYRKPRFDNRKKPDGWLAPSIRQKIETHVTVVGNVMKILPVTKIIVETASFDIQKIKNPEIEGEGYQHGEQLDFWNVREYVLFRDGHTCQCCKGKSKDNILNVHHIESRKTGGNAPNNLITLCETCHKAYHKGIITLPKEIHRGMRFRDAAFMGIMRWAFYDRLKELYNPLGAEVINTYGYITKNTRIEHGLPKEHYVDARCISDNPAAKPLDHYYFQKKVRCHNRQIHKNTILKGGIRKRNQAAYLVKGYRLFDKVKYQNQEYFIFGRRSSGFFDIRTLDGTKVNKGSISCKKLQLVEKSKHYLTEQRKVAA

SEQ ID NO: 13468 - protein, 374 aa, unidentified; identical to SEQ ID NO: 12633
  REGION 1..374: note = Human gut metagenome

SEQ ID NO: 13469 - protein, 420 aa, unidentified; identical to SEQ ID NO: 3247
  REGION 1..420: note = Human gut metagenome

SEQ ID NO: 13470 - protein, 414 aa, unidentified; identical to SEQ ID NO: 6490
  REGION 1..414: note = Lachnospiraceae bacterium UBA4226

SEQ ID NO: 13471 - protein, 493 aa, Streptosporangium sp.; identical to SEQ ID NO: 3095

SEQ ID NO: 13472 - protein, 444 aa, unidentified
  REGION 1..444: note = Human gut metagenome
LAKDHNRLQGRGEQNLRVFVLNKRRKPLMPCSSAKARILLKEKKAVVVRRTPFTIQLTIATGETKQPISLGVDAGYKHVGLSASTEKAELYASEVELRQDITDLLSTRLALRRSRRNRKTRYRAPRFDNRVRSKHKGWLAPSVENRINAHLSRIAAVLRILPLTKITVETAAFDTQLLKNPDVSGEAYQQGEQLGFWNVREYVLFRDGHVCQHCHGKSKDPVLNVHHLESRRTGGDSPSNLLTLCETCHKALHRGEIKLKTQRGKSFRAETFMGIMRWTVLNRLKSAYPELDVRNTYGYLTKHARITHGIAKSHCADAFCIAGNFGAKRLGYYYFQKQTRRHNRQIHKLSILKGGLLKRNQAPYEVKGFRLFDKVACKGEDAFIFGRRSSGSFDVRKLDGTRISAGISFKKLRLLEKRRTYLTEIRKEAALPPLPKRRGLRVDF

SEQ ID NO: 13473 - protein, 460 aa, Moorena sp.
LTFAQACAKHERELNPSNRSISIMRVFALDKNRKPLDPCHPARARILLKQGRAKVLRRYPFTIILGDLEIENCVTHFHQLKIDPGAKTTGLAIVQNHRVVWAAELTHRGFQIRDALTSRRQMRRSRRNRKTRYRQPRFLNRKKPEGWLPPSLMSRVHNILTWVKKLIRFCPIAGCSQELVRFDTQKMQNPKISGTDYQQGTLYGYELREYLLEKWHRTCAYCGATATPLEIEHIKPKSKGGSDRGSNLTIACHSCNQAKGNQEIEQFLSNKPSILKGILSQTKRPLADTAAVNTTRWKLYNELKSTGLSVEVGSGGLTKYNRCRQNFPKTHWLDAANVGSVETLYVEDYQPLLITAKGHGTRQICRTDKFGFPKRHCSRIKIHKGFQTGDIAKAIVTKGKKIGTYVGRVATRATGYFNISTNNGLVQGISHRYCQAIHRKDGYSYQFHRASRCYPFSSPL

SEQ ID NO: 13474 - protein, 415 aa, unidentified; identical to SEQ ID NO: 5395
  REGION 1..415: note = Human gut metagenome

SEQ ID NO: 13475 - protein, 544 aa, unidentified; identical to SEQ ID NO: 11743
  REGION 1..544: note = Human gut metagenome

SEQ ID NO: 13476 - protein, 430 aa, unidentified; identical to SEQ ID NO: 4817
  REGION 1..430: note = Human gut metagenome

SEQ ID NO: 13477 - protein, 435 aa, Moorena sp.
MQNYVFVIDTNFQPLNPIHPKKARRLLEKGKAAVFRMYPFTVILKTAIRQSRRCANANPTISPCQVKIDPGSKVTGFALVQKDQVIWAMELEHRGGLIKKKLESRRAVRRGRRNRNTRYRKPRFLNRKRPEGWLPPSLEHRILTTQTWVKRLIKFCPVSEIWVERVKFDTQKMQSPEISGVEYQQGELAGYEVREYLLEKWGRECAYCGKQNVPLQIEHIHPKSKGGSNRVSNLCLACEKCNQRKGNKPVEDFLKKKPKLLQKIKAKAKQPLKDAAAVNATRNRLVKVLQGIKPVITGTGAQTKYNRTKLGFPKQHWVDAACVGNIETLTLKISQPLLVTCKGQGGRQKAALNKCGYPIRHNPLKPIGRRPRCANKGWVTGDLVRHQRLGIGKVTPRSKGSFGFTPLGMKGYKSCKPQDISAIHRKDGYIYSFCG

SEQ ID NO: 13478 - protein, 439 aa, unidentified
  REGION 1..439: note = Soil metagenome
VCGYALPAFGQSIWFNERSRMVLVYVLDNHKRPLMPTTPVMARILLKQGRAKVVRKLPFTIKLQYNIVAAQVAPLTLGVDTGSSTLGSAVTDDKGNVLYLSEVAIRNDIAEKMTRRREYRRNRRYRKTRYRLPGSENRKNSIKSDRFSPTMRSKIDSHLKEIRFVESILPIKATILETASFDPHALKNPEVLANPLLYQQGINYGFANTKAYVLDRDSYTCQHCAGKSKDRRLHVHHIIFRTNGGSDEEENLVTLCKTCHVELHAGSISLKLTGKKKGQLRHATQMNSIRVQLLKRLPEARETFGYITKEHRQLFTDVKDHSVDAVFIATQGMKPIFKTSLVIQKKCVSDGDYRQTRGARSEECIPTGKIMGFRKFDATFYRGERYFIMGRMSTGYAILMNIAGETVKLKPIPKLHLMARAAARKSWIISQRTMANVCS

SEQ ID NO: 13479 - protein, 420 aa, unidentified; identical to SEQ ID NO: 3504
  REGION 1..420: note = Human gut metagenome

SEQ ID NO: 13480 - protein, 410 aa, unidentified
  REGION 1..410: note = Human gut metagenome
MTNYAFVLDVNGKQLAPTKEQKAWFLIRKKRATLISKYPMVIQLKKEISDEQICKDEICCGIDDGGLYVGVALVQKCKTKNKVVFKGTIEQRNDVKHLMEVRKGYRGYHRFHKRYRQARFNNRKSSKRIAPSILQKRQATIRVIKQLNKWINIANYLLEDVAIDIRALTDGYKLYRWQYQQSNRLDENIRKTVILRDDCKCMECGKSNCRLEVHHIKPRRLNGSNTLDNLISLCETCHQRTEGQEELYMDRYFSILNSTDNKNLNYAQHVMIGKKWLREQLSELGTLILTTGGDTANKRIDWNIEKSHSNDAICITGLQPDTCNVKEWTIKPMRRQSKAKTDNVLGIKHRDLVEYTFRNGETHRGYVTALYPEQNALNFQSPTKHCKRVNAKKCKLIWKYSKIYWLDNVS

SEQ ID NO: 13481 - protein, 406 aa, unidentified
  REGION 1..406: note = Human gut metagenome
MVYVQDIDGRPLMPTTRHGKVRRLLKSKKATVVNLCPFTIRLLYDTIGYKQEITLGVDTGTKHVGLSATTKSKELYASEVILRSDVVDLLSTRRELRKIRRYRLRYRKPRFMNRIKSKKRGWIAPSIRQKIDSHIRIIGFVYSILPVSKLIIEVAQFDTQKIKNPEISGKEYQEGEQLGFWNVREYVLARDEHKCQHCKGKSKDPVLNVHHIESRKTGGDSPSNLITLCKTCHKEFHKGNIKLKVNRGESLRDAAVMSIMKWELYDELKSLYPNVKITFGYITKYNRINHGIEKSHVSDAFVISRNFDSERLGYYYKRKLVRRHNRQIHKMKAPKGGNKRMNQSPFKVFGFRLFDKVMFQGKERFIYARRLRGIFNIRDINGENKKDISYKKLEYVSHGLISIVAG

SEQ ID NO: 13482 - protein, 426 aa, unidentified; identical to SEQ ID NO: 3614
  REGION 1..426: note = Human gut metagenome

SEQ ID NO: 13483 - protein, 446 aa, unidentified
  REGION 1..446: note = Soil metagenome
MAVYVLDKSGKPLMPCSEKRARLLLARGRARVHRLAPLVIRLVDRRLTDSAVQPLTLKLDPGSRFTGLALVRQQDRGVSVLSLLELIHRGAAISKAMGQRASYRRRRRSQNLRHRAPRFDNRNRPEGWLPPSLRHRLDTTLSWVQRLRRWAPITDLTIERVKFDLQKLQNPEISGIEYQQGALQGYEVREYLLEKWGRSCAYCAAESVPLEIEHILARSNGGSDRVTNLTLACRPCNQRKANQPVEVFLKGKPELLTRIKARSKAPLRDAAAVNATRNALFDALLQTRLPVATGTGAQTKFNRQRLGIPKTHALDAACVGEVESVASWRRPTLAIKATGRGEYQRTRLTAHGFPRGYLTRQKRHFGFQTGDQVRAQVTAGKKAGAHQGRVAVRQTGSFNIQTPHGVVQGVHHRHCTLIQRADGYAYSQLPFDSAQPRKEAARAGAR

SEQ ID NO: 13484 - protein, 512 aa, unidentified
  REGION 1..512: note = Human gut metagenome
MSTVYVLNKDGKPLMPTTRGGHVRHLLKEQKARVVQSNPFTIQLLYETNDVVQPLYLGIDPGRTNIGVAVVKADGTAVFAAHLETRNKKIPKLMQDRKKARRARRTNGRRCRRQRRAKANGTISKKCVKQDTAQSKNPSKRAKEIGVIKRHLPGCKKDVLCVGIKNKEAKYTNRARLEGWLTPTANQLLQTHINLVKKIQKFLPISDVVLEVNKFAFMRLDNPNIQKWQYQRGPLYQKGSLENAVSEMQEHHCLFCEKPIEHYHHVVPKSENGSNTIANIVGLCAEHHNLVHKDVAWQEKLVEEKTGLNKKYGALSVLNQIIPALTKELSFLFPKHSFMTNGKSTHDYRAAHGISKDHWLDAYCIACSVLPIDVCDSTINNCVPYELKQFRRHDRRALNNENMNRVYTLNDKVVATNRHKATEQEAASLEEFRKEHPNDVCKLKVKEHHPTYRNMNRNYPGSVFLVGKQIHVMQGIASSKDGKATKYNDTRATTIAAGKCKFVAKNSGILFV

SEQ ID NO: 13485 - protein, 469 aa, unidentified
  REGION 1..469: note = Freshwater metagenome
MNKVFVLDKNKVPLMPCHPARARELLTKGRAAVYRTAPFTIILKDRTVEDSVLQPLELKLDPGAKTTGIAINAWFKTNPENKQATLIFGANLTHKAFQIKDALTKRAILRRSRRGRKCRYREKRFNNRKNKKEGWIAPSVQSIVNNIDTWIKKLIKLAPIKFISAEINKFDSQKLQNPFISGVQYQQGTLIGYQIRQYLLEQYDYTCIYCGAKNIPLEVDHVIPRTKSGSNRVSNLVISCKPCNLAKSNLDLNQFVKDPKKLAIIKAGLKKPLRASAYVNIIRKKLVLLIESYGLPYLLGDGATTKFNRTKQRYLKDHFIDAACVNEGAGSNVYIKPGFKPLLIKAMGRGDHQVSHVDKYGFPTGEPARGKRFFDFTSGDIVQFTHTLTRRSFRINPRKTGTFNIIDLELRVILKFKDQKLSKQKLNQLVTKIKTMTKTQVKTLKLPASVNHKNLKLVQRNDGYKYSYS

SEQ ID NO: 13486 - protein, 544 aa, Moorena sp.
LEKLHGDQGEFLRLAIDERTMLHAELKTNGGVLPQLRPLEAQAADSLRGSARNGSACDAGMQPARGESSEHASPEPSPAKAECGVSRVFVLDKKNRPLMPCLPARARKLLRAGKAVVARRFPFTIRLKERQSGAVQPVRVKIDPGAKTTGLAVVREGGNGQYVLHLSELTHRGWKVQKSMGQRSAYRRRRRSSNLRHRAPRFDNRPKPNGWLPPSLRCRVDNVIAWVGRFRRLSPVSAISVERVKFDTQLMENPDISGAEYQNGSLFGYELKEYVLEKCNRTCQYCGGLSKDPILEIEHVVPRNPKSGTRGSNRLSNLTLGCRTCNLAKGNLLPQEWLECLSKSQSRLDKRRAAGLERILDGKKPSLAPAAAVNATRNALYFSLIATGLPVETGTGGRTKYNRHRLLVHKAHCLDAACTGEVSSLHGWKQPVLLVTAMGRGSYQRTRVDKYGFPRGYLMRQKSVHGFQTGDIVQATVPKGKNTGTYVGRVAVRASGNFNIKVGATTITDVGWKHCRLISKSDGYGYARAALPLPPEGSSPRAEE

SEQ ID NO: 13487 - protein, 420 aa, unidentified
  REGION 1..420: note = Human gut metagenome
MQYVYVLNKHGEPLMPCLPGKARVLLKQQKACVVKRTPFTIKLLYGSTGYKQPITLGVDAGSKHVGLSASTEKRELYCEEFTPRNDVVDLLSTRKQNRRSRRNRKTRYRAPRFDNRVHGKHKGWLAPSVEVKIQEHITVIKRICRILPITLVRVETAEFDTQRLKAMLAGKPLPVGTDYQLGEMYDEYNVRQYVLKRDNYTCQCCDAHTTAKKVIKLHVHHLESRKVGGNAPSNLITLCTTCHNNLHKGKITLDGKKRGKTLRDAAFMGIMRNTLLTRLHNELNIPVQNTYGYITKLLREQNDIKKSHVNDARCISKHPLAEPCSVCYHTKAIRHHNRQIHKAKILKGGIRKANQAPYIVKGFRLWDKVLYNGQECFISGRRSSGYFALRKLDGTAITNSISFKKLQLLEPATNYLIERM

SEQ ID NO: 13488 - protein, 453 aa, Moorena sp.; identical to SEQ ID NO: 4156

SEQ ID NO: 13489 - protein, 447 aa, unidentified; identical to SEQ ID NO: 8397
  REGION 1..447: note = Human gut metagenome

SEQ ID NO: 13490 - protein, 414 aa, unidentified; identical to SEQ ID NO: 2588
  REGION 1..414: note = Human gut metagenome

SEQ ID NO: 13491 - protein, 620 aa, Streptomyces sp.; identical to SEQ ID NO: 11696

SEQ ID NO: 13492 - protein, 392 aa, Halomonas sp.
MAVFVLDKKKQPLMPCSEKRARLLLARGRAVVHKRYPFTIRLKNRVGGEAQPLRLGIDPGSKTTGLALIREPDSQQRHVLCLFELIHRGYQIKKALQQRAAFRRRRRSANLRYRAPRFNNRTKPKGWLAPSLQHRVDTVTAWVNRLNRLAPVTAISQELVRFDTQKLDNPEINGVEYQQGTLLGYEVREYLLEKWGRECAYCGTADTPLEIEHVIPRSRGGSNRVSNLTLSCHPCNQSKDALSLVDFFATDKGLKKRLKANGHTANARLERVQRQLKQPLRDASAVNATRWALFSALNATGLPVTVASGGRTKYNRQRLNIPKSHALDAACVGAFEKLHDWTVPTLTIKAMGRGSYQRTRLTKYGFPRGFLMRQKQVHGFQTGHGACDSTHR

SEQ ID NO: 13493 - protein, 498 aa, unidentified
  REGION 1..498: note = Human gut metagenome
MPTTRCGHVRHLLKEQKARVVASKPFTIQLLYKTNDVVQPLYLGIDPGRTNIGVAVVKADGTAVFTAHLETRNKEIPKLMKKRKDSRRARRTNGRRCRRQRRAKANGTISKKCVKHDTAQNGSVSKRAKEIGVIKRHLPGCEKDVLCIGIKNKEAKFSNRTRPEGWLTPTANQLLQTHINLVKKIRKFLPISDAVLEINKFAFMQLDNPNIQKWQYQQGPLYQKANLEEAVSEMQEHHCLFCKKPIAHYHHVVPQSENGSDTIGNIVGLCTKHHDLVHKDTAWQKKLAKKKTGLNKKYGALSVLNQIIPALTKELSSLFPKHFFATNGKSTYDYRSAHGVSKDHWLDAYCIACSVLPNDVCDSGINNRVPYELKQFRRHDRRALNNENMSRVYTLNDNVVATNRHKATKQTTDSLEEFRQNHPDDVCKLKVKEHHPTYRNMNRNYPGSVFLIGKQVHVMQGIAGSKDGEATTYKDTNANSIAAGKCKFVAKNSGILFV

SEQ ID NO: 13494 - protein, 432 aa, Moorena sp.; identical to SEQ ID NO: 6011

SEQ ID NO: 13495 - protein, 455 aa, unidentified; identical to SEQ ID NO: 12675
  REGION 1..455: note = Human gut metagenome

SEQ ID NO: 13496 - protein, 509 aa, Moorena sp.
VSTALSFLREGRKRGYVIMSGKKNKSNHYIYVVDRHGNPVMPSRRPGRIRHLLKEGKAVPISTHPFVVKLKYDIPGRTQPIHLGIDTGRENIGVGASLENGENVFLSDVETKNKAVTKAMSDRRAYRMSRRRHRREKKQRHAHTKKSEMKNGRPAVKGERHTRKTIGRDIQYPGCKNPVTHKVIKGKEARIANRRRDEGWQTPSARQLIQTHMRIVKSVMKFLPVTHITIEMVSFDFQKLANVEIRDWEYSEGPLHGFKSPADYVWSRQNGKCYFCDKKIAVCHHAMHKAKGGSDRVGNLVGLCSECHQKLHSDMSMDKRLQEEFGMPRTRVSVLNSAMPEIDRQMRALCDARGIVYATCTGFDTYEARKRYGIPKDHCTDGYAISLYGRNANNVRLTDSVCMMRRFRKKSGSIIQKLNQRVYKLKGKVVAVNRHKRTDQKEPALDDYMSRYAQTHSEAECRRHFHELKIIPAKRTYTYRKQKLVSPVHIGDTVRYEKRNKTSGITKKA

SEQ ID NO: 13497 - protein, 283 aa, unidentified
  REGION 1..283: note = Human gut metagenome
LLPVTKITVETASFDIQLLKNPNIAGKEYQEGEQLAFWNVREYVLFRDGHVCQHCHGRSKDPVLNVHHLESRRTGGDSPGNLITLCETCHRALHRGEMKLRAKRGQSLRAEAFMGIMRWEVLGRLKTSHPELEVNNTYGYRTKHVRIRNGIAKSHCADAFCIAGNLGAERLGEFFFQKQTRRNNRQIHKLSILKGGIRKRNQAPFEVKGFRLFDKVACKGEEGFIFGRRSSGFFDVRKLDGTRISAGLSCKKLHLLEKRQTYIKEIRKEEALPPLPDGRDLRA

SEQ ID NO: 13498 - protein, 414 aa, unidentified; identical to SEQ ID NO: 2588
  REGION 1..414: note = metagenome

SEQ ID NO: 13499 - protein, 431 aa, Escherichia sp.; identical to SEQ ID NO: 3801

SEQ ID NO: 13500 - protein, 415 aa, unidentified
  REGION 1..415: note = Human gut metagenome
MVYVLANDGQPLMPTERHGKVCRMLKSGMAKVVKKCPFTIQLQYESERNVQPVSLGVDAGSKHIGISATTKTKVLYESDVELRDDIVKLLATRRQLRRSRRSRKTRYRPVRFDNRKRKEGWLAPSIRQKIGSHLTVVANACKILPINQIIVETASFDIQKIKDPEIQGIEYQQGEQMDFWNIREYVLFRDGHTCQCCKGKSKDKVLNVHHIESRKTGGNAPNNLITLCETCHKGYHNGTVTLPKNIKRGMKFKDAAFMGIMRWTFYNTLKEQYEPDIPVHYTYGYITKNTRINHNLPKGHCIDARCISGNPDAVSDGTYYYQKKVRCHNRQIHKQTILKGGIRKSNQAEYLVRGFRLFDKVRYQGREYFIFGRRKSGFFDIRTLSGEKVNKGSINVKRLTFVDTRKNYLTERRTV

SEQ ID NO: 13501 - protein, 502 aa, Flavonifractor sp.; identical to SEQ ID NO: 2616

SEQ ID NO: 13502 - protein, 426 aa, Parasutterella sp.; identical to SEQ ID NO: 3045

SEQ ID NO: 13503 - protein, 458 aa, Scytonema sp.; identical to SEQ ID NO: 6982

SEQ ID NO: 13504 - protein, 472 aa, unidentified
  REGION 1..472: note = Human gut metagenome
LYFLLILLNLLKESSVMTNIYILDINGKPLMPCHNGAFVRCRLKNKEAKVVKRKPFTVQLMYEVKNNYKQDIYLGVDAGYKYIGFSASTSNQELFSGELEQDCGMVERNKERRMYRRQRRSRLRYRKARFNNRKAGKPQGWTAPSLQRKRDTHLRFIMMLSSIMPITDINVEIGLFDPALMKATAEGRTIKGADYQHGEAEGFENMKSYIRYRDSYTCQNPDCKCHKMKKEDREKLKLHVHHIGYYKHDRSSRPGNLITLCELSHTPETHQPGNLLYGWKPKMKSLRETAFMNTVRKEIVDTLKVIYPDKTVRYTYGYKTNLTRRDWHVPKSHHDDAFCIAGQYSLKRAETIYFNQQRRNNRSLEIFHDAKYIDSRDGKRKTGKELYCGRNTRNKNFNKENLHQYRSKKVSKGKRNIRKQHYKYQPNDIVVFEGQKYKIRGSHCKGSRVILDTKKSVSVKKIHILKHCSGIC

SEQ ID NO: 13505 - protein, 279 aa, unidentified
  REGION 1..279: note = Human gut metagenome
VVVETAEFDLHLLKAIADGKPVPQGEDYQKGEMYGHYNVRQYVLWRDNYTCQCCGAHATKKKEVRLHVHHLESRKVGGDAPDNQVTLCESCHEKLHKGLIAEKDFKKRKRRSTRDATFMGIMRKTLMQRLYSELPIPVIETRGYITKATREKLLVLPKSHTNDALAIAQGKRGFNVGYLPEIAQIDKIYTIRPVRHHNRQLHKAAILKGGIRKSNQAGKYVFGYRLFDKVQFNGQDCFIWGRRTTGIFTIKTINGKMIKDGISFKKLKPVEKSTSYLIA

SEQ ID NO: 13506 - protein, 418 aa, unidentified; identical to SEQ ID NO: 6784
  REGION 1..418: note = Human gut metagenome

SEQ ID NO: 13507 - protein, 427 aa, Scytonema sp.
MPKVFLIDTDKKPLDPIHSAQARQLLRNGKAAIFRRFPFTLILKESRPDAPVQPLRLKIDPGAKTTGFALVNDATGEVVLKSELQHRGFAIRDALTSRRQIRRGRRARKTRYRAPRFNNRKRPSYWLPPSLQSRVENIKTWVKRLIKLAGIGAISQELVRFDMQLMLNPDIQGNEYQQGTLAGYETREYLLQKWDRTCVYCGAKDIPLQVEHIHPRAKGGSNRLSNLTLSCEKCNVKKGTKDVKDFLKKDPEKLKRILSQTKKPASDAAAVNTTRFALLQCLKQFGLPVETASGGLTKFNRSSQLLDKQHWIDAACVGKSTPTLNIKGVKPLLIKAIGHGNRQMCITNKFGFPIKHRSNIKFHFGFRTGDMVRATLPTGKFAGTHVGRVVTRATGVFEMVTVNGKISPVRYKYVHKIQRHDGYSYGT

SEQ ID NO: 13508 - protein, 423 aa, Arthrospira sp.; identical to SEQ ID NO: 3350

SEQ ID NO: 13509 - protein, 448 aa, unidentified
  REGION 1..448: note = bioreactor sludge metagenome
VQLAEQALKTLAKRTLPRNGVSQMSNFVFVLDTNKRPLDPVHPGAARHLLNAGKAAVFRKYPFTIILKEACPDVPVQDLELKLDPGSKVTGIAIKQGNKLIFGAELQHRGQQIKDALLSRRQLRRSRRNRKTRYRKARFLNRTRPDGWLAPSLQHRVLTTLTWVRKFMRLAPIASIAQELVRFDVQLISNPEISGVEYQQGELQGYEVREYLLEKWNRKCAYCSVENVSLEIEHIQPKSKGGSDRVSNLALACHPCNQSKGNQDIRDFLADKPDLLSRILKQAKSPLKDAAAVNSTRWALFNALKITGLPVTTGTGGQTKFNRTRLNLPKSHWFDAACVGNVGTLKVLASKPLLIAAKGHGSRQMCGTDKYGFPTRHKSRVQIHKGFQTGDIVTATVTAGKKIGSYVGRVLCRASGSFDINTTAGRVAGISHKYCKPIHKKDGYSYGF

SEQ ID NO: 13510 - protein, 411 aa, unidentified; identical to SEQ ID NO: 2663
  REGION 1..411: note = Human gut metagenome

SEQ ID NO: 13511 - protein, 470 aa, unidentified
  REGION 1..470: note = Human gut metagenome
MSVFVVGLNGCRLMPTSERKARLLLKQGKAFVEQKVPFTIRLNYKIGSTTQLGYLGIDTGSQHIGVSVVREDGTVLHKEEIGLRDSMSKRKLLEAKASLRRGRRYRKTRYRHPKWRPKTKRVYCEVPDRKGRHWQKKKITFTSKRPKGWLPPSLQSKTDHHIRWIKKLQDLLPEGYRLSIELGRFDPARMKNPEIHGDLYQKGPQYDYENVRAYVLDRDRYTCQICKKKGGKLHVHHILYRSHGATDDPQYMVTVCSDCHSAQNHLPGGILYQWMQEQKRFSRGLRDATFMNILRKRLIRAFPEAVFTYGNVTKVDREKLKLPKSHGNDATAIALVKTGITAVKDKESVICIQQVRRKKRSLHEETPRKGRKEPNRTAARNNKNTKAVTVTKRQNKKKVSMTGCLFDRVELNGKKGWISGFTGKSCYVKDADDQYLSTSPKYKQVSLSKLRILHHCGNWIIGAKKTLGKG

SEQ ID NO: 13512 - protein, 412 aa, unidentified; identical to SEQ ID NO: 6276
  REGION 1..412: note = Human gut metagenome

SEQ ID NO: 13513 - protein, 457 aa, unidentified
  REGION 1..457: note = Candidatus Competibacteraceae bacterium
MAVFVLDRHQKPLMPCSEKRARKLLACGRARVHRLMPFSIRLVDRTVNESVLQPVKIKLDPGSKTTGMALVRESETIDDATGEIHTTVHVLNLLELHHRGQQISESLTARRQMRRRRRSKLRYRKPRFLNRGNKSKGWIAPSLQHRIDTVSAWVNRFQRLAPITGIAQELVRFDAQQMENPEISGIEYQQGTLAGFETREYLLNKWVRECAYCGARSVPLQIEHIHPRARGGSNRVANLTLACQPCNQQKGAQEIEVFLAKDPKRLARIQAHAKAPLKDAAAVNSTRWALFNTLKSTGVPVTTGSGGRTKFNRAQLQIPKTHALDAACVGNIEAIQGWKKPTLAIKATGRGSYQRTRLNAYGFPRGYLTRQKRIKGFQTGDMVKAEVTKGKKTGSYLGRVAVRASGSFNPQIAQGVVQGVGYRYCKVIQRADGYGYSQLGTFQKEAELRSARSASPA

SEQ ID NO: 13514 - protein, 520 aa, Nocardiopsis sp.
MATFRAGRKTHRAVLPQRPALESAPADTPRIGNETGRGDHHPVVPGAEHGRGETGTAPPGGSGVTPAPSGAGERGREAHTPHPFVFVLDEHGTPLQPCPPARARKLLAKGRAVVHRRTPFTIRLRGRTAADSRIDGVEIGIDPGSRHTGLAVFTAVAGERRDRYAIRLDHRGPAIRKKMGQRSGYRRRRRSAHLRHRPPRFDDRTRPAGWLAPSLRHRVGTTVSWVGRLSRLAPVRAAHVERVAFDTHALSADQPLEGVEYQHGALHGFEVREYLLATFDRACVYRGATNTPLNLDHVRPRSRGGSDRVSNLVLACVPCDQAKSNRPVEEFMARKPKLLAQTLARAKAPLRDAAAVQSTRWALWRALDSRLPTHVGSGGRTKWNRTRNRLPKSHTLDALAVGEIDTITQTVDTVLVAGCTGRGSYARTRPDRHGFPRLRLPRTKRFFSFATGDLVRAVVPTGKETGTHTGRVAVRSSGSFNVTTAHGTVQGIHHRHLRLLQRADGYTYTTRKEKGVSSRP

SEQ ID NO: 13515 - protein, 371 aa, unidentified
  REGION 1..371: note = Human gut metagenome
MLRTNLWPVSSSGTPRPGSVTGNAVRTGSPPTVQHLVQTHLNIIRKISRYLPVTDIAIEVNRFAFMHMENPKAVGVDFQNGPLKGYDDVKEAIRTQQHGKCLMCKKPIAHFHHIVPRSRGGSDTIQNLAGLCTEFHTKVHTDTAFRKDFDEKKSGQLKKYGALSALNQAVPFICKKLLEEYGEEHVHFCRGLDTSLIRTALGFEKTKKNQMHEVDAYCIGLAALEVNEVETPAFDHTFQIRQFRRQDRSIIHHQTGRSYYQGKEKVAQNRKPGFEQKTTALSQWYKEQVRIHGEKEAEKLRSQLRVEKSCRHYNDMDRFLPGAVFLYEGKRYVLSGRITNGKYLRACGQGMKNFPAAECTFIRHNAGLVFI

SEQ ID NO: 13516 - protein, 512 aa, unidentified
  REGION 1..512: note = Human gut metagenome
MSTVYVLNKDGKPLMPTTRGGHVRYLLKEKKARVVTSKPFTIQLLYETDDVVQPLYLGIDPGRTNIGVAVVKTDGTAVFTAHLETRNKEIPKLMQGRKKARRARRTNGRRCRRQRRAKANGTISKKCVKQTTAQNGSVSKRAKKIGVIKRHLPGCEKKVLCIGIKNKEAKFSNRTRPEGWLTPTANQLLQTHINLIKKIRKFLPVNDVVLEINKFAFMQLDNPNIQKWQYQQGPLYQKASLEEAVSEMQEHHCLFCKKSIVHYHHVVPQSENGSDTIGNIVGLCTKHHDLVHKDTAWQKKLAKKKTGLNKKYGALSVLNQIIPTLTKELSSLFLKHFFVTNGKSTYDYRAAHGVSKDHWLDAYCIACSVLPNDTCDKNINGRVPYKLKQFRRHDRRALHKENMSRVYTLDGKKVATNRHKAIKQTTDSLEEFRQRQPNDVCKLKVKEHHPEYRNPERNFPGCVFLVGKHTHVMQGTSGSHNGKADGYYDTNGNSYSSGKCKFVAKNKGIVFA

SEQ ID NO: 13517 - protein, 413 aa, unidentified
  REGION 1..413: note = Human gut metagenome
MTSYAFVLDANGKQLAPAKEQKAWFLIRKKRAALVSKYPMVIQLKKEIPENEICKDEIRCGIDDGGLHVGIALVQKCKTKNKVVFKGTIEQRNDVKHLMEVRRGYRRYHRYHKRYRPARFDNRKSSKRKKRIAPSILQKRQAIIRVIHWLNKWINITNYWLEDVSIDIRALTDGYKPYRWQYQKSNRLDENIRKAAILRDGGKCMECGKSNCRLEVHHIKPRRRNGSDTLDNLITLCKSCHQKTEGQEELYMDRYFSLLKSSDHKNLNYAQHVMIGKEWLRKQLSSLGVLYLTNGGDTANKRIDWNIEKSHANDAVCITNLQPDTYDMKEWTVKPMRRQSKAKTDNVLGIKHRDLVEYTLKNGETHRGYVTALYPEQKAINFQSPTKHCKKVNARKCKLLWKYSKIYWFENAS

SEQ ID NO: 13518 - protein, 470 aa, unidentified; identical to SEQ ID NO: 2825
  REGION 1..470: note = Human gut metagenome

SEQ ID NO: 13519 - protein, 430 aa, unidentified
  REGION 1..430: note = Human gut metagenome
MPKVYVLNRHGRPLMPCTPAKARHLLDAGKAKVRHRTPFTIQLLYGSTGYTQEVILGVDAGSKTIGLSAATETEELFSAEVKPRNDVVELMSARRQFRRARRNRTTRYRKPRFDNRVRSKHKGWLAPSVEVKIQEHMTAIRRACAILPVSKVVVETAEFDLQLLKAVAEGKPVPQGEDYQKGEMYGHYNVRQYVLWRDSYTCCICGVHGSVRKGVPLHVHHLESRRVGGDAPDNLVTLCTACHDKLHKGIIMAADIKKRKRRSTRDATFMGIMRMTLLRRLREQLPVPVVETRGYITKATRENLLVLPKSHANDALAIAHGPQGFRAEHLPNIRQADRLYTISPVRHHNRQLHKATILKGGVRKTNQAEKYICGFRLYDKVLYNGIECFVWGRRTSGSFLLRQLNGEKVKDGVSYKHLKLLERSQSYLVA

SEQ ID NO: 13520 - protein, 424 aa, Moorena sp.; identical to SEQ ID NO: 9122

SEQ ID NO: 13521 - protein, 416 aa, unidentified
  REGION 1..416: note = Human gut metagenome
MVYVLDKNGQPLMPTDRHRKVRLMLQSGQAKVIKRCPFTIQLNYDSGHQTQEISLGIDAGSKHIGVSTTTKIKVLYEVDVELRNDIVDLLSSRRELRRGRRNRKTRYRQAKFNNRRRGNGWLAPSIRQKIGTHLTVVENICKMLPISRIMVETASFDIQKIKNPDIQGAEYQQGDQLEFWNVREYVLFRDGHICQCCKGKSKDKILNVHHIESRKTGGNAPNNLITLCETCHTGYHKGTVQLPKAIKRGMRFKDAAFMGIMRWAFYEALKQQYEPVGTPVHNTYGYITKHTRIAYNLPKEHYVDARCISGNPEASSNGEYYYQKKVRCHNRQIHKLTVLKGGIRKQNQATYLVKGYRLFDKVSYQGKGYFVFGRRQSGFFDIRTLSGEKVNKGSLSCKKLKFIATRTYYLTERRAV

SEQ ID NO: 13522 - protein, 437 aa, unidentified
  REGION 1..437: note = Wastewater metagenome
MPCSEKRARLLLARGRACVHRLVPFVIRLTDRQLDTCTLQPLRIKLDPGSKTTGLALVRDTEHLNTDTGEIQRGVAVLSLIELVHRGRQISEALTARRQMRRRRRGCLRYRAPRFLNRGNKARGWLAPSLQHRINTTTAWVARFRRWSPVTALSAELVRFDMQRLQNPEISGVEYQQGTLAGYEVREYLLAKWSRKCAYCGVENVPLQIDHIHPKAKGGTNRVSNLTLACGPCNARKSAQSVDAFLAKDPKRLTALLAQAKRPLKDAAAVNATRWALVGALKATGLPVETASGGCTKFNRSRLAIPKTHALDAVCVGAVSVVTNWQKPSLTIKCTGRGSYQRTRLDKYGFPRGYLMREKSVKGFKTGDLVRAIVPTGKKAGRHTGRVAIRKSGSFNIQTLAGVVQGIGYRHCRLLQRADGYGYFFNKAACDTAQKRE

SEQ ID NO: 13523 - protein, 469 aa, Streptomyces sp.; identical to SEQ ID NO: 6877

SEQ ID NO: 13524 - protein, 453 aa, unidentified
  REGION 1..453: note = Human gut metagenome
MSVAVVSKTGMLLMPTSEYRARKPLKSKKAIIHGYHPFTIQLTERETGYIQPVELCMDTGYIHIGTSVKSEKHEYLGEQIDTLTDERQKHDACRMYRRQRRNRKRYRQPRFNNRERDDGWIAPSLEHKKTIHIQAISRICKVMPVTDITLEMGNFDTQVLKAREEGRPLPQGLDYQHGERYSVTTLREAVFLRDGYTCQCCGRTIKDGAILHAHHVIYRSQGGTNRISNLITVCDKCHTPANHKPGGKLYGWKPKVASFKGATYMTTIRWKLYNEVKALFLDIDIHITYGAETKERRRAFDITKSHVNDAFVMGQFHPKHRSKPVCYKKKRRNNRCLEKFYDAKYIDSRDGKKRTGQELFNGRISRNHKKDSENLHQYRRQKISAGKRTIRKQHYAIQPHDIVIFNGEKFETSGCHNNGTRVILLPQKKSVAIKKLNIYRYAGGYFKSAFNQK

SEQ ID NO: 13525 - protein, 529 aa, Moorena sp.; identical to SEQ ID NO: 8480

SEQ ID NO: 13526 - protein, 455 aa, Halomonas sp.; identical to SEQ ID NO: 5795

SEQ ID NO: 13527 - protein, 414 aa, unidentified
  REGION 1..414: note = Human gut metagenome
MPCSPAKARLLLKEKKAIVKRRTPFTIQLTIATGESKQPVSLGVDAGYKHVGFSASTEKAELYASEVELRQDVSDLLSARRALRQSRRNRKTRYRAPRFDNRIRTKRKSWLAPSVENRINAHLSRIEAVLRLLPVTKITVETASFDMQLLKNPDISGKEYQEGEQLGFWNVREYVLFRDGHVCQHCHGRSKDPVLNVHHLESRRTGGDSPGNLITLCETCHKALHRSEITLKTKRGQSFRAEAYMGLMRWEVLNRLKTSHPGLEVHNTYGYRTKYTRIVNGIDKSHCADAFCIAGNLGAERLGEFFFQKQTRRNNRQIHKLSILKGGIRKRNQAPFEVNGFRLFDKVACKGEEGFIFGRRSSGFFDVRKLDGTCISAGISYKKLHLLEKRRTYLTEIRKEEALPPLPEGSGLRA

SEQ ID NO: 13528 - protein, 431 aa, unidentified
  REGION 1..431: note = Human gut metagenome
MPDKVYVISRLGHPLMPCSPAKARHLLDDKKAKVVKRMPFTIRLLYGSTKYIQPIILGVDAGRKTIGLSASTAKGEVFAAEVMPRNDVVENLSTRREFRRARRNRTTRYRKPRSDNRVRSNHERWLAPSVKVKIQEHITSIKRVCTILPISKVVIETAEFDLQLLKAIQEGKTIPEGEDYQKGEMYGSYNVCQYVLWRDNYTCICCGVRGTPKNPVRLHVHHFESRKYGGNAPDNHGTLCDDCHKKFHLGIIADVKLKTRRRQSTRDAAFMGIMRKTLMWRLRTELFIPVAETKGYITKATREKLLVLPKSHTRDALAIAQGRHGFSIKEYAYVEPANHIYTVRPVRHHNRQLHKASILKGGIRKRNQASKYVFGFRLYDKVLYQGKACFVWGRRTSGTLLLRTIDGIKVKDGVSYRNLTLLERSSNYLIA

SEQ ID NO: 13529 - protein, 442 aa, unidentified; identical to SEQ ID NO: 7213
  REGION 1..442: note = Human gut metagenome

SEQ ID NO: 13530 - protein, 426 aa, Anabaena sp.; identical to SEQ ID NO: 9126

SEQ ID NO: 13531 - protein, 537 aa, unidentified
  REGION 1..537: note = Human gut metagenome
MQYVYVVDKHGKALMPTTRYRHVRKLLKSGKAVAICNKPFTTRLKYESSTYTQDLWEGIDTGRQNIGDAVSNEKGENVYLADVRTNNKSIKSNMQDRAGFRRERRRHDRQSKQRKAKHDGTEIQNGDDDTVRTKHSCKSIKISYPTADEPVIHKVIRGKEGKFANRKRPEGWITPSARQVIQITMNEIRQTARILPVNHINLERISFDFQKLENQDIRRWEYGKGVLYGYKTYKNYIWDEQHGKCACCGKPITQYHHIIHRTEGGIDSVKNIIGLCNGCHNKIHASKDAEDKLKGLKEGVRQRYYVGLLNSVIPALIEEVSAYCDEHGIEFTVTDGKTTAETREKYGLSKDHCTDAYAISLADRDVKSVSVSDRIYEKRRFKKKSGNIIAKRNQRIYKFDGKIIAYNRHKATNQKDDSFEEYMTKYAETHTDKECRQHVAQIEIIPAKRTYTYHKQGLVAPCHAGDIVRYEKHNKIKGNTKKDTFVATSVEMNGEGHIKYGDACGSRKIKFCRPIDSGCLQAVHNYQADEYLRKIAE

SEQ ID NO: 13532 - protein, 391 aa, Methanobrevibacter sp.
MLVYVLNKYEKPLMPCKPAKARKLLKNKKAIVINREPFTIKLLYGSSGYKQNISLGVDPGSKIIGLSATTEKKELFASNVELRNDIVNLISTRKEYRKNRRSRKTRYRKPRFDNRRKKEGWIAPSIKNKIDTHLNVIENIYKILPITKLIVETASFDIQKIKNPRISGEEYQKGVQLNFYNIREYILTRDNHICQHCKGKSKDSILNVHHIESKKIGGNSPDNLITLCKTCHMDFHNGKIDLNFKRKSSFRDATFMGFIGQRLYEILKKIYVNVHVTYGYITKNIRIKQGLPKEHYVDARCISGNPNVEPLDYYFYQKKVRRHNRQIHRGNPKKGKRSLNQAPYIVKGFRLYDKVLYNNQECFIFGRRRNGYFLLKRLDGTIIHGTAIIKN

SEQ ID NO: 13533 - protein, 417 aa, unidentified; identical to SEQ ID NO: 5520
  REGION 1..417: note = Human gut metagenome

SEQ ID NO: 13534 - protein, 545 aa, unidentified
  REGION 1..545: note = Human gut metagenome
VQFAWWLCHPKPSDNIEDVKHETALMLLQIKAGTETFGTAPCGSGPKAEGVSPERKAMNTVAVVTNTNKPLMPTSPYRARKLLSSGKAKIVKHRPFTILLVNRSDGNVQEIEYKSDTGYLHVGISVCSEKREFVREQRDLLPDEKEKHNDRRKYRRTRRNRKRYRKARFDNRIGKIRKKEKNEHVWLPPSLEHKVDAQVQLFLRLYQVMPVKRAVFEMGQFDPALMKALEKGESAPQGIDYQMGERYQIATRRAAVFTRDRYACVFCGRSIKDHAILHVHHIGFWKQDRSNRLDNLATCCEQCHTSENHRPGGILYGVEPKLESLASATYMNVVRFELLRRLKEAAPDVEFHISYGAKTSVIRKQRSISKSHTNDAYCLGQYFPKLRAEEIGFQKIRRNDRILQKFYDAEYLDSRDGTTKKGKELTNGRISRNHKKDHENLHQYRGKKLSKGRITIRRGRSSLKPGGLVRFDGEVLTVHGTHRSRKKNKAGHIKVSVNVEFERPSKTGRKSAALSKCQIISRSYNTGWKQIQLRKEEQGRIAAVV

SEQ ID NO: 13535 - protein, 477 aa, unidentified; identical to SEQ ID NO: 2707
  REGION 1..477: note = Human gut metagenome

SEQ ID NO: 13536 - protein, 441 aa, unidentified; identical to SEQ ID NO: 4242
  REGION 1..441: note = Synthetic metagenome

SEQ ID NO: 13537 - protein, 512 aa, unidentified; identical to SEQ ID NO: 5238
  REGION 1..512: note = Human gut metagenome

SEQ ID NO: 13538 - protein, 420 aa, unidentified
  REGION 1..420: note = Human gut metagenome
MQYVYVLNKHGEPLMPCSPGKARLLLKQQKACVVRRTPFTIKLLYGSAGYKQPITLGVDAGSKHVGLSASTEKRELYSEEFTPRSDVVKLLSTRKQNRRSRRYRKTRYRAPRFDNRVHSKHKGWLAPSVEVKIQEHITVIKHICKILPISLVRVETAEFDTQRLKAMLAGKPLPVGTDYQLGEMYDEYNVRQYVLKRDHYTCQCCGTHNTAKKVVKLHVHHLESRKTGGNAPSNLVTLCTTCHKNLHKGRVTLDGKERGKPLRDAAFMGIMRKTLMVRLKEELPIPAQGTYGYITKMRREQNDIKKSHTNDARCISKHPLAEPCSVCYRTKAIRHHNRQTHKANFSKKGIRKRSQMPYLVEGFRLWDKVLYKGQECFVSGRRSSGSFTLKKLDGTSVSKGVTFKKLRLLEPATNYLIERM

SEQ ID NO: 13539 - protein, 407 aa, unidentified
  REGION 1..407: note = Human gut metagenome
MVYVVANDGQPLMPTERHGKVCRMLKSGMAKVIKKCPFTIQLQYESKRNVQPVSLGVDAGSKHIGISATTKTKVLYESDVELRDDIVKLLATRRQLRRSRRNRKTRYRPARFDNRKRKEGWLAPSIRQKMESHLTVVANVCKILPVSRIIVETASFDIQKIKNPDIQGVEYQQGEQMDFWNIREYVFFRDGHTCQCCKGRSKDKILNVHHIESRKTGGNAPNNLITLCETCHKGYHNGTVILPKNIKRGMKFKDAAFMGIMRWAFYNALKEQYEPAIPVSMTYGYLTKNTRIRHNLPKEHHIDARCISGNPDAVSDGTYYYQKKVRCHNRQIHKQTILKGGIRKSNQAEYLVKGYRLFDKVRYHGREYFIFGRRKTGFFDIRTLSGEKVNKGSISVKKLTFADTRKN

SEQ ID NO: 13540 - protein, 451 aa, unidentified
  REGION 1..451: note = Human gut metagenome
MSVAVISKTGERLMPTSEYRARKLLKSGKAVKCSYHPFTIQLTERKTGDAQPIELCMDTGYIHIGISVKSEKHEYLAEQIDTLTNERTRHDACRMYRRQRRGRKRYRQPQFNNRKRDKGWIAPSLEHKKDIHIQAISRINKVMPLTDITMEMGNFDTQVLRAKEEGKPLPQGADYQHGERYGTATLREAVFSRDNYKCQCCGRTISDGAILHVHHIKYRSHGGTNSMVNLATVCDKCHTPKNHKPGGKLYDWKPKLPDFKGTTFMTTIRWQLYSEVKSLFPDINIHITYGAATKEQRRELNIDKSHVNDAFAMGKFHPKHRVNAILYKKKRRNNRCLEKFYDAKYIDSRDGSKKTGQELFNGRINRNHKKDSENLHQYRLQKIKAGKRTIRKQHYSIQPHDIVIYENRKRETLGCHNNGTRVMLLPDKKSVSIKKVKIYKYAGGYFKSAFN

SEQ ID NO: 13541 - protein, 512 aa, unidentified; identical to SEQ ID NO: 12368
  REGION 1..512: note = Human gut metagenome

SEQ ID NO: 13542 - protein, 446 aa, Moorena sp.; identical to SEQ ID NO: 12638

SEQ ID NO: 13543 - protein, 544 aa, Ruminococcus sp.; identical to SEQ ID NO: 2457

SEQ ID NO: 13544 - protein, 279 aa, unidentified
  REGION 1..279: note = Human gut metagenome
VVIETAEFDLQLLKAIEEGKPVPQGEDYQQGEMYGHYNVRQYVLWRDGYTCQCCGAHATKKKEVRLHVHHLESRKVGGDAPDNQVTLCESCHEKLHKGLIAEKDFKKRKRRSTRDATFMGIMRKTLMQRLCSELPIPVIETRGYITKATREKLLVLPKSHTNDALAIAQGKQGFNVGYLPEIAQIDKIYTIRPVRHHNRQLYKATILKGGIRKSNQTEKYVFGYCLFDKVQFNGQDCFIWGRRTTGIFTIKTINGKMIKDGISFKKLKLVEKSTSYLIA

SEQ ID NO: 13545 - protein, 423 aa, unidentified
  REGION 1..423: note = Human gut metagenome
MVYVLNIDGQPLMPTDRHGKVRHLLKDGRAEVVKRCPFTIRLLYDSTHYTQDIVLGVDAGSKHIGLSGTTETKELYASDVELRNDIVDLISTRRQNRRSRRNRKIRYRKARFQNRVSDKKDWLAPSIRQKVDTHMTVVSRVCKILPVTKIIVETASFDIQKIKDPDISGTGYQHGEQLDFWNVREYVLFRDGHTCQCCKGKSKDPVLNVHHIESRKTGGDAPNNLITLCETCHKGYHSGAVQLPKAIHRGMRFKDAAFMGIMRWAFYNKLKEVYEPQDIEVSMTFGYLTKNTRIRHYLPKEHYIDARCISGHPEAIPSNEVFYQKKVRCHNRQIHKNTILKGGVRKRNQAGYLVKGFRLFDKVAYEGREYFIFGRRQSGFFDLRNLSGCKVNKGSLSYRKIGFLEPRQYYLCERRVMDTQGCA

SEQ ID NO: 13546 - protein, 422 aa, unidentified
  REGION 1..422: note = Human oral metagenome
MLVYVLKQNGQPFMPTERFGKVRRLLKEGKAKVVRREPFTIRLLYEPETDVIQECYCGVDTGSKHVGVAVVGNDRVLYQSQTELRSDIKKKMDRRRDFRKARHFRKTRYRKSRFLNRRNSIRKDRLPPSVKHKVQAHIDEIEFCKKILPVLDENIILEVSQFDTTLMKNPSLINEKVKHWGYQQGFNYGYSSRRSAILHRDAYTCQCCGKKNCRLEVHHIKFRSNGGTDDEENLITLCTDCHKGIHAGTVVLNKRPKRSKGLKYATHMSIIRSRLLREYPNAIETFGFVTSENRNHLNLKKDHYIDACVIASGGLEFKSSEIVYYKRRLSKGEYQLTRKACGKEFICRGKILGFKQFDKVEYFGVKCFISSRRNNGIATLVDIFRNPLDFQHLPNGYKNPKMRLLKRISSRKTVVIENDRHL

SEQ ID NO: 13547 - protein, 516 aa, unidentified
  REGION 1..516: note = Desulfobacteraceae sp.
LHRELKTNGGMLPQSRPLEARVADNLQGCGRNGSGHTAAVQQSRGESSTDARVEPSPAFAENGVSRVFVLDKKGNPLMPCHPARARKFLARGRARVHQSFPFTIRLVDRIRESSNVQPVNVKLDPGAKTTGMAVVRQDGGHAQILHLSELTHRGAVIRKKLGQRSNYRRRRRTANLWYRKKRFHNRTRPKGWLPPSLKSRVDNTLSWVKKYQRFCPVTGIVLERVRFDTQKLQNPDISGIAYQQGTLFGYEVKEYLLERFKRTCAYCNGLSKDPVLEIEHFVPRNPSKGDKGSNRISNLAIACKTCNQDSKKNLQPADWISLLSRSRKKIDQVRLQNATRFLEGKRPSLASTAAVNATRNAIFFELRGLGLPVECATGGRTKYNRSRLDIPKTHCLDAACTGQVDSVSGWKQNVFLIKAMGRGSYQRTRVNKYGFPRGTLMAQKTVKGFATGDMVKAVVPSGKKQVTYFGRVAVRKSGSFNIQTNTETVQGISWKYCKIISRQNGYNFASQVSSPT

SEQ ID NO: 13548 - protein, 436 aa, unidentified
  REGION 1..436: note = Human metagenome
MTKTLTTKTTQVCVLDQNGKPLMPTTRLGKVYRLLKTQKAHIASYEPFTIQLDYEPDTHIIQPMTLGVDSGAIHSGYSVANAHREYYSAEVIARDDISKRLSDRHMYRQHRRYRKTRYRKPRFNNRKNKKKGWLPPSLEQKVAVQLNEIDHLHRHFPIQKIIVEVAEFDIQKIKDPNISSIEYQQGTLQGYNIRNYLLEKHNRKCFYCGKTVSKFEVEHMLPKSRGGSNRIDNLTLSCHDCNQKKDTMTAEEFIKQTLPAKKATAKLKQLPNEKRLFEYMAHMNATRWALYNAINEKYPNVKMTYGYITKYNRIQANLPKAHHIDVKCITGFATVPSIDQIVIKIKMRRHNRQLHRATFSKGHARKAACLPTVTFGFQLYDLVCFNNHRYYIKGRRSSGSFKLVSIEGLKNTNRNYKKLTRLAHTNAYLINRYTNL

SEQ ID NO: 13549 - protein, 459 aa, unidentified; identical to SEQ ID NO: 11427
  REGION 1..459: note = Cyanobacteria bacterium UBA11149

SEQ ID NO: 13550 - protein, 414 aa, unidentified; identical to SEQ ID NO: 5510
  REGION 1..414: note = Human gut metagenome

SEQ ID NO: 13551 - protein, 420 aa, unidentified; identical to SEQ ID NO: 11835
  REGION 1..420: note = Human gut metagenome

SEQ ID NO: 13552 - protein, 391 aa, Methanobrevibacter sp.; identical to SEQ ID NO: 13532

SEQ ID NO: 13553 - protein, 518 aa, unidentified; identical to SEQ ID NO: 2751
  REGION 1..518: note = Human gut metagenome

SEQ ID NO: 13554 - protein, 461 aa, unidentified
  REGION 1..461: note = Human gut metagenome
VQPLYLGIDPGRTNIGVAVVKADGTAVFTAHLETRNKEIPKLMKKRKDSRRARRTNGRRCRRQRRAKANGTISKKCVKQATAQNGSASKRAKKIGVIKRHLPGCEKEVLCIGIKNKEAKFNNRTRPAGWLTPTANQLLQTHINLIKKIQKLLPISDVVLEINKFAFMQLDNPNIQKWQYQQGPLYQKANLEETVSEMQEHHCLFCKKKIDHYHHVVPQHKNGSNTIDNIIGLCTQHHDLVHKDATWQKRLAKKKTGLNKKYGALSVLNQIIPALTKELSSLFPKHFFVTNGKSTYDYRAAHGVSKDHWLDAYCIACSVLPNDTCDKTINSRVPYELKQFRRHDRRALNNENMSRVYTFNGKMVATNRHKATEQTTDSLEEFRQRQPNDVCNLKVKEHHPTYRNMNRNYPGSVFLVGNQVHVMQGIAGSKDGEATTYKDTNANSIAAGKCKFVAKNSGILFV

SEQ ID NO: 13555 - protein, 428 aa, unidentified; identical to SEQ ID NO: 7211
  REGION 1..428: note = Human gut metagenome

SEQ ID NO: 13556 - protein, 430 aa, unidentified
  REGION 1..430: note = Human gut metagenome
MVYVLDVSGNPLTPTKRHGKARHLLETGKAVCVKRCPFTIRLTYQNAGPEPEGLSLGVDCGSKHIGLSVSSEEQEYYSSEVELRQDITANLSTRREFRRARRYRKTRYRKPRFLNRTASKKKGWLAPSVRQKVESHLNRIDKAVKMMPIREIKVEVAAFDLQKLQADLKGLKRPKGEEYQQGPQLDFWNVREYVLFRDHHECQCCHGKSGDKVLNVHHLRSRKVGGDAPDNLITLCEYCHGQYHKGELELPESAKKPKPLRDAVFMGIMRWTLYNRLKEIYEPQGIKVKLTYGYITKHTRIENGLEEKSHHLDALCIAGHPKAKRCEEWFLQKKVRCHNRQLHKATIQKGGVRKANQLPAVVKGFRLYDKVLFQNRECFIWGRRKTGYFALKTLDGIMICDGVSSKKLTLLEKRKSYLTERRKQELCNSF

SEQ ID NO: 13557 - protein, 442 aa, unidentified; identical to SEQ ID NO: 7496
  REGION 1..442: note = Human gut metagenome

SEQ ID NO: 13558 - protein, 424 aa, Enterococcus sp.; identical to SEQ ID NO: 4034

SEQ ID NO: 13559 - protein, 456 aa, unidentified
  REGION 1..456: note = Human gut metagenome
MNTCVCVLSNNGERLMPTFRLSKVRRLLKDGKAKIVKHHPFTIQLLYDSKTNTQPIEICEDVGYNYIGISAKSKSREYVSTQYDTLQDEKEHHDDCRKMRRSRRNRLRYRKPRFDNRKRDEGWLAPSLEHKKQLNISLIERYVSVIPITHATVEVGSFDTMLLQSIQKGEAKPEGADYQKGPRYNLATLREAVFYRDNYTCQVCKRKITDGAILHMHHMFYWKGRHGYQLDELVTVCEKCHTPANHQKGGKLYGFGKDKKFANLSGAAFMNAVRWQIVNALYATYGKEFVTITYGAMTKEKRIALQLEKTHNNDAYAMGDYHPARRCKFRHYQKRRRNNRVLEKFYDATYVDTRTGNKAKGKELFNGRISRNHKKDCENLHKYRSKKVSKGRRSIRRQHYAIQPYDTVRFEGKTYITSGCHNKGTRLLIPVNGKSKSVAISKVQVVCHAGAWIQII

SEQ ID NO: 13560 - protein, 428 aa, unidentified; identical to SEQ ID NO: 7211
  REGION 1..428: note = Human gut metagenome

SEQ ID NO: 13561 - protein, 413 aa, unidentified; identical to SEQ ID NO: 10467
  REGION 1..413: note = Human gut metagenome

SEQ ID NO: 13562 - protein, 518 aa, unidentified; identical to SEQ ID NO: 10514
  REGION 1..518: note = Human gut metagenome

SEQ ID NO: 13563 - protein, 440 aa, Moorena sp.; identical to SEQ ID NO: 3187

SEQ ID NO: 13564 - protein, 462 aa, unidentified
  REGION 1..462: note = Human gut metagenome
MSVLVIGRNGRALMPTNPRKARLLLKKKTASVVCRHPFTIQLLYKTGCATQEGSIGIDTGSQHIGVGITCGDKVILKDEHALRSSMEKRSLLATRAVMRRGRRYRKVRYRKPKWRHHTKRMYFEKANRRGQHWRKVKTTTQSPRSKGWLPPSLQSKCDHHFRIIDRYLKYLPDPITRNLVIETGRFDMARMNDPTIHGEMYQRGPMYDAENLRAYIFARDNYQCACCKAKAGTTRKADGTTVKLVAHHILFRSRGATDNPKYIISVCDHCHTTKAHQPGGILYSWMENNKKVARGLRDATFMNILRKRLFARYPQAAFTYGNITAADRKKLRLPKSHANDAVAISLFGKEASTVKNICQTMHYKQIRKSKRSLHEAIPRKGRKNPNTKAVRNKKNTTQVNGFKLWDSVLANGKKLFICSFTGTSAYLIDKNGCYISQPGKTYKQWPLSKLKRLHPNGNWLMA

SEQ ID NO: 13565 - protein, 447 aa, unidentified
  REGION 1..447: note = Human gut metagenome
MVTVQQSTHHLLFSRVFIRMNLFMVYVISQDGKPLMPCSNPIARLLLKQGKAKVKKREPFTIKLTYETTNYVQDLTLGVDTGSGTIGTAVGKDNGDIVYMSEVTVRNDITGKMTQRAKYRRNRRNRKTRYRKSRWLNRANSIKKDRFSPTMQSKFHSHVKEIEYIKSILPITEMVFETGQFDTHLMKNPSLSNPKVKHWGYQKGTNYGFENTKVFVLNRDNYTCQCCKGKHKDSKLEVHHIVFRSQGGSDEESNLITLCHTCHKDLHSGKINPKLSGKVKGNLKYATQMNSIRKQLFRLYPNAIETFGYVTKANRLHLGVDKEHYYDACTIATQGNAFNVKSNLYKEKCVSDGDFQKTKGIRSEQPVVTDKICGFRKFDKVRYFGNDYFIKGRMSTGYAILMDIDGNKIDFSAMPKGYKTPKMVNLKRLEARSTWMITTVEVTPNIA

SEQ ID NO: 13566 - protein, 420 aa, unidentified; identical to SEQ ID NO: 8769
  REGION 1..420: note = Human gut metagenome

SEQ ID NO: 13567 - protein, 431 aa, unidentified
  REGION 1..431: note = Human gut metagenome
MPDKVYVISRLGHPLMPCSPAKARHLLDDKKAKVVKRMPFTIRLLYGSTKYIQPIILGVDAGSKTIGLSASTAKGEVFAAEVMPRNDVVENLSTRREFRRARRNRTTRYRKPRSDNRVRSNHERWLAPSVKVKIQEHITSIKRVCTILPISKVVIETAEFDLQLLKAIQEGKPIPEGEDYQKGEMYGSYNVCQYVLWRDNYTCICCGVRGTPKNPVRLHVHHFESRKYGGNAPDNHGTLCDDCHKKFHLGIITDVKLKTRRRQSTRDAAFMGIMRKTLMWRLRTELFIPVAETKGYITKATREKLLVLPKSHTRDALAIAQGRHGFGIKEYAYVEPANHIYTVRPVRHHNRQLHKASILKGGIRKRNQASKYIFGFRLYDKVLYQGKACFVWGRRTSGTFLLRTIDGIKVKDGVSYRNLTLLERSSNYLIA

SEQ ID NO: 13568 - protein, 419 aa, unidentified; identical to SEQ ID NO: 3670
  REGION 1..419: note = Human gut metagenome

SEQ ID NO: 13569 - protein, 443 aa, Anoxybacillus sp.; identical to SEQ ID NO: 2800

SEQ ID NO: 13570 - protein, 417 aa, unidentified
  REGION 1..417: note = Human gut metagenome
MPCSPAKARLLLKERKAIVKRRTPFTIQLTIATGEAKQPVTLGVDSGYKHIGLSATTEQAELYASEVELRQDITDLLSARLALRRSRRSRKTRYRAPRFDNRVASKRKGWLAPSVENRITAHMSRVEAVMRVLPVTAITVETAAFDTQLLKDPDITGEAYQQGEQLGFWNVREYVLFRDGHVCQHCRGKSKDPILNVHHIESRRTGGDAPNNLITLCETCHKAFHRGEIELKVKRGKSFKAETFMGIMRWPLFERLKKSHPELSVRNTYGYLTKHKRISYGIAKSHCADAYCIADNLGAKRLEGFFFQKQTRKHNRQIHKLSILKGGLRKKNQAPYEVKGLRLFDKVICKGEEAFIFGRRTSGSFDVRRLDGTRISAGINYKKLRLLEPRTTYLTEFRKEAALPPLHECRGFRAEFL

SEQ ID NO: 13571 - protein, 469 aa, Burkholderia sp.; identical to SEQ ID NO: 5751

SEQ ID NO: 13572 - protein, 430 aa, unidentified
  REGION 1..430: note = Human gut metagenome
MPKVYVLNRHGRPLMPCTPAKARHLLDAGKAKVRHRTPFTIQLLYGSTGYTQEVILGVDAGSKTIGLSAATETEELFSAEVKPRNDVVELMSARRQFRRARRNRTTRYRKPRFDNRVRSKHKGWLAPSVEVKIQEHMTAIRRACAILPVSKVVVETAEFDLQLLKAVAEGKPVPQGEDYQKGEMYGHYNVRQYVLWRDSYTCRICGVHGSVRKGVPLHVHHLESRRVGGDAPDNLVTLCTACHDKLHTGIIMAADIKKRKRRSTRDATFMGIMRMTLLRRLREQLPVPVVETRGYITKATRENLLVLPKSHTNDALAIAHGPQGFRAEYLPNIRQADRLYTICPVRHHNRQLHKATILKGGVRKANQAEKYICGFRLYDKVLYNGIECFVWGRRTSGSFLLRQLNGEKVKDGVSYKHLKLLERSQSYLVA

SEQ ID NO: 13573 - protein, 450 aa, Moorena sp.; identical to SEQ ID NO: 4205

SEQ ID NO: 13574 - protein, 557 aa, Blautia sp.; identical to SEQ ID NO: 7395

SEQ ID NO: 13575 - protein, 408 aa, unidentified; identical to SEQ ID NO: 6548
  REGION 1..408: note = Human gut metagenome

SEQ ID NO: 13576 - protein, 426 aa, Parasutterella sp.; identical to SEQ ID NO: 3045

SEQ ID NO: 13577 - protein, 464 aa, unidentified
  REGION 1..464: note = Human gut metagenome
MAISAACVARSSPRAEPMPNSAVPAPRRMAVTSEKSTWMYEFIVIRSVMPCTPAKARHLLDAGKAKVRHRTPFTIQLLYGSTGYTQEVILGVDAGSKTIGLSAATETEELFSAEVKPRNDVVELMSARRQFRRARRSRKTRHRKPRFNNRVRSKHKGWLAPSVEVKIQEHMTAIRRVCVILPISKVVVETAEFDLQLLKAVAEGKPVPQGEDYQKGEMYGHYNVRQYVLWRDSYTCCICGVHGSVRKGVPLHVHHLESRKVGGDAPDNLVTLCTACHDKLHKGIIMAADIKKRKRRSTRDATFMGIMRMTLLRRLREQLPVPVVETRGYITKATRENLLVLPKSHANDALAIAHGPQGFRAEHLPNIRQADRLYTIRPVRHHNRQLHKATILKGGVRKANQAETYICGFRLYDKVLYNGIECFVWGRRTKGTFLLKQLNGEKVKDGVSYKHLKLLERSQSYLVA

SEQ ID NO: 13578 - protein, 442 aa, unidentified
  REGION 1..442: note = metagenome
MSTSVFVLDKKHRPLMPCRPARARRLLRAGRARVVKRFPFVIRLVDRTVEQSEVQPVLIKLDPGSRETGAAVVRDDEKKRHHALAFFVIKHRGGAIRDALKARSAFRRRRRSQNFRCRSPRFLNRVKPKGWLPPSLRHRVETTLSFVRRMCRYLPVSGIATELVKFDSQKLQNPEGSGGKYQQGTLFEYEVREYLLEKFGRKCVYCGAEGVPLNIDHVVPRAKGGSNRVSNLVLACVSCNQKKGARSLEDFLKGKPEVLARVRRELKTPLRDAAAVNATRWVLFNELKATGLPVETGSGALTKLNRHAFGVEKEHWLDALCVGRLNGVVTRKGLNVLEIRCMGRGSRQRTRLTKYGFPRGYLMRQKCVHGFATGDMVEANVPKGKKAGLWRGRVAVRVSGSFNIQTPKGVIQGVGWKHCRLISHNDGYGYAWLGHAPHSSPA

SEQ ID NO: 13579 - protein, 408 aa, unidentified; identical to SEQ ID NO: 4810
  REGION 1..408: note = Human gut metagenome

SEQ ID NO: 13580 - protein, 425 aa, Paraburkholderia hospita; identical to SEQ ID NO: 3655

SEQ ID NO: 13581 - protein, 415 aa, unidentified
  REGION 1..415: note = Human gut metagenome
MENRIEYCFVVDKNNRPLTPTKVNKGWYLVRKSRAKLKSKYPMVIQLEKEVKSDEDDESHIVCGIDDGSAHVGLAIVQKCPTKNKVVFKGTIEQRQDVKHLMDVRRGHRRYHRYHKRYRQARFNNRSSSKRTCRLAPSIKQKKDAILRVLYQLNKWVNIQEYHLEDVCIDIRALTDDYKPYRWQYQKSNRLDENLRKATILRDECRCQECGKSNCVLEVHHIRARKYGGADTIGNLITLCSGCHQKTEGRERDFEDRYFNMIKSKPKRFDYAMHVMQGKTYLREKISELGSLHLTNGGETANKRIEWNVEKSHGNDAICVTDCIPDNCDVKEWIIKPMRRKSKAKTNNLLGIRHRDLVSYTYKNGETHTGYVTALYPEQLVLNFQSKTKHCKKVNARKCRLLWKFNKIYWLEQCV

SEQ ID NO: 13582 - protein, 512 aa, unidentified; identical to SEQ ID NO: 5549
  REGION 1..512: note = Human gut metagenome

SEQ ID NO: 13583 - protein, 420 aa, unidentified; identical to SEQ ID NO: 3685
  REGION 1..420: note = Human gut metagenome

SEQ ID NO: 13584 - protein, 401 aa, unidentified
  REGION 1..401: note = Human gut metagenome
LNKRGKPLMPCSPAKARLLLKEKKAIVVRRTPFTIQLTIATGESKQPVSLGVDAGYKHVGLSASIEKAELYASEVELRKDITDLLSARRALRQSRRNRKTRYRAPRFDNRIRTKRKGWLAPSVENRINAHLSRIEAVLRLLPITKITVETASFDMQRLKNPDISGKEYQEGEQLGFWNVREYVLFRDGHVCRHCHGRSKDPVLNVHHLESRRTGSDSPDNLITLCETCHKALHRGEITLKAKRGQSFRAQAFMGIMRREVLNRLKASYPELKVHETYGYLTKHARIANGIVKSHGADAFCIAGNLGAERLGEFFFQKQTRRNNRQIHKLSILKGGIRSAIRHPLRPKASVFLIRLPAREKKASFSAVDHPGLLMYESSTAPAFQPASAARSCVCWRRDGPI

SEQ ID NO: 13585 - protein, 445 aa, Clostridium sp.
LIKRGVPLMVYVLSKEGKPLMPTNRYAKVRVLLKSKKAVVVNSKPFTIKLLYNTKSFTQPITLGIDSGYLNIGFSAITKEKELIVGEVKLLKGMSERLKEKAMYRRQRRSRLRYRKPRFDNRKRSKDWLAPSIQHKYDSHIRFIDKLKKLLPITNIIIEVANFDAHKLKDPSIEGADYQNGEQKDFFNLREYILHRDGHKCQNPNCKNKNAESILQVHHIGFWKQNRSDRPGNLITLCNKCHTPKNHKKNGFLYGWQPKVKSFKEATFMSMIRWRLVNTLDCNHTYGYITKSNRIALKLEKTHYNDAFCIAGGSSQSRVNPLIFEQIKRNSRSLEKFYDAKVIDIRTNTKVSGLELFNGRRTRNKNLNSENLRKYRGVKVSKGQRRIRTKRYFYQPGDLVKYEDKVYTVKGTQNKGKYIALKELKKVPKVELLEPYKFRKGLVCA

SEQ ID NO: 13586 - protein, 423 aa, unidentified
  REGION 1..423: note = metagenome
VWNKRRKPLMPCSPAKARHLLKEKKAAVVRRTPFTIQLTIATGESKQPVTLGVDAGYKHVGLSASTEKAELYASEVELRQDVSDLLSARRALRQSRRNRKTRYRAPRFDNRIRTKRKSWLAPSVENRINAHLSRIEAVLRLLPVTKITVETASFDMQLLKNPDISGKEYQEGEQLGFWNVREYVLFRDGHVCQHCHGRSKDPVLNVHHLESRRTGGDSPGNLITLCETCHKALHRSEITLKTKRGQSFRAEAYMGLMRWEVLNRLKTSHPGLEVHNTYGYRTKYTRIVNGIDKSHCADAFCIAGNLGAERLCEFFFKKQTRRNNRQIHKLSILKGGIRKRNQAPFEAKGFRLFDKVACKGEEGFIFGRRSSGFFEVRKLDGTCISAGISYKKLHLLEKRRTYLTEIRKEEALPPLPEGSGLRA

SEQ ID NO: 13587 - protein, 524 aa, unidentified
  REGION 1..524: note = Human gut metagenome
MEILRIDWKDICPTGRSGLPQKELFMRPVYVLDMNGKPLMPTCRFGKVRRMLKSDEAKVVDTLPFTIQLDRPTKTHVVQSVTLGCDPGRTNIGLAAVRSDGTDLYRTHCETRNKEVVDLMDTRRAARRASRRGERLARKRLAAKHETATTFPDGRKLPGYEKPIMLKNIINTEARFNNRVRPAGWLTPTATQLLRTHLNLIKRISRILPVSDIALEINKFAFMQLDEPDKNKWNIDFQHGPLYGTGGLKAAVRQLQNDTCLLCQENVIEHFHHLIPRSKRGDNTINNIAGLCQRCHEAVHKSADTAEKLSTLKKGQTKRYGGTSVLNQIIPKLVEELGKTYHEHLHLTYGWQTKEFRTKHKLEKTHDTDAYCIAAGTMQTVNPNIWTDVYEIKQFRRHNRANIHHQTERTYKLNGQTVARNRRKRTDQKTDSLAEWFENTVKQYGQQKAEHLRAGLKVRKSTRYYNFKDRVMPGAVFQYEGNRYVVTGQLSGGQYYRAYGKGNQNFPAKKIRIISLNRGLVYVA

SEQ ID NO: 13588 - protein, 456 aa, unidentified
  REGION 1..456: note = Marine metagenome
MAIFVLDKKKQPLMPCSEKRARLLLQRGRAVVHKRYPFTIRLKDRVGGSTQPLSLGIDPGSKTTGLALIREPDSQQRHVLCLFELIHRGYQIKKALQQRAAFRRRRRSANLRYRAPRFNNRTKPKGWLAPSLQHRVDTVTAWVNRLSRLAPVTAISQELVRFDTQKLDNPEISGVEYQQGTLLGYEVREYLLEKWGRECAYCGTADTPLEIEHVIPRSRGGSNRVSNLTLSCHPCNQSKDALSLVDFFATDKGLKKRLKANGHTANARLERVQRQLKQPLRDASAINATRWALFNALKATSLPVAVGTGGRTKYNRQRLGIPKTHALDAACVGAFDALHAWQVPTLTIKAMGRGSYQRTRLTKHGFPRGYLMRQKQVHGFQTGDMVRAMVPTGKKAGTHTGRVAVRKTGSFNIQTEQGAVQGISHKYCTLIQRGDGYGYHFTPFTHLTGGAGQAVA

SEQ ID NO: 13589 - protein, 414 aa, unidentified; identical to SEQ ID NO: 2588
  REGION 1..414: note = Human gut metagenome

SEQ ID NO: 13590 - protein, 413 aa, unidentified; identical to SEQ ID NO: 11784
  REGION 1..413: note = Human gut metagenome

SEQ ID NO: 13591 - protein, 512 aa, unidentified
  REGION 1..512: note = Human gut metagenome
MSTVYVLNKNGKPLMPTTRCGHIRYLLKEKKARVVASKPFTIQLLYETDDVVQPLYLGIDPGRSNIGVAVVKTDGMAVFTAHLETRNKEIPKLMKKRKDSRRARRTNGRRCRRQRRAKANGTISKKCVKQTTAQNGSVSKRAKEIGVIKRHLPGCEKDVLCIGIKNKEAKFNNRTRPTGWLTPTANQLLQTHINLVKKIQKFLPISDVVLEVNKFAFMQLDNPNIQKWQYQKGPLYQKESLKSAVSEMQEHHCLFCKKKIDHYHHVVPQHKNGSNTIDNIVGLCTQHHDLVHKDATWQKRLAKKKTGLNKKYGALSVLNQIIPALTKELSSLFPKHFFVTNGKSTYDYRAAHGVSKDHWLDAYCIACSVLPNDTCDKTINSRVPYELKQFRRHDRRALNNENMSRVYTFNGKMVAANRHKATEQTTDSLEEFRQRQPNDVCNLKVKEHHPTYRNMSRNYPGSIFLVEKQVHIMQGIAGSKDGKATTYKDTNANSIAAGKCKFVAKNSGILFV

SEQ ID NO: 13592 - protein, 434 aa, Anoxybacillus sp.; identical to SEQ ID NO: 10651

SEQ ID NO: 13593 - protein, 414 aa, unidentified
  REGION 1..414: note = Human gut metagenome
MPCSPAKARLLLKEKKAIVVRRTPFTIQLTIATGESKQPVSLGVDAGYKHVGLSASTEKAELYASEVELRKDITDLLSARRALRQSRRNRKTRYRAPRFDNRIRTKRKGWLAPSVENRINAHLSRIEAVLRLLPITKITVETASFDMQRLKNPDISGKEYQEGEQLGFWNVREYVLFRDGHVCRHCHGRSKDPVLNVHHLESRRTGSDSPDNLITLCETCHKALHRGEITLKAKRGQSFRAQAFMGIMRREVLNRLKASYPELKVHETYGYLTKHARIANGIVKSHGADAFCIAGNLGAERLGEFFFQKQTRRNNRQIHKLSILKGGIRKRNQAPFEAKGFRLFDKVACQGEEGFIFGRRSSGSFDVRKLDGTRISAGISCKKLRLLERRRTYLTEIRKEEALPPLPEGRGLRA

SEQ ID NO: 13594 - protein, 465 aa, unidentified
  REGION 1..465: note = Human gut metagenome
MSTCVCVLSNSGERLMPTFRLGKVRRLLKDGKAKIVKHHPFTIQLLYDSKTNTQPIEICEDVGYNYVGISVKSESHEYVSAQYDTLQDEKEHHDDCRKMRRSRRNRLRYRKPRFDNRKRGESWLAPSLRHKKELNVNVVKMYCAVMPITHATVEVGSFDTMLVKAIQEGKAVPEGADYQKGPRYNLATLREAVFYRDNYVCKVCGRKATEGAILHVHHMLYWKGRHGNSLSELITVCEKCHTPANHQKSGKLYGFGENVKFADLSGAAFMNTVRWQIVNVLYAAFGKPFVTFTYGAMTKEKRIALHLEKSHNNDAYAMGSFHPVNRCAFEHYEKVKRNNRILEKFYDSQYIDIRTGEIATGKELFNGRISRSHKKDSENLHKYRGKRICKGHRALRRKKVALNPGDLVSLNGEILVVHGTHTKKNGSVNVEFKTPSRGGKKSASLKKLKIVKTTDSMHSAWEKIS

SEQ ID NO: 13595 - protein, 356 aa, unidentified
  REGION 1..356: note = Human gut metagenome
MHMNDLKSMCKILPINHVTLERVAFDFQKLENENIKTWEYGKGKLYGYDSPEEYIHDVQDGKCLVCGKPHIDYLHHIIPRSKGGSDKVSNIAGLCYDCHYGPMGVHNCQNTQDRLPELKSEANKQYKVSLLNSVMPVLIEEMDKFCKANSIMFSICEGHDTAKVRDMYDLQKDHCIDGFAISLVDRNVKSVDVMPDRIYQKQRYKKKSKNIIQKRNCREYYDGKKLVAVNRHKGTDQKADSLEEYMNTYAETHTTDECKKHFDSLVVKPARRTYTFHKEWRICPFHIGDKVRYEKKNKIKGNTKVETFICESIHFYKDKNKAKVEHNKTKSKRMKFCRVLEAGCTPYIDYRKLALM

SEQ ID NO: 13596 - protein, 404 aa, unidentified
  REGION 1..404: note = Soda lake metagenome
MSKKVYVQDKNGKALDPTTSIRARKLLSKGRAEVVQREPFTIKILDRKKKSSYTKDVTLGIDAGYKEVGFSVINEDEELISGVLELRNDIPKKLEQKANYRRNRRHRNTRYRQPRFDNRKKSKPKGWLAPSIKHKMNSHIKLVNKLKEILPISKVIVEVAQFNTQKMQNPEIEGVEYQQGTLQGYNVRNYLLEKFNRQCAYCGKEDVPLEVEHIIPKSRGGSNRVDNLTISCHNCNQEKDSQTAKEFGYPNVQKQAKQTLKSTAFMNIVRWKIVNKLDCDYTFGHITKKNRIEQDLEKTHYNDAFIIANGKNQKRCKPIKAIINRRNNRSLQTNRKTYGRSVRKQKYLLSPGDLVKYEGKVCEVKGMFNYGKWVRMKDSDGNTVNSNVKDVELVKYRKGLCFVS

SEQ ID NO: 13597 - protein, 268 aa, Eubacterium hallii; identical to SEQ ID NO: 7943

SEQ ID NO: 13598 - protein, 536 aa, Anaerostipes sp.; identical to SEQ ID NO: 4526

SEQ ID NO: 13599 - protein, 419 aa, Geobacillus sp.
LFVYIINKHGKPLMPCSPRKARLLLKQKKAKVVRRTPFTIQLLYGSSGYKQPVSLGVDMGTRHVGISATTKKDVLFEAEAQLRTDIVELLAIRRQFRRSRRNRKTRYREARFLNRRKPEGWLPPSIQHKINSHIKLIDLVHNILPVTSVTIEVAAFDTQKLKNLNIRGVEYQQGEQIGFWNVREYVLYRDNHTCQYCKGKKKDPVLQVHHIESRKTGGDSPDNLVTLCKTCHHEIHEKGLEHIFQRKRPPMRDASQMTAMRWAMFSRIREKYSHANITYGYITKCIRIANGLSKSHMVDARCISGNPLAKPSGTVYLLKFVRKNNRQLHKATILKGGKRKSNKAPRFVKGFQLFDKVVYERKECFIFGRRSSGYFDLRLLDGTKVHASASWKKLKRVEHASTLLIERRKGDSSPTFALA

SEQ ID NO: 13600 - protein, 417 aa, unidentified
  REGION 1..417: note = Human gut metagenome
MIYVRSKEGSVLMPTERCGKIGYLLRHGKAHVVSRVPFVVQLDYDSTTYTQDVSLGIDAGSKHIGVSASSEKKEMLAAQVELRSDIVNLLSTRRELRQTRRNRKTRYRKARFDNRKKKDGWLAPSVEQKIESHLKVIRLVHKILPITKTTIEVAQFDAQKIKNPYIKGDEYQQGEQMGFWNVREYVLARDGHKCVHCKGKSKDPILNVHHLESRKAGGNSPSNLVTLCETCHKAYHRGEFDLKIKRGSSLRDAAVMNIMRWAVYERAKAEFGNVHLTYGYITKHTRIENGIAKTHAADAFCIAKNVHAMRLSSFFMCRCVPRHTRALHVANPKKCGIRRNTIASHKIGKSNFQRFDMVRWMGKECFIFGSTHGRPVLRDIDGLQVANQPSVNIKTIKFLKRLKNNILMEEKNFRRLN

SEQ ID NO: 13601 - protein, 552 aa, unidentified
  REGION 1..552: note = gut metagenome
MTSCTCTVFPACNHAKASSSQGKHNLLLRQERFIVKEVANMSTVYVLNKDGKPLMPTTRGGHVRHLLKEQKARVVRAKPFTIQLLYETNDVVQPLYLGIDPGRTNIGVAVVKANGTAVFTAHLETRNKEVPKLMQDRKKARRARRTNGRRCRRQRRAKANGTISKKCVKQDTAQSKNPSKRAKEIGIIKRRLPGYKKDVLCIGIKNKEAKYTNRTRPEGWLTPTANQLLQTHINLVRKMQKFLPISDVVLEVNKFAFMRLDNPDIQKWQYQQGPLYQKGSLENAVSEMQEHHCLFCDKPIDHYHHVVPQSENGSNTIANIVGLCAEHHNLVHKDAAWQKKLAEEKVGLNKKYGALSVLNQIIPALTNKLSVLFPKHFFVTAGKSTHDYRATHGVSKDHWLDAYCIACSVLPSDVCDSNINNHMPYELKQFRRHARRALNNENMNRVYTLNDKAVAINRHKATEQEAASLEEFRKEHPNDVCKLKVKEHHPTYRNMNRNYPGSIFLVGKHVHIMQGIAGSKDGKATTYKDSNANSITASKCKFVAKNSGILFV

SEQ ID NO: 13602 - protein, 320 aa, unidentified
  REGION 1..320: note = Human gut metagenome
RAPRFDNRIRTKRKGWLAPSVENRINAHLSRIEAVLRLLPVTKITVETASFDLQLLKNPDISGKEYQEGEQLGFWNIREYVLCRDGHVCQHCYGRSKDPVLNVHHLESRRTGGDSPGNLITLCETCHKALHRGEITLKAKRGQSFRAEAFMGIMRWEVLNRLKASHPELEVNNTYGYRTKHARIANDIAKSHCADAFCIAGNLGAERLGEFLFQKQTRRNNRQIHKLSILKGGIRKRNQVPFEVKGFRLFDKVACKGEEGFVFGRRSSGYFDVRKLDGTRISTGISYKKLRLLEKRQTYLTEIRKEEALPPLPEGRGLRA

SEQ ID NO: 13603 - protein, 417 aa, unidentified
  REGION 1..417: note = Human gut metagenome
MQLVYVLNKDGLPLMPTHKLGKVRHLLKDGKAKVVKRNPFTIQLNYKCDNYIQPITLGVDAGSKHIGLSASTKKQELYCSDVELRNDVVELLSTRRENRRTRRNHLRYRPARFDNRKKEDSWLAPSIRQKIDSHLKVIEEVHKILPISQTIVEVASFDTQLLKALLEGKTISGIDYQQGEMLGYNTREYVLYRDNHTCQHCHGKSKDKVLEVHHLETRKTGGNAPSNLIALCKTCHNKYHNGEIILKQKRGAKYDDASFMGIMRWTFYNKLKEIYPNVSMTYGYITKYNRINYGIAKDHYNDAYCISQNFKAKPLDTIIYQKKVRCHNRQIHKANFLKSGIKKLNQAPYIVKDFRLFDKVRYQDEECFIFGRRSSGYFDIRKLDGTIIHRSASYKKLELLEARKSYLQEERSRQFLS

SEQ ID NO: 13604 - protein, 468 aa, unidentified; identical to SEQ ID NO: 3693
  REGION 1..468: note = Human gut metagenome

SEQ ID NO: 13605 - protein, 434 aa, unidentified; identical to SEQ ID NO: 5659
  REGION 1..434: note = Fermentation metagenome

SEQ ID NO: 13606 - protein, 406 aa, unidentified
  REGION 1..406: note = Human gut metagenome
MVYVQDIDSKPMMPTTRHGKVRRLLKDNKAVVVNTCPFTIKLTYKTSDYKQEIVLGVDAGTKHVGLSATTKSKELYSGEVILRNDVVELLSTRRESRRARRNRLRYRKPRFENRVKSKRLGWVAPSVRHRIDAHIRVIDNVCSILPISRIIIEVAQFDTQKINNPNISGNEYQKGDQLGFWNVREYVLARDGHKCQHCKGKSKDSILNIHHVESRKTGGDSPSNLITLCETCHKEYHKGNIDLKVKRGKSLRDAAVMGIMKWKLYDELKSKYDNVSMTFGYITKYNRIKYGIEKSHTSDAFVISRSFNAKRIERQYLKRLIRRHNRQIHKMKILKGGKKKNNQAPFEVFGFRLFDKVLYNNEICFIYGRRKSGCFDIRDFDGKNSKNVTYKKLKLIRGKRYPIILK

SEQ ID NO: 13607 - protein, 475 aa, Blautia sp.; identical to SEQ ID NO: 4128

SEQ ID NO: 13608 - protein, 371 aa, Methanosarcina sp.
LNGPTVVWLAQIHHKTNIKSNIDSRRAMRRTRRNRNTRYRKPKFNNRGRKEGWLPPSLQSRVDNIKNWVIKLQRLCSLTHISYENVKFDTQLMQNPEISGIEYQQGELQGYEIREYLLEKWDRKCAYCGAENISLEIEHIIPKSRGGTSRISNLTLACHACNQVKGDMTAEEFGYPDIQKQAKKPLKDAALVTATRWKVYNVLSETGLNIECGTGARTKMNRILLNLPKNHHFDAVCVGTSTPNDIIFRTNSVLHIKAKGRGSHCRTNLNKYGFPRGYLARQKSFFGFQTGDIVKAIVPKGKHQGTWIGAVACRKTGYFDIKNKEGVKAAQGINHKYCKMLSRVDGYEYASEHVGVDGIPLMTEVTSILPY

SEQ ID NO: 13609 - protein, 456 aa, Halomonas sp.; identical to SEQ ID NO: 2773

SEQ ID NO: 13610 - protein, 426 aa, Anoxybacillus sp.
MVFVLDTNKRPLAPCHEAVARKLLKQGKAAIYRRFPFTIILKKSVDESEIKATYRLKIDYGSRHTGLAILRGQEVVWLGQLDHRTDIKERIDKRRAFRRARRNRKTRYRKPRFLNRKRKEGWLPSSLESRVQNIQTWVNRLKKLCPIGYISYENAKFDTQLMRNPEINGVEYQQGTLQGYEVREYLLEKFGRKCCYCGKENVPLEVEHIIPKSRGGTDRVDNLCLACHDCNQRKGSKTAEEFGYPHIQKQVKESLKDASAINSTRWKAYEVLKQTGLDVECGTGARTKMNRIRLDLPKTHYFDACCVGESTTNHLYFKTKEVLFIKAKGRGSRSRTNLDRYGFPRGYLARQKFFFVFQTGDMVKAVVPRGKYQGVWFGEVACRKTGSFDIKGKDGKRIAQGINYRYVQVIQRFDGYTYRREGMNIA

SEQ ID NO: 13611 - protein, 428 aa, Symploca sp.
VSKVFVLDTNKQPLNPIHPGRARMLLSQGKAAVFRRYPFTLILKQKASKLTVEPLTIKIDPGAKTTGLALVNDARGEVVWAGELQHRGFQIRDTLTSRRQLRRSRRNRKTRYRKSRFLNRTRTKGWLSPSLSSRVANILTWVKRLSSLCQITAISQELVRFDTQKMEDADIRGVGYQQGTLAGYEVREFLLEKWNRTCAYCGAKDTKLEIEHIQPRSKDGSNRVSNLCLACVPCNQKKGSQDIKDFLKGKPNLLKRILAQAKRPLADTAAVNATRWNLYKNLKEIGLPVEVGTGGRTKYNRTIRGLDKTHYWDAACVGASTPEQLITSGVKPLLIAAKGHGTRQQCRSDKFGFPSRYCSRTKFHKGFQTGDIVKAIVTSGKKIGTYVGRVATRATGSFNISTTDGLVQGISHKYCTHIHKKDGYSYAT

SEQ ID NO: 13612 - protein, 505 aa, Ruminococcus sp.
MPYIYVLAPDGHPLMPTRRRRHVKKLLNSGKARIAAHIPFTIQLKYQTPEICQPLTLGIDPGRTNIGCAAIESKGRLVYSAVCETRNKEISKLMDERRQHRRASRNGERKRRQRRARKYGTMLQAGCVMRRLPHYDTEIMCRWITNTEARFCNRKRPVGWLTPTVEQLVRTHVNLFRKVSKILPITDAAIEINRFAFARMEDPSITGLDFQNGPLKGYTDVKAAVADQQKGLCLLCGRAKISRYHHIIPRYRNGSESLDNRAGLCDSCHEKVHKDVEAAGRLAAKKQGMMKKYHALSALNQAIPYICSRLSEAISPEHLYFTTGRDTSEAREGLSIRKDWKASPCHDADAYLIACNGMGITPESVDFKNSYRIKQYRRHDRQLIHAQRERAYRLDGKTVARNRRKRTEQQGDSLHEWYLKTKALIGRAGARRLQKQMKVAPSTRYYKNPKRLMPGTVFIARGKRYVICGQLSNGMYLRAEGCGTENFPIRDCRILRQNGGLVYVA

SEQ ID NO: 13613 - protein, 431 aa, Escherichia sp.; identical to SEQ ID NO: 3801

SEQ ID NO: 13614 - protein, 408 aa, unidentified
  REGION 1..408: note = Human gut metagenome
MVYVQDINGKPMMPTTRHGKVRRLLKSNKAIVVNLCPFTIKLTYVTSDYKQEIVLGVDAGTKHVGLSATTKSKELYSSEVILRNDIVDLLSTRRESRKVRRNRLRYRKPRFDNRVKSKRPGWIAPSVKYKVDAHIRVIGNVCSILPISRIVIEVAQFDTQKINNPNISGKEYQEGDQLGFWNVREYVLARDGHKCQYCKGKSKDNILNVHHIESRKTGGDSPSNLITLCETCHKEYHKGNIDLKIRRGKSLRDAAVMGIMKWRLYEELRSKYGIVSMTFGYVTKYNRINHGIEKSHVSDAFVISKNFNAIRLGYYYKVRLVRRHNRQIHKQKIQKGGIKRLNQSPFEVFGFRLFDRVMFENSYYFIFGRRKTGSFNIRDIDGKNQKNVTYKKFKLSRCKRFMIQKEMN

SEQ ID NO: 13615 - protein, 438 aa, Petrotoga sp.; identical to SEQ ID NO: 8698

SEQ ID NO: 13616 - protein, 431 aa, unidentified; identical to SEQ ID NO: 6230
  REGION 1..431: note = Human gut metagenome

SEQ ID NO: 13617 - protein, 457 aa, Moorena sp.
MSVAVISKTGMRLMPTNEYRARHLLKAGKAVIEQYRPIFTIRLTEREEGETQPIEYASDTGYQHVGVSIKSEKHEFVHAQYDMLGNETERHNDCRKYRRARRNRLRYRKPRFDNRKPKMAKGEALAPSLQHRVDNQTRLFDACCRIMPITTATFEMGKFDIQLLQAQADGRPLPHGTDYQHGSRYLYQTERMAVFGRDHYTCQICGRSIQDGAILHTHHIGFWMMPPYRSNRISNLLTVCEKCHTAKNHKPGGKLWGIHPKTSNLAGASYMSSVRWRMYYALVLAHPEVKIHIQYGAKTAAVRKERHLAKTHANDAYCIGSFHPLHRCKEVLFIKKRRNNRILAKFYDAKYIDIRDSSKKSGAQLSCGRTNRSESRRTEKNERICRGQKCSKGRVSVRRQHYAFQPGDTVCWKSAGYIVKGTHCNGTRVLLNTGKSVKLADLHITKRQGGWSVSSHE

SEQ ID NO: 13618 - protein, 408 aa, unidentified
  REGION 1..408: note = Marine sediment metagenome
LVPVYVINKHGKPLMPCGPRKARVLLKQGKAKVFRYVPFTIQLLHGSSGYRQKIYAGRDRGLTQGIIACREDGRVLLRFQVTGRIDISELLYWRACLRRSRRNRKTGYRPCRNKNRKRPEGWLAPSVAHLWYEHQKTRHLVESTLPVTAWAEEVNKFDTRRMWDPEVKGKGYQEGPLKGKKNVRQYVLERDSYRCVLCGNPEDLETHHIVWRFRGGSDRPKNMVTLCKKCHDKVTAGKIEIKVLVKSYRWPARLNALNPLFNALDAVKITPGKVKKARTELSLGKEHWADAAALVFAAFGVKPDIENLPLLLQGRFVRTKNRQLHRTNPSKGGKRAKAQGNRYLINKSGVRFMRNDLVEYKGATGYVSSLRSSGSVRVCDWQGKELINVSVNKLKKLQNRDSIIWEVS

SEQ ID NO: 13619 - protein, 428 aa, unidentified; identical to SEQ ID NO: 8932
  REGION 1..428: note = Human gut metagenome

SEQ ID NO: 13620 - protein, 442 aa, unidentified
  REGION 1..442: note = Human gut metagenome
MSTSVFVLDKKHRPLMPCRPARARRLLRAGRARVVKRFPFVIRLVDRTVEQSEVQPVLIKLDPGSRETGAAVVRDDEKKRHHALAFFVIKHRGGAIRDALKARSAFRRRRRSQNFRCRSPRFLNRVKPKGWLPPSLRHRVETTLSFVRRMCRYLPVSGIATELVKFDSQKLQNPEVSGVKYQQGTLFEYEVREYLLEKFGRKCVYCGAEGVPLNIDHVVPRAKGGSNRVSNLVLACVSCNQKKGARSLEDFLKGKPEVLARVRRELKTPLRDAAAVNATRWVLFNELKATGLPVETGSGALTKFNRHAFGVEKEHWLDALCVGRLNGAVTRKGLNVLEIRCMGRGSRQRTRLTKYGFPRGYLMRQKCVHGFATGDMVEANVPKGKKAGLWRGRVAVRVSGSFNIQTPKGVIQGVGWKHCRLISHNDGYGYAWLGHAPHSSPA

SEQ ID NO: 13621 - protein, 453 aa, unidentified; identical to SEQ ID NO: 6204
  REGION 1..453: note = Human gut metagenome

SEQ ID NO: 13622 - protein, 434 aa, Lactobacillus sp.; identical to SEQ ID NO: 8535

SEQ ID NO: 13623 - protein, 413 aa, unidentified; identical to SEQ ID NO: 3476
  REGION 1..413: note = Human gut metagenome

SEQ ID NO: 13624 - protein, 419 aa, unidentified
  REGION 1..419: note = Human gut metagenome
MVYVLDINGQPLMPTTRHGKVRRLLNNHLAKAVKRCPFTIQLLYQSTKETQSVSLGIDAGSKHIGLAATTEQKVVYQEELIPRNDVVKLLSARRALRYSRRNRKTRYRKSRFNNRVHSKHKGWLAPSVEAKIQEHITAIKRICQILPVSEIHVETAEFDLQRLKAIEEGKPLPVGTDYQLGEQYDFYNTRQYVLHRDGYTCQCCGTHDNNVKLHVHHIESRQTGGNAPNNLITLCEHCHKALHEGKLKLSKGKKRGKSYRDATFMGITRKTLLERLKKEVDVPVTGTYGYITKYWREKAGLEKSHINDAVCISKHPYVEPLDTYYLTKAVRHHNRQIHKVNFSKGGIRKRNQAPHLVKGFRLFDKVLYQGKECFIFGRRVSGRMDIRLLDGIRINASVGYKNLELLELRKAYLTERRTC

SEQ ID NO: 13625 - protein, 424 aa, unidentified
  REGION 1..424: note = Chicken gut metagenome
MVPVLDANKKPLAPCHEARARKLLSKGKAAVYLRYPFTIILKRVVNDEVEPCTIKIDPGSQHTGISIVRGQDVLFMAQIDHRTTIKDAMKKRAAYRRNRRSRKLRYREPRFLNRTKPEGWLPPSVRSPLQNTVTMFKRLNRLFPIGNIEYELVKFDTQKLVNPDIAGVEYQQGPLYRTDIRSFLCKTYQNTCQYCGGATGDRQMEWEHLLPRSRGGSNSVSNATWACHTCNQEKGNLTPQEWASVIKAKKTRSPLDEARLSGIKKVQKQNYGPALADAAKVNSIRLALKTQLEQETGLPVRTSAAYNTKVNRVRLGLEKDHCIDAACVGREIPDTLYFKTNRCLVITACGRGKHCRTNVDSTGFPRSYLPRQKTFFGFQTGEMVVANVPSGKHAGRYVGRVSCRSSGSFGITTSAGRVDGINHK

SEQ ID NO: 13626 - protein, 426 aa, unidentified; identical to SEQ ID NO: 3614
  REGION 1..426: note = Human gut metagenome

SEQ ID NO: 13627 - protein, 456 aa, unidentified
  REGION 1..456: note = Human gut metagenome
MSTCVCVLSNSGKRLMPTFRLGKVRRLLKDGKAKIVKHHPFTIQLLYDSKTNTQPIEICEDVGYNYIGISVKSESHEYVSAQYDTLQDEKACHDSCRKLRRTRRNRLRYRKPRFDNRKRGEGWLAPSLRHKKELNVNVVKMYCAVMPITHATIEVGSFDTMLVKAIEEGKATPESADYQKGPRYKLATLREAVFYRDNYTCQVCGRKANEGAILHVHHMFYWKGRHGNSLSELITVCEKCHTPANHQKGGKLFGFGEDKEFANLSGAAFMNAVRWQIVDALHATYGKEFVTITYGAMTKEKRIILGIEKTHNNDAYAMGDYHPVHRCVFRHYQKRRRNNRVLEKFYDATYIDTRTGNKAKGKELFNGRISRNHKKDSEDLHKYRSKKVSKGRCSIRRQRYAIQPYDTVRLESKTYITSGCHNKGTRLLIPANGKSKSVAISKVQVVCHAGAWIQII

SEQ ID NO: 13628 - protein, 442 aa, Lactobacillus sp.; identical to SEQ ID NO: 5193

SEQ ID NO: 13629 - protein, 430 aa, unidentified
  REGION 1..430: note = Human gut metagenome
MPKVYVLNRHGRPLMPCTPAKARHLLDAGKAKVRHRTPFTIQLLYGSTGYTQEVILGVDAGSKTIGLSAATETEELFSAEVKPRNDVVELMSARRQFRRARRNRTTRYRKPRFDNRVRSKHKGWLAPSVEVKIQEHMTAIRRACAILPVSKVVVETAEFDLQLLKAVAEGKPVPQGEDYQKGEMYGHYNVRQYVLWRDSYTCRICGAHGSVRKGVPLHVHHLESRRVGGDAPDNLVTLCTACHDKLHKGIIMAADIKKRKRRSTRDATFMGIMRMTLLRRLREQLPVPVVETRGYITKATRENLLVLPKSHANDALAIAHGPQGFRAEYLPNIRQADRLYTIRPVRHHNRQLHKATILKGGVRKTNQAEKYICGFRLYDKVLYNGIECFVWGRRTSGSFLLRQLNGEKVKDGVSYKHLKLLERSQSYLVA

SEQ ID NO: 13630 - protein, 456 aa, unidentified
  REGION 1..456: note = Human gut metagenome
MSTCVCVLSNSGERLMPTFRLGKVRHLLKDGKAKIVKHHPFTIQLLYDSKTNTQPIEICEDVGYNYIGISVKSQSHEYVSAQYDTLQDEKACHDSCRKYRRTRRNRLRYRKPRFDNRKRSEGWLAPSLRHKKELNVNVVKMYCAVMPITHATVEVGSFDTMLVKAIQEGKAIPEGADYQKGPRYNLATLREAVFYRDNYVCKVCGRKATEGAILHVHHMFYWKGRHDNSLSELITVCEKCHTPANHQKGGKLYGFGENVKFADLSGAAFMNTVRWQIVNELYAAFGKDFVTVTYGAMTKEKRIALHLEKSHNNDAYAMGNCHPAHRCEFGHYQKRCRNNRVLEKFYDATYIDTRTGDKAKGKELFNGRISRNHKKDSEDLHKYRSKKVSKGRRSIRRQRYAIQPYDTVRLESKSYITSGCHNKGTRLLIPANGKSKSVAISKVQVVCHAGAWIQII

SEQ ID NO: 13631 - protein, 412 aa, unidentified; identical to SEQ ID NO: 4932
  REGION 1..412: note = Human gut metagenome

SEQ ID NO: 13632 - protein, 414 aa, unidentified
  REGION 1..414: note = Human gut metagenome
MVYVINKQGQALMPTERFGKVRRLLKNSLAHVVCRIPFTIQLDYDTTDYTQPVSLGVDAGSKHIGISATTSDKELYAADVELRNDIVDKLSTRREQRRTRRSRLRYRKARFNNRISSKRKGWLAPSVENKIQTHLTVVEKIHKFLPITNIVVETASFDIQKINNPSISGSEYQQGEQLDFFNVREYVLFRDNHICQHCKGKSKDKVLNVHHIESRKTGGDSPKNLITLCETCHKAYHRGDFELNVKRGKSFRDSAFMGIMRWSFYDRLKNIYPNVSMTFGYITKNARITNNLPKEHYVDARCISGNPVAKPLGYYFYQKKVRCQNRQIHKANFLKGGRKKLNQAPFLVKGFRLFDLVEYQKDLYYIFGRRDSGFFDIRKLDGTKVNKGSINCKYLRLVDKRKSILIEKRMQVNL

SEQ ID NO: 13633 - protein, 426 aa, unidentified
  REGION 1..426: note = Human gut metagenome
LAKDLYRSIDREETNLRVYVLNKRGEPLMPCSAAKARILLKEKKAVVKRRTPFTIQLTIATGETKQSVTLGVDAGYKHIGLSASTEKAELYASEIELRQDVSELLAGRSALRQARRSRKPRHRAPRFDNRKREKGWLAPSVENRIGAHVSRVEAVLRILPVTKIIVETASFDVQRLKNTDMQGVEYQQGEQLGFWNVREYVLFRDGHECQHCHGKSKDKVLNVHHIESRRTGGDAPNNLITLCETCHKAFHRGEIELKVKRGRSFQAETFMGVMRRTFFERLRASHPEIEVRNTYGYLTKDTRIANKIEKSHCADAFCIAGNLKAKRLGYYFFQKQTRRHNRQIHKLTILKGGVRKRHQTPYEIKGFRLYDKVLYRGKVAFIFSRRSSGYFDIRTLDGERIAASGSYKKLRLLEKRRTFLIELRRN

SEQ ID NO: 13634 - protein, 512 aa, unidentified; identical to SEQ ID NO: 3971
  REGION 1..512: note = Human gut metagenome

SEQ ID NO: 13635 - protein, 442 aa, unidentified
  REGION 1..442: note = Human gut metagenome
MSTSVFVLDKKHRPLMPCRPARARRLLRAGRARVVKRFPFVIRLVDRTVEQSEVQPVLIKLDPGSRETGAAVVRDDGKKRHHALAFFVIKHRGGAIRDALKARSAFRRRRRSQNLRCRSPRFLNRVKPKGWLPPSLRHRVETTLSFVRRMCRYLPVSGIATELVKFDSQKLQNPEVSGVKYQQGTLFEYEVREYLLEKFGRKCVYCGAEGVPLNIDHVVPRAKGGSNRVSNLVLACVSCNQKKGARSLEDFLKGKPEVLARVRRELKTPLRDAAAVNATRWVLFNELKATGLPVETGSGALTKLNRHAFGVEKEHWLDALCVGRLNGAVTRKGLNVLEIRCMGRGSRQRTRLTKYGFPRGYLMRQKCVHGFATGDMVEANVPKGKKAGLWRGRVAVRVSGSFNIQTPKGVIQGVGWKHCRLISHNDGYGYAWLGHAPHSSPA

SEQ ID NO: 13636 - protein, 418 aa, unidentified
  REGION 1..418: note = Human metagenome
MVYVINKDGQALMPTERFGKVRRLLKNGLAHVVCRIPFTIQLDYETTHFVQPISLGVDAGSKHIGISATTSEKELYAADVELRNDIVEKISTRREQRRTRRNRLRYRKARFNNRVSSKHKGWLAPSVENKIQTHLTVVEKIHKFLPITKIIVETASFDIQKIKNPSISSEEYQQGEQLDFFNVREYVLFRDNHTCQHCKGKSKDHILNVHHIESRKIGGDSPSNLITLCESCHKAYHNGKIDIKVKRGASFRDAAFMGIARWTTYERLKNIHPNVSMTFGYITKNTRITNGLPKEHHVDARCISGNPKSKPLGYYFYQKKVRCQNRQIHKANFLKGGRKKLNQSPFLVKGYRLFDLVEYQKELYYIFGRRDSGFFDIRRLDGTKVNKGSISCKHIRLVDIRRSILTERRNSCSTIPTN

SEQ ID NO: 13637 - protein, 424 aa, Moorena sp.
ITRVFVLNKNRQPLDPCKPARARILLSVGKAKVYRRYPFTIILTEEVKQPITHDQQLKIDPGAKISGLAIVQGKRVIWGSELTHRGFQIQEALTSRRQLRRSRRNRKTRYRKPRFLNRTRPKGWLAPSLTSRVQNILTWVKKLIRFCPITGISQELVRFDTQKLQNPELSGIEYQQGTLYGYELREYLLEKWNRKCAYCGATGTQLEIEHIKPKSKGGSNRVSNLTIACHPCNQAKSNQDIELFLSKKPSILKRILSQSLRPLADAASVNSTRCTLYYELKSIGLPVEVGSGGLTKFNRCRQNLPKTHWLDAANVGKVETLIIEVTLPLVITAKGHGTRQLCRTNKYGFPIRHCSRIKFHKGFQTGDIVRAVVTKGKNIGTYVGRVATRKSGSFNISTLGGLVQGISHKYCRFIHRKDGYAYTN

SEQ ID NO: 13638 - protein, 509 aa, unidentified; identical to SEQ ID NO: 12136
  REGION 1..509: note = Human gut metagenome

SEQ ID NO: 13639 - protein, 442 aa, unidentified; identical to SEQ ID NO: 10884
  REGION 1..442: note = Human gut metagenome

SEQ ID NO: 13640 - protein, 515 aa, unidentified
  REGION 1..515: note = Human gut metagenome
VTDVSTIYVLNKDGKPLMPTTRCGHVRYLLKEKKARVAASKPFTIQLLYETNDVVQPLYLGIDPGRTNIGVAVVKTDGTAVFTAHLETRNKEIPKLMQGRKKARRARRTNGRRCRRQRRAKANGTISKKCVKQTTAQNGSVSKRAKEIGVIKRHLPGCEKDVLCIGIKNKEAKFSNRTKPEGWLTPTANQLLQTHINLVKKIRKFLPISDVVLEINKFAFMQLDNPNVQKWQYQQGPLYQKANLEEAVSEMQEHHCLFCKKPIAHYHHVVPQSENGSNTIGNIVGLCTKHHDLVHKDTAWQKKLTKKKTGLNKKYSALSVLNQIIPALTKELSSLFPKHFFATNGKSTYDYRAAHGVRKDHWLDAYCIACSVLPNDVCDKNINSRVLYELKQFRRHDRRALNNENMSRVYTLNENVVATNRHKATKQTTDSLEEFRQNHPDDACKLKVKEHHPTYRNMSRNYPGSVFLVGNQVHVMQGVAGSKDGKATTYKDTNANSIAAGKCKFVAKNSGILFV

SEQ ID NO: 13641 - protein, 512 aa, unidentified
  REGION 1..512: note = metagenome
MSTVYVLNKDGKPLMPTTRCGHVRYLLKEKKARVVTSKPFTIQLLYETNDVVQPLYLGIDPGRTNIGVAVVKTDGTAVFTAHLETRNKEIPKLMQGRKKARRARRTNGRRCRRQRRAKANGTISKKCVKQTTAQNGSVSKRAKEIGVIKRHLPGCEKELLCIGIKNKEAKFSNRTRPEGWLTPTANQLLQTHINLVKKIQKFLPISDVVLEINKFAFMQLDNPNIQKWQYQQGPLYQKASLEEAVSEMQEHHCLFCKKPIAHYHHVVPQSENGSDTIGNIVGLCTKHHDLVHKDTAWQKKLAKKKTGLNKKYGALSVLNQIIPALTKELSSLFPKHFFATNGKSTHDYRAAHDVSKDHWLDAYCIACSILPNDTCDKNINGRVPYKLKQFRRHDRRAPHKENMSRVYTLDGKKVATNRHKAIKQTTDSLEEFRQRQPNDVCKLKVKEHHPEYRNPERNFPGCVFLVGKHTHVVQGTSGSHNSKADGYYDTNGNSYSSGKCKFVAKNKGIVFA

SEQ ID NO: 13642 - protein, 425 aa, Moorena sp.; identical to SEQ ID NO: 9937

SEQ ID NO: 13643 - protein, 434 aa, Lactobacillus sp.
MQNRVFVINRQGEPLMPCKQQKCRNLLQAGRAKVIKKEPFTIQLLFGSTGYKQPVSIGVDSGQHHVGLAVTSQDKVLFQGEVSLRQDVKKLLDTRRIYRRGRRNRNTRYRPPRFLNRAKPAGWLPPSVASKVQHNITWIQRVQAVLPQAELHIEVGKFDMAKMKQPGITGLGYQQGDLYGYETAKQYVLDRDNYTCQICHGKTKDPKLKIHHIIYRSTGGTNQVSNLLTVCATCHTQANHQPGGKLYALQAKRFQSHHSLKGATFMNILRRRLFTAFPEASFQYGAQTTLNRAKLELPKAHYNDAVTISGIQRISQQPTAVVMFRQFRKKKRSLHEATARKGRKTPNTTSKRNAKNKKFSKGFYLNDYVQLPNGQKGNVSGFSGKTLCFVKAGDGHYLAISSKYKHINLSKLKVIRHQNNWNVTEIEVKTYQMA

SEQ ID NO: 13644 - protein, 418 aa, Exiguobacterium sp.; identical to SEQ ID NO: 2406

SEQ ID NO: 13645 - protein, 404 aa, unidentified
  REGION 1..404: note = Human gut metagenome
LRVFVLNKRGKPLMPCSPAKARLLLKEKKAIVKRRTPFTIQLTIATGETKQPVGLGVDAGYKHVGLSASTDKAELYASQVELRQDITDLLSARRALRRARRNRKTRYRAPRFNNRIRTKRKGWLAPSVENRINAHLSRIEAVLRLLPVTKITVETASFDMLLLKNPDIAGKEYQEGEQLGFWNVREYVLFRDGHVCQHCYGRSKDPVLNVHHLESRRTGGDSPGNLITLCETCHEALHRGEIALKTKRGHSFRAEAFMGMMRWEVLNRLKASHSELEVNNTYGYRTKHARIVNGIDKSHCADAFCIAGNLGAERLCEFFFQKQTRRNNRQIHKLSILKGGIRKRNQAPFEIKGFRLFDKVACKGEESFIFGRRSSGYFDVRKLDGTRISAGISYKKLRLLEKRR

SEQ ID NO: 13646 - protein, 512 aa, unidentified; identical to SEQ ID NO: 8277
  REGION 1..512: note = Human gut metagenome

SEQ ID NO: 13647 - protein, 431 aa, unidentified
  REGION 1..431: note = Human gut metagenome
MPNKVYVINKHGRPLMPCSPAKARHLLDAGKAKVKKRTPFTIQLVYGSSGYTQEVILGVDAGSKTIGVSASTKKEELFAANVIPRNDVVDLLSTRRESRRARRNRKTRYRKPRFDNRVRSKHKGWLAPSVEVKIQEHITAIRRVCGILPVSKVVVETAEFDLQLLKAIEEGKPVPQGEDYQKGEMYGHYNVRQYVLWRDNYTCQCCGAHATKKKEVRLHVHHLESRKTGGDAPGNLVTLCDSCHEKLHKGLIAEKDFKKRKRKSTRDATFMGIMRKTLMQRLCSELPIPVIETRGYITKATREKLLVLPKSHTNDAQAIAQGKQGFNVGYLPGIEQIDKIYTIRPVRHHNRQLYKATILKGGIRKSNQTKKYVFGYRLFDKVQFNGQDCFIWGRRTSGYFVVKTIDGKVIHNSASFKKLRLVERASNYLIA

SEQ ID NO: 13648 - protein, 512 aa, unidentified
  REGION 1..512: note = Human gut metagenome
MSTVYVLNKDGKPLMPTTRCGHVRRLLKEQKAQVVTSKPFTIQLLYETDDVVQPLYLGIDPGRTNIGAAVVKTDGTAVFTAHLETRNKEIPKLMQGRKKARHARRTNGRRCRRQRRAKANGTISKKCVKQATAQNGSVSKRANEIGVIKRHLPGCEKEVLCIGIKNKEAKFSNRTRPEGWLTPTANQLLQTHINLVKKIQKFLPISDVVLEINKFAFMRLDNPNVQKWQYQQGPLYQKASLEEAVSEMQEHHCLFCKKPIAHYHHVVPQSENGSDTIGNIVGLCTKHHDLVHKDTAWQKKLAKKKTGLNKKYGALSVLNQIIPALTKELSFLFPKHFFATNGKSTYDYRAAHGVGKDHWLDAYCVAGSVLPNDACDNNINNHVPYELKQFRRHDRRALHKENMGRVYTLNGKSVATNRHKAIKQTTDSLEEFRQRQPNDVCKLKVKEHHPEYRNPKRNFPGCVFLVGKHTHVMQGTSGSHNGKADGYYDTNGNSYSSGKCKFVVKNEGIVFT

SEQ ID NO: 13649 - protein, 425 aa, Moorena sp.
MSTNYVLVLDTNRKPLNPCKPGMARSLLKAGKAAVFKQYPFTIILNKAVDDAPKPVQLKIDPGSKVTGLALVQDDKVLWGTELYHRGQQIKADLEDRRKLRRGRRNRKTRYRQPRFLNRTRPEGWLAPSMLHRVLTTMTWVRRLTKFVPVTGISLERVRFDTQKMINPEVSGVDYHQGELQGYEVREYLLEKWNRQCAYCQATDTRLEVDHIHPKSKGGSDRVSNLTLACHDCNQAKGNQDIRDFLCGKSDLLNRILSQVKQPLLDAAAVNSTRNKIAEELIATGLPIEFGTGGQTKYNRCRLDLPKTHWLDAACVGVVVHLTLETKQCLTITASGHGNRQMAGVDKYGFPYRHRTRQQVHFGFRSGDIVRAVVPKGKKAGTHVGRVLCRKSGSFDIQTKSGRVTGINHKYCSTIHGRDGYAYVF

SEQ ID NO: 13650 - protein, 420 aa, unidentified
  REGION 1..420: note = Human gut metagenome
MQYVYVLNKHSEPLMPCSPGKARLLLKRQKACVVKRTPFTIKLLHGSAGYKQPITLGVDAGSKHVGLSASTEKRELYSEEFTPRNDVVELLSTRRQNRCSRRNRKTRYRTPRFNNRVHSKHKGWLAPSVEVKIQEHITVIKRICRILPITLVRVETAEFDTQRLKAMLAGKPLPVGTDYQLGEMYDEYNVRQYVLKRDNYTCQCCGAHTTAKKAIKLHVHHLESRKVGGNAPSNLITLCTACHDNLHKGKVTLDGKKRGKTLRDAAFMGIMRNTLLIRLRNELNIPVQNTYGYITKLLREQNDIKKSHVNDARCISKHPLAEPCSVCYRTKAIRHHNRQIHKAKILKGGIRKANQAPYIVKGFRLWDKVLYNGQECFISGRRSSGYFALKKLDGTAITNSISFRKLRLLEPAINYLIERM

SEQ ID NO: 13651 - protein, 434 aa, Moorena sp.
MSKIFVLNTDTRPLDPIHPAQARQLLRNKKAAVSRRFPFTIILKESRPKAPIKPLRLKIDPGAKHTGIALVNDTTGEVVFGGELKHRGFAIRDALTSRRQLRRSRRNRKTRYRQPRFLNRTRSEEWLAPSLQSRVDNIKTWVNRLRKLAPIKAISQELVRFDMQLMRNPDIQGKEYQQGTLAGYETREYLLEKWNRQCAYCGIKDVPLQIEHIHPRAKGGSNSITNLTLSCEKCNIKKGTKDVKDFLKKDPTKLQKILAQAKKSLADAAAVNATRYALLEVLKATGLTVECGSGGLTKFNRSQQNLVKTHWTDAACVGKSTPILKIKGIKPLLITANGHGTRQMAGTDKFGFPTRHRSNKQIHYGFSTGDIVKAVVTNGQKVGEYLGRVLCRATGSFDIATKMGRIAGISYKYCSAIHKKDGYSYAFSNFLDYD

SEQ ID NO: 13652 - protein, 414 aa, unidentified
  REGION 1..414: note = Human gut metagenome
MPCSPAKARLLLKEKKAIVKRRTPFAIQLTIATGETKQPVSLGVDAGYKHVGLSASTEKAELYASEVELRQDITDLLSARRALRQSRRNRKTRYRAPRFDNRIRTKRKGWLAPSVENRINAHLSRIEAVLRLLPVTKITVETASFDMQLLKNPDIAGKEYQEGEQLGFWNVREYVLFRDGHVCQHCHGRSKDPVLNVHHLESRRTGGDSPGNLITLCETCHKALHRGEITLKAKRGQSFRAEAFMGIMRWEVLNRLKASHPELEVNNTYGYRTKHARIANDIAKSHCADAFCIAGNLGAERLGEFFFQKQTRRNNRQIHKLSILKGGIRKRNQAPFEVNGFRLFDKVACQGEEGFIFGRRSSGFFDVRKLDGTRISAGISCKKLHLLEKRRTYLTEIRKEEALLALPEGRSLRT

SEQ ID NO: 13653 - protein, 423 aa, unidentified
  REGION 1..423: note = Human gut metagenome
MRVFVFNMRGEPLMPCTQRKARLLLKTGKAKIYKYNPFTIQLKYVTGENKQECHVGIDTGSKYIGLAVTSENKVLFKGEVELRQDVKSKIDTKRIYRRSRRNRKTRYRRCRFLNRKRFGKWLPPSLQNRINHTFKWIDKLCSFIPESILHIEVGKFDIAKMINPEVHSVDYSQGQTYGYQGERYFIFARDNYTCQVCGERNKPLQTHHIIYVSNGGTNRVDNQITVCKNCHNSTNHKNGGIFYKWQKEHKKVKQYKEPPFMNVLRQQILNQYPQALITYGFETTIKRKNIGLEKTHYNDAIVISGVSTISENLHEWLLIRQFRKKKRSLHEGVPRKGRKEPNRIQKRNSKNTPYYRGFYLNDKVSVFGKSGYITGFTNSGAYVKGVDGEYIVLPNKSYKRVNIASLKFICHNNNWQYITKNAV

SEQ ID NO: 13654 - protein, 432 aa, unidentified
  REGION 1..432: note = Human gut metagenome
VLQTTNPFQHWRRITTDRKVEQTEPVRYPSMENTLKVFVLNMRGQPLMPCSPPKARKLLRAGKAVPVRRTPFVIQLTVPTGETKQPITLGVDAGYKHVGLSATTAKEELLASEVELRQDVTGLLSDRLALRRARRNRKTRCRAPRFDNRVRSKHKGWLAPSVENRIQAHISRIEAVCRVLPITKIVIETASFDIQKIKNPEVEGTDYQQGEQLGFWNVREYVLFRDGHVCQACKGRSKDLILNVHHIESRKTGGDAPGNLITLCEACHKAYHAGKLKQFSPRRGASFRAETFMGIMRWTVLNRLRERHPELPVTNTYGYLTKHKRIVAGLPKTHCADAFCIAGVLDAKRRGEYLFQKQTRRHNRQIHKLTILKGGVRKRHQAPYLVHGFRLFDKVLCKGEVGFIFGRRSSGAFDVRRLNGTKISAGISYKKL

SEQ ID NO: 13655 - protein, 428 aa, unidentified
  REGION 1..428: note = Human gut metagenome
LKVFVLNMRGQPLMPCSPAKARHLLKAGKAVVRRRTPFTIQLRIATGEMKQSVTLGVDAGAKHVGLSATTEKEEVFASEVELRQDITGLLAARLSLRRERRQRKTRYRAPRFLNRVRSKHKGWLAPSVENRIQAHMSRIDAICGLLPVTKIVIETASFDIQKIKHPDVEGTDYQQGDQLGFWNVREYVLFRDGHVCQHCHGHAKDKILNVHHLESRQTGGDAPNNLITLCETCHKACHAGKIKLKVKRGQSFRAEAFMGIMRWTLLDRVRKAHPGLPVENTYGYLTKNTRIAMGLPKAHCVDAYCIAGNLKAVRRGVHLYQRPVRKHNRQIHKCTVLSKTLKDGTKIGYRKLNQTPHLVKNFRLFDKVRCLGKTGFIFGRRSSGYFDVRRLDGVKLSSGISYRKLTLLEKRSTYLTELRKEDGASSPV

SEQ ID NO: 13656 - protein, 477 aa, unidentified; identical to SEQ ID NO: 8085
  REGION 1..477: note = Human gut metagenome

SEQ ID NO: 13657 - protein, 438 aa, unidentified; identical to SEQ ID NO: 4848
  REGION 1..438: note = Human gut metagenome

SEQ ID NO: 13658 - protein, 504 aa, unidentified
  REGION 1..504: note = Human gut metagenome
MAWEAIQTRRIKPHDIGEGTLRRHAAGTVSFPVLCKNRKETLMSVLVIGRNGRALMPTNPRKARLLLKKKTASVVCRHPFTIQLLYKTGCATQEGCIGIDTGSQHIGVGITCGDRVILKDEHALRSSMEKRSLLATRTVMRRGRRYRKVRYRKPKWRHHTKRMYFEKANRRGQHWRKVKTTTQSPRLKGWLPPSLQSKCDHHFRIIDRYLKYLPDPITRNLVIEAGRFDMARMNDPTIHGEMYQRGPMYDAENLRAYIFARDNYQCACCKAKAGTTRKADGTTVKLVAHHILFRSRGATDNPKYIISVCDHCHTTKAHQPGGILYSWMENKKKVARGLRDATFMNILRKRLFARYPQAAFTYGNITAADRKQLRLPKSHANDAVAISLFGKEASTVKNICQTMHYKQIRKSKRSLHEAIPRKGRKNPNTKAVRNKKNTTQVNGFKLWDSVLADGKKLFICSFTGTSAYLIDKNGCYISQPGKTYKQWPLSKLKRLHPNGNWLMA

SEQ ID NO: 13659 - protein, 431 aa, unidentified
  REGION 1..431: note = Human gut metagenome
MPNKVYVINKHGRPLMPCSPAKARHLLDAGKAKVKKRTPFTIQLVYGSSGYTQEVILGVDAGSKTIGVSASTKKEELFAANVIPRNDVVDLLSTRREFRRARRNRKTRYRKPRFDNRVRSKHKGWLAPSVEVKIQEHITAIRRVCGILPVSKVVVETAEFDLQLLKAIADGKPVPQGEDYQKGEMYGHYNVRQYVLWRDNYTCQCCGAHATKKKEVRLHVHHLESRKVGGDAPDNQVTLCESCHEKLHKGLIAEKDFKKRKRRSTRDATFMGIMRKTLMQRLCSELPIPVIETRGYITKATREKLLVLPKSHTNDALAIAQGKRGFNVGYLPEIAQIDKIYTIRPVRHHNRQLHKATILKGGIRKSNQAEKYVFGYRLFDKVQFNGQDCFIWGRRTTGIFTIKTINGKMIKDGISFKKLKPVEKSTSYLIA

SEQ ID NO: 13660 - protein, 422 aa, unidentified
  REGION 1..422: note = Human gut metagenome
MQYVYVVGSNGKPLMPCSPTKARKLLKSKSAAVLQRTPFTIKLLHHAGGYKQPITLGVDAGSKHVGLSACTDTEELYKEELTPRNDVVKLLSARRECRRGRRHRKTRYRAPRFNNRVHSKHKGWLAPSVEVKIQEHITAIHRICRRLPITKIVVETAEFDTQRLKAMLEGKPLPVGIDYKRGEMYDEYNVRQYVLKRDNYTCQHCGARGSAEKGIKLHVHHLETRQTGGNAPNNLITLCKDCHTALHDGKITLKLDKKKRGKPLRDSAFMGIMRKTLLSRIRKEVAIPVVETQGYITKLLREENHIQKSHTNDARCIAGCPKALPCDTTYHTKAIRHHNRKIYKTNILKGGVRKLNQAPYKVFGFRIWDKVKYKGQECFITGRRSSGYFALKKLGGTTISNSANYKKIHFLEPANHYIIERS

SEQ ID NO: 13661 - protein, 427 aa, Parasutterella sp.; identical to SEQ ID NO: 12981

SEQ ID NO: 13662 - protein, 421 aa, unidentified
  REGION 1..421: note = Ga0307928_10000789
VDPLQHAGGQNLRVSDNMHVFVLNKRKEVLMPTSCRKARLLLKSGKAVVIKRFPFIIQLTYATGENKQKITCGVDPGYSDIGFSCITKTRELIGGTVKLDNFTSKHLSEKRMYRRNRRNRLRYRSPRFLNRRRSNKWIPPSIERRYQTHINLINKLKQFLPISNITIEIGNFDIQKLNNPDINGKGYQQGNLYNYSNLKSFVLSREKHICQLCNKNDLKNDKWKLHHIILKSKGGTDKSNNMALLHESCHKKLHKQNLYNKLKKNKQYKESIFMNIIKSRFKNSLNCKLVFGYETYCRRNELKLEKSHSNDSFVVAGGTNQKRSMEYNIKQRRRNNRTLQLNRKGFSPSIRRKRYKLQPYDLVKIDNNIYDVVGTHCLGKRVKVKSEKNKKKEISIKKIDWYFNNNSLIWKKGVSGNSSHY

SEQ ID NO: 13663 - protein, 451 aa, unidentified; identical to SEQ ID NO: 7526
  REGION 1..451: note = Human gut metagenome

SEQ ID NO: 13664 - protein, 431 aa, unidentified; identical to SEQ ID NO: 5232
  REGION 1..431: note = Human gut metagenome

SEQ ID NO: 13665 - protein, 457 aa, Moorena sp.; identical to SEQ ID NO: 4365

SEQ ID NO: 13666 - protein, 431 aa, unidentified
  REGION 1..431: note = metagenome
MPDKVYVISRLGHPLMPCSPAKARHLLDDKKAKVVKRMPFTIRLLYGSTKYIQPIILGVDAGSKTIGLSASTAKEEVFAAEVMPRNDVVENLSTRREFRRARRNRTTRYRKPRSDNRVRSNHERWLAPSVKVKIQEHITSIKRVCTILPISKVVIETAEFDLQLLKAIQEGKPIPEGEDYQKGEMYGSYNVCQYVLWRDNYTCICCGVRGTPKNPVRLHVHHFESRKYGGNAPDNHGTLCDDCHKKFHLGIITDVKLKTRRRQSTRDAAFMGIMRKTLMWRLRTELFIPVAETKGYITKATREKLLVLPKSHTRDALAIAQGRHGFGIKEYAYVEPANHIYTVRPVRHHNRQLHKASILKGGIRKRNQASKYVFGFRLYDKVLYQGKACFVWGRRTRGTLLLRTIDGIKVKDGVSYRNLTLLERSSNYLIA

SEQ ID NO: 13667 - protein, 442 aa, unidentified; identical to SEQ ID NO: 2903
  REGION 1..442: note = Human gut metagenome

SEQ ID NO: 13668 - protein, 458 aa, Lactobacillus sp.; identical to SEQ ID NO: 4474

SEQ ID NO: 13669 - protein, 451 aa, Ruminococcus sp.; identical to SEQ ID NO: 2424

SEQ ID NO: 13670 - protein, 411 aa, unidentified; identical to SEQ ID NO: 3917
  REGION 1..411: note = Human gut metagenome

SEQ ID NO: 13671 - protein, 406 aa, unidentified
  REGION 1..406: note = Human gut metagenome
MDAWDIIVVLNKRGKPLMPCSPAKARHLLKEKKAAVVRRTPFTIQLTIATGESKQPVSLGVDAGYKHVGLSASTEKAELYASEVELRQDITDLLSARRALRQSRRNRKTRYRAPRFDNRIRTKRKGWLAPSVENRINAHLSRIEAVLRLLPVTKITVETASFDMQLLKNPDISGKEYQEGEQLGFWNIREYVLCRDGHVCQHCYGRSKDPVLNVHHLESRRTGGDSPGNLITLCETCHKALHRGEITLKAKRGQSFRAEAFMGIMRWEVLNRLKASHPELEVNNTYGYRTKHARIANGIAKSHCADAFCIAGNLGAKRLGEFLFQKQTRRNNRQIHKLSILKGSLRKRNQAPFEVKGFRLFDKVAYQGEEGFIFGRRSSGFFDIRRLDGTRISAGINYKFPHVLKG

SEQ ID NO: 13672 - protein, 515 aa, unidentified
  REGION 1..515: note = Human gut metagenome
MTALEERLSKTEYIYVLGFDGKPQMPTRRKRHVLKLLKTGRARIAEDIPFTIRLTYRNAPVLQPVTLAEDPGRTNIGAAVLSPLGDLLFAAVIETRNKEIKKLMTDRKKSRQASRRGERKARQRLAKRYGSMVKSGMVMRKLPMYAADRFVTCKFIRNTQARFCNRKRCPDWITPTVQHLVQTHLNIIRKISRYLPVTDIAFEVNRFAFMHMENPEAMGVDFQNGPLKGYGDVKEAIRTQQHGKCLMCKKPISHFHHIVPRSRGGSDTIQNLAGLCTECHTKVHTDTAFRKDFDEKKSGQLKKYGALSALNQAVPFICKKLLEEYGEEHVHFCRGLDTSLIRTAFGFEKTKKNQMHEVDAYCIGLAALEVNEVETPAFDHTFQIRQFRRQDRSIIHHQTGRSYYQGKEKVAQNRKPGFEQKTTALSQWYEEQVRIHGEKEAEKLRSQLRVEKSCRHYNDMDRFLPGAVFLYEGKRYVLSGRITNGKYLRACGQGMKNFPAAECTFIRHNAGLVFI

SEQ ID NO: 13673 - protein, 443 aa, unidentified
  REGION 1..443: note = Human gut metagenome
LTKDENRPSGRTTGLRAEQAEPAGIRKGDTLKVFVLNMRGKPLMPCSPAKARHMLKAGKAFVVRRTPFTIKLTIATGETKQDVTLGVDAGARHVGISATTEKEEVFASEVALRQDITGLLADRLAFRRARRNRKTRYRSPRFNNRVRSKHKGWLASSVENRIQAHMSRIDAVCRLLPVTKIVIETASFDIQKIRNPEVEGTGYQQGDQLGFWNVREYVLFRDGHICQHCRGRSKDPILNVHHLESRKTGGDAPNNLITLCETCHKAYHAGKIKLKVKRGQSFRAEAFMGIMRWTLLDRVRKTHPKLPVENTYGYLTKHKRIALGLPKTHCVDAFCIAGNLKALRRGDFLFQQQTRKHNRQIHKCSILKGGVRTLNQAPFLVKGFRLFDKVRIGGQIGFVFGRRVRGTFNIRRLDKTVIGTDINCKKLSLLETRKTFLTELRKE

SEQ ID NO: 13674 - protein, 442 aa, unidentified; identical to SEQ ID NO: 3218
  REGION 1..442: note = Human gut metagenome

SEQ ID NO: 13675 - protein, 380 aa, Moorena sp.
LLSRYPMVIQLKKKISDQEICKDEIRCGIDDGGLHVGVALVQKCQTRNKVIFKGTIEQRNDVKHLMDVRRGFRRYHRDHKRYRPVRFDNRKSSKRKGRIAPSILQKRQATIRVINQLNKWVNITNYWLEDVAIDIRALTDGYKPYRWQYQKSNRLDENIRKAVILRDGCQCMECGKSNCRLEVHHIKPRRLKGSNTLGNLITLCTGCHQKTEGAEELYMNRYFALLNSSDNKKLNYAQHVMIGKKWLREQLSKLGMLHLTNGGDTANKRIDWGIAKSHSNDAICITDLRPDTCEIKEWEIKPMRRQSKAKTDNVLGIKHSDLVEYTFMNGETHRGYVTALYPEQNALNFQSPTKHCKKVNARKCKVLWKYSKIYWLDDVS

SEQ ID NO: 13676 - protein, 417 aa, unidentified
  REGION 1..417: note = Human gut metagenome
MVYVISKDNKPLMPCSNAIARLLLKQGKAKVKKREPFTIKLTYDTTNYIQDLTLGVDTGSGTIGTAVSKDNGDIIYMSEVVVRNDISEKMAQRAKYRRNRRTRKTRYRKARWLNRKSSIKSGRFSPTMISKFHSHIKEIEFIKSILPIKNLVLETGKFDPQLMQNPELKYKPWGYQKGKNYGFSNTREMVLNRDNYTCQCCKGKRKDRKLEVHHIVFRSNNGSDDENNLITLCRTCHNLLHKGEIKLNLRGYKKGSLKYATQMNSIRKQLLRHYPEAIETFGYITKENRLNINIEKEHYLDACVIATGGNSFKIRSNLYKKKHIPKGDYQQTKGIRSEQRLNTKKICGFRKFDKVKYFGKEYFIKGRMSAGYTILMDFDGNKIDFSNMQKGFKTPRLNNCKRINERSSQMVCRQFIS

SEQ ID NO: 13677 - protein, 433 aa, unidentified
  REGION 1..433: note = Anaerobic digester metagenome
MQHVFVLDQNKKPLDPCHPARARKLLRSGQAAVFRRFPFTIILMERTLKESVTHKYCVKIDPGSKQTGMALVREGDHKVVWAAIIQHRGQVIRDNLLARRAIRRGRRAHHCRYRPARFDNRHRQKGWLPPSLESRLANIETWVRRLALHTPLTAISMELVKFDTQKIENPEISGVEYQQGKLVGYEVREYLLEKWGRKCAYCGKTGVPLEIEHIIPKSRGGSNQVSNLTLACETCNRAKNNLSAVEFGHPEIQKKAKLPLKDAAAVNSIRWELWRRLSAWGFVVECGTGGRTKYNRISQNLPKTHWLDAACVGEAGKNIFVPNGLDGLGIKSYGHGSRQMCRMNKFGFPRTSAKGAKKVFDFQTGGIVRAVVTKGKKVGTYVGRVAVRSSGYFDIQCGTQIVQGISYIYCRLLHKPDGYSYTYRKDEGFTPLG

SEQ ID NO: 13678 - protein, 446 aa, Azotobacter sp.
MAVYVLDKTGKPLMPCSEKRARLLLERSRARVHRLLPFVIRLTDRRQADCTLQPLALKLDPGSRFTSMALVRRQGRRVSVLSLLELIHRGAAIRQALLQRAAFRRRRRSANLRYRAPRFDNRTRPAGWLPPSLRHRLDTSLAWVARLRRWAPIASLAVERVKFDLQALQNPGIVGIEYQQGTLQGYEVREYLLEKWGRRCAYCGTEQVPLEVEHIVPRSAGGSDRVSNLTLACRTCNQNKGNRPLEVFLARQPLRLARIMAQAKAPLRDAAAVNATRNALFASLLATGLSVEAGSGGQTKFNRRRLGLPKSHALDAVCVGEVEAVAGWQRPTLAIRATGRGEYQRTRLTAHGFPRGYLTRRKRHFGFQTGDRVHAVVPTGKKAGVHRGRVAVRQTGSFNIQTAGGVVQGIGHRHCHLVQRADGYGYSLQSFDSAQLEKEAARAGAR

SEQ ID NO: 13679 - protein, 493 aa, unidentified; identical to SEQ ID NO: 2644
  REGION 1..493: note = Human gut metagenome

SEQ ID NO: 13680 - protein, 428 aa, unidentified
  REGION 1..428: note = metagenome
MLVYVLDKNEQPLMPTHNGAKVRVLLKQKRAKVVSKCPFTIKLLYESTNFTQPLTLGVDTGSKYVGSAVINDATSEVVYESQTELRDDIKSKMDRRRQFRRARRNKLRYRPVRFNNRKSSKRKDRYNPTLTSKFQGHTREIEFVKSILPISDIVLEVGEFDPQLLQAPTLAYRKWGYQKGELYQQENFKQATKARDDYKCQCCGKQNCGLEVHHLIPRSSGSDKLANLITLCTDCHHLAHSSEEQLLAFQKKFGKKTKGTLRYATQMNVLRHMLQREYPNAEVTYGFITKEMRRVFGLEKSHMIDACCIASRGSEFHNENSNRYKKKCVAKGDYTRTGVSGGKFGILPNGKIVGFRRYDKVFYNSKEYFIAGRMSIGKVYLIDIDNNRLQVERTRRGTGEKYTSKAMIKVSLVRKVTSAKTCLCTINK

SEQ ID NO: 13681 - protein, 435 aa, unidentified; identical to SEQ ID NO: 4814
  REGION 1..435: note = Bioreactor metagenome

SEQ ID NO: 13682 - protein, 406 aa, unidentified; identical to SEQ ID NO: 7406
  REGION 1..406: note = Human gut metagenome

SEQ ID NO: 13683 - protein, 278 aa, unidentified; identical to SEQ ID NO: 12272
  REGION 1..278: note = Human gut metagenome

SEQ ID NO: 13684 - protein, 444 aa, unidentified
  REGION 1..444: note = Candidatus Anoxychlamydiales bacterium
MLVFVLNKLKKPLMPCSSAKARGLLKKGLAKVISKKPFTIKLLFGSSGYKQKIIAGMDTGSKIIGIAAIANGKVLYQAETKLRGEEIKKKMDQRRMYRRSRRGRKLRYRKPRFLNRRASTATNRLAPSVKHKVFSHIREKRFIESILPISMWIVETASFDIHKITNPKGVSKALGKGSSYQKGRMLDFYNVKQYVLNRDKYQCQKCKKKTNLKLHVHHIQFRSNSGSNSPDNLVTLCETCHDKLHNLKKEEAEKSSKKLQKKAQKQTKHATEVSILRSQICKHFRNNKTSQPFEETFGYITKFNRESENLPKSHHIDAICIASRGERIEMHNQNNISDLFLRRCVSKGDYQQRRGSRSELKIPTGKLFGLKKFDLVKTSKGVGFVKGKRSSGFFAISDINGTIISDSVNIKKNTNRIQARKAVLTWRSQFVSDLKDRVSLREKR

SEQ ID NO: 13685 - protein, 442 aa, unidentified; identical to SEQ ID NO: 3218
  REGION 1..442: note = Human gut metagenome

SEQ ID NO: 13686 - protein, 229 aa, unidentified
  REGION 1..229: note = Human gut metagenome
QYVLKRDHYTCQCCGAHNTAEKVVKLHVHHLESRKTGGNAPSNLVTLCTTCHKNLHKGKVTLDGKERGKPLRDAAFMGIMRKTLMARLKEELPIPVQGTYGYITKMRREQNDIKKSHTNDARCISKHPLAEPCSVCYRTKAIRHHNRQTHKANFSKKGIRKRSQMPYLVEGFRLWDKVLYKGQECFVSGRRSSGSFALKKLDGTSISKGVTFKKLRLLEPATNYLIERM

SEQ ID NO: 13687 - protein, 498 aa, unidentified
  REGION 1..498: note = Human gut metagenome
MTTVYVLSKNGKPLMPTTRCGHVRILLKEKKARVVERNPFTIQLTYETEENTQPLTLGIDPGRTNIGASVITQDGECVFSAQLVTRNKDVPKLMKQRKLFRMAHRRLKRRCKRQRRAKAAGTISQKGDFERPLPGYEKPIICKGIKNKEARFNNRKRPIGWLTPTANHLLLTHINLVKKLQKFLPITDVVLEINKFAFMQLDNPHIQRWQYQKGPLYGKGSVEEAVYAQQDGHCLFCGKAIAHYHHIVPQHKNGSETLENRVGLCNEHHDLVHKDRAWEAKMRSTKEGINKKYHALSVLNQIIPALADQLALLFPQRTFVTAGKDTADFRADHGIHKEHHLDAYCIACSILETAAKVKEPAEQPYLMTQFRRHDRQACHKANITRKYYDTDNKLVASNRHKAMDQKADSLEEYRIAHGEKAVSQLAVKPHPPAYKDINRVTPGSLLADNNGKVFTLTRSDGKHNGIADYFVDTQDIKHLAKRCILLQKNQGIVFAETG

SEQ ID NO: 13688 - protein, 432 aa, unidentified
  REGION 1..432: note = Bacilli bacterium
LKQKEYVFVVDKKGKQLSPTDINNAWRLIRTKKAKCIKYNPFTIKLNKIVKEEELDQSVFEMGIDDGSSNVGFSILQYCKKDNQITRIKVIQKATMEQRKDVKHLMEIRRGYRRNRRSEKRSRECQFNNRSASKRDGRIAPTIKQKRDAVVRIVKYYKKLVNITQIALEDVSIDIRALTEEKELKGEEYQQSNRQDDNIRRAVYLRDKGICQMCGEHKQKMEAHHIHPRRLGGPDSIYNEILLCHDCHSSINGKELQYKDTFYKKINGKLIRTDYAQHVMQGKYYLRNELSLLGELHLTFGGTTANKRNTWNIEKSHTNDAICIGCKDINMKPDTVNVKEYTIKPIRHKRKSNTTSMKFELGDYVELEIRSNKLKKKIKVTGYITSFVKCQKGKDKGKLTYINLTANDGTIYKRYSLKKCKLLERQKHLRFL

SEQ ID NO: 13689 - protein, 470 aa, unidentified; identical to SEQ ID NO: 2825
  REGION 1..470: note = Human gut metagenome

SEQ ID NO: 13690 - protein, 431 aa, unidentified; identical to SEQ ID NO: 3801
  REGION 1..431: note = Human gut metagenome

SEQ ID NO: 13691 - protein, 422 aa, unidentified
  REGION 1..422: note = Human gut metagenome
LNKRGKPLMPCSPAKARLLLKEKKAIVVRRTPFTIQLTIATGESKQPVSLGVDAGYKHVGLSASTEKAELYASEVELRKDITDLLSARRALRQSRRNRKTRYRAPRFDNRIRTKRKGWLAPSVENRINAHLSRIEAVLRLLPITKITVETASFDMLLLKNPDIAGKEYQEGEQLGFWNVREYVLFRDGHVCQHCYGRSKDPVLNVHHLESRRTGGDSPGNLITLCETCHKALHRGEITLKAKRGQSFRAQAFMGIMRREVLNRLKASYPELKVHETYGYLTKHARIANGIVKSHGADAFCIAGNLGAERLGEFFFQKQTRRNNRQIHKLSILKGGIRKRNQAPFEIKGFRLFDKVACQGEEGFIFGRRSSGSFDVRKLDGTRISAGISCKKLRLLEKRRTYLTEIRKEEALPPLPEGRGLRA

SEQ ID NO: 13692 - protein, 521 aa, unidentified; identical to SEQ ID NO: 7054
  REGION 1..521: note = Human gut metagenome

SEQ ID NO: 13693 - protein, 423 aa, unidentified; identical to SEQ ID NO: 3951
  REGION 1..423: note = Human gut metagenome

SEQ ID NO: 13694 - protein, 415 aa, Bacillus sp.; identical to SEQ ID NO: 7196

SEQ ID NO: 13695 - protein, 344 aa, Moorena sp.; identical to SEQ ID NO: 3540

SEQ ID NO: 13696 - protein, 416 aa, unidentified; identical to SEQ ID NO: 9724
  REGION 1..416: note = Bioreactor metagenome

SEQ ID NO: 13697 - protein, 424 aa, unidentified; identical to SEQ ID NO: 5075
  REGION 1..424: note = Human gut metagenome

SEQ ID NO: 13698 - protein, 411 aa, unidentified; identical to SEQ ID NO: 6901
  REGION 1..411: note = Human gut metagenome

SEQ ID NO: 13699 - protein, 424 aa, unidentified
  REGION 1..424: note = Human gut metagenome
MVYVLSKEGTPLMPTNRHGRVRHLLDAGEAKAVKRCPFTIQLLYQSTTYTQEITLGVDAGSKTIGLSASTEKKELYASETRLRMDITDLLSVRRQFRRTRRNRKTRYRKARFNNRVHAKHKGWLAPGIEAKIGTHFRAVRDVCRILPVTEIIVETASFDIQKIKALENGEPVPEGTDYQEGDQLGFWNVREYVLWRDGYKCRCCNGKSKDQVLNVHHIESRKTGGDAPNNLATLCGYCHKQYHKGTILLPKSVRRGNSFRDAAFMGIMRRTFYNRLKEQYPRVAMTYGYITKNTRIRNSLPKTHYADARCIAGHPQAEPLEVYYFQKKVRCHNRQIHKANILKGGKKKRNQAEYLVKGYRLYDRVRYQNREYYVFGRRASGFFDIRTLGGNKGNKGSVSCKKLRFLEPRKTMLIERRMQEQEAV

SEQ ID NO: 13700 - protein, 493 aa, unidentified; identical to SEQ ID NO: 2644
  REGION 1..493: note = Human gut metagenome

SEQ ID NO: 13701 - protein, 416 aa, unidentified
  REGION 1..416: note = Human gut metagenome
MVYVLSQHGQPLMPTENHAKVRALLKHGKAKVIQRCPFTIQLLYESTTHTQKINLGIDAGSKTIGVSATTDSKVLYESEVVLRNDIVELLSGRRALRRSRRNRKTRYRKPRFDNRKKPDGWLAPSIRQKIETHVTVVENITKILPMTKIIVETASFDIQKIKNPEIEGAEYQHGEQLDFWNVREYVLFRDGHTCQCCKGKSKDNILNVHHIESRKTGGNAPNNLITLCETCHKAYHKGIITLPKEIHRGMRFRDAAFMGVMRWAFYDRLKELYNLLGVEVINTYGYITKNTRITYDLPKEHYVDARCISGNPAAKPMDYYYLQKKVRCHNRQIHKCKINKGGTRKRNQAAYEVKGFRLYDQVLWKGQKCFIFARRSTGRMDLRLLDGTHVNASVGYKNLKLLSMRKNYLIEQRKAG

SEQ ID NO: 13702 - protein, 461 aa, unidentified; identical to SEQ ID NO: 2919
  REGION 1..461: note = Wastewater metagenome

SEQ ID NO: 13703 - protein, 520 aa, Micromonospora sp.
LYTGVKTNSGVLPQLRTLESVSADTAPRSHETGHGRRKAAGVRHGRGETGVSRRHPEPASAGTGEGREAHTHPVVFVVDRHHRPLQPCSPARARKLLASGRAVVHRHTPFVIRLKDRGVADSQVDGVELGIDPGSKVTGIAVFRADNTLRTGLFAIEVRHRGGQIRDKLTARAVFRRGRRSRNLRYRAPRFLNRRRSDGWLAPSLRHRIDNTVSWVQRLCRWAPVTGLHVERVAFDTQLMQNPNIAGVEYQHGTLHGYEVREYLLAKWGRECAYCGASGEPLNIDHIVPRSRGGSDRVSNLTLACVPCNLAKGATPVEVFLADRHDVLARIRLQAKLPLRDAGAVSATRRAVWQALAATGLPVEVCTGGRTKWNRHQTGAPKTHSLDALHVGVLAGVQSCPGEVLVAAATGRGSYARTRCDRYGFPRLRLPRSKSVYGFQTGDLVHAVVSAGKNKGRHIGRVAVRTTGEFNIRTSHALVQGIHHRHFRLLQRADGWAYAREEERRFFPALNGRVSTPQRR

SEQ ID NO: 13704 - protein, 422 aa, unidentified; identical to SEQ ID NO: 5333
  REGION 1..422: note = Human gut metagenome

SEQ ID NO: 13705 - protein, 515 aa, unidentified; identical to SEQ ID NO: 5111
  REGION 1..515: note = Human gut metagenome

SEQ ID NO: 13706 - protein, 425 aa, unidentified
  REGION 1..425: note = Ga0315277_10034546
MQRVFVLSSDQKPLDLCHPARARKLLKQGRAAIFRRQPFTIILKDRTAAESVTHPYRLKFDPGSKTTGIAIVQEQTGEVVWAAELQHKSNLVADRMEKRVGCRGRRRTANLRYRPPRFGNRRREKGWLTPCMRSRVGNIRTWTARLMRVCPITAFSLELVKFDTQAMQNPEISGVEYQRGTLAGWDVREYLLEKWERKCAYCGAKDVPFEAEHILPKSRGGTDRVSNLTLACHECNQAKGNQTAAEFGHPEVQVEAKQSLKDAAAVTTTRWAVYAVLRDTGLPVETGTGGRTKYNRTRLGLPKAHWIDAACVGASTPDALGVRGPGWQSRPLIIRAMGRGSRQMCRMDKHGFPRTAAKSVKRVHGFQTGDLVRAIVPTGKHAGTHVGRVAVRTSGSFRVGTVDGIGYRHCRLLQRTDGYEYVSHS

SEQ ID NO: 13707 - protein, 426 aa, Parasutterella sp.; identical to SEQ ID NO: 3045

SEQ ID NO: 13708 - protein, 421 aa, unidentified; identical to SEQ ID NO: 12209
  REGION 1..421: note = Human gut metagenome

SEQ ID NO: 13709 - protein, 440 aa, Clostridium sp.; identical to SEQ ID NO: 10253

SEQ ID NO: 13710 - protein, 453 aa, unidentified; identical to SEQ ID NO: 9767
  REGION 1..453: note = Human gut metagenome

SEQ ID NO: 13711 - protein, 504 aa, unidentified; identical to SEQ ID NO: 3854
  REGION 1..504: note = Human gut metagenome

SEQ ID NO: 13712 - protein, 475 aa, Ferroplasma sp.; identical to SEQ ID NO: 9016

SEQ ID NO: 13713 - protein, 458 aa, Acidithiobacillus sp.
MPCHPARARELLREGRARVHRIVPFTIRLVDRLQADSVLQPLRLKLDPGSKTTGLALAREKETVDPTTGEVLRTLTILMLLELKHRGHAIRDALTSRSALRRRRRGNLRYRPARFDNRTKPEGWLAPSLQHRVDTTLAWVKRLMRWAPVTALSQELVRFDMQQMQNPEISGTEYQQGTLAGYEVREYLLEKWGRECVYCRAQHTPLEIDHIHPRSKGGSDRVNNLTVSCHDCNQRKGNRPLEQFLAKAPERAEKILKQAKARLNDAAAVNSTRWTLFQRLKATGLDVEVASGGRTKWNRIRLGLPKAHCIDAACVGHLDAIKNWQQPVLSIKATGRGSYQRTRLTKYGFPRGVLTRSKSAFGFQTGDMVKAVVTRGKKAGAWLGRVAIRVSGSFNIQTATGLVQGIHHRFCTLIQRADGYSYSWTKIASTQGDAGLGRSQTAALSLPGLNPGVSRATG

SEQ ID NO: 13714 - protein, 455 aa, unidentified; identical to SEQ ID NO: 11167
  REGION 1..455: note = Mouse gut metagenome

SEQ ID NO: 13715 - protein, 366 aa, unidentified
  REGION 1..366: note = Human gut metagenome
VVGNRLLSIKPLINIGEGVIYSSICTGLSLQTYQKRKEVPCMVYVLDINGQPLMPTTRHGKVRRLLNSHLAKVVKRCPFTIQLLYQSTKEIQPVSLGVDAGSKHIGMAATTEKKVVYQEELSARNDVVKLLSARRTLRRTRRNRKTRYRKPRFNNRVHSKHKGWLAPSVEVKIQEHITTIKRICQILPISEIQVETAEFDLQRLKAMEEGRTPPVGTDYQLGEQYDFYNTRQYVLHRDGYTCQCCGTHDNNIKLHVHHIESRQTGGDAPNNLIILCEHCHKALHEGKLELPKGKKRGKSYRDATFMGVMRKTLLERLKKEIDVPVEGTYGYITKYWRERAGLEKSHIHDAVCISQYPYAKPLDIYY

SEQ ID NO: 13716 - protein, 418 aa, unidentified
  REGION 1..418: note = Human gut metagenome
MVYVLGQDGHPLMPTCRHGKVKRMLKSRMAKVVKKCPFTIQLQYESTTHTQKINLGIDAGSKTIGVSATTDSKVLYESEVVLRNDIVELLSGRRALRRSRRNRKTRYRKPRFDNRRRPDGWLTPSIRQKIKTHVTVVENVMKILPVTKIIVETASFDIQKIKNPEIEGAEYQYGEQLDFWNVREYVLFRDGHTCQCCKGKSKDNILNVHHIESRKTGGNAPNNLITLCETCHKAYHKGVITLPKEIHRGMRFRDAAFMGIMRWAFYDRLKELYTPFGVEVINTYGYITKNTRIEHGLPKEHYVDARCISGNPAAKPLGHYYFQKKVRCHNRQIHKNTILKGGIRKRNQAAYLVKGYRLFDKVKYQNQEYFIFGRRSSGFFDIRTLNGTKVNKGSISCKKLQLVEKSKHYLTEQRKVTA

SEQ ID NO: 13717 - protein, 408 aa, unidentified
  REGION 1..408: note = Human gut metagenome
MVYVQDINGKPLMPTTRHGKVRRLLKDKKAVVVNLCPFTIKLTYVTSDYKQEIVLGVDAGTKHVGLSATTKSKELYSSEVILRNDIVDLLSTRRELRRSRRNRLRYRKPRFDNRIKSKRPGWVAPSVKYKVDAHIRVIDNVCSILPISRIVIEVAQFDTQKINNPEISGKEYQEGDQLGFWNVREYVLARDGHKCQHCKGKSKDPVLNVHHIESRKTGGDSPSNLITLCETCHKEYHKGNIDLKIRRGKSLRDAAVMGIMKWRLYEELKSKYDNISMTFGYVTKYNRIKHGIEKSHVFDAFVISKNFDAIRLGYYYKVRLVRRHNRQIHKQKIPKGGIKRPNQSPFEVFGFRLFDRVMFENSYYFIFARRKTGSFNIRDIDGKNQRDITYKKLKLSRCKRFMVQKEMD

SEQ ID NO: 13718 - protein, 424 aa, unidentified
  REGION 1..424: note = Human gut metagenome
MRVFVFNMRGVPLMPCTQRKARILLKEGKAVIYKYNPFTIQLTHATGENTQDCHVGIDTGAKHAGVAITSEGKVLFKGEIELRQDVKSNLDTRRIYRRNRRNRKTRYRQPRFLNRRKADKWLPPSLQNRLDHTFHWIDTLRGLVPSPTLHIEVGKFDTAKMIDPEIHGVDYQHGQTYGFFDERYYVFARDNYTCQCCGKSKGKILQTHHIIYRSNGGTDRADNLITVCTDCHTSKNHQKGGILYMWQEQHKKVRQYKEPPFMNTLRRRIFAKYPDAAITYGSETTPKRKEKGLDKTHYNDAIIISGVQTISENPDEWLFIRQFRKKKRSLHEGTPRKGRKEPNRTQKRNSKNTPYYRGYHLNDKVRVLGKTGYISGFTGGAAYVKDSDNQYITLPNKSYKQVGISNLQHVCHNNNWQYITKTTA

SEQ ID NO: 13719 - protein, 430 aa, unidentified
  REGION 1..430: note = Human gut metagenome
MPKVYVLNRHGRPLMPCTPAKARHLLDAGKAKVRHRTPFTIQLLYGSTGYTQEVILGVDAGSKTIGLSAATETEELFSAEVKPRNDVVELMSARRQFRRARRNRTTRYRKPRFDNRVRSKHKGWLATSVEVKIQEHMTAIRRACAILPVSKVVVETAEFDLQLLKAVAEGKPVPQGEDYQKGEMYGHYNVRQYVLWRDSYTCCICGVHGSVRKGVPLHVHHLESRRVGGDAPDNLVTLCTACHDKLHKGIIMAADIKKRKRRSTRDTTFMGIMRMTLLRRLWEQLPVPVVETRGYITKATRENLLVLPKSHTNDALAIAHGPQGFRAEYLPNIRQADRLYTIRPVRHHNRQLHKATILKGGVRKANQAEKYICGFRLYDKVLYNGIECFVWGRRTSGSFLLRQLNGEKVKDGVSYKHLKLLERSQSYLVA

SEQ ID NO: 13720 - protein, 493 aa, unidentified; identical to SEQ ID NO: 2644
  REGION 1..493: note = Human gut metagenome

SEQ ID NO: 13721 - protein, 442 aa, Lactobacillus sp.
MKHENANRVFLLNRDGKPLMPCRPRKARLLLKSGKAFVVKKYPFTIQLKYGSYGYKQKASLGVDTGQRHIGFAIVSQNKVLYQSEVELRQDVHKNLYTRKIYRRSKRNRKTRYRQARFLNRVHGKRDGLWLPPSIKGKVSHNIAWIKRYLAVLPNTDLHIEVGKFDMAKMINPEISGKQYQEGSLKDWKNYEYYVLARDEYTCQLCHKHGEGVKLVVHHIVYRSHGGTDRISNLITLCTDCHTTKNHQPGGKLYKWMKAKKKVTKQLKCATFMNILRKRIMTAFPEASFQYGSQTYVDRKNLLLPKGHFMDAIAISGIKSVGQMPDTVTLISQFRKKKRSLHEATARKGRKQPNTSSKRNEKNMNHARGLWLNDYVRVIGNHAKGYVKGFKSKGYYVYLTDGLGNYVLSNGKNYINRKQCRLIMHNGNWQKAEQKLSLYEFK

SEQ ID NO: 13722 - protein, 419 aa, unidentified
  REGION 1..419: note = Human gut metagenome
MVYVLDINGQPLMPTARHGKVRRLLNSHLAKVVKRCPFTIQLLYQSTKETQPVSLGVDAGSKHIGLAATTEKKVVYQEELTPRNDVVKLLSARRTLRRSRRNRKTRYRKVRFNNRVHSKHKGWLAPSVEVKIQEHITVIKNVCKILPISEIHVETAEFDLQRLKAMEEGKPLPVGTDYQLGEQYDFYNTRQYVLHRDGYACQCCGTHDNDVKLHVHHIESRQTGGNAPNNLITLCEHCHKALHEGKIELPKGKKRGRPYRDAAFMGTMRNTLLERLKKEMDIPVMMTYGYITKYWREKTGLEKSHINDAICISKHPYAKPLDTCYLTKAVRHHNRQIHKANFSKGGIRKRNQAPYLVKGFRLFDKILYQGKECFIFGRRVSGGMDVRLLDGTHINAFVGYKKLKLLESRKAYLIERRTC

SEQ ID NO: 13723 - protein, 470 aa, unidentified; identical to SEQ ID NO: 2825
  REGION 1..470: note = Human gut metagenome

SEQ ID NO: 13724 - protein, 427 aa, Moorena sp.
MSKVFVIDSEKRQLDPMHSAQARQLLRNKKAAVFRRFPFTIILKESKPESPVSPLRLKLDPGAKTTGIALVNDSTGEIVFAAELKHRGFAIRDALTSRRQLRRGRRNRKTRYRKPRFLNRTRPEGWLAPSLQSRVENIKTWVNKLRKFAPIKAISQELVRFDMQLMRNPEIQGEEYQQGTLAGYETREYLLEKWNRQCAYCGVKDVPFQVEHIHPRAKGGSNSIANLTLSCEKCNTKKGTKDIKEFLKKDPSKLTKILGQAKRPLADAAAVNTTRWALFKTLRETGLPVETGSGGLTKFNRSQQKLEKTHWLDATCVGKSTPKLIIKCVKPLLIISNGHGSRQSCRTDKFGFPNRHVPREKIHFNFQTGDIVKAVVTTGKKVGNYVGKVAIRSSGSFNVSTKKGLIQGISHKFCKRIHAKDGYSYAQ

SEQ ID NO: 13725 - protein, 429 aa, Moorena sp.
MQNRVFVIDVNKQPLNPIHPGRGRKLLKQGKTAVFRTYPFTIILKKTVRDPVNEPDRIKLDPGAKVTGMALVNQRTDAVVWAAELTHRGDMIRQKLADRRRVRRNRRHRKTRYRPARFDHRKRPDGWLAPSLQHRVETTMNWVERLGKCCSITDLSMELVRFDTQKLQNPEISGVQYQQGVLFGYELREYLLTKWRHECAYCGAQKVPLEIEHIHPKSKGGSDRVSNLAIACHQCNQKKGNKPVEQFLKKKPEVLKRLLAQANAPLKDAAAVNSTRWALFNRLQETGLAIEIGTGGLTKYNRTLQGLPKTHWLDAACVGKSTPMLNIATSQPLLITCTGRGGRQKAAINKYGYPIRHNPLKPIGRRPRCANKGWQTGDIAKHRVHGIGRITPRSRGSFVLSKPDKTKKSVKPIDLKPVFRRDGYSYKWA

SEQ ID NO: 13726 - protein, 408 aa, Petrotoga sp.; identical to SEQ ID NO: 11663

SEQ ID NO: 13727 - protein, 420 aa, unidentified; identical to SEQ ID NO: 5988
  REGION 1..420: note = Human gut metagenome

SEQ ID NO: 13728 - protein, 434 aa, unidentified; identical to SEQ ID NO: 9304
  REGION 1..434: note = Human gut metagenome

SEQ ID NO: 13729 - protein, 450 aa, Moorena sp.; identical to SEQ ID NO: 2935

SEQ ID NO: 13730 - protein, 432 aa, Moorena sp.
MSNFVFVIDTNKKPCDPVPPGQARRLLKQGNAAVFRRYPFVIILKYPASLHPGPHQLKIDPGSKTTGLAIIQQDKVVWGAQLQHRGQKISNDLKARNAVRRSRRNRKTRYRRPPIKNRGKRQRSKGWLAPSLKSRVYNIMTWVLRIKKYVPITGVSQELVKFNTQVLVNPETTGIEYQQGELFGYEVREYLLQKWGRKCAYCSATNTRLEIDHIHPRSRGGSNRVSNLTIACHECNQAKSNQDIRDFLAQKPDVLNRVLSQAKQPLKDAASVNSTRWALFNQLQQTDLPVEIGTGGRTKYNRTRLELPKTHWLDAACVGTQDMLTVLTSQPLLISAKGWGTRQMCITNKHGFPIKHRERKKVFFGFQTGDMAQANLPRGKFAGTHVGRLTVRKTGVFEMTKHIGKVSPVRHKYCKAIHRNDGYMYAFSTISH

SEQ ID NO: 13731 - protein, 475 aa, Blautia sp.; identical to SEQ ID NO: 4128

SEQ ID NO: 13732 - protein, 422 aa, unidentified
  REGION 1..422: note = Human gut metagenome
LNKRGKPLMPCSPAKARLLLKEKKAIVVRRTPFTIQLTIATGESKQPVSLGVDAGYKHVGLSASTEKAELYASEVELRKDITDLLSARRALRQSRRNRKTRYRAPRFDNRIRTKRKGWLAPSVENRINAHLSRIEAVLRLLPITKITVETASFDMQRLKNPDISGKEYQEGEQLGFWNVREYVLFRDGHVCRHCHGRSKDPVLNVHHLESRRTGSDSPDNLITLCETCHKALHRGEITLKAKRGQSFRAQAFMGIMRREVLNRLKASYPELKVHETYGYLTKHARIANGSVKSHGADAFCIAGNLGAERLGEFFFQKQTRRNNRQIRKLSILKGGIRKRNQAPFEAKGFRLFDKVACQGEEGFIFGRRSSGSFDVRKLDGTRISAGISCKKLRLLEKRRTYLTEIRKEEALPPLPEGRGLRA

SEQ ID NO: 13733 - protein, 326 aa, unidentified; identical to SEQ ID NO: 10937
  REGION 1..326: note = Human oral metagenome

SEQ ID NO: 13734 - protein, 442 aa, unidentified; identical to SEQ ID NO: 2903
  REGION 1..442: note = Human gut metagenome

SEQ ID NO: 13735 - protein, 512 aa, unidentified; identical to SEQ ID NO: 3493
  REGION 1..512: note = Human gut metagenome

SEQ ID NO: 13736 - protein, 457 aa, unidentified
  REGION 1..457: note = Human gut metagenome
VWLYQAVYNLGEGFLPSSEERTAFYWLLIYRKEHGIMQYVYVLNKHGEPLMPCSPGKARLLLKQQKACVVKRTPFTIKLLYGSAGYKQPITLGVDAGSKHVGLSASTEKRELYREEFTPRNDVVDLLSTRRQNRRSRRNRKTRYRAPRFDNRVHSKHKGWLAPSVEVKIQEHITVIKRICRILPITLVRVETAEFDTQRLKAMLKGKPLPVGTDYQLGEMYDEYNVRQYVLKRDNYTCQCCGAHPTEKKPVRLHVHHLESRHVGGNAPNNLITLCVACHKALHEGKITLDKGKKRGKPLRDAAFMGIMRNTLLARLKDELNIPVKQTYGYITKLLREKNKIPKSHVNDARCIAKTPNAKPCDTMLYTRALRHHNRQIHKAKILNGGIRKKNQAPYLVKGFRLWDKVRYNGEECFITGRRSSGYFALKKYDGTVISNSASYKKLMLLEAATNYITERS

SEQ ID NO: 13737 - protein, 507 aa, unidentified
  REGION 1..507: note = Human gut metagenome
VSEYIYVIGVDGDPQMPTKRKRHVEQLLQAGRARVFRQVPFTIQLTYENKPVLQPITIAEDPGRSNIGMAVVSLSGELLSAAVVQTRNKEIVKLMEKRKQHRRASRNGERKTRQRLAKKCYTMLKAGLLMRKLPTYGKDKRVQCNVIRNTEARFCNRKRSDGWLTPSAEHLVRTHINLIHKMQKFLPITDIAIEINRFAFLSLEDPSISGVDFQNGPLKGYDDLNAAVEDLQDGHCLMCNSPIEHRHHIVPRSMQGSNTIGNIAGLCCKCHEKVHKDSAFEDHLKKKKTGLNKRYVAVSVLNQAIPFICKRLEQEFGKEHVHYCSGRDTSMVRRSFGYHKTKEEQLHEVDAWCIAVLSLQQIPEKAPSFDHVHEILQFRRQDRSIIDAQTSRMYYHEGKKVAKNRKKAEGQREDSLQEWRKRQVERYGEEQTRKMISQLKVKKSIRRYNRLDRLMPGAVFYYQDVRYVMRGQHCEGTYLQAVGMGSKDFPAKKCKIVAHNEGLVFVS

SEQ ID NO: 13738 - protein, 413 aa, unidentified; identical to SEQ ID NO: 4790
  REGION 1..413: note = Human gut metagenome

SEQ ID NO: 13739 - protein, 419 aa, Lachnospira sp.; identical to SEQ ID NO: 3034

SEQ ID NO: 13740 - protein, 425 aa, Anabaena sp.
MSNFVLVLDTNKKPLTPIHPGDARFLLNQQKAAVFRRFPFTIILKEPKSDVLTQPIELKIDPGSKTTGFALVQNNKVIWGMELQHRGLAIKESLETRKGVRRGRRSRHTRYRQARFLNRTKPQGWLAPSLSHRVLTINTWVKRLCNFAPITDIVQELARFDLQQLENPEISGFEYQQGELQGYEVREYLLNKWNRKCAYCTAENVPLQVEHIKPKAKGGTNRISNLCLACEKCNIKKGTQDIEKFLGKKPELLKQILSQAKRTLKDASAVNSTRWALFNKLKETGLPITTGSGGLTKFNRTRLGLPKTHWIDAACVGKVETLKILTTKILTVKSTGHGCRRFCRINKFGFPCTEPKKIFTHVSTGDFVKATLHKDRKNITSGRYVSRVKTPTKNGCEIVINGFRVEFSTMKDITKVHCSDGYSYV

SEQ ID NO: 13741 - protein, 512 aa, unidentified; identical to SEQ ID NO: 12075
  REGION 1..512: note = Human gut metagenome

SEQ ID NO: 13742 - protein, 397 aa, Desulfurobacterium sp.; identical to SEQ ID NO: 8895

SEQ ID NO: 13743 - protein, 439 aa, unidentified; identical to SEQ ID NO: 3280
  REGION 1..439: note = Wastewater metagenome

SEQ ID NO: 13744 - protein, 431 aa, Escherichia sp.; identical to SEQ ID NO: 3801

SEQ ID NO: 13745 - protein, 518 aa, unidentified; identical to SEQ ID NO: 7468
  REGION 1..518: note = Human gut metagenome

SEQ ID NO: 13746 - protein, 470 aa, unidentified; identical to SEQ ID NO: 2825
  REGION 1..470: note = Human gut metagenome

SEQ ID NO: 13747 - protein, 409 aa, unidentified
  REGION 1..409: note = Human gut metagenome
MINYAFVLDADGKQLAPTKEQKAWFLIRKKRAVLVSKYPMVIRLKKKILDNEVCKDEMRCGIDDGGLHVGISVVQKCQTKNKVLFKGTIEQRNDVKRLMEVRRGYRRYHRNHKRHRPARFNNRSSPRRKGRIAPSILQKRQATIRVINCLNRWVNITSYWFEDVSIDIRALTDGYRPYKWQYQKSNRLDENIRRAVILRDGCKCMECGKSDCGLEVHHIKPRRLNGSNTLGNLITLCKNCHQKTEGKEEQFMDWYFSILGSSDNKNLNYAQHVMIGKNWLRDKLSGLGELHLTNGGDTANKRIDWNIEKSHSNDAICITGLLPDTCDVKEWIVKPMRRQSKAKTDNVLGIRHRDLVEYTYKSGETHMGYVTALYPCQHALNFQSPTKHCKKVNAKKCKLLWSYSKIYFL

SEQ ID NO: 13748 - protein, 406 aa, unidentified; identical to SEQ ID NO: 6079
  REGION 1..406: note = Human gut metagenome

SEQ ID NO: 13749 - protein, 478 aa, Pantoea sp.
VAVFVLDIHGKALMPCTEKRARLLLDRGRARVHRLLPMVVRLVDRQAGDCEFQPLRLKIDPGSKTTGLALVREVAAVDALTGEVQLGVAALNLLELVHRGRQISEAMTARRQMRRRRRSNLRYRAPRFLNRGGDKTGRLAPSLQHRVDTTMAWVRRIQRWAPVRAISSELVRFDMQALQNPEIEGIEYQQGTLFGYELREYLLEKWGRQCAYCGARNLPLQIEHIRARAHGGSNRASNLTLACACCNQKKAARSVEDFLAQDHKRLNAILAQAQKPLRDAAAVNATRRALANALQATGLPVELASGGRTKFNRSALGVPKTHALDAACVGQVHSIENWDRPTLALKAMGRGSYQRTRLDKFGFPRGYLMRSKRVHDFATGDMVRADVPKGLKAGVHWGRVAVRASGNFNIQSHQAGVSAVVQGIHYRHCRIVQRNDGYGYFLNPANHTKRDQVRPKASDASHPALYLPGMNAEVSRAL

SEQ ID NO: 13750 - protein, 406 aa, unidentified
  REGION 1..406: note = Human gut metagenome
MVYVQDINGKPLMPTTRHGKVRRLLKDKKAVVVNLCPFTIKLMYVTSDYKQEIVLGVDAGTKHVGLSATTKSKELYSSEVILRNDIVDLLSTRRELRKARRNRLRYRKPRFDNRVKSKRPGWIAPSVKYKVDAHIRVVENVCSILPISRIVIEVAQFDTQKIKNPEILGKEYQEGDQLEFWNTREYVLARDGHKCQYCKGKSKDSILNVHHIESRKTGGDSPSNLITLCETCHKEYHKGNIDLKIRRGKSLRDAAVMGIMKWRLYEELKSRYDRVFMTFGYITKHNRIKYGIEKSHTSDAFVISKNINAKRIERQYLKRLIRRHNRQIHKMKILKGGKKKNNQAPFEVFGFRLFDKVLYNNKIFFVYGRRKSGSFNIRDFNGENSKDVSRKKFKLIRGKRHPIILK

SEQ ID NO: 13751 - protein, 415 aa, unidentified
  REGION 1..415: note = Human gut metagenome
MVYVVANDGQPLMPTERHGKVCRMLKSGMAKVIKKCPFTIQLQYESKRNVQPVSLGVDAGSKHIGISATTKTKVLYESDVELRDDIVKLLATRRQLRRSRRNRKTRYRPARFDNRKRKEGWLAPSIRQKMESHLTVVANVCKILPVSRIIVETASFDIQKIKNPDIQGVEYQQGEQMDFWNIREYVFFRDGHTCQCCKGRSKDKILNVHHIESRKTGGNAPNNLITLCETCHKGYHNGTVILPKNIKRGMKFKDAAFMGIMRWAFYNALKEQYEPAIPVSMTYGYLTKNTRIRHNLPKEHHIDARCISGNPDAVSDGTYYYQKKVRCHNRQIHKQTILKGGIRKSNQAEYLVKGYRLFDKVRYHGREYFIFGRRKTGFFDIRTLSGEKVNKGSISVKKLTFADTRKNYLTERRTV

SEQ ID NO: 13752 - protein, 442 aa, unidentified; identical to SEQ ID NO: 3161
  REGION 1..442: note = Human gut metagenome

SEQ ID NO: 13753 - protein, 416 aa, unidentified
  REGION 1..416: note = Human gut metagenome
MVYVLDIDGQPLMPTNRHGKVRHLLKDGMAKVVQRCPFTIQLLYNNTNYTQEITLGVDAGSKHIGLSATTERIVLYEAEVELRNDIPKLLATRKQNRRSRRNRKTRYRKSRFDNRRRKEGWLAPSVQQKVDCHLKVVENVCKLLPVTKIIAEVASFDIQKIKNPKIEGTDYQKGDQLGFWNVREYVLFRDGHTCQCCKGKSKDKILNVHHIESRQTGGNAPDNLITLCETCHKRYHKGLIKLPEKIKRGMAFKDAAFMGIMRWAFYGRLKETYLPLGIDVSLTYGYLTKNTRISHQLPKKHHIDARCISGHPDAVSDGIYYHQKKMRCHNRQIYKAKTLKRGIRKRNQAEYLVIGFRLFDKVRYQGKDYFIFGRRKSGYFDIRDLNGEKVNKGSINYKKLRLVETRRSYLTERRLA

SEQ ID NO: 13754 - protein, 424 aa, Phormidium sp.
MSNYVFVIDTDKTPCDPVHPAQARLLLNQNKAAVFRRYPFTIILKETQNKKPTPLTVKIDPGSKTTGLAILRGEDVIWGAELSHRGQQIKASLESRRAIRRGRRSRKTRYRPARFLNRKKPKGWLAPSLQHRVDTTLTWVNKLIRYSPIVGITRELVRFDLQKMETPEISGVEYQQGELQGYEVREYLLEKWNRQCAYCGGRDIPLQVEHIQPKAKGGTNRISNLCLACEPCNIRKGTHDIKDFLSGQPDLLSRILKQAKSPLRDATAVNSTRWVLFNTLKGTGLPVITVRGGQTKFNRTRLGLPKTHWLDAACVGKVNSLKLLTSKPLLISAKGHGTRQMCRTDRYGFPSRYVPRHKLVKGFQTGDIVKAIVTRGKKVGEYLGRVAVRSQGSFNITTNQGLIQGISYKYCKHIHKKDGYSYVA

SEQ ID NO: 13755 - protein, 512 aa, unidentified
  REGION 1..512: note = Human gut metagenome
MSTVYVLNKDGKPLMPTTRCGHVRHLLKEQKARVVASKPFTIQLLYKTNDVVQPLYLGIDPGRTNIGVAVVKADGTAVFTAHLETRNKEIPKLMKKRKDSRRARRTNGRRCRRQRRAKANGTISKKCVKQDTAQNGSVSKRAKEIGVIKRHLPGCEKDVLCIGIKNKEAKFSNRTRPEGWLTPTANQLLQTHINLVKKIRKFLPISDAVLEINKFAFMQLDNPNIQKWQYQQGPLYQKANLKEAVSEMQEHHCLFCKKPIAHYHHVVPQSENGSDTIGNIVGLCTKHHDLVHKDTAWQKKLAKKKTGLNKKYGALSVLNQIIPALTKELSSLFPKHFFATNGKSTYDYRSAHGVSKDHWLDAYCIACSVLPNDVCDSGINNRVPYELKQFRRHDRRALNNENMSRVYTLNDNVVATNRHKATKQTTDSLEEFRQNHPDDVCKLKVKEHHPTYRNMNRNYPGSVFLIGKQVHVMQGIAGSKDGEATTYKDTNANSIAAGKCKFVAKNSGILFV

SEQ ID NO: 13756 - protein, 423 aa, Moorena sp.
MRVFVLNKNRQPLDPCKPARARIILSKGKAKVYRRYPFTIILTEEIEEPITHGSQLKIDPGSKTSGLAIIQNNRVVWGCELTHRGFQIRDALTSRRQLRRARRHRKTRYRQPRFLNRTRPKGWLAPSLMSRVHNILTWVKKLTRLCPITGLSQELVRFDTQKLQNPEISGIEYQQGTLYGYELREYLLEKWNRKCAYCGAKGTHLEIEHIKPLSKGGSNRVSNLAIACHSCNQAKSNQEIEQLLSGKPEILKRILSQAKRPLSDAAAVNTTRWKLYHELKLFGLPVEVGSGGLTKFNRCRQNLPKTHWLDAANVGKVDTLIVEDYKPLLVAAKGHGTRQICRINKYGFPIRYCSRVKIHKGFQTGDIVRAVVTKGKKIGTYVGRVATRKSGYFNISTKSGMVQGISHKYCQFIHRKDGYAYTD

SEQ ID NO: 13757 - protein, 450 aa, Moorena sp.; identical to SEQ ID NO: 2935

SEQ ID NO: 13758 - protein, 523 aa, unidentified
  REGION 1..523: note = Human gut metagenome
VSLSLNRQAEKKASTSAVTKHANARREEAAGMQSQYKGVTATNERGKNMVITLDKNKRPLGFMSERRCRILLEKKRAVLYRYFPTIVILKDVDARKLSGLSSYRIKIDPGAKYTGIAIVMDDTNEFMYAMQIEHRGEQIKKNLDTRRGARRNRRSRETGYRRPKWGNRCAAKEQRQSYDSRRDENWLPPSIKSTADNIISWIRRLCRWINITNCSIESVRFDTQLMENPEIEGVEYQQGTLYGYEVKEYLLEKYGHTCQYCGGKSNDPILEWEHMLPRSRGGSDRLKNATLACHNCNQDKGNHTLEEWQTILQDRIPKERGKQKELDQIRQKFVQQVMEGKTPVKGLRYAAWVNSSRRYSQRHLYLRFPELECSSGGRTKYNRNALGYPKEHHYDALCVGEIPEDGFVDRTNGYYLYAKATGRGTRLRGQINQCGVIIRTWMDRSKTAFGFQTGDLVVADVPKDTKYKYKGHFSGRVMIRKSGSFDIRTLSGEMVTVNAKFCRLLQNNSGYQMMIKRAIPLGN

SEQ ID NO: 13759 - protein, 451 aa, unidentified; identical to SEQ ID NO: 6972
  REGION 1..451: note = Human gut metagenome

SEQ ID NO: 13760 - protein, 411 aa, unidentified
  REGION 1..411: note = Human gut metagenome
MVYVQDIDGKPMMPTTRHGKVRRLLKDNKAVVVNTCPFTIKLTYKTSDYKQEIVLGVDSGTKHVGLLATTKSKELYASEVILRSDVVDLLSTRRGLRRTRRSRLRYRKQRFNNRVKSKKDGWIAPSVRHKIDSHIRIISFVYSILPVSKLIVEVAQFDTQKIKNPEISGKEYQEGEQLGFWNVREYVLARDGHKCQHCKGKSKDPILNIHHIESRKIGGDSPSNLITLCETCHKEFHKGNIKLKVSRGKSLRDAAVMGIMKWKLYEELKSRYDNVSMTFGYITKYNRINHGIEKSHVSDAFVISRNFNSCRLGYYYKRKLVRRHNRQIHKMKILKGGIRKRNQAPFKVFGFRLFDKVMFQGEEHFIYARRLSGQFNIRDINGENKKDVSCKKLKYVSHGLVSVKTNLFLSQ

SEQ ID NO: 13761 - protein, 431 aa, unidentified; identical to SEQ ID NO: 5232
  REGION 1..431: note = Human gut metagenome

SEQ ID NO: 13762 - protein, 512 aa, unidentified; identical to SEQ ID NO: 5238
  REGION 1..512: note = Human gut metagenome

SEQ ID NO: 13763 - protein, 431 aa, Moorena sp.
MRVFVLDKNLKPLDPCRPARARLLLKQGRAKVFRRYPFTIILSDLEVENCTTHNHQLKIDPGAKITGLAIRQNDTVIWSAEITHRGFQIRDALTSRRQLRRSRRNRKTRYRKPRFLNRKRPSGWLAPSLMSRVHNILTWVKKLIRLCPIAGIFQELVRFDTQKMENPEISGTEYQQGTLCGYEIREYLLEKWNRKCAYCGATDVRLEIEHIKPKSLGGSDRVNNLAIACHDCNQTKGNQEIEQFLSGKPDILKRILSQAKRSLADAAAVNSTRWKLYNELKLTGLPVKTGSGGQTKYNRRQFSLPKTHWLDAACVGDVQSIFVEDYQILSIVAKGHGTRQICRTDKFGFPKRYCSRTKIHKGFQTGDIVKAVVTKGKKIGTYVGRVATRKTGSFNISTANGLIQGISYKYCTPIHKKDGYAYQINTLPSLS

SEQ ID NO: 13764 - protein, 420 aa, unidentified; identical to SEQ ID NO: 5918
  REGION 1..420: note = Human gut metagenome

SEQ ID NO: 13765 - protein, 442 aa, unidentified; identical to SEQ ID NO: 2903
  REGION 1..442: note = Human gut metagenome

SEQ ID NO: 13766 - protein, 447 aa, unidentified; identical to SEQ ID NO: 3915
  REGION 1..447: note = Human gut metagenome

SEQ ID NO: 13767 - protein, 465 aa, unidentified; identical to SEQ ID NO: 3603
  REGION 1..465: note = Human gut metagenome

SEQ ID NO: 13768 - protein, 431 aa, unidentified
  REGION 1..431: note = Human gut metagenome
MPDKVYVISRLGHPLMPCSPAKARHLLDDGKAKVVKRTPFTIKLLYGSTEYTQPVILGVDAGSKTIGLSASTTKEELFAAEVMPRNDVVENLSTRREFRRARRNRTTRYRKPRFNNRVHSKNNGWLAPSVEVKIQEHITSIKRVCAILPISKIVVETAEFDLQLLKAVQDGKPVPEGEDYQKGEMYGSYDVRQYVLWRDNYTCTCCGVKGTDKKPVKLHVHHFESRKHGGNAPDNYGTLCEDCHKKLHLGIITDISLKTRKRPSTRGAAFMGIMRKTLMQRLITGLFIPVAETKGYITKAAREEILKLPKTHTNDALAIAQGRHGFGIREQAYVKPTNRIYTVRPVRHHNRQLHKATMLKGGIRKLNQASKYIFGFRLYDKVLYQGGECFVWGRRRSGSFLLRTIDGTKVKDGVGYRNLTLLERSTNYLIA

SEQ ID NO: 13769 - protein, 446 aa, Actinomadura sp.; identical to SEQ ID NO: 11832

SEQ ID NO: 13770 - protein, 309 aa, Oscillatoria sp.
MSNHVFVLDTNRKPLTPCKPGVARSLLKAGKASVFRRYPFTIILNKEVDANPEPLELKLDPGSKVTGIALKQGNHIIFAAELQHRGEPIKKALLSRRQLRRSRRNRKTRYRPARFLNRTRPEGWLAPSLQHRVDTLMTWVNRFRRLAPVGSIAQELVRFDLQLMENPEISGVEYQQGELQGYEVREYLLFKWGRTCAYCGAKNVPLEVEHIQPRSKGGSDRVSNLTLACHSCNQAKGHGDIRDFLSGQPDVLSRLLGQAKSPLKDAAAVNSTRWALFKALKATGLPVTTGTGGQTKFNRLRLNGTGGRH

SEQ ID NO: 13771 - protein, 413 aa, Clostridium sp.; identical to SEQ ID NO: 4134

SEQ ID NO: 13772 - protein, 395 aa, unidentified
  REGION 1..395: note = Human gut metagenome
MMPTTRHGKVRRLLKSKKATVVNLCPFTIRLLYDTTGYKQEITLGVDTGTKHVGLSATTKSKELYASEVILRSDVVDLLSTRRELRKIRRYRLRYRKPRFMNRIKSKKRGWIAPSIRQKIDSHIRIIGFVYSILPVSKLIIEVAQFDTQKIKNPEISGKEYQEGEQLGFWNVREYVLARDEHKCQHCKGKSKDPVLNVHHIESRKTGGDSPSNLITLCKTCHKEFHKGNIKLKVNRGESLRDAAVMSIMKWELYDELKSLYPNVKMTFGYITKYNRINHGIEKSHVSDAFVISRNFDSERLGYYYKRKLVRRHNRQIHKMKAPKGGNKRMNQSPFKVFGFRLFDKVMFQGKERFIYARRLRGIFNIRDINGENKKDISYKKLEYVSHGLISIVAG

SEQ ID NO: 13773 - protein, 442 aa, unidentified; identical to SEQ ID NO: 3658
  REGION 1..442: note = Human gut metagenome

SEQ ID NO: 13774 - protein, 402 aa, unidentified
  REGION 1..402: note = Human gut metagenome
CRRQRRAKTNGTISKKCVKQTTAQNGSVSKRAKEIGVIKRHLPGCEKDVLCIGIKNKEAKFTNRARPEGWLTPTTNQLLQTHINLVKKIQKFLPISDVVLEVNKFAFMQLDNPNIQKWQYQQGPLYQKGSLENAVSEMQEHHCLFCEKPIEHYHHVVPKSENGSNTIANIVGLCTEHHNLVHKDATWQKKLAKEKVGLVKKYSALSVLNQIIPALTKEMNSLFPKHFFVTNGKSTYDYRTAHGVSKDHWLDAYCIACSVLPNDVCDSNINSHVPYELKQFRRHDRRVLHKANMSRVYTLNGKTVATNRHKAIKQTTDSLEEFRQSHPGDVCKLKVKEHHPAYRNLNRNYPGSVFLVDGQVHVMQGVSGSHNGKADGYYNTNGNAYPYYKCKFVVKNEGIVFA

SEQ ID NO: 13775 - protein, 512 aa, unidentified
  REGION 1..512: note = Human gut metagenome
MSTVYVLNKDGKPLMPTTRCGHVRRLLKEQKARVVTSKPFTIQLLYETNDVVQPLYLGIDPGRTNIGVAAVKTDGTAVFTAHLETRNKEIPKLMQGRKKARRARRTNGRRCRRQRRAKANGTISKKCVKQTTAQNGSVSKRAKEIGVIKRHLPGCEKELLCIGIKNKEAKFSNRTRPEGWLTPTANQLLQTHINLVKKIQKFLPISDVVLEINKFAFMQLDNPNIQKWQYQQGPLYQKASLEEAVSEMQEHHCLFCKKPIAHYHHVVPQSENGSNTIGNIVGLCTKHHDLVHKDATWQKKLAKKKTGLNKEYGALSVLNQIIPALTKELSSLFPKHFFATNGKSTYDYRAAHGVSKDHWLDAYCIACSVLANDVCDSNINSHVPYELKQFRRHDRRALHKENMSRVYTLNGKSVATNRHKAIKQTTDSLEEFRQRQPNDVYKLKVKEHHPEYRNPKRNFPGCVFLVGKHTHVVQGTSGSHNSKADGYYDTNGNSYSSGKCKFVAKNKGIVFA

SEQ ID NO: 13776 - protein, 431 aa, unidentified; identical to SEQ ID NO: 2689
  REGION 1..431: note = Human gut metagenome

SEQ ID NO: 13777 - protein, 414 aa, unidentified
  REGION 1..414: note = Human gut metagenome
MPCSPAKARLLLKEKKAIVKRRTPFTIQLTIATGESKQPVTLGVDAGYKHVGLSASTEKAELYASEVELRQDVSDLLSARRALRQSRRNRKTRYRAPRFNNRLRTKRKGWLAPSVKNRINAHLSRIEAVLRLLPVTKISVETASFDMQLLKNPDIAGKEYPEGEQLGFWNVREYVLFRDRHVCQHCYGRSKDPVLNVHHLESRRTGGDSPGNLITLCETCHKALHRGDITLKAKRGKSFRAEAFMGIMRWEVHNRLRALHPGIEVSNTYGYRTKHARIANGIAKSHCADAFCIAGNLGAERLCEFFFQKQTRRNNRQIHKLSILKGGIRKRNQAPFEVKGFRLFDKVACQGEEGFIFGRRSSGFFDVRKLDGTRISAGISCKKLHLLEKRRTYLTEIRKEEALPPLPEGRGLRA

SEQ ID NO: 13778 - protein, 420 aa, unidentified; identical to SEQ ID NO: 4855
  REGION 1..420: note = Human gut metagenome

SEQ ID NO: 13779 - protein, 396 aa, unidentified; identical to SEQ ID NO: 4508
  REGION 1..396: note = Human gut metagenome

SEQ ID NO: 13780 - protein, 421 aa, unidentified
  REGION 1..421: note = Human gut metagenome
MQYVYVLNKHGKPLMPCSPGKARLLLKEGKARVVKRTPFVIKLLHGSAGYKQPVALGVDAGSRHVGLSACTEGRELYKEELSPRNDVVELLSVRRQYRRSCRNRKTRYRAPRFNNRVHSKHKGWLAPSVEVKIQEHITVIKRVCRILPIVLVRVETAEFDTQRLKAMLEGKPLPVGSDYQLGEMYDEYNVRQYVLKRDNYTCQCCGAHPAEKKPVRLHVHHIESRHVGGNAPNNLITLCAVCHKALHEGKITLGNGKKRGKPLRDAAFMGIMRNTLLARLKDELNIPVKQTYGYITKLLREENHVEKSHTNDARCIAKAPNAKPCDTMFRTRALRHHNRQIHKAKILKGGTRKKNQAPYLVKGFRLWDKVRYNGEECFITGRRTSGYFAIKKYDGTVISNSASYKKLTLLEAATNYITERS

SEQ ID NO: 13781 - protein, 456 aa, Halomonas sp.; identical to SEQ ID NO: 2773

SEQ ID NO: 13782 - protein, 278 aa, unidentified
  REGION 1..278: note = Human gut metagenome
LKVFVLNMRGQPLMPCSPAKARHLLKAGKAVVKRRTPFTIQLRIATGETKQSVTLGVDAGAKHVGLSAATEKEEVFASEVELRQDITGLLAARLSLRPERRQRKTRYRAPRFLNRVRSKHNGWLPPSVENRIQAHLSRIDAICGLLPVTKIVIETASFDIQKIKHPDVEGTDYQQGDQLGFWNVREYVLFRDGHVCQHCHGHAKDKILNVHHLESRQTGGDAPNNLITLCETCHKACHAGKIKLKVKRGQSFRAEAFMDIMRWTLLDRVRKAHPGLPV

SEQ ID NO: 13783 - protein, 424 aa, unidentified
  REGION 1..424: note = Human gut metagenome
MRVFVFNMCGEPLMPCTQRKARVLLKENKAIIYKYNPFTIQLTYTTGETAQDCRIGVDTGSKHMGIAVTSKDKVLFKGEVELRQDVKSNIDTKRIYRRSRRNRKTRYRKARFFNRKKADKWLPPSLQNRINHTFYWIDTFISLIPNPTLHVEVGKFDTAKMINPEINGVDYQHGQTYGFFDERYFVFARDNYTCQCCGKSKNKILQTHHIIYRSNGGTNRVDNLITVCTDCHTSKNHKKGEILYKWQEQHKKVKRYKEPPFMNVLRQRIFVTYPNAEITYGSETTPKRNIMGLSKTHYNDAIVISGINEINENCEDWLLIKQFRKKKRSLHEATARKGRKNPNRNQIRNNKNTPYYKGFYLNDKVSILGISGYVTGFTNGGAYIKDDNDNYITLPNKTYKQININKIKRKCHNNNWQYIVKNVA

SEQ ID NO: 13784 - protein, 442 aa, Anaerostipes sp.; identical to SEQ ID NO: 2903

SEQ ID NO: 13785 - protein, 404 aa, unidentified
  REGION 1..404: note = Archaeon sp.
MQKLLVELKNTPGDAPQVPCSVSGALNREETLSVSRTVLANNSSDEDQHSGRSGQTLNVPVINMHGKPLMPTSPGKARRLLQQGKAAVVQRSPFTIQLCYLTGNYTQNIKLGIDSGYSNIGFSAVTDKNELLSGELTLRKRISKLIEQKKGYRRDRRNKLWYRKPRFNNRSKPEGWFAPSIQHKLETHLRLIEKLKKILPITKIIVEVAKFDQQKMSKPEIKGVEYQQGELEGYEVREYLLEKWKHECAYCDKGNIPLEIEHIIPKIRGGTDRVSNLTLACHKCNQKKGDKTAEEFGYPNIQKKANQTLKSTAFMNIVRKKLVNILMANTTKVNTLKCAWTYGYITKHDRIKMKLEKSHVNDAFVIAGGTTQSRTIPYMATQTRRNNRRIQTNRKEYKPSISLL

SEQ ID NO: 13786 - protein, 413 aa, unidentified; identical to SEQ ID NO: 2636
  REGION 1..413: note = Human gut metagenome

SEQ ID NO: 13787 - protein, 425 aa, unidentified; identical to SEQ ID NO: 13021
  REGION 1..425: note = Human gut metagenome

SEQ ID NO: 13788 - protein, 431 aa, unidentified
  REGION 1..431: note = Human gut metagenome
MPNKVYVINKHGRPLMPCSPAKARHLLDAGKAKVKKRTPFTIQLVYGSSGYTQEVILGVDAGSKTIGMSASTKKEEVFAADVTPRNDVVDLMSTRREFRRARRNRKTRYRKPRFDNRVRSKHKEWLAPSVEVKIQEHITAIRRVCGILPVSKVVVETAEFDLQLLKAIEEGKPVPQGEDYQKGEMYGHYNVRQYVLWRDDYTCQCCGAHATKKKEVRLHVHHLESRKVGGDAPDNQVTLCESCHEKLHKGLIAEKDFKKRKRRSTRDATFMGIMRKTLMQRLCSELPIPVVKTRGYITKATREKLLVLPKSHTNDALAIAQGKRGFNVGYLPEIAQIDKIYTIRPVRHHNRQLHKATILKGGIRKSNQTEKYVFGYRLFDKVQFNGQDCFIWGRRTTGIFTIKTINGKMIKDGISFKKLKPVEKSTSYLIA

SEQ ID NO: 13789 - protein, 425 aa, Moorena sp.
MSNFVLVLDTNKKPLAPIHPGDARFLLNQQKAAVFRRFPFTIILKEPKSDVPTQPIELKIDPGSKTTGFALVQNNKVIWGMELQHRGLAIKESLETRKGVRRGRRSRHTRYRQARFLNRTKPQGWLAPSLSHRVLTINTWVKRLCNFAPITDIVQELARFDLQQLENPEISGFEYQRGELQGYEVREYLLNKWNRKCAYCTAENVPLQVEHIKPKAKGGTNRISNLCLACEKCNIKKGTQDIEKFLVKKPELLKQILSQAKRPLKDASAVNSTRWALFNKLKETGLPITTGSGGLTKFNRTRLGLPKTHWIDAACVGKVETLKILTTKILTVKSTGHSCRRFCRINKFGFPCTEPKKIFTHVSTGDFVKVTLHKDRKNITSGRYVSRVKTPTKNGCEIVINGFRVEFSTMKDITKVHCSDGYSYV

SEQ ID NO: 13790 - protein, 450 aa, Moorena sp.; identical to SEQ ID NO: 2935

SEQ ID NO: 13791 - protein, 431 aa, Calothrix sp.; identical to SEQ ID NO: 5518

SEQ ID NO: 13792 - protein, 401 aa, unidentified
  REGION 1..401: note = Human gut metagenome
MVNLTMPTTRHGKVRRLLKDKKAVVVNLCPFTIKLMYVTSDYKQEIVLGVDAGTKHVGLSATTKSKELYSSEVILRNDIVDLLSTRRELRRSRRNRLRYRKPRFDNRIKSKRPGWVAPSVKYKVDAHIRVIDNVCSILPISRIVIEVAQFDTQKINNPNISGKEYQEGDQLGFWNVREYVLARDGHKCQHCKGKSKDPVLNVHHIESRKTGGDSPSNLITLCETCHKEYHKGNIDLKIKRGSSLRDAAVMGIMKWRLYEELKSKYDNISMTFGYVTKYNRIKHGIEKSHVFDAFVISKNFDAIRLGYYYKVRLVRRHNRQIHKQKIPKGGIKRPNQSPFEVFGFRLFDRVMFENSYYFIFARRKTGSFNIRDIDGKNQRDITYKKLKLSRCKRFMVQKEMD

SEQ ID NO: 13793 - protein, 419 aa, Geobacillus sp.; identical to SEQ ID NO: 13599

SEQ ID NO: 13794 - protein, 413 aa, Sutterella sp.
LKVFVLNMRGKPLMPCSPAKARHMLKAGKAFVVRRTPFTIKLTIATGETKQDVTLGVDAGARHVGISATTEKEEVFASEVALRQDITGLLADRLAFRRARRNRKTRYRAPRFNNRVRSKHKGWLAPSVENRIQAHISRIEAVCRLLPVTKIVIETASFDIQKIRNPEVEGTGYQQGDQLGFWNVREYVLFRDGHICQHCRGRSKDPILNVHHLESRKTGGDAPNNLITLCETCHKAYHAGKIKLKVKRGQSFRAEAFMGIMRWTLLDRVRKTHPKLPVENTYGYLTKHKRIALGLPKTHCADAFCIAGNLKALRRGDFLFQQQTRKHNRQIHKCSILKGGVRTLNQAPFLVKGFRLFDKVRIGGQIGFVFGRRVRGTFNIRRLDKTVIGTDINCKKLSLLETRKTFLTELRKE

SEQ ID NO: 13795 - protein, 442 aa, Lactobacillus sp.; identical to SEQ ID NO: 5262

SEQ ID NO: 13796 - protein, 421 aa, unidentified
  REGION 1..421: note = Human gut metagenome
MRGQPLMPCSPAKARHLLKAGKAVVRRRTPFTIQLRIATGETKQSVTLGVDAGAKHVGLSATTEKEEVFASEVELRQDITGLLAARLSLRRERRQRKTRYRAPRFLNRVRSKHKGWLAPSVENRIQAHMSRIDAVCRLLPVTKIVIETASFDIQKIKDPSVEGTDYQQGDQLGFWNVREYVLFRDGHVCQHCHGHAKDKILNVHHLESRQTGGDAPNNLITLCETCHKACHAGKIKLKVKRGQSFRAEAFMGIMRWTLLDRVRKAHPGLPVENTYGYLTKNTRITPGLPKAHCVDACCIAGNLKAVRRGVCLHQRQVRKHNRQIHKCTVLSKTLKDGTKIGYRKLNQTPHLVKNFRLFDKVRCLGQTGFIFGRRSSGYFDVRRLDGVKLSSGISYRKLTLLEKRSTYLTELRKEDGASSPV

SEQ ID NO: 13797 - protein, 446 aa, unidentified; identical to SEQ ID NO: 11687
  REGION 1..446: note = Human gut metagenome

SEQ ID NO: 13798 - protein, 418 aa, unidentified; identical to SEQ ID NO: 5737
  REGION 1..418: note = Human gut metagenome

SEQ ID NO: 13799 - protein, 443 aa, Anoxybacillus sp.
MVEENMTCFMQRKGENPMVFVLDTNKRPLAPCHEAVARKLLKQGKAAIYRRFPFTIILKKSVDESEIKATYRLKIDYGSRHTGLAILRGQEVVWLGQLDHRTDIKERIDKRRAFRRARRNRKTRYRKPRFLNRKRKEGWLPPSLESRMQNIKTWVERLRKICPIEHISYENAKFDTQLMRNPEINGVEYQQGTLQGYEVREYLLEKFGRKCCYCGKEGVPLEVEHIIPKSRGGTDRIDNLCLACRDCNQRKGSQTAEEFGYPHIQEMVKKTLKDASVVNATRRKVYEVLKQSGCEVECGTGARTKMNRIRLGLPKIHYFDACCVGKSTPLQLHFKTKEVLFIKAKGRGSRSRTNLDRYGFPRGYLARQKYFFGFQTGDMVKANVPKGKYQGVWFGEVACRKTGSFDIKGKDGKRIAQGINYRYVQVIQRFDGYAYGKGVAELA

SEQ ID NO: 13800 - protein, 339 aa, Pseudoalteromonas sp.; identical to SEQ ID NO: 9888

SEQ ID NO: 13801 - protein, 420 aa, unidentified; identical to SEQ ID NO: 2812
  REGION 1..420: note = Human gut metagenome

SEQ ID NO: 13802 - protein, 451 aa, unidentified; identical to SEQ ID NO: 10609
  REGION 1..451: note = Human gut metagenome

SEQ ID NO: 13803 - protein, 427 aa, Enterococcus sp.; identical to SEQ ID NO: 2410

SEQ ID NO: 13804 - protein, 461 aa, Desulfotignum sp.
MGAFAVNGVSRVFVLDKKGKPLMPCHPARARKFLAQGRARVHQMFPFTIRLVDRIREDSDVQPVNVKIDPGAKTTGMAVVRQDGGHIHILHLSELTHRGSAIRKKLDQRSNYRRRRRTTNHWYRKPRFNNRTRPKGWLPPSLRSRVDNTLSWVKKYQKFCPVTGIVLERVRFDTQKLQNPDISGIEYQQGTLFGYEVKEYLLEKYKRTCAYCNGLSKDPVLEIEHFVPRNPSKGDKGSNRISNLAIACKTCNQDSKKNLQPADWISLLSRSRKKIDQVRLQNATRFLEGKRPSLASTAAVNATRNAIFFELRGLGLPVECSTGGRTKYNRSRLDIPKTHCLDAACTGQVDSVSGWKQNVFLIKAMGRGSYQRTRVDKYGFPRGTLMSQKTVKGFATGDMLKAVVPSGKKQGTYFGRVAVRKSGSFNIQTNTETVQGISWKYCKIISRQNGYNFASQVSSPT

SEQ ID NO: 13805 - protein, 415 aa, unidentified; identical to SEQ ID NO: 12104
  REGION 1..415: note = Human gut metagenome

SEQ ID NO: 13806 - protein, 427 aa, unidentified
  REGION 1..427: note = Human gut metagenome
LRVFVLNKRGKPLMPCSPAKARLLLKEKKAIVVRRTPFTIQLTIATGESKQPVSLGVDAGYKHVGLSASIEKAELYASEVELRKDITDLLSARRALRQSRRNRKTRYRAPRFDNRIRTKRKGWLAPSVENRINAHLSRIEAVLRLLPITKITVETASFDMQRLKNPDISGKEYQEGEQLGFWNVREYVLFRDGHVCRHCHGRSKDPVLNVHHLESRRTGSDSPDNLITLCETCHKALHRGEITLKAKRGQSFRAQAFMGIMRREVLNRLKASYPELKVHETYGYLTKHARIANGIVKSHGADAFCIAGNLGAERLGEFFFQKQTRRNNRQIHKLSILKGGIRKRNQAPFEAKGFRLFDKVACQGEEGFIFGRRSSGSFDVRKLDGTRISAGISCKKLRLLEKRRTYLTEIRKEEALPPLPEGRGLRA

SEQ ID NO: 13807 - protein, 442 aa, unidentified; identical to SEQ ID NO: 4533
  REGION 1..442: note = Human gut metagenome

SEQ ID NO: 13808 - protein, 424 aa, Fervidobacterium sp.; identical to SEQ ID NO: 6057

SEQ ID NO: 13809 - protein, 403 aa, unidentified
  REGION 1..403: note = Marine metagenome
QDISLHLDAGYANIGFSAQTKSRELLGGVLELLKGMSERIKERAMYRNNRRSRLRYRKPKFKKGGDFVSNRPDGWLAPSIQHKLDSHLNLIRKIQQILPITSIQIETASFDIQKINNPDIEGAGYQEGEQLGFWNLREYILHRDNHTCQNPNCKNKSKEKILQVHHIGFWKQDRSDRPANLITLCTKCHTTKNHQKNGFLYGWEPRLKSFKPETFMTTVRRGLVNQAREIFNLPVEETFGYLTKSSRIQKELPKSHHYDAFAMGNAKTVSRPYTINQTRRNNRSLENFNDAKYLHKETKEKVSGRDLTSGRRTRNKESHLNSLNLRYLRGHKISKGYRAIRRRRYPLQPNDTIRYEGKICKVTGTHSLGKTVRFKLPCGTTADKSVNKVKQIASCKGLAFKLD

SEQ ID NO: 13810 - protein, 456 aa, Moorena sp.; identical to SEQ ID NO: 12153

SEQ ID NO: 13811 - protein, 512 aa, unidentified
  REGION 1..512: note = Human gut metagenome
MSTVYVLNKDGKPLMPTTRGGHVRHLLKEQKARVVRTKPFTIQLLYETNDVVQPLYLGIDPGRTNIGVAVVKTDGTTVFTAHLETRNKEIPKLMKKRKDSRRARRTNGRRCRRQRRAKANGTISKKCVKQTTAQSGSVSKRANEIGVIKRHLPGCEKEVLCIGIKNKEAKFSNRTRPEGWLTPTANQLLQTHINLVKKIQKFLPISDVVLEINKFAFMRLDNPNVQKWQYQQGPLYQKASLEEAVSEMQEHHCLFCKNTIDHYHHVVPQHKNGSNTIGDIVGLCAKHHDLVHKDTEWQKKLAKKKTGLNKKYGALSVLNQIIPALTKELSSLFPKHFFATNGKSTYDYRAAHGVSKDHWLDAYCIACSVLADDVCDNNINSHVPYELKQFRRHDRRALHKENMSRVYTLNGKSVATNRHKATEQTTDSLEEFRQRQPNDVCKLKVKEHHPEYRNPKRNFPGCVFLVGKHTHVMQGTSGSHNGKADGYYDTNGNSYSSGECKFVAKNGGIVFA

SEQ ID NO: 13812 - protein, 426 aa, Calothrix sp.; identical to SEQ ID NO: 12058

SEQ ID NO: 13813 - protein, 512 aa, unidentified
  REGION 1..512: note = Human gut metagenome
MSTVYVLNKDGKPLMPTTRCGHVRHLLKEQKARVVRTKPFTIQLLYETDDVVQPLYLGIDPGRTNIGVAVVKADSTAVFTAHLETRNEEIPKLMQGRKKARRTRRTNGRRCRRQRRAKANGTISKKCVKQTTAQNGSVSKRAKEIGVIKRHLPGCEKDVLCVGIKNKEAKFSNRTRQEGWLTPTANQLLQTHINLIKKIRKFLPISNVVLEINKFAFMRLDNPNIQKWQYRQGPLYQKASLEEAVSEMQEHHCLFCKKSIAHYHHVVPQSENGSNTIGNIVGLCTKHHDFVHKDTAWQKKLAKKKTGLNKKYGALSVLNQIIPALTKELSSLFPKHFFATNGKSTYDYRAAHSVSKDHWLDAYCIACSVLANDVCDSNINSRVPYELKQFRRHDRRALNNENMSRVYTLNGKVVATNRHKATKQTTDSLEEFRQNHSDDVCKLKVKEHHPTYRNMNRNYPGSVFLIGKQVHVMQGIAGSKNGEATTYKDTNANSIAAGKCKFVAKNSGILFV

SEQ ID NO: 13814 - protein, 427 aa, unidentified; identical to SEQ ID NO: 8384
  REGION 1..427: note = Human gut metagenome

SEQ ID NO: 13815 - protein, 671 aa, Clostridium sp.
MKPWITTRILQASVREDARKCRKETIMVAVLSNTDVALMPTSSCRARILLRSKRAEIVGYHPFTIRLLDRETGNTQPIEYKSDTGSVYVGVSICSEKHEYISEERILLDDEKKKHDNCRTLRRTRRNRLRYRKPRFDNREKAKGWIAPTLQNKLDRQLDIFHAYKKVMPITSATFEVGKFDIQLLAAMESGKPVPEGKDYQQGARYQQETLRQAVFFRDSFTCQVCQKGVKDGVILRMHHIGFRKNDHSDRMANLLTVCTTCHSSKNHNPGGELWDLKPEIKPLHDAAFMNTIRWKLIDTLKETHPDVELHFTYGARTKCTRRTMHIGKSHANDAYCIGEFHPKHRCDTVYYQKQRRNNRVLEKFYDAVYLDLRTGEDEKAAALGSGRTKRNTHLAYKDQRPYRGRKVSSGHRSITRKRSPYKKGDILRVQKEYTVKEPDQNGKLQKVTKVMDVTAKLASSHSKVDSKTLKAFRTGKIKKIPKSAVMMAYDFTEPLPNGRQSCDGKHVKAVKTTKIQAWKRISKPEPKKRRLTPNDKEQTRRIPRTTYKGGGTLRHDNGKTVFRIPYIQIKNKGFKIASQISRSSVPDRPHPYRIFLPVAICKRRLYAWAARYAGTRFLKCHDRWLYAADVLICTFHQPIHYGIHYHAAYDRGISEYRGNAKGRKDRTGPF

SEQ ID NO: 13816 - protein, 340 aa, Anoxybacillus sp.
MVFVLDTNKCPLAPCHEAVARKLLKQGKAAIYKRYPFTIILKEIVDNFRPKTPYRLKIDHGSKHTGLAILRGQEVVWLGQLDHRTDIKERMDKRRAFRRARRNRKTRYRKPRFLNRKRKEGWLPPSLESRVQNIQTWVNRLKKLCPIGYISYENAKFDTQLMRNPEINGVEYQQGTLQGYEVREYLLEKFGRKCCYCGKENVPLEVEHIIPKSRGGTDRVDNLCLACHDCNQRKGSKTAEEFGYPHIQKQVKETLKDTSAINSTRWKAYEVLKQTGLDVECGTGARTKMNRIRLDLPKTHYFDACCVGESTTNHLYFKTKEVLFIKAKGRGSRSRTNLDR

SEQ ID NO: 13817 - protein, 430 aa, unidentified
  REGION 1..430: note = Human gut metagenome
MPKVYVLNRHGRPLMPCTPVKARHLLDAGKAKVRQRTPFTIQLLYGSTGYTQEVVLGVDAGSKTIGLSASTETEELFSAEAKPRNDVVELMSARRQFRRARRTRKTRHRKLRFNNRVRSKHKGWLAPSVEVKIQEHMTAIRRVCGILPVSKVVVETAEFDLQRLKAVAEGKPVPQGEDYQKGEMYGHYNVRQYVLWRDGYTCRVCGAHGSVKKGVPLHVHHLESRRVGGDAPDNLVTLCTACHDKLHKGIITVEDFKKRKRRSTRDATFMGIMRMTLLRRLWEQLPVPVVETRGYITKVTREKLLVLPKSHTNDALAIAHGPQGFRAGYLPNIRQADRLYTIRPVRRHNRQLHKATILKGGVRKANQAEKYICGFRLYDKVLYNGIECFVWGRRTSGSFLLRQLNGEKVKDGVSHKQLKLLERSQSYLVA

SEQ ID NO: 13818 - protein, 450 aa, Clostridium sp.; identical to SEQ ID NO: 2935

SEQ ID NO: 13819 - protein, 421 aa, unidentified; identical to SEQ ID NO: 4235
  REGION 1..421: note = Human gut metagenome

SEQ ID NO: 13820 - protein, 452 aa, unidentified; identical to SEQ ID NO: 4732
  REGION 1..452: note = Sediment metagenome

SEQ ID NO: 13821 - protein, 458 aa, Lactobacillus sp.; identical to SEQ ID NO: 6016

SEQ ID NO: 13822 - protein, 466 aa, unidentified; identical to SEQ ID NO: 11103
  REGION 1..466: note = Human gut metagenome

SEQ ID NO: 13823 - protein, 267 aa, unidentified
  REGION 1..267: note = Human gut metagenome
VETAEFDTQRLKAMLEGKPLPVGTDYQLGEIYDEYNVRQYVLKRDHYTCQCCGAHTTTKKTVKLHVHHLESRKVGGNAPSNLITLCTTCHDALHKGKVSLDGKERGKPLRDAAFMGIMRKTLMARLRDELSIPVQGTYGYITKMRREQNDIKKSHVNDARCISKHPLAEPCSVCYRTKAIRHHNRQTHKANFSKGSIRKRSQMPYVVEGYRLWDKVLYKGQECFVSGRRASGSFTLKKLDGTRISKGVTFKKLRLLEPATNYLIERM

SEQ ID NO: 13824 - protein, 462 aa, unidentified; identical to SEQ ID NO: 2823
  REGION 1..462: note = Human gut metagenome

SEQ ID NO: 13825 - protein, 428 aa, Sutterella sp.; identical to SEQ ID NO: 5624

SEQ ID NO: 13826 - protein, 425 aa, unidentified
  REGION 1..425: note = Human oral metagenome
MLVYVLKQNGQPFMPTSRFGKVRRLLKTKKAKVVRREPFTIKLLYEPETDVVQECYCGVDTGSRHIGVAVVENDKVLYQSQTELRSDIKRKMDSRRMYRRNRRNRKTRYRKPRFLNRRNSIRKDRLSPSVRHKVQAHIDEIEFCKKILPIKDENLILEVSQFDTALMKNPILMNEKIKHWGYQQGFNYGYSSRRKAVLHRDNYTCQYCGKKNCRLEVHHVKFRSNGGTDDEENLITLCKECHDGVHAGTVTLDRKPKKSKGLKHATHMSIIRSRLLKEYPDAIETFGFVTNENRNHLKLEKDHYIDACVIASGGLEFKELEVIFYKNRVSKGDYQLTKGIRGEQKLPTGKICGFRKFDKVEYLGEKYFIKGRMNSGFAILMNIFSEKVDFSSMPKGLKTPKLSNCNRISTRRSCLCINQIRKVIN

SEQ ID NO: 13827 - protein, 424 aa, unidentified; identical to SEQ ID NO: 3351
  REGION 1..424: note = Human gut metagenome

SEQ ID NO: 13828 - protein, 442 aa, unidentified; identical to SEQ ID NO: 2903
  REGION 1..442: note = Human gut metagenome

SEQ ID NO: 13829 - protein, 419 aa, unidentified; identical to SEQ ID NO: 4877
  REGION 1..419: note = Human gut metagenome

SEQ ID NO: 13830 - protein, 442 aa, Lactobacillus sp.; identical to SEQ ID NO: 13721

SEQ ID NO: 13831 - protein, 462 aa, unidentified; identical to SEQ ID NO: 4058
  REGION 1..462: note = Human gut metagenome

SEQ ID NO: 13832 - protein, 419 aa, unidentified
  REGION 1..419: note = Human gut metagenome
MVYVISKDSKPLMPCSNVIARLLLKQGKAKVKKREPFTIKLTCETTNYTQDLTLGVDAGSGTIGTAVSKNNGDIVYMAEVVVRNDITDKMTRRAKYRRNRRNRKTRYRKARWLNRTNSIRNDRFSPTMQSKLHSHVKEIEYIKSILPVTKMVFETGQFDTHLMKNPSLANPKIKHWGYQKGPNYGFENTKAFVLNRDNYTCQCCKGKHKDSKLEVHHIVFRSQGGSDEESNLITLCHTCHKDLHSGKINIKLKGKVKGNLKYATQMNSIRKQLFRLYPSAIETFGYVTKANRLLLGVDKKHYYDACTIATQGNTFNVKSNLYKKRCVSDGDFQKTKGVRSEQPIVTDKIYGFRKFDKVRYFGKNYFIKGRMSTGYAILMDIDGNKIDFSAMPKGYKTPKLSNCNRVSARTTQMIQTVAI

SEQ ID NO: 13833 - protein, 341 aa, unidentified
  REGION 1..341: note = Human gut metagenome
TDLLSARRALRQSRRNRKTRYRAPRFDNRIRTKRKGWLAPSVENRINSHLSRIEAVLRLLPVTKITVETASFDLQLLKNPNISGKEYQEGEQLGFWNIREYVLCRDGHVCQHCYGRSKDPVLNVHHLESRRTGGDSPGNLITLCETCHKALHRGELTLKAKRGQSFRAEAFMGIMRWEVLNRLKASHPELEVNNTYGYRTKHARISNGIAKSHCADAFCVAGNLGAERLGEFLFQKQTRRNNRQIHKLSVLKHGLRKRNQVPFEVNGFRLFDKVACKGEEGFIFGRRSSGFFDVRKLDGTRISAGISYKKLHLLEKRQTYLIEIRKEEAFPPLPEGRGLRA

SEQ ID NO: 13834 - protein, 463 aa, Moorena sp.
MAVFVLDRSGRPLMPCTEKRARLLLARGRARVHKVMPFTIRVVDRLAEDNEFQALRVKLDPGSKTTGMALVRETAENGVAVINLFELMHRGKQISEALTARRGHRSLRRSRLRYRPARRLNRGNKKSGWLAPSLQHRVDTTLAWVNRIQRYAPVSAISTELVRFDMQALENPEIEGAQYQQGTLAGYEVREYLLEKWHRTCAYCGAKNVPLQIEHIHPKSKSGSDRISNLTLACQCCNAKKAALPVEVFLAKQPERLKRIQAQAKRPLKDAAAVNATRWALINALKTTGLVVETASGGRTKFNRIELGIPKTHALDAACVGPMNSMTGWRKPTLCIKAMGRGSYQRTRLDKFGCVRGYLTRSKNIQGFQTGDRVKAIVTKGKKAGCHIGRVAVRASGSFNIQTSNGLVQGVSHRYCTVVQRGDGYGYQLVAKTEATGTQPKQGDALHPALYLPGLKAGISRAN

SEQ ID NO: 13835 - protein, 362 aa, unidentified
  REGION 1..362: note = Human gut metagenome
MVYVLNMDGQPLMPTNRHGKVRHLLKDGMAEVVKRCPFTIKLLYRSTNYTQPVTLGVDAGSKHIGLSATTEDKELFASDVELRNDIVDLISTRRQNRRGRRSRKTRYRKPRFLNRTGNRKSGWVAPSIENKIQTHLTVVDKVCRMLPVSKIVVETASFDIQKIKNPDICGTEYQQGEQLNFWNVREYVLFRDGHKCQCCKGKSKDKILNVHHIESRKTGGDAPNNLITLCETCHTGYHKGTVKLPKTIHRGMVFRDAAFMGIMRWAFYNELKRRYPNVSHTYGYITKNIRIENNLPKYHYIDARCISGHPLAVPSGEVFYQKKVRCHNRQIHKNTIGKGGYRKRNQAEYIVKGLRLFDKVSY

SEQ ID NO: 13836 - protein, 477 aa, unidentified
  REGION 1..477: note = Human gut metagenome
MVITLDKNKQPLGVCSERRARILLQKKRAYVRKYFPFTIVVKDTDIRTLEKRDEYRIKIDPGSKYTGIAVVRLTDDAVVFFQQIEHRGGQVKSDLETRSATRRNRRSRETRYRRPKWRNKQLAKNKKPGYDTSRPEGWLPPSEKSIADNIISWVIRLKKLFNITQCSFEAVRIDTQLMDNPEIEGVEYQHGELAGWECREYLLDKYGHTCQYCRGASGDKILEVEHINPKAQGGSNKIKNLTIACHTCNQAKGARTPKQWLVSFEGNETKLAEERCKGIRNVIRNKVSGVSNRYCAWVNSTRRYIEKALFFLFGDVECASGGRTKANRVKLKLPKDHHYDALCVGAIPENGFKDLSNGYCFMAKAIGRGSRLRGNINKCGIIILKFKKGPKRRFGFQNGDIVRANVPKGKYSGVHVGRVMTRASGSFDIRKANGERASSNYRYCRILQHDNGFLCSYQNRKAKTQFLSAINNRDPLR

SEQ ID NO: 13837 - protein, 396 aa, unidentified; identical to SEQ ID NO: 4508
  REGION 1..396: note = Human gut metagenome

SEQ ID NO: 13838 - protein, 499 aa, unidentified
  REGION 1..499: note = Human gut metagenome
MRYVYVLDVDGKPLMPTCRYGKVRRMLKSGQAKAVDTLPFTIQLTYQTKTKILQPVTAGQDPGRTNIGLAAVREDGIDLYRSHCETRNKEISKLMEERLAHRRASRRGERLARKRLAKKFGTIAKKLNGRLLPGYKEPLAVKDIINTEAKFNARLRPEGWLTPTATQLLRTHLNLLERVSRILPVTDVAIEINRFAFMELADPDKKHSEIDFQHGALFGTGGLEQAIREQQQDRCLLCGKRDIEHFHHIIPRTKRGSNTIANLAGLCEECHTLVHQSEEAKSRLEEKKQGLLKQYGGTSVLNQIIPSLVKELEIRYPGHLYVTTGKDTKAFREKHGLEKDHDVDAYCIAASRMENIKPKIQTEPFEIQQFRKHNRANIHHQTERTYKLDGKVIAKNRKKRMDQKTDALEDWYNAMMQQHGKQQAERMCARLTVQKSIRYYNNLDRIMPGMVFLYRKKRYVMTGQKNRGYYYLAYGEGVTPFSSKKVNIVCHNTGLVYVA

SEQ ID NO: 13839 - protein, 512 aa, unidentified; identical to SEQ ID NO: 5549
  REGION 1..512: note = Human gut metagenome

SEQ ID NO: 13840 - protein, 465 aa, unidentified; identical to SEQ ID NO: 9038
  REGION 1..465: note = Human gut metagenome

SEQ ID NO: 13841 - protein, 414 aa, Streptomyces sp.; identical to SEQ ID NO: 6272

SEQ ID NO: 13842 - protein, 442 aa, unidentified; identical to SEQ ID NO: 2903
  REGION 1..442: note = Human gut metagenome

SEQ ID NO: 13843 - protein, 431 aa, Escherichia coli; identical to SEQ ID NO: 6926

SEQ ID NO: 13844 - protein, 408 aa, unidentified
  REGION 1..408: note = Human gut metagenome
MVYVQDIDGKPMMPTTRHGKVRQLLKDKKAVVINTCPFTIKLMYKTSDYKQEIVLGVDAGTKHVGLSATTKSKELYSSEVILRSDIVDLLSTRRELRRTRRNRLRYRKPRFDNRIKSKRTGWVAPSVRHRIDAHIRVIDNVCSILPISRIIVEVAQFDTRKIKNPNISGNEYQEGNQLGFWNVREYVLTRDGHKCRHCKGKSKDPILNVHHIESRKTGGDSPSNLITLCETCHKEYHKGKIDLRVKRGKSLRDAAVMGIMKWKLYEELKSRYDNVSMTFGYITKYNRIKYGIEKSHISDAFVISKNFNALRLGYHYKVRLVRRHNRQIHKQKVLKGGVKKPNQSSFEVFGFRLFDRVMFEGNCYFIFGRRKSGSFNIRDIDGGNQRDITYKKLKLLRCKRFMIQKETN

SEQ ID NO: 13845 - protein, 465 aa, unidentified
  REGION 1..465: note = Human gut metagenome
MSTCACVLSKNGERLMPTIRLGKVRHLLKDGKAKIIKHHPFTIQLLYDSETNIQPIEICEDVGYNYIGISVKSQSHEYVSAQYDTLQDEKDCHDSCRKMRRTRRNRLRYRKPRFDNRKHDKGWLAPSLEHKKELNVNVIKMYCEVMPITHATVEVGSFDTMLVKAIEEGKATPESTDYQKGPRYNLASLREAVFYRDNYTCQVCGRKANEGAILHVHHMFYWKGRHGNSLNELVTVCEKCHTPANHQKGGKLYGFGENIKFANLSGAAFMNTVRWQIVNELYAAFGKPFVTFTYGAMTKEKRIALHLDKSHSNDAYAMGNFHPVDRCAFEHYEKVKRNNRILEKFHDSRYIDIRTGKEAKGKELFNGRISRSHKKDSENLHKYRGKRIRKGYRALRRKKVTLNSGDLVSLNGETLIVHGTHTNKKGNVRVEFKVAALNGKKSASLKKLKIVKTSTPMHSAWAKVS

SEQ ID NO: 13846 - protein, 462 aa, unidentified
  REGION 1..462: note = Human gut metagenome
MSVLVIGRNGRALMPTNPRKARLLLKKKTASVVCRHPFTIQLLYKTGCATQEGCIGIDTGSQHIGVGITCGDKVILKDEHALRSSMEKRSLLATRAVMRRGRRYRKVRYRKPKWRHHTKRMYFEKANRRGQHWRKVKTTTQSPRPKGWLPPSLQSKCDHHFRIIDRYLKYLPDPITRNLVIETGRFDMARINDPTIHGEMYQRGPMYDAENLRAYIFARDNYQCACCKAKAGTTRKADGTTVKLVAHHILFRSRGATDNPKYIISVCDHCHTTKAHQPGGILYSWMENNKKVARGLRDATFMNILRKRLFARYPQAAFTYGNITAADRKKLRLPKSHANDAVAISLFGKEASTVKNICQTMHYKQIRKSKRSLHEAIPRKGRKNPNTKAVRNKKNTTQVNGFKLWDSVLANGKKLFICSFTGTSAYLIDKNGCYISQPGKTYKQWPLSKLKRLHPNGNWLMA

SEQ ID NO: 13847 - protein, 429 aa, Moorena sp.
MCNYVFVLDANHKPLNPCRPVTARKLLTAGKAAVYRRYPFTIILKKQVEAEPKPMSLKIDPGSKMTGLAIVYGNQVVWSAEIEHRGSKIKSALDSRRAVRRSRRNRKCRYRKPRFNNRKRPEGWLAPSLQHRVATTMTWVLRLIKLTPIGSISQELVRFDTQKLQNPEISGIEYQQGELMGYEVREYLYQKWDRQCVYCGAHSVKLEIEHIVPKSKGGTNRVSNLTLACHRCNQAKGNLNAQDFLLGKPDVLKRILARAKQPLLDAAAVNSTRWKLYQSLKKTGLSVEVGTGGRTKYNRIKLGLPKSHWIDAACVGEVATLEIVTRQPLLIKAMGHGCRQVIQMDGIGFPRKGYKPKHPVKGWKTGDIVNVVAGKNAGLKGVRIKTVRAKGNFDLIGADQDSSNKVLSASRNYIQCVHRQDGYYYSFAK

SEQ ID NO: 13848 - protein, 445 aa, Clostridium sp.
LIKRGVPLMVYVLSKEGKPLMPTNRYAKVRVLLKSKKAVVVNSKPFTIKLLYNTKSFTQPITLGIDSGYLNIGFSAITKEKELISGEVKLLKGMSERIKEKAMYRRQRRSRLRYRKPRFDNRKRSKDWLAPSIQHKYDSHIRFIDKLKKLLPITNIIIEVANFDTHKLKNPSIEGAVYQNGEQKDFFNLREYILHRDGHKCQNPNCKSKGAESILQVHHIGFWKQDRSDRPSNLITLCNKCHTPKNHKENGFLYGWQPKVKSFKEATFMSMIRWRLVNTLGCKHTYGYITKSNRIALKLEKTHYNDAFCIAGGSNQNRANPLIFEQIKRNSRSLEKFYDAKVIDIRTNTKVSGLELFNGRRIRNKNLNSENLRKYRGVKVSKGQRRIRTKRYFYQPGDLVKYEDKVYTVKGTQNKGKYIALKELKKVPKVELLAPYKFRKGLVCV

SEQ ID NO: 13849 - protein, 414 aa, unidentified
  REGION 1..414: note = Human gut metagenome
MPCSPAKARLLLKEKKAIVKRRTPFTIQLTIATGESKQPVTLGVDAGYKHVGLSASTEKAELYASEVELRQDVSDLLSARRALRQSRRSRNTRYRAPRFDNRIRTKRKGWLAPTVENRINVHLSRIETVLRLLPVTKITVETASFDTQLLKNPDIAGKEYQEGEQLGFWNVREYVLFRDEHVCQHCHGRSKDPALNVHHLESRRTGGDSPRNLITLCETCHKALHRGEITLKAKRGQSFRAEAFMGIMRWEVLNRLKASHSELKVHNTYGYLTKHARIANSIAKSHGADAFCIAGNLGAARLGEFFFQKQTRRNNRQIHKLSILKGGLRKRNQAPNEIMGFRLFDKDACKGEEGFIFGRRSSGYVDVRKLDGTRISASISCKKLRLLEKRRTYLTEIRKEEALPSLSEGRGLRA

SEQ ID NO: 13850 - protein, 420 aa, unidentified
  REGION 1..420: note = metagenome
MQYVYVLNKHGEPLIPCSPGKARLLLKQQKACVVKRTPFTIKLLFGSAGYKQPITLGVDAGSKHVGLSASTEKRELYSEEFTPRSDVVELLSTRRQNRRSRRNRKTRYRVPRFDNRVHSKHKGWLAPSVEVKIQEHITVIKHICKILPISLVRVETAEFDTQRLKAMLAGKPLPVGTDYQLGEMYDEYNVRQYVLKRDHYTCQCCGTHNTAKKVVKLHVHHLESRKTGGNAPSNLVTLCTTCHKNLHKGKVTLDGKERGKPLRDAAFMGIMRKTLMARLKEELPIPVQGTYGYITKMRREQNDIKKSHTNDARCISKHPLAEPCSVCYRTKAIRHHNRQTHKANFSKKGIRKRSQMPYLVEGYRLWDKVLYKEQECFVSGRRSSGSFTLKKLDGTSVSKGVTFKKLRLLEPATNYLIERM

SEQ ID NO: 13851 - protein, 442 aa, unidentified; identical to SEQ ID NO: 3161
  REGION 1..442: note = Human gut metagenome

SEQ ID NO: 13852 - protein, 411 aa, unidentified
  REGION 1..411: note = Mouse gut metagenome
MPCSQRKARLLLKNKKAKIYAYHPFTIQLFYASGETIQKCNIGVDTGSRHIGLAITSENKVLFKGEIDLRQDVKSNLDTRRTYRRNRRNRKTRYRKARFFNRVTSKQKNWLPPSMESKIHHTFHWMNKLENLVADSNLHIEVGKFDMAKMIRPDIQGKEYSQGQCYGYFDTRYFVFARDDYTCQCCKKKNKILRTHHIRYRSNGGTDRADNLITVCTDCHTSKNHKKGGILYEWQQRHKKGKPYKEPPFMNIIRKRIYQKYPDAVISYGSQTTPKRKERNLDKTHYNDAIIISGIEDIKENPKEWLRIKQFRKKKRSLHEAAARKGRKEHNRTQKRNRKNTSYDKGWYLNDYVEVFGKKGYISGFTNSGVYIKNTNDDYITMPDKKYKQVSHHNLVRICHNNNWQYEIQKI

SEQ ID NO: 13853 - protein, 438 aa, unidentified; identical to SEQ ID NO: 4848
  REGION 1..438: note = metagenome

SEQ ID NO: 13854 - protein, 427 aa, Enterococcus sp.; identical to SEQ ID NO: 5630

SEQ ID NO: 13855 - protein, 529 aa, unidentified; identical to SEQ ID NO: 6786
  REGION 1..529: note = Human gut metagenome

SEQ ID NO: 13856 - protein, 431 aa, unidentified; identical to SEQ ID NO: 9553
  REGION 1..431: note = Human gut metagenome

SEQ ID NO: 13857 - protein, 427 aa, unidentified
  REGION 1..427: note = Human metagenome
VYVINKHGRPLMPCSPAKARHLLDAGKAKVKKRTPFTIQLVYGSSGYTQEVILGVDAGSKTIGMSASTTKEELLSAEVKPRNDVVDLLSTRREFRRVRRNRKTRYRKPRFDNRVRSKHKEWLAPSVEVKIQEHITSIKRVCRILPVSKVVIETAEFDLQLLKAIADGKSVPQGEDYQKGEMYGHYNVRQYVLWRDNYTCQCCGAHATKKKEVRLHVHHLESRKVGGDAPSNLITLCDSCHEKFHKGIITAANLKKRKRRSMRDATFMGIMRKTLIQRLRAELTIPVAETRGYITKTTREKLLVLPKSHTNDALAIALGKHGFNVGYLPEIAQIDKIYTIRPVRHHNRQLHKVTILKGGIRKSNQAEKYVFGYRLFDKVQFNGQDCFIWGRRTTGIFTIKTINGKMIKDGISFKKLKLVEKSTSYLIA

SEQ ID NO: 13858 - protein, 380 aa, Arthrospira sp.; identical to SEQ ID NO: 3156

SEQ ID NO: 13859 - protein, 507 aa, unidentified
  REGION 1..507: note = Human gut metagenome
LKKEAAGHRQGKDCRPVRYGPPYRAGMPDGRRKPERKHMVAVVTSTGKPLMPTSAYRARKLLKKGRAVIFKYRPYFTIQLVDRADGEVQEVEYKSDTGSVHVGISVCTEKKELLSEQRDLLENEPEHHNDRKKNRRTRRNRKRYRKPRFDNRKKKPQEGHEKWLPPTLLHKMEVQVRLFREFCRVVPVTSACFEMGKFDTQALKAVSKGEPVPEGEGYQKGERYGTDTLRAAVFLRDGHTCRFCGRSVKDGAILHVHHVGYWKGDRTNRPANLASACEQCHTPANHGKNGILYGKEPEFKTLKDASYMTSVRWIMLDEIKKAAPGVQVSVTYGVTTKRKRQELHLPKSHVNDAFSMASFHPKKRSDTEYWKKIPRHDRVLQKFYDAIYLDTRDGSEKKGSELSNGRISRNHKKDSENLHQYRGHKVSKGHNSIRRGASSLKPGSIVMYKGEKMTVHGTHTRYVKGKDGKTAKKVNVQFTCPASDGKKSASLEKCTPVSRVYNTGWKR

SEQ ID NO: 13860 - protein, 451 aa, unidentified
  REGION 1..451: note = Human gut metagenome
MSVAVMSKTSMRLMPTSEYRARKLLKSKKATVYGYHPFTIQLTERETGDVQPVELCMDTGYLHIGMSVKSKKHEYLGVQIDTLTDEKQKHDACRMYRRQRRSRKRYRQSRFNNRKRSDGWIAPSLEHKKDIHIQTISRICNAMPITNITLEMGNFDTQVLKALEENRPLPQGTDYQHGERYGIATLREAVFARDKYTCQCCRKTIADGAILHVHHIIYRSRGGTNRMSNLATVCDRCHTPANHKPGGRLYNWKPKIASFKGATFMTAVRWKMYNEVKSKFSDINIHITYGAETKEQRRAFDITKSHVNDALVMGQFHPKHRSRPVCYKKKRRNNRCLEKFYDAKYIDSRDGKKRSGQELFNGRINRNHKKDSENLHQYRQQKVSAGRRTIRKQHYSIQPHDIIVFNRQQFETSGCHCNGARAILLPQKKSVAIKKLSIHKYAGGYFKSDFT

SEQ ID NO: 13861 - protein, 412 aa, unidentified
  REGION 1..412: note = Human gut metagenome
MVYVISQNGQPLMPTENHAKVRILLKNKKAKVIKRCPFTIQLAYDSTNYTQDITLGVDSGSKHIGLSATTKNKVLFESDVELRNDIVNLLSTRRQNRRTRRNRKTRYRKPRFNNRRRKEGWLAPSVQNKVDSHLTVIRKVHEILPITKVIVEVASFDIQKIKNPTISGTEYQQGEQLDFWNVREYVLFRDSHICQCCKGKSKDKILNVHHIESRKTGGDAPNNLITLCETCHTGYHKGIIKLPKTIHRGMSFKDATFMGIMRWAFYTKLKEIYPNVSLTYGYITKNTRIRNSLPKEHYIDARCISGNPKAISDGMVYYQKKVRCHNRQIHKNTILKGGIRKRNQASYDVMGFRLFDKVKWKGQNCFIFGRRSTGRMDLRLLNGTKINASVGYKNLKIIEMRKNYLTEQRKGG

SEQ ID NO: 13862 - protein, 453 aa, Anaerotruncus sp.; identical to SEQ ID NO: 10259

SEQ ID NO: 13863 - protein, 442 aa, Selenomonas sp.; identical to SEQ ID NO: 4776

SEQ ID NO: 13864 - protein, 456 aa, unidentified
  REGION 1..456: note = Human gut metagenome
MSTCVCVLSNNGERLMPTIRLGKVRRLLKDGKAKIIKHHPFTIQLLYDSKTNTQPIEICEDVGYNYIGISVKSESHEYVSAQYDTLQDEKEHHDDCRKYRRTRRNRLRYRKPRFDNRKRSEGWLAPSLEHKKQLNIRLIERYVSVIPITRATVEVGSFDTMLLQAIQKGESKPEGVDYQKGPRYNLATLREAVFYRDNYTCQVCGRKIADGAILHMHHMFYWKGRHGYQLDELVTACEKCHTPANHQKGGKLYGFGKDKKFANLSGAAFMNAVRWQIVDALHATYGKEFVTITYGAMTKEKRIILGIEKTHNNDAYAMGDYHPAHRCVFRHYQKRRRNNRVLEKFYDVTYIDARTGNKAKGKELFNGRISRNHKKDSEDLHKYRSKKVSKGRRSIRRQRYAIQPYDTVRLESKTYITSGCHNKGTRLLIPANGKSKSVAISKVQVVCHAGAWIQII

SEQ ID NO: 13865 - protein, 493 aa, unidentified
  REGION 1..493: note = Human gut metagenome
MAAVYVISASGKPLMPTTRCGHVRGLLNAGKARVVEREPFTIQLKYETPDVTQPLYLGIDPGRTNVGSAVVREDGECVFTAQLTTRNKDVPKLMKARKQFRMAHRRLKRRCKRQRRAKAAETLSQKGEFQRLLPGYEEPIICKGIRNKEARFNNRQRPAGWLTPTANHLLLTHLNMVKKLQKLLPITDVVLEVNRFAFMAMENPSIRRWQYQQGPLYGKGSVEDAVYAQQDGHCLFCGKPIAHYHHVVPQHKNGSETLENRVGLCNEHHDLVHKDRAWDAKMKETKAGLNKKYHALSVLNQIIPALTEQLTAMFPQHAFVTTGKDTADFREDYGIAKEHHLDAYCIACSVLAEPTKVAAPTGKPHRLMQFRRHDRQVCHKENIKRVYLSEGKAVATNRHKAIEQKDDSLEEFRKTHTQQEVSALTVKDHQPVYKDMRRFMPGGVFLFNGKVHTLQRSHGRYKEMPFYYIDTDGSKNHAKGCIFLQQNCGMRWA

SEQ ID NO: 13866 - protein, 518 aa, Anaerostipes sp.; identical to SEQ ID NO: 2751

SEQ ID NO: 13867 - protein, 473 aa, unidentified
  REGION 1..473: note = Human gut metagenome
MVAVVTNTGRPLMPTSTYRARKLLKGGRAVIYKYRPYFTIMLVDRAEGEVQDIEYKSDTGSKHAGISACTEKQELLSEQRDLPDREPEHHKEQQRYRRGRRNRKRYRKPKFDNRKKKPQEGHEKWLAPTNLHKLEIQVDLFKDFCQVVPVTSAYFEMGKFDTQVLKAVLEGRPIPQGEDYQRGEQYGTDTLRAAVFLRDDYTCRICGRTIKNGAILHVHHVGYWMQDRTNRPANLATVCEQCHTPANHGRNGILYGRKPEHGTLKDASYMTSVRWIMLKELKEAAPEVDIHVTYGVTTKRMRQGLHLPKSHVNDAFSMGRFHPKKRADTVYWKKTIRHDRSLQKFYDAVYLDTRDGREKKGSELSNGRISRNHKKDSENLHKYRGHKVSKGHVSIRRDGNKLKPGSVVLYNGERLTVHGTHTSYRKNKKGEEVKSVNVQFTRPASDGKKSASLKKCKIVTRNYNTGWKRYRPA

SEQ ID NO: 13868 - protein, 512 aa, unidentified; identical to SEQ ID NO: 7636
  REGION 1..512: note = Human gut metagenome

SEQ ID NO: 13869 - protein, 450 aa, Moorena sp.; identical to SEQ ID NO: 2935

SEQ ID NO: 13870 - protein, 415 aa, Moorena sp.
MRVFVLDKNRKPLDPCHPAKARKLLKSGRAKVLRRYPFTIIIKDLEAENCSTHDHQLKIDPGAKTTGLAIVQGDRVIWGAELTHRGFQIKEALTSRRQLRRSRRNRKTRYRQPRFLNRTRPKGWLPPSLMSRVHNILTWVNKLIRFCPVTGISQELVRFDTQKMLNPEVSGIEYQQGTLYGYELREYLLEKWNRTCAYCGADNTRLEIEHIKPKSKGGTDRVSNLAIACHDCNQAKGNLEIEQFLSRKPSILKRILSQAKKPLADAAAVNATRWKLHDELKLIGLPVEVGSGGLTKYNRCRQNLPKTHWLDAANVGKVDTLYIEDYQPLLITAKGHGTRQICRTDKFGFPRLHCSLKKIHKGFQTGDIVRAVVTKGKKIGTYMGRIATRKTGSFDIAAAKGKVSGISYKYCQAIH

SEQ ID NO: 13871 - protein, 405 aa, unidentified
  REGION 1..405: note = Human gut metagenome
VSVVREDGTVLHKEEIGLRDSMSKRKLLEAKASLRRGRRYRKTRYRHPKWRPKTKRVYCEVPDRKGRHWQKKKITFTSKRPKGWLPPSLQSKTDHHIRWIKKLQDLLPEGYRLSIELGRFDPARMKNPEIHGDLYQKGPQYDYENVRAYVLDRDRYTCQICKKKGGKLHVHHILYRSHGATDDPQYMVTVCSDCHSAQNHLPGGILYQWMQEQKRFSRGLRDATFMNILRKRLIRAFPEAVFTYGNVTKVDREKLKLPKSHGNDATAIALVKTGITAVKDKESVICIQQVRRKKRSLHEETPRKGRKEPNRTAARNNKNTKAVTVTKRQNKKKVSMTGCLFDRVELNGKKGWISGFTGKSCYVKDADDQYLSTSPKYKQVSLSKLRILHHCGNWIIGAKKTLGKG

SEQ ID NO: 13872 - protein, 428 aa, unidentified
  REGION 1..428: note = Uncultured Lachnospiraceae bacterium
MVYVSDKDGQPLMPTKRYGKVRHLLKEGKAKVVRCMPFTIQLLYDSGEHTQPVDLGVDAGSKYIGLSACSDKAELFAAEVEPRDDISKNLTSRKESRRTRRSRKTRYREPRFDNRTHHKKEGWLAPSVKCRCETHLTAIRKVMSLLPVSGITIEMAPFDTQKLKADIFDMKAPSGTDYQHGESEGYDNIKAYVRWRDGYKCAVCGREHIPLQVHHKKQRKDGGSNMPANLITVCVDCHKAYHAGLLPDGQAAVMQPDTDVKPMRDAAFMNIMRWAVWDRLKELGLPLHMSFGYITARQREKYGIEKSHHADARCISGHGDLPPAGEWFFCKKVRCHNRQIHKKNPGAGGYRKLAQQGHVIKGFKLNDTVLFGGKEWFIHGRREKGAFVLEDLDGNRTERAPSKLKFMHPNGTLLIERRKLIQGGSSHD

SEQ ID NO: 13873 - protein, 473 aa, unidentified; identical to SEQ ID NO: 3562
  REGION 1..473: note = uncultured beta proteobacterium

SEQ ID NO: 13874 - protein, 428 aa, unidentified
  REGION 1..428: note = Human gut metagenome
LKVFVLNMRGQPLMPCSPAKARHLLKAGKAVVKRRTPFTIQLRIATGETKQNVTLGVDAGAKHVGLSATTEKEEVFASEVELRQDITGLLAARLSLRRDRRHRKTRYRAPRFLNRVRSKHKGWLAPSVENRIQAHMSRIDAVCRLLPVTKIVIETASFDIQKIKDPSVEGTDYQQGDQLGFWNVREYVLFRDGHVCQHCHGRSKDKILNVHHLESRQTGGDAPNNLITLCETCHKAYHAGKIKLKGKRGQSFRAEAFMGIMRWTLLDRVRKAHPGLPVENTYGYLTKHTRITHGLPKTHCVDAYCIAGNLKAVRRGVYLHQRQMRKHNRQIHKFTVLSKRLEDGTKIGYRKLNQSPYLVHGFRLFDKVRCLGQIGFIFGRRSSGYFDVRRLDGVKLSPSISWRKLTLLEKRSTYLTELRKQDGASSPV

SEQ ID NO: 13875 - protein, 524 aa, Butyricicoccus sp.; identical to SEQ ID NO: 8949

SEQ ID NO: 13876 - protein, 421 aa, Lactobacillus sp.; identical to SEQ ID NO: 5881

SEQ ID NO: 13877 - protein, 453 aa, unidentified; identical to SEQ ID NO: 6331
  REGION 1..453: note = Ga0315284_10003077

SEQ ID NO: 13878 - protein, 420 aa, unidentified; identical to SEQ ID NO: 3247
  REGION 1..420: note = Human gut metagenome

SEQ ID NO: 13879 - protein, 430 aa, Moorena sp.; identical to SEQ ID NO: 3328

SEQ ID NO: 13880 - protein, 465 aa, unidentified
  REGION 1..465: note = Human gut metagenome
MSTCVCVLSNSGERLMPTFRLGKVRRLLKDGKAKIVKHHPFTIQLLYDSKTNTQPIEICEDVGYNYIGISVKSESHEYVSAQYDTLQDEKEHHDDCRKYRRTRRNRLRYRKPRFDNRKRDDGWLAPSLEHKKELNVNVIKMYCEVMPITHAIVEVGSFDTMLVKAIEEGKATPESADYQKGPRYKLATLREAVFYRDNYTCQVCGRKANEGAILHVHHMFYWKGRHGNSLSELITVCEKCHTPANHQKGGKLYGFGEDIKFANLSGAAFMNTVRWQIVNVLNAAFGKPFVTFTYGAMTKEKRIALHLEKSHNNDAYAMGSFHPVNRCAFEHYEKVKRNNRILEKFYDSQYIDTRTGELTNGKSLFNGRISRSHKKDSENLHKYRGKRLYKGHRALVRKKVNLNPGDLVSLNGEVLVVHGTHTNKKGAINVEFKVPSKSGKKSASLKKLEIIKTSNSMRSAWKKVS

SEQ ID NO: 13881 - protein, 512 aa, unidentified; identical to SEQ ID NO: 13135
  REGION 1..512: note = Human gut metagenome

SEQ ID NO: 13882 - protein, 433 aa, Clostridium sp.; identical to SEQ ID NO: 7140

SEQ ID NO: 13883 - protein, 415 aa, unidentified; identical to SEQ ID NO: 6044
  REGION 1..415: note = Human gut metagenome

SEQ ID NO: 13884 - protein, 749 aa, unidentified
  REGION 1..749: note = Human gut metagenome
LKVFVLNMRGQPLMPCSPAKARHLLKAGKAAVRRRTPFTIQLRIATGETKQSVTLGVDAGAKHVGLSAATEKEEVFASEVELRQDITGLLAARLSLRRDRRHRKTRYRAPRFLNRVRSKHKGWLAPSVENRIQAHMSRIDAICGLLPVTKIVIETASFDIQKIKHPDVEGTDYQQGDQLGFWNVREYVLFRDGHVCQHCHGHAKDKILNVHHLESRQTGGDAPNNLITLCETCHKACHAGKIKLKVKRGQSFRAEAFMDIMRWTLLDRVRKAHPGLPVENTYGYLTKNTRITLGLPKAHCVDAYCIAGNLKAVRRGVYLHQRQVRKHNRQIHKCTVLSKTLKDGTKIGYRKLNQTPHLVKNFRLFDKVRCLGQTGFIFGRRSSGCFDVRRLDGVKLSSGISYRKLTLLEKRGTHLTELIKEDGASSSVRRQRFLRRVSMNKPCTYLLSALMASAVLAPVAASAADKSELEVRMEAAQKVLADRSYYERWSPEAALKTVEDAKAANEAGSARQKEIDGALDVMKDWCHTRFLVNACIKDARDLHHEREKEIRSVRLKADEMIRLDRVEQRRARQESQKQNVKQPMKLGGSTESPESRSESRAEEVKTKQSRAEERRALEEANVRAYEEKQARAARKAEERHDPIRVKSRVKAPSSPIEGHLGRTAADVEAGRAEAAERMAQEDANVAAFNAKQAEAKKRLEEAEATAAERKASREARQANFNKTLEERRAAQKRYEESRENKDSGLKKYF

SEQ ID NO: 13885 - protein, 424 aa, Moorena sp.; identical to SEQ ID NO: 8578

SEQ ID NO: 13886 - protein, 407 aa, unidentified
  REGION 1..407: note = Human gut metagenome
VYVQDINGKPMMPTTRHGKVRRLLKDKKAVVVNLCPFTIRLTYVTSDYKQEIVLGVDAGTKHVGLSATTKSKELYSSEVILRSDIVDLLSTRRELRKTRRNRLRYRKPRFDNRVKSKRSGWIAPSVKYKIDAHIRVVDNVCSILPISRIVIEVAQFDTQKIKNPNISGKEYQEGDQLGFWNVREYVLARDGHKCQYCKGKSKDPVLNVHHIESRKTGGDSPSNLITLCETCHKEYHKGNIDLKIKRGSSLRDAAVMGIMKWRLYEELKSKYDNISMTFGYVTKYNRIKHGIEKSHVSDAFIISKNFNAIRLGYYYKVRLVRRHNRQIHKQKIPKGGVKRLNQSPFEVFGFRLFDRVMFENSYYSIFGRRKTGRFNIRDIDGKNQRDITYKKLKLSRCKCFMVQNEMN

SEQ ID NO: 13887 - protein, 414 aa, unidentified; identical to SEQ ID NO: 13302
  REGION 1..414: note = Human gut metagenome

SEQ ID NO: 13888 - protein, 369 aa, unidentified
  REGION 1..369: note = Human gut metagenome
HIGLAATTEKKVIYQEELIPRNDVVKLLSARRTLRRSRRSRKTRYRKPRFNNRVHSKHKGWLAPSVEVKIQEHITAIKNVCKILPVSEIHVETAEFDLQRLKAMEEGKPLPVGTDYQLGEQYDFYNTRQYVLHRDGYTCQCCDAHDKDVKLHVHHIESRQTGGNAPNNLVTLCEHCHKALHEGKIELPKNKKRGKSHRDAAFMGIMRNTLLERLKKEVDVPATMTYGYITKYWREKAGLEKSHINDAICISKHPYAKPLDAYYLTKAVRHHNRQIHKANFSKGGIRKRNQAPYLVKGFRLFDKVSYQSKEYFIFGRRATGFFDIRTLDGTKVNKGSVSYKKLRIQDTAKAYVKEVRAIPHMNEFTCVLA

SEQ ID NO: 13889 - protein, 447 aa, unidentified; identical to SEQ ID NO: 11247
  REGION 1..447: note = Human gut metagenome

SEQ ID NO: 13890 - protein, 415 aa, unidentified; identical to SEQ ID NO: 5821
  REGION 1..415: note = Human metagenome

SEQ ID NO: 13891 - protein, 465 aa, unidentified; identical to SEQ ID NO: 3070
  REGION 1..465: note = Human gut metagenome

SEQ ID NO: 13892 - protein, 417 aa, unidentified
  REGION 1..417: note = Human gut metagenome
MPCSPAKARLLLKEKKASVKRRTPFTIQLTIATGEAKQPVTLGVDSGYKHIGLSATTEKAELYASQVELRQDITDLLSARLALRRSRRSRKTRYRAPRFNNRVANKREGWLAPSVENRIAAHVSRVETVIRLLPVTAITVETAAFDTQLLKNPDIAGVAYQQGDQIGFWNVREYVLFRDGHVCQHCRGKSKDPILNVHHIESRRTGGDAPNNLITLCETCHRAFHRGEIELKVKRGKSFKAETFMGIMRRTLLERLKKAHPELNVRNTYGYLTKHKRISHGIAKSHCADAYCIADNLGAKRLEGFFFQKQTRKHNRQVHKLSILKGGLRKKNQAPYEVKGFRLFDKVICKGEEAFIFGRRTSGSFDVRRLDGTRISAGINYKKLRLLEPRTTYLAEFRKEAAHPPLHECRGFRAEFL

SEQ ID NO: 13893 - protein, 442 aa, unidentified; identical to SEQ ID NO: 2903
  REGION 1..442: note = Human gut metagenome

SEQ ID NO: 13894 - protein, 512 aa, unidentified
  REGION 1..512: note = Human gut metagenome
MSTVYVLNKDGKPLMPTTRCGHVRHLLKEQKARVVASKPFTIQLLYKTNDVVQPLYLGIDPGRTNIGVAVVKADGTAVFTAHLETRNKEIPKLMKKRKDSRRARRTNGRRCRRQRRAKANGTISKKCVKHDTAQNGSVSKRAKEIGVIKRHLPGCEKEALCIGIKNKEAKFNNRTRPEGWLTPTANQLLQTHINLVKKIQKFLPISDVVLEVNKFAFMRLDNPNIQKWQYQQGPLYQKVSLEEAVSEMQEHHCLFCKNTIDHYHHVVPQHKNGSNTIDNIVGLCTKHHDLVHKETAWQEKLAKKKTGLNKKYGALSVLNQIILALTKGLSFLFPKHFFVTTGKNTYDYRTAHSVSKDHWLDAYCIACSVLPNDVCDSSINSHVPYELKQFRRHDRRALHKENMSRVYTLNGKKVATNRHKAIEQTTDSLEEFRQRQPNDVYKLKVKEHHPEYRNPKRNFPGCVFLVGKRTHVMQGTSGSHNGKADGYYDTNGNSYSSGKCKFVAKNEGIVFA

SEQ ID NO: 13895 - protein, 431 aa, unidentified; identical to SEQ ID NO: 2746
  REGION 1..431: note = Human gut metagenome

SEQ ID NO: 13896 - protein, 430 aa, unidentified; identical to SEQ ID NO: 4310
  REGION 1..430: note = Human gut metagenome

SEQ ID NO: 13897 - protein, 515 aa, unidentified; identical to SEQ ID NO: 3339
  REGION 1..515: note = Human gut metagenome

SEQ ID NO: 13898 - protein, 408 aa, unidentified; identical to SEQ ID NO: 4080
  REGION 1..408: note = Human gut metagenome

SEQ ID NO: 13899 - protein, 431 aa, unidentified
  REGION 1..431: note = Human gut metagenome
MVYVLDINGQPLMPTARHGKVRRLLNSHLAKVVKRCPFTIQLLYQSTKETQPVSLGVDAGSRHIGLAATTEKKVIYQEELIPRNDVVKLLSARRVLRRSRRSRKTRYRKPRFNNRVHSKHKGWLAPSVEVKIQEHITAIKNVCKILPVSEIHVETAEFDLQRLKAMEEGKPLPVGTDYQLGEQYDFYNTRQYVLHRDGYVCQCCGAHDKDVKLHVHHIESRQTGGNAPNNLITLCEHCHKALHEGKIELPKNKKRGKSHRDAAFMGIMRNTLLERLKKEVDVPVTMTYGYITKYWREKAGLEKSHINDAICISKHPYAKPLATYYLTKAVRHHNRQIHKANFSKGGIRKRNQAPYMVKGFRLFDRVLYQGKNYFIFGRRATGFFDIRTLDGTKVNKGSVSYKKLRIQDTAKTYLKEVQAIPRMNEFTCVLA

SEQ ID NO: 13900 - protein, 442 aa, unidentified; identical to SEQ ID NO: 3161
  REGION 1..442: note = Human gut metagenome

SEQ ID NO: 13901 - protein, 406 aa, unidentified; identical to SEQ ID NO: 6176
  REGION 1..406: note = Human gut metagenome

SEQ ID NO: 13902 - protein, 413 aa, unidentified
  REGION 1..413: note = Human gut metagenome
MTSYSFVLDANGKQLAPTKEPKAWFLIRKKRAALVSKYPMVIQLKKKIQENEICKDEIRCGIDDGGLHVGIALVQKCKSKNKVVFKGTIEQRNDVKHLMEVRRNYRRYHRYHKRYRQARFDNRKSSKRKGRIAPSILQKRQATIRVINRLNKWINITNYWLEDVSIDIRVLTDGYKSYSWQYQKSNRLDENIRKATILRDGGKCMECGKSNCRLEVHHIKPRRRNGSNTLDNLITLCESCHQKTEGQEELYMDRYFSLLKSSDNKNLNYAQHVMIGKMWLRKQLSGLGVLYLTSGGDTANKRIDWNIEKSHTNDAVCITDLQPDTCDMKEWTMKPMRRQSKAKTDHVLGIHHRDLVEYTFKNGETHRGYVTALYPEQKAINFQSQTKHCKKVNARKCKLLWNYSKIYWFENAS

SEQ ID NO: 13903 - protein, 423 aa, Lactobacillus sp.; identical to SEQ ID NO: 5050

SEQ ID NO: 13904 - protein, 454 aa, unidentified
  REGION 1..454: note = Human gut metagenome
VSYTARYVPAYRFKHITKKEVPYMVYVLDIDGQPLMPTSRHGKVRRLLNSHLAKVVKRCPFTIQLLYQSTKETQPVSLGVDAGSRHIGLSATTEREVVYQEELVPRNDIVKLLSARRALRRSRRNRKTRYRRVRFNNRVHSKHKGWLAPSVEVKIQEHITATKRICQILPIFDIHVETAEFDLQRLKAMEEGRLLPAGTDYQLGEQYDFYNTRQYVLHRDEYTCQCCGTHDNNVKLHVHHVESRQTGGEAPNNLITLCEHCHKSIHAGKMMLPKGKKRGKSYRDAAFMGIMRNTLLERLRKEVNVPVTMTYGYITKYWREKAGLEKSHINDAICISKHPYARPLETYYLTKAVRHHNRQIHKTKFSKGGIRKRNQAPYLVKGFRLFDKVLYQGESYFIFGRRITGYFDIRTLDGTKVNKGSTSYKKLRIQDTAEAYLTEVRAIPHMNEFTCVLA

SEQ ID NO: 13905 - protein, 427 aa, Nostoc sp.
MCKVFVIDSEKRPLNPIHPAQARQLLRNHKAAVFKRFPFTIIVKESHLDAPVQSLRLKLDPGAKYTGIAIVNDASGEVVFAAELKHRGFAIRDALTSRRQLRRARRNRKTRYRQPRFLNRTRPQGWLAPSLQSRIENIKTWVSRLCKVARITAISQELVKFDMQLIRHPDIQGKEYQQGTLAGFETRQYLLEKWNRECAYCGIKDAPLQIEHIHPKSKGGSNSITNLTLSCEKCNLKKSSQDIRDFLKKDKSRLEKILALTKKPLADAAAVNTTRFALLETLKSTGLPVETGSGGLTKFNRTQQGLSKSHWLDACCVGTSTPTLKIKGVKPLLITANGHGTRQSCRTDKYGFPIRHCSRTKFHFGFQTGDIVKTVVTKGKKVGTYIGRIATRATGSFNISTAQGLIQGISYKYCKTIHKKDGYAYTM

SEQ ID NO: 13906 - protein, 430 aa, Calothrix sp.; identical to SEQ ID NO: 10070

SEQ ID NO: 13907 - protein, 436 aa, unidentified
  REGION 1..436: note = Human oral metagenome
MTKTLTTQTTQACVLDQNGKPLMPTTRLGKVYRLLKTQKAHIVSYEPFTIQLDYEPDTHIIQPMTLGVDSGAIHSGYSVANEHREYYSAEIIARNDISNRLSDRRMYRQTRRSRKTRYRKPRFNNRKNKKKGWLPPSLEQKVATQLNEIDHLHRYFPIETIIVEVAEFDIQKIKNPDISGIEYQQGTLQGYNIRNYLLEKHGRKCFYCGKTVSDFEVEHMFPKSKGGSNRIDNLTLSCHDCNEKKGTLTAEKFIQQTLPAKKAAAKLKQLPKEKRLFKYMAHMNATRWTLYNTIKEKYPNVKMTYGYITKYNRIQAGLPKAHHIDAKCITGFSNVPSISQTVVKVKMRRHNRQLHRATFSKGHIRKAASLPTKVFGFQLYDLVLFNNHRYYIKGRRSSGSFALVSVEGLKNEKRSYKKITLLAHTNAYLINHYVNV

SEQ ID NO: 13908 - protein, 295 aa, unidentified
  REGION 1..295: note = Human gut metagenome
ARFNNRSSSKRTCRLAPSIKQKKDAILRVLYQLNKWVNIQEYYLEDVCIDIRAMTDDYKPYRWQYQKSNRLDENLRKATILRDGCRCQECGKSNCILEVHHIRARRYGGANTIGNLITLCKKCHDKTESREKDFEERYFNMIKSKPKRFDYAMHVMQGKTYLREKISELGILHLTNGGETANKRIEWDIVKSHSNDAICIADGIPDTCDIKEWIIKPMRRKSKAKTDNVLGIKHRDLVSYTYKSGETHTGYVTALYPEQLALNFQSKTKHCKKVNARKCRLLWKFNKIYWLEQCV

SEQ ID NO: 13909 - protein, 456 aa, unidentified; identical to SEQ ID NO: 4421
  REGION 1..456: note = Human gut metagenome

SEQ ID NO: 13910 - protein, 417 aa, unidentified
  REGION 1..417: note = Human gut metagenome
VMVYVLDKNGQPLMPTDRHRKVRLMLQSGQAKVIKRCPFTIQLNYDSGHQTQEISLGIDAGSKHIGVSTTTKIKVLYEVDVELRNDIVDLLSSRRELRRGRRNRKTRYRQAKFNNRRRGNGRLAPSIRQKIGTHLTVVENICKMLPISRIMVETASFDIQKIKNPDIQGAEYQQGDQLEFWNVREYVLFRDGHTCQCCKGKSKDKILNVHHIESRKTGGNAPNNLITLCETCHTGYHKGTVQLPKAIKRGMRFKDAAFMGIMRWAFYEALKQQYEPVGTPVHNTYGYITKHTRIAYNLPKEHYVDARCISGNPEASSNGEYYYQKKVRCHNRQIHKLTVLKGGIRKQNQATYLVKGYRLFDKVSYQGKGYFVFGRRQSGFFDIRTLSGEKVNKGSLSCKKLKFIATRTYYLTERRAV

SEQ ID NO: 13911 - protein, 427 aa, unidentified; identical to SEQ ID NO: 8384
  REGION 1..427: note = Human gut metagenome

SEQ ID NO: 13912 - protein, 442 aa, unidentified; identical to SEQ ID NO: 2903
  REGION 1..442: note = Human gut metagenome

SEQ ID NO: 13913 - protein, 406 aa, unidentified; identical to SEQ ID NO: 2703
  REGION 1..406: note = Human gut metagenome

SEQ ID NO: 13914 - protein, 424 aa, Petrotoga sp.; identical to SEQ ID NO: 8893

SEQ ID NO: 13915 - protein, 470 aa, Blautia sp.; identical to SEQ ID NO: 2925

SEQ ID NO: 13916 - protein, 425 aa, unidentified
  REGION 1..425: note = Human gut metagenome
MENTLKVFVLNMRGQPLMPCSPPKARKLLRAGKAVPVRRTPFVIQLTVPTGETKQPITLGVDAGYKHVGLSATTAKEELLASEVELRQDVTGLLSNRLALRRARRNRKTRYRAPRFDNRVRSKHKGWLAPSVENRIQAHISRIEAVCRVLPITKIVIETASFDIQKIKNPEIEGEGYQQGEQLGFWNVREYVLFRDGHVCQACKGRSKDLILNVHHIESRKTGGDAPGNLITLCEACHKAYHAGKLKQFSPRRGASFRAETFMGIMRWTVLNRLRERHPELPVTNTYGYLTKHKRIVAGLPKTHCADAFCIAGVLDAKRRGEYLFQKQTRRHNRQIHKLTILKGGVRKRHQAPYLVHGFRLFDKVLCKGEVGFIFGRRSSGAFDVRRLNGTKISAGISYKKLSLLEKRKMFLTELRKEGRDSSRV

SEQ ID NO: 13917 - protein, 430 aa, unidentified
  REGION 1..430: note = Human gut metagenome
MPKVYVLNRHGRPLMPCTPAKARHLLDAGKAKVRQRTPFTIQLLYGSTGYTQEVILGVDAGSKTIGLSAATETEELFSAEVKPRNDVVELMSARRQFRRARRNRTTRYRKPRFDNRVRSKHKGWLAPSVEVKIQEHMTAIRRACAILPVSKVVVETAEFDLQLLKAVAEGKPVPQGEDYQKGEMYGHYNVRQYVLWRDSYTCRICGMHGSVRKGVPLHVHHLESRRVGGDAPDNLVTLCTACHDKLHKGIIMAADIKKRKRRSTRDATFMGIMRMTLLRRLREQLPVPVVETRGYITKATRENLLVLPKSHTNDALAIAHGPQGFRAEYLPNIRQADRLYTIRPVRHHNRQLHKATILKGGVRKANQAEKYICGFRLYDKVLYNGIECFVWGRRTSGSFLLRQLSGEKVKDGVSYKHLKLLERSQSYLVA

SEQ ID NO: 13918 - protein, 414 aa, unidentified; identical to SEQ ID NO: 2588
  REGION 1..414: note = Human gut metagenome

SEQ ID NO: 13919 - protein, 431 aa, unidentified
  REGION 1..431: note = Human gut metagenome
MPNKVYVINKHGRPLMPCSPAKARHLLDAGKAKVKKRTPFTIQLVYGSSGYTQEVILGVDAGSKTIGVSASTKKEELFAANVIPRNDVVDLLSTRREFRRVRRNRKTRYRKPRFDNRVRGKNKEWLAPSVEVKIQEHITAIKRVCYILPVSKVVVETAEFDLQLLKAIEEGKPVLQGEDYQQGEMYGHYNVRQYVLWKDNYICQCCGAHATKEKEVRLHVHHLESRKTGGDAPGNLVTLCDSCHEKLHKGLIAEKDFKKRKRRSTRDATFMGIMRKTLMQRLCSELPIPVVETRGYITKATREKLLVLPKSHTNDALAIAQGKRGFNVGYLPGIIQTDKIYTIRPVRHHNRQLHKAAILKGGIRKSNQAGKYVFGYRLFDKVQFNEQDCFIWGRRTTGIFTIKTINGKMIKDGISFKKLKLVEKSTSYLIA

SEQ ID NO: 13920 - protein, 413 aa, unidentified; identical to SEQ ID NO: 2636
  REGION 1..413: note = Human gut metagenome

SEQ ID NO: 13921 - protein, 351 aa, unidentified; identical to SEQ ID NO: 10636
  REGION 1..351: note = Human gut metagenome

SEQ ID NO: 13922 - protein, 451 aa, unidentified; identical to SEQ ID NO: 7526
  REGION 1..451: note = Human gut metagenome

SEQ ID NO: 13923 - protein, 431 aa, unidentified; identical to SEQ ID NO: 8285
  REGION 1..431: note = Human gut metagenome

SEQ ID NO: 13924 - protein, 451 aa, Moorena sp.; identical to SEQ ID NO: 3199

SEQ ID NO: 13925 - protein, 414 aa, unidentified
  REGION 1..414: note = Human gut metagenome
MVYVINKQGQALMPTERFGKVRRLLKNSLAHVVCRIPFTIQLDYDTTDYTQPVSLGVDTGSKHIGISATTSEKEMYAADVELRNDIVDKLSTRREQRRTRRSRLRYRKARFNNRISSKRKGWLAPSVENKIQTHLTIVEKIHKFLPITNIVVETASFDIQKINNPSISGSEYQQGEQLDFFNVREYVLFRDNHICQHCKGKSKDKVLNVHHIESRKTGGDSPKNLITLCETCHKAYHRGDFELNVKRGKSFRDSAFMGIMRWSFYDRLKNIYPNVSMTFGYITKNARITNNLPKEHYVDARCISGNPMSKPLGYYFYQKKVRCQNRQIHKANFLKGGRKKLNQAPFLVKGFRLFDLVEYQKELYYIFGRRSSGSFDIRKLDGTKVNKGSINCKYLRLVDKRKSILIEKRMQVNL

SEQ ID NO: 13926 - protein, 451 aa, unidentified
  REGION 1..451: note = Human gut metagenome
VTTILKTCFAAFNLAKVVVLMDAWDIIVVLNKRGKPLMPCSPAKARLLLKEKKAIVKRRTPFTIQLTIATGETKQPVSLGVDAGYKHVGLSASTEKAELYASEVELRQDITDLLSARRALRQSRRNRKTRYRAPRFDNRIRTKRKGWLAPSVENRINAHLSRIEAVLRLLPVTKITVETASFDLQLLKNPDISGKEYQEGEQLGFWNIREYVLCRDGHVCQHCYGRSKDPVLNVHHLESRRTGGDSPGNLITLCETCHKALHRGEITLKAKRGQSFRAEAFMGIMRWEVHNRLRALHPGIEVSNTYGYRTKHARIANGIAKSHCADAFCIAGNFGAKRLGEFFFQKQTRRNNRQIHKLSILKGGIRKRNQAPFEVKGFRLFDKVACQGEEGFIFGRRSSGYFDVRKLDGTRISAGISCKKLHLLEKRRTYLTEIRKEEALPPLPEGRGLRA

SEQ ID NO: 13927 - protein, 415 aa, unidentified; identical to SEQ ID NO: 2674
  REGION 1..415: note = Human gut metagenome

SEQ ID NO: 13928 - protein, 412 aa, unidentified; identical to SEQ ID NO: 6913
  REGION 1..412: note = Human gut metagenome

SEQ ID NO: 13929 - protein, 477 aa, Acidithiobacillus sp.; identical to SEQ ID NO: 5650

SEQ ID NO: 13930 - protein, 502 aa, Flavonifractor sp.; identical to SEQ ID NO: 2616

SEQ ID NO: 13931 - protein, 494 aa, unidentified; identical to SEQ ID NO: 12763
  REGION 1..494: note = Human gut metagenome

SEQ ID NO: 13932 - protein, 494 aa, unidentified
  REGION 1..494: note = Human gut metagenome
MDMVYVLNKDGKPLMATTRGGRVRYLLKEKKARVVSSTPFTIQLNYDTPDATQDLILGIDPGRTNIGVAVVKEDGSCVFSAHLETRNKDVPLLMKKRAAFRRNHRTLDRRRKRQRRAKAAGTTIAEGSVERLLPGYEKPIMCHHIRNKEARFNNRSRPAGWLTPTANHLLQTHINLIAKVAKFLPITKVVVELNRFAFMAMDNPNIRRWEYQQGPLCGLGSVEDAVYAQQDGHCLFCKKPIDHYHHVIPRHKRGSETLANRCGLCAKHHDLVHTDKAWADKLVTRKEGMNKKYHALSVLNQIIPHLMEYIGSETLYDAYATDGRSTKGFRIAKNVPKEHYTDAYCIACSILDTDIEVSAPVEPFEMKQFRRHDRQACIRQMVDRKYILDGKVVATNRHKAIEQKSDSLEEFREAHGNAAVSQLTVKPHHPQCKDMARIMPGAVMVFDGAVGVFQGSSGRNNGTPNYYNSTKGERFLTRSCVLLAQNAGMVFIPA

SEQ ID NO: 13933 - protein, 426 aa, Lactobacillus sp.; identical to SEQ ID NO: 3294

SEQ ID NO: 13934 - protein, 465 aa, unidentified; identical to SEQ ID NO: 10277
  REGION 1..465: note = Human gut metagenome

SEQ ID NO: 13935 - protein, 393 aa, unidentified
  REGION 1..393: note = Human gut metagenome
MPCSPAKARLLLKEKKAIVVRRTPFTIQLTIATGESKQPVSLGVDAGYKHVGLSASTEKAELYASEVELRKDITDLLSARRALRQSRRNRKTRYRAPRFDNRIRTKRKGWLAPSVENRINAHLSRIEAVLRLLPITKITVETASFDMQRLKNPDISGKEYQEGEQLGFWNVREYVLFRDGHVCRHCHGRSKDPVLNVHHLESRRTGSDSPDNLITLCETCHKALHRGEITLKAKRGQSFRAQAFMGIMRREVLNRLKASYPELKVHETYGYLTKHARIANGIVKSHGADAFSIAGNLGAESSANSSSRSRLAETTGRFTNFPSSKGAFESAIRHPLRPKASVFLIRLPAREKKASFSAVDHPGLLMYESSTAPAFQPASAARSCVCWRRDGPI

SEQ ID NO: 13936 - protein, 420 aa, unidentified; identical to SEQ ID NO: 5136
  REGION 1..420: note = Human gut metagenome

SEQ ID NO: 13937 - protein, 529 aa, unidentified; identical to SEQ ID NO: 6786
  REGION 1..529: note = Human gut metagenome

SEQ ID NO: 13938 - protein, 419 aa, unidentified
  REGION 1..419: note = Human gut metagenome
MPTTRHGKVRRLLNSHLAKVVKRCPFTIQLLYQSTKEIQPVSLGVDAGSKHIGMAATTEKKVVYQEELSPRNDVVKLLSARRTLRRTRRNRKTRYRKPRFNNRVHSKHKGWLAPSVEVKIQEHITTIKRICQILPISEIQVETAEFDLRRLKAMKEGKPLPVGTDYQLGEQYDFYNTRQYVLHRDGYTCQCCGTHDNNIKLHVHHIESRQTGGDAPNNLIILCEHCHKALHEGKLELPKGKKRGKSYRDATFMGVMRKTLLERLKKEIDVPVEGTYGYITKYWRERAGLEKSHIHDAVCISKYPYAKPLDIYYLTKTVRHHNRQIHKSNFSKGGIRKRNQAPYLVKGFRLFDKVLYQGKEYFIFGRRATGYFDIRTLDGTKVNKGSISYKKLRIQDTAKAYLKEARAIPHMNKFTCVLA

SEQ ID NO: 13939 - protein, 420 aa, unidentified
  REGION 1..420: note = Human gut metagenome
MQYVYVLNKHGEPLMPCSPGKARILLKQQKACVVKRTPFTIKLLYGSTGYKQPITLGVDAGSKHVGLSASTEKRELYSEEFTPRNDVVELLSTRRQNRRSRRNRKTRYRAPRFNNRVHSKHKGWLAPSVEVKIQEHITVIKRICRILPITLVRVETAEFDTQRLKAMLAGKPLPVGTDYQLGEMYDEYNVRQYVLKRDNYTCQCCGAHTTAKKTVKLHVHHLESRKVGGNAPSNLITLCTTCHNNLHKGKITLDGKKRGKTLRDAAFMGIMRNTLLTRLRNELNIPVQNTYGYITKLLREQNDIKKSHVNDARCISKHPLAKPCSVCYRTKAIRHHNRQIHKAKILKGGIRKANQAPYIVKGFRLWDKVLYNEQECFISGRRSSGYFALRKFDGTTITNSISFKKLRLLEPATNYLIERK

SEQ ID NO: 13940 - protein, 422 aa, unidentified; identical to SEQ ID NO: 5333
  REGION 1..422: note = Human gut metagenome

SEQ ID NO: 13941 - protein, 420 aa, unidentified
  REGION 1..420: note = Human gut metagenome
MQYVYVLSKHGEPMMPCSPGKARLLLKQQKACVVRRTPFTIKLLYGSAGYKQPITLGVDAGSKHVGLSASTEKRELYREEFTPRNDVVELLSTRRQNRRSRRNRKTRYRAPRFDNRVHSKHKGWLAPSVEVKIQEHITVIKRICKILPISLVRVETAEFDTQRLKAMLAGKPLPVGTDYQLGEMYDEYNVRQYVLKRDNYTCQCCGAHTTAKKLVKLHVHHLESRKTGGNAPSNLVTLCTTCHKNLHKGKVTLDGKERGKPLRDAAFMGIMRKTLMARLKEELPIPVQGTYGYITKMRREQNDIKKSHTNDARCISKHPLAEPCSVCYRTKAIRHHNRQTHKANFSKKGIRKRSQMPYLVEGFRLWDKVLYKGQECFVSGRRSSGSFALKKLDGTSISKGVTFKKLRLLEPATNYLIERM

SEQ ID NO: 13942 - protein, 442 aa, unidentified; identical to SEQ ID NO: 2903
  REGION 1..442: note = Human gut metagenome

SEQ ID NO: 13943 - protein, 460 aa, Fischerella sp.; identical to SEQ ID NO: 9149

SEQ ID NO: 13944 - protein, 430 aa, unidentified
  REGION 1..430: note = Human gut metagenome
MPKVYVLNRHGRPLMPCTPAKARHLLDAGKAKVRHRTPFTIQLLYGSTDYTQEVILGVDAGSKTIGLSAATETEELFSAEVKPRNDVVELMSARRQFRRARRNRTTRYRKPRFDNRVRSKHKGWLAPSVEVKIQEHMTAIRRACAILPVSKVVVETAEFDLQLLKAVAEGKPVPQGEDYQKGEMYGHYNVRQYVLWRDSYTCRICGAHGSVRKGVPLHVHHLESRRVGGDAPDNLVTLCTACHDKLHKGIIMVADIKKRKRRSTRDTTFMGIMRMTLLRRLWEQLPVPVVETRGYITKATRENLLVLPKSHTNDALAIAHGPQGFRAEYLPNIRQADRLYTIRPVRHHNRQLHKATILKGGVRKANQAEKYICGFRLYDKVLYNGIECFVWGRRTSGSFLLRQLNGEKVKDGVSYKHLKLLERSQSYLVA

SEQ ID NO: 13945 - protein, 424 aa, unidentified
  REGION 1..424: note = Human gut metagenome
MRVFVFNMRGVPLMPCTQRKARILLKEGKAVIYKYNPFTIQLTHATGENTQDCHVGIDTGAKHVGVAITSEGKVLFKGEIELRQDVKSNLDTRRIYRRSRRNRKTRYRQPRFLNRRKADKWLPPSLQNRLDHTFHWIDTLRGLVPSPTLHIEVGKFDTAKMIDPEIHGVDYQHGQTYGFFDERYYVFARDNYTCQCCGKSKGKILQTHHIIYRSNGGTDRADNLITVCTDCHTSKNHQKGGILYKWQEQHKKVRQYKEPPFMNTLRRRIFAKYPDAAITYGSETTPKRKEKGLDKTHYNDAIIISGVQTISENPDEWLFIRQFRKKKRSLHEGTPRKGRKESNRTQKRNSKNTPYYRGYHLNDKVRVLGKTGYISGFTGGAAYVKDSDNQYITLPNKSYKQVGISNLQHVCHNNNWQYITKTTA

SEQ ID NO: 13946 - protein, 477 aa, unidentified; identical to SEQ ID NO: 8085
  REGION 1..477: note = Human gut metagenome

SEQ ID NO: 13947 - protein, 422 aa, Parasutterella excrementihominis
LNKRGKPLMPCSPAKARLLLKEKKAIVKRRTPFTIQLTIATGESKQPVTLGVDAGYKHVGLSASTEKAELYASEVELRQDVSDLLSARRALRQSRRNRKTRYRAPRFNNRLCTKRKGWLAPSVENRINAHLSRIEAVLRLLPVTKITVETASFDMQLLKNPDISGKEYQEGEQLGFWNIREYVLCRDGHVCQHCYGRSKDPVLNVHHLESRGTGGDSPGNLITLCETCHKALHRGEITLKAKRGQSFRAEAFMGIMRWEVHNRLRALHPGIEVSNTYGYRTKHARIANGIAKSHCADAFCIAGNLGAERLCEFFFQKQTRRNNRQIHKLSILKGGIRKRNQAPFEVKGFRLFDKVAYKGEEGFIFGRRSSGFFDVRKLDGTRISAGISYKKLHLLEKRRTYLTEIRKEEALPPLPEGRGLRA

SEQ ID NO: 13948 - protein, 419 aa, Eubacterium hallii
MVYVISQDSKPLMPCSNPIARLLLKQGKAKVKRREPFTIKLIYETTGYTQDLTLGVDTGSGTIGTAVSKDNGDIVYMSEVVVRNDITDKMTQRAKYRRNRRNRKTRYRKARWLNRSNSIKKDRFSPTMQSKLHSHVREIEYIQSILPITEMVFETGQFDMHLMKNPSLANPKVRPWGYQKGTNYGFENTKAMVLNRDNYTCQCCKGKHKDSKLEVHHIVFRSQGGSDEESNLITLCHTCHKDLHSGKINLKLSGKVKGNLKYATQMNSIRKQLFRLYPNAIETFGYVTKANRLHLGVDKEHYYDACTIATQGNAFNVKSNLYKKKCISDGDFQKTKGIRSEQAIVTDKICGFRKFDKVRYFGNDYFIKGRMSAGYAILMDIDGNKIDFSTMPRGYKTPKLSNCKRITARSTVMTQVKVV

SEQ ID NO: 13949 - protein, 422 aa, unidentified; identical to SEQ ID NO: 5333
  REGION 1..422: note = Human gut metagenome

SEQ ID NO: 13950 - protein, 440 aa, unidentified
  REGION 1..440: note = Human gut metagenome
MPTNSYRARRLLKSKRAVIYRYRPVFTIKLVDRTNGYTQPIEYKCDTGYQNIGISICSDTKEFVNEQRDLLKDEVKRHSDSRKYRRTRRNRLRYRKKRFDNRRGVISRDGFAPSIRNKRDVHVRLYEEYYKVFPITKAVFEMGQFDTQVLKAVEAGLPVPEGTDYQRGEQYGYATLREAVFARDSYTCICCGKSAIKDGVKLRIHHIGYLSGDRSNRMANLGSVCENCHTSKNHKPGGKLYNLKPKLKTFKGATFMTMVRYSMVKQLKAATPDVDIRVTYGAATKLARKALNVKKTHSNDAYCMGEFHPKHRSNFKHHRKCRRNSRVLSKFYDAKYMDLRNSSIKKGSQLACGRTNRRIPRHTELNERIYRGHKISKGKLVVRRQHYQYRPGDTVWAEGKRCTVKGIISNGTRIALNERNPVSVNKIDKTVHTGGWAKAS

SEQ ID NO: 13951 - protein, 436 aa, Deinococcus sp.; identical to SEQ ID NO: 9112

SEQ ID NO: 13952 - protein, 419 aa, Geobacillus sp.; identical to SEQ ID NO: 4579

SEQ ID NO: 13953 - protein, 411 aa, unidentified; identical to SEQ ID NO: 2663
  REGION 1..411: note = Human gut metagenome

SEQ ID NO: 13954 - protein, 452 aa, unidentified
  REGION 1..452: note = Human gut metagenome
MVYVLNISGQPLMPTDNCAKVRILLKSGKARVVRRCPFTIQLMYDTTSYTQEIALGVDSGSRHIGLSVTTKDKVLFESDVELRNDIADLLSTRRQNRRARRSRKTRYRKQRFSNRKRKDGWLAPSVQNKVDTHLTAIRRVHEILPVSRIIVEVASFDIQKIKNSDISGTEYQQGEQMGFWNVREYILFRDGHECQCCHGRSGDKILNVHHIESRKTGGNAPNNLITLCETCHTGYHNGTVKLPKTIHRGMTFRDAAFMGIMRWVLYDKLKVIYPDVHLTYGYITKSIRIENGLPKDHYIDARCISGNSNAKSDGTMYCQKKVRCHNRRIHKNGILKGGIRKRNQAPYEVMGFRLFDKVKWKGRKCFIFGRRSTGRMDLRLLDGTKVNASVGYKNLHLLEMRKNMLVEERRKAVPPTGKPVGFPARHLWQRHKIDKGILKNEKGLFFLLYCLS

SEQ ID NO: 13955 - protein, 423 aa, unidentified; identical to SEQ ID NO: 3951
  REGION 1..423: note = Human gut metagenome

SEQ ID NO: 13956 - protein, 451 aa, unidentified; identical to SEQ ID NO: 9425
  REGION 1..451: note = Human gut metagenome

SEQ ID NO: 13957 - protein, 427 aa, Alicyclobacillus sp.; identical to SEQ ID NO: 2399

SEQ ID NO: 13958 - protein, 415 aa, unidentified; identical to SEQ ID NO: 6534
  REGION 1..415: note = Human gut metagenome

SEQ ID NO: 13959 - protein, 494 aa, unidentified
  REGION 1..494: note = Human gut metagenome
VCGAVSSPQKEIYEGICHRQEWLGTGAYNPKESQTPAKKRKAVIEHRQPFTIRLKYKTGCASEHLKCGVDTGSQHIGTSLISPECKRVLDKSEYELRSTMEKRTLMEIRREYRRGRRFRKTRYRHPKYKPHTKRVYVEKPVTYRKHLTHWKKQVNTFASSREEGWLPPSIRSKLDQHILLIRRYQQALPPKTIVRIEVGRFDIQHMMDPSIRGEMYQRSPMYESENIKAYIFTRDNYQCQCCGKKAGVVRKDGTTVKLKVHHVDFQSKGATDNPSRLASVCDKCHTEAAHKPGGVLYGWMIEGKKFSRGYRDATFMNIIRKRLREEFPDAEFTYGNITAADRKILKLEKTHGNDAVAIAAHGMNTVDNTEETTYYRQLRKQKRSLHEANPRKGRKEPNRLAARNRKNTCVAGGRYLNDKVKVLDQIGWISGFSGNSSVYVKNREGEYISMPGKGYKMVPISQTKLITHCNNWAVYTKCDKPLSGQNDAFISAIE

SEQ ID NO: 13960 - protein, 422 aa, unidentified; identical to SEQ ID NO: 5333
  REGION 1..422: note = Human gut metagenome

SEQ ID NO: 13961 - protein, 440 aa, unidentified
  REGION 1..440: note = Human gut metagenome
MPTNSYRARRLLKLKRAVIYKYRPVFTIKLVDRTNGYTQPIEYKCDTGYQNIGISICSDTKEFVNEQRDLLKDEVKRHSDSRKYRRTRRNRLRYRKKRFDNRRGMISKDGFAPSIRNKRDVHVRLYEEYYKVFPITKAVFEMGQFDTQVLKAVEAGLPVPAGTDYQRGEQYGYATLREAVFARDNYKCICCGKSAIKDGVKLRIHHIGYLSGDRSNRMANLGSVCESCHTSKNHKPGGKLYNLKPELKTFKGATFMTTVRYSMVKKLKAATPDVDIRVTYGAATKLARKDINVKKTHSNDAYCMGEFHPKHRSDFKHYRKCRRNSRVLSKFYDAKYRDLRDGSVKTGSQLSCGRTNRKISRHTELDGRIYRAHKISRGRVSIRRQHYSLRPGDKVLYDGKAYFVTGMQNSGTRVKLTNRKVCSLKKVHVLQHCNAWTAVI

SEQ ID NO: 13962 - protein, 442 aa, unidentified; identical to SEQ ID NO: 12673
  REGION 1..442: note = Human gut metagenome

SEQ ID NO: 13963 - protein, 442 aa, unidentified; identical to SEQ ID NO: 4522
  REGION 1..442: note = Human gut metagenome

SEQ ID NO: 13964 - protein, 420 aa, unidentified
  REGION 1..420: note = Human gut metagenome
MQYVYVLSKHGEPMMPCSPGKARLLLKQQKACVVKRTPFTIKLLYGSAGYKQPITLGVDAGSRHVGLSASTEKRELYREEFAPRNDVVELLSTRRQNRRSRRNRKTRYRAPRFDNRVHSKHKGWLAPSVEVKIQEHITIIKRICKILPISLVRVETAEFDTQRLKAMLAGKPLPVGTDYQLGEMYDEYNVRQYVLKRDNYTCQCCGAHTTAKKLVKLHVHHLESRKTGGNAPSNLITLCTTCHKNLHKGKVTLDGKERGKPLRDAAFMGIMRKTLMARLKKELPIPVQGTYGYITKMRREQNDIKKSHTNDARCISKHPLAEPCSVCYRTKAIRHHNRQTHKANFSKKGIRKRSQMPYLVEGYRLWDKVLYKEQECFVSGRRSSGSFTLKKLDGTSVSKGVTFKKQRLLEPATNYLIERM

SEQ ID NO: 13965 - protein, 570 aa, unidentified
  REGION 1..570: note = Candidatus Collierbacteria bacterium
MKQSKQSNKKFKAQALNSKEKSALDILGLRPDLVYQAQESMPKGIATPEGVTTTFKITSKDALRDDNSSPGPCKNETSKALTKAERLAKATERQLTEAQRNLNIVEENIASKATVPSREIARKGIHTQGRVLVIGQDSNPCMPCNPARARKLLKAGKAKIHLYFPFVIQLNYSPTGTQPVQLKGDPGTRTTGICLNILTQRGWRTVWAMHLVHHPDDIRNSLTKRRSQRNGRRSRNTRYRPPRWNNRKRAKGWLAPSLMTNVINLVTWVKRLKKHAPVTQITIEDVKFDTQLMQNPDISGLEYQYGTLHGTDVREHTFWKCNYTCSYCGKKNVPLTVDHIKSQSPRTPDRQAGTNTPSNLTAACKPCNQEKSNYSVEEFAIMRGVKSFPLLKINNEKNLKAVGISNSIRLRIIEETKKATRINPELGSGGRTKFNRENQKYPKTHFIDAACAGESGAKVSLNPNMQIYIVKACSRNARRMQQPDSFGFPKGKAKEFSCIHGVRTGDIGKAVVTKGKNKGTWIGRISIRSTGTFKVGNKDGVNYKKIKVIQRNNGYSYNFAYPPLFQNPKP

SEQ ID NO: 13966 - protein, 413 aa, unidentified; identical to SEQ ID NO: 5965
  REGION 1..413: note = Human gut metagenome

SEQ ID NO: 13967 - protein, 414 aa, unidentified
  REGION 1..414: note = Human gut metagenome
MPCSPAKARLLLKEKKAIVKRRTPFTIQLTIATGETKQPVSLGVDAGYKHVGLSASTEKAELYASEVELRQDVSDLLSARRALRQSRRNRKTRYRAPRFNNRLRTKRKGWLAPSVENRINAHLSRIEAVLRLLPVTKITVETASFDTQLLKNPDIAGKEYQEGEQLGFWNVREYVLFRDGHVCQHCYGRSKDPVLNVHHLESRRTGGDSPGNLITLCETCHKALHRGDITLKAKRGQSFRAEAFMGIMRWEVLNRLKASHPELEVNNTYGYRTKHARIANDIAKSHCADAFCIAGNLGAERLGEFFFQKQTRRNNRQIHKLSILKGGIRKRNQAPFEIKGFRLFDKVVCKGEEGFIFGRRSSGYFDVRKLDGTRISAGISCKKLHLLEKRRTYLTEIRKEEALPPLPEGRDLRA

SEQ ID NO: 13968 - protein, 292 aa, unidentified
  REGION 1..292: note = Human gut metagenome
LSRIEAVLRLLPVTKITVETASFDLQLLKNPDISGKEYQEGEQLGFWNIREYVLCRDGHVCQHCYGRSKDPVLNVHHLESRRTGGDSPGNLITLCETCHKALHRGEITLKAKRGQSFRAEAFMGIMRWEVHNRLRALHPGIEVSNTYGYRTKHARIANGIAKSHCADAFCIAGNLGAERLCEFFFQKQTRRNNRQIHKLSILKGGIRKRNQAPFEVKGFRLFDKVACQGEEGFIFGRRSSGFFDVRKLDGTRISAGISYKKLHLLEKRQTYLIEIRKEEAFPPLPEGRGLRA

SEQ ID NO: 13969 - protein, 408 aa, unidentified
  REGION 1..408: note = Human gut metagenome
MVYVQDINGKPMMPTTRHGKVRRLLKDKKAVVVNLCPFTIRLTYVTSDYKQEIVLGVDAGTKHVGLSATTKSKELYSSEVILRSDIVDLLSTRRELRKTRRNRLRYRKPRFDNRVKSKRSGWIAPSVKYKIDAHIRIVDNVCSIPPISRIVIEVAQFDTQKIKNPNISGKEYQEGDQLGFWNVREYVLARDGHKCQYCKGKSKDKILNVHHIESRKTGGDSPYNLITLCETCHKEYHKGNIDLKIRRGKSLRDAAVMGIMKWRLYEELKSKYDNISMTFGYVTKYNRIKHGIEKSHVSDAFVISKNFNAIRLGYYYKVRLVRRHNRQIHKQKIPKGGVKRLNQSPFEVFGFRLFDRVMFENSYYFIFGRRKTGRFNIRDIDGKNQRDITYKKLKLSRCKCFMVQNEMN

SEQ ID NO: 13970 - protein, 414 aa, unidentified
  REGION 1..414: note = Human gut metagenome
MPCSPAKARLLLKEKKAIVVRRTPFTIQLTIATGEAKQPVSLGVDAGYKHVGLSASTEKAELYASEVELRQDVSDLLSARRALRQSRRNRKTRYRAPRFNNRLRTKRKGWLAPSVENRINAHLSRIEAVLRLLPVTKISVETASFDMQLLKNPDIAGKEYPEGEQLGFWNVREYVLFRDRHVCQHCYGRSKDPVLNVHHLESRRTGGDSPGNLITLCETCHKALHRGDITLKAKRGKSFRAEAFMGIMRWEVHNRLRALHPGIEVSNTYGYRTKHARIANGIAKSHCADAFCIAGNLGAERLCEFFFQKQTRRNNRQIHKLSILKGGIRKRNQAPFEVKGFRLFDRVACQGEESFIFGRRSSGFFDVRKLDGTRISAGISCKKLHLLEKRRTYLTEIRKEEALPPLPEGRGLRA

SEQ ID NO: 13971 - protein, 414 aa, unidentified
  REGION 1..414: note = Human gut metagenome
MVYVLNMDGQPLMPTNRCGKVRHLLKDGMAEVVKRCPFTIKLLYRSTNYTQPVTLGVDAGSKHIGLSATTEDKELFASDVELRNDIVDLLSTRRQNRRGRRSRKTRYRKPRFLNRTGNRKSGWVAPSIENKIQTHLTVVDKVCRMLPVSKIVVETASFDIQKIKNPDICGTEYQQSEQLNFWNVREYVLFRDGHKCQCCKGKSKDKILNVHHIESRKTGGDAPNNLITLCETCHTGYHKGTVKLPKTIHRGMVFRDAAFIGIMRWAFYNELKRRYPNVSHTYGYITKNIRIENNLPKYHYIDARCISGHPLAEPSEEVFYQKKVRCHNRQIHKNTIGKGGYRKRNQAEYIVKGFRLFDKVSYKGQECFIFGRRSSGSFDIRLLDGTKISAGVTYKKLRLSQTRGSFLIERRLVG

SEQ ID NO: 13972 - protein, 417 aa, unidentified
  REGION 1..417: note = metagenome
MPCSPAKARLLLKEKKAIVKRRTPFTIQLTIATGEARQPVTLGVDSGYKHIGLSATTEKAELYASEVELRQDITDLLSARLALRRSRRSRKTRYRAPRFDNRVASKREGWLAPSVENRIAAHMLRVEAVMRVLPVTAITVETAAFDTQLLQNPDIAGEAYQQGEQLGFWNVREYVLFRDGHVCQHCRGKSKDPILNVHHIESRRTGGDAPNNLITLCETCHKAFHRGEIKLKVKRGKSFKAETFMGIMRWTLFERLKKAHPELRVRNTYGYLTKHKRISHGIAKSHCADAYCIADNLGAKRLEGFFFQKQTRKHNRQIHKLSILKGGLRKKNQAPYEVKGFRLFDKVICKGEEAFIFGRRTSGSFDVRRLDGTRISAGINYKKLRLLEPRTTYLTEFRKEAALPHLHECRGFRAEFL

SEQ ID NO: 13973 - protein, 434 aa, Lactobacillus sp.; identical to SEQ ID NO: 13643

SEQ ID NO: 13974 - protein, 451 aa, unidentified; identical to SEQ ID NO: 12558
  REGION 1..451: note = Human gut metagenome

SEQ ID NO: 13975 - protein, 406 aa, unidentified; identical to SEQ ID NO: 9290
  REGION 1..406: note = Human gut metagenome

SEQ ID NO: 13976 - protein, 398 aa, unidentified
  REGION 1..398: note = Human gut metagenome
MVYVQDIDGKPMMPTTRHGKVRRLLKANKATVVNLCPFTIRLTYATSGYKQEIVLGVDAGTKHVGLSATTKSKELYSSEVILRSDIVELLSTRRELRRTRRNRLRHRKPRFGNRVKSKHHGWVAPSVRHKVDAHIRVIDNICSTLPISRIIVEIAQFDTQKIKNPDISGNEYQEGDQLGFWNVREYVLARDGHKCQHCKGKSKDPILNVHHIESRKTGGDSPSNLITLCETCHKEYHKGNIDLKVKRGKSLRDAAVMGIMKWKLYEELKSRYPNVSMTFGYITKYNRIKYGIEKYHISDAFVISKNFNALRLEYHYKVRLVRRHNRQIHKQKVLKGGAKKPNQSPFEVFGFRLFDRVMFEGNYYFIFGRRKSGSFNIRDINGGNQRNVTYKKLKLSIG

SEQ ID NO: 13977 - protein, 407 aa, unidentified; identical to SEQ ID NO: 7371
  REGION 1..407: note = Human gut metagenome

SEQ ID NO: 13978 - protein, 462 aa, Burkholderia sp.; identical to SEQ ID NO: 7523

SEQ ID NO: 13979 - protein, 310 aa, Moorena sp.; identical to SEQ ID NO: 11637

SEQ ID NO: 13980 - protein, 431 aa, unidentified; identical to SEQ ID NO: 4306
  REGION 1..431: note = Human gut metagenome

SEQ ID NO: 13981 - protein, 431 aa, unidentified
  REGION 1..431: note = Human gut metagenome
MPNKVYVINKHGRPLMPCSPAKARHLLDEGKAKIKKRTPFTIQLVYGSSGYTQEVILGVDAGSKTIGMSVSTTKEELLSAEVKPRNDVVDLQSTRREFRRARRNRKTRYRKPRFDNRVRSKRKGWLAPSVEVKIQEHITAIRRVCGILPVSKVVVETAEFDLQLLKAIEEGKPVPQGEDYQKGEMYGYYNVRQYVLWRDNYTCQCCGAHATKKKEVRLHVHHLESRKSGGDAPGNLVTLCDSCHEKLHKGLITEDDFKKRKRKSTRDATFMGIMRKTLIQRLRAELTIPVAETRGYITKATREKLLVLPKSHTNDAQAIAQGKQGFNVGYLPGILQIDKIYTIRPVRHHNRQLHKATILKGGIRKSNQAEKYVFGYRLFDKVQFNGQDCFIWGRRTTGIFTIKTINGKMIKDGISFKKLKLVEKSTSYLIA

SEQ ID NO: 13982 - protein, 418 aa, unidentified; identical to SEQ ID NO: 7351
  REGION 1..418: note = metagenome

SEQ ID NO: 13983 - protein, 458 aa, Desulfobacter sp.
MKVYVKSQSGKWLMPTNPANARILLKKGKAKVLQRTPFVIQLLYETTEHVQTVTVGIDDGGIQVGIAAVSRGKVLFQEELTLRSDIKSKLDTRRQYRRSRRYRKTRYRKARFLNKKQSLPTCKVCGGNAPASQVICRSCLNRADGVHQKYAGIKKSMFRIPPSIRAKKDAIIRVVKQMPLPISRIVLEDLYFDFQAMENPDISGEQYQHGDLLYHKNFKQACLVRDKFRCRVCGAQTKLQCHHIRPRAKGGTDKLSNLMTLCDVCHDRHHKERLQLPKQKSSFYMSAAHVQQGKHYLQRELSKTAPLSTTFGYITGHHRNRAGIEKSHVNDAVVIADKKAIPFDGYIKTNHVQSRKRSLHESTARKGRKSPNRTQNRNNKNVFTLKGFTRWDTVQYKGCVGFISGFTGRSSCRIIDIHGEYIKNPEKKYTQVNLREVRKIHGNRSTVRYYANSSPTES

SEQ ID NO: 13984 - protein, 465 aa, unidentified; identical to SEQ ID NO: 3070
  REGION 1..465: note = Human gut metagenome

SEQ ID NO: 13985 - protein, 430 aa, unidentified
  REGION 1..430: note = Human gut metagenome
MPKVYVLNRHGRPLMPCTPAKARHLLDAGKAKVRHRTPFTIQLLYGSTGYTQEVILGVDAGSKTIGLSAATETEELFSAEVKPRNDVVELMSARRQFRRARRNRTTRYRKPRFDNRVRSKHKGWLAPSVEVKIQEHMTAIRRACAILPVSKVVVETAEFDLQLLKAVAEGKPVPQGEDYQKGEMYGHYNVRQYVLWRDSYTCRICGAHGSVRKGVPLHVHHLESRRVGGDAPDNLVTLCTACHDKLHKGIIMAADIKKRKRRSTRDATFMGIMRMTLLRRLREQLPVPVVETRGYITKATRENLLVLPKSHTNDALAIAHGPQGFRAEHLPNIRQADRLYTIRPVRHHNRQLHKATILKGGVRKANQAEKYICGFRLYDKVLYNGIECFVWGRRTSGSFLLRQLNGEKVKDGVSYKHLKLLERSQSYLVA

SEQ ID NO: 13986 - protein, 454 aa, Anoxybacillus sp.
ASVLHITSIYNMVEENMTCFMQRKGENPMVFVLDTNKRPLAPCHEAVARKLLKQGKAAIYRRFPFTIILKKSVDESEIKATYRLKIDYGSRHTGLAILRGQEVVWLGQLDHRTDIKERIDKRRAFRRARRNRKTRYRKPRFLNRKRKEGWLPSSLESRVQNIQTWVNRLKKLCPIGYISYENAKFDTQLMRNPEINGVEYQQGTLQGYEVREYLLEKFGRKCCYCGKENVPLEVEHIIPKSRGGTDRVDNLCLACHDCNQRKGSKTAEEFGYPHIQKQVKESLKDASAINSTRWKAYEVLKQTGLDVECGTGARTKMNRIRLDLPKTHYFDACCVGESTTNHLYFKTKEVLFIKAKGRGSHSRTNLDRYGFPRGYLARQKFFFGFQTGDMVKAVVPRGKYQGVWFGEVACRKTGSFDIKGKDGKRIAQGINYRYVQVIQRFDGYAYGKGVAELA

SEQ ID NO: 13987 - protein, 431 aa, unidentified
  REGION 1..431: note = Human gut metagenome
MPNKVYIINKHGRPLMPCSPAKARHLLDEGKAKVKKRTPFTIQLIYGSSGYTQEVILGVDAGSKTIGMSASTTKEELLSAEVKPRNDVVDLLSTRREFRRARRNRKTRYRKPRFDNRVRSKHKGWLAPSVEVKIQEHITAIRRVCGILPVSKVVVETAEFDLQLLKAIADGKPVPQGEDYQKGEMYGHYNVRQYVLWRDGYTCQCCGAHATKKKEVRLHVHHLESRKVGGDAPDNQVTLCESCHEKLHKGLIAEKDFKKRKRRSTRDATFMGIMRKTLMQRLCSELPIPVVETRGYITKATREKLLVLPKSHTNDALAIAQGKQGFNVGYLPEIAQIDKIYTIRPVRHHNRQLHKATILKGGIRKSNQTEKYVFGYRLFDKVQFNGQDCFIWGRRTTGIFTIKTINGKMIKDGISFKKLKLVEKSTSYLIA

SEQ ID NO: 13988 - protein, 339 aa, unidentified
  REGION 1..339: note = Human gut metagenome
LLSARRALRQSRRNRKTRYRAPRFDNRIRTKRKGWLAPSVENRINAHLSRIEAVLRLLPITKITVETASFDTQLPKNPDIAGKEYQEGEQLAFWNVREYVLFRDGHVCQHCHGRSKDPVLNVHHLESRRTGGDSPGNLITLCETCHKALHRGEIKLSAKRGQSLRAEAFMGIMRWEVLNRLKLSHPELEVNNTYGYRTKHARIANGIAKSHCADAFCIAGNLGAKRLGEFFFQKQTRRNNRQIHKFSILKDGIRKRNQAPFEVNGFRLFDKVACQGEEGFIFGRRSSGYFDVRKLDGTCISAGISYKKLHLLEKRRTYLTEIRKEKALPPLPGGSGLRA

SEQ ID NO: 13989 - protein, 493 aa, unidentified; identical to SEQ ID NO: 3154
  REGION 1..493: note = Human gut metagenome

SEQ ID NO: 13990 - protein, 427 aa, Enterococcus sp.; identical to SEQ ID NO: 2410

SEQ ID NO: 13991 - protein, 430 aa, unidentified
  REGION 1..430: note = Human gut metagenome
MPNKVYVINKHGRPLMPCSPAKARHLLDAGKAKVKKRTPFTIQLVYGSSGYTQEVILGVDAGSKTIGMSASTTKEELLSAEVKPRNDVVDLLSTRREFRRARRNRKTRYRKPRIDNRVRSEHKGWLAPSVEVKIQEHITSIKRVCRILPVSKVVIETAEFDLQLLKAIADGKPVPQGEDYQQGEMYGHYNVRQYVLWRDNYTCQCCGAHATKKKEVRLHVHHLESRKVGGDAPDNQVTLCESCHEKLHKGLITAKDFKKRKRKSTRDATFMGIMRKTLMQRLCSELPIPVIETRGYITKATREKLLVLPKSHTNDALAIAQGKQGFNVGYLPGIVQINKIYTIRPVRHHNRQLHKATILKGGIRKSNQAGKYVFGYCLFDKVQFNGQDCFIWGRTTGIFTIKTINGKMIKDGISFKKLKPVEKSTSYLIA

SEQ ID NO: 13992 - protein, 413 aa, unidentified
  REGION 1..413: note = Human gut metagenome
LKVFVLNMRGKPLMPCSPAKARHMLKAGKAFVVRRTPFTIKLTIATGETKQDVTLGVDAGARHVGISATTEKEEVFASEVALRQDITGLLADRLAFRRARRNRKTRYRAPRFNNRVRSKHKGWLAPSVENRIQAHMSRIEAVCRLLPVTKIVIETASFDIQKIRNPEVEGTGYQQGDQLGFWNVREYVLFRDGHICQHCRGRSKDPILNVHHLESRKTGGDAPNNLITLCETCHKAYHAGKIKLKVKRGQSFRAEAFMGIMRWTLLDRVRKTHPKLPVENTYGYLTKHKRIALGLPKTHCADAFCIAGNLKALRRGDFLFQQQTRKHNRQIHRCSILKGGVRKLNQAPFLVKGFRLFDKVRIGGQIGFVFGRRVRGIFNIRRLDKTVIGTDINCKKLSLLETRKTFLTELRKE

SEQ ID NO: 13993 - protein, 304 aa, unidentified
  REGION 1..304: note = Human gut metagenome
LAGAICGGQDPGAYHQYQAGFELLPIGKVVVETAEFDLQLLKSIADGMPVPQGENYQKGEMYGFYNVRQYVFFRDGYTCQCCGAHGKGIKFHTHHLESRKTGGNAPDDLVTVCDKCHKAFHAGLITDAKLKKRRRKSTRDAAFMGIMRKTLLQRLRAELPIPVVETRGYITKATRERLLKLPKSHTNDALAIAMGRHGFGIKEVTYMPQSDRIYQIKPVRHHNRQLHKAIPKKGGRRQRSQGPKYVQGFRRFDKVLYRGQECFIWGLRTRGYFQLKLLNGTKVHESAKASELILLEHRSGYLIA

SEQ ID NO: 13994 - protein, 420 aa, unidentified
  REGION 1..420: note = Human gut metagenome
MQYVYVLNKHGEPLMPCSPRKARLLLKQKKAYVIKRTPFTVKLLYGSAGYKQPVTLGVDAGSKHIGISATTEKHELYREEATPRNDVVDLLSARRAFRRSRRNRKTRYRAPRFNNRVHSKHKGWLAPSVEVKIQEHITLIKHACCILPVTLVRVETAEFDTQRLKAMLEGKPLPVGTDYQLGEMYDEYNVRQYVLKRDNYTCQCCGAHSTKTKGVKLHVHHIETRRTGGNAPNNLITLCKACHKALHAEKVTLDGKKRGKPLKDAAFMGIMRKTLMERLLKELKIPVQETYGYITKYLREKHSIPKSHTNDARCISKNPLAIPCDTCYYTKAIRHHNRQLHKATILKGGIRKANQAPYTVKGYRLWDKVAYNGTECFITGRRTSGYFALKKLDGTVASNSISYKKLRLLEAATNYIIERK

SEQ ID NO: 13995 - protein, 431 aa, unidentified; identical to SEQ ID NO: 5579
  REGION 1..431: note = Human gut metagenome

SEQ ID NO: 13996 - protein, 458 aa, Anoxybacillus sp.
MVEENMTCFMQRKGENPMVFVLDTNKRPLAPCHEAVARKLLKQGKAAIYRRFPFTIILKKSVDESEIKATYRLKIDYGSRHTGLAILRGQEVVWLGQLDHRTDIKERIDKRRAFRRARRNRKTRYRKPRFLNRKRKEGWLPSSLESRVQNIQTWVNRLKKLCPIGYISYENAKFDTQLMRNPEINGVEYQQGTLQGYEVREYLLEKFGRKCCYCEKENVPLEVEHIIPKSRGGTDRVDNLCLACHDCNQRKGSKTAEEFGYPHIQKQVKESLKDASAINSTRWKAYEVLKQTGLDVECGTGARTKMNRIRLDLPKTHYFDACCVGESTTNHLYFKTKEVLFIKAKGRGSRSRTNLDRYGFPRGYLARQKFFFGFQTGDMVKAVVPRGKYQGVWFGEVACRKTGSFDIKGKDGKRIAQGINYRYVQVIQRFDGYAYGKGGRNLRKVQFLVVPKGRGFLA

SEQ ID NO: 13997 - protein, 341 aa, unidentified
  REGION 1..341: note = Human gut metagenome
LLSTRRESRRARRNRKTRYRKPRFDNRVRSKHKGWLAPSVEVKIQEHITSIKRVCRILPVSKVVIETAEFDLQLLKAIADGKPVPQGEDYQKGEMYGHYNVRQYVLWRDNYTCQCCGAHATKKKEVRLHVHHLESRKTGGDAPGNLVTLCDSCHEKLHKGLIAEKDFKKRKRRSTRDATFMGIMRKTLMQRLCSELPIPVVETRGYITKATREKLLVLPKSHTNDAQAIAQGKQGFNVGYLPGILQIDKIYTIRPVRHHNRQLHKATILKGGIRKSNQTEKYVFGYRLFDKVQFNGQDCFIWGRRTTGIFTIKTINGKMIKDGISFKKLKILEKSTSYLIA

SEQ ID NO: 13998 - protein, 518 aa, unidentified
  REGION 1..518: note = Human gut metagenome
LANLKLIDELLEKTEYIYVLGTDGKPQMPTNRKVRVRSLFKSGLAKIVDTVPFTIRLLYENDAVLQPITIAEDPGRTNIGAAVLTQLGDLVFSAVVETRNKSIKKLMSDRKAYRQASRRGERKARQRLAKRHGSMIKAGMIMRKLPQYAADKFVTCKIIKNTEARFCNRKRMPDWLTPTVNHLVQTHINLIKKVEKYLPITDVAIEVNRFAFMQMENPDASGVDFQNGPLKGFDDVKAAICEQQHGKCLMCKNDIEHFHHIVPRSKGGSDTIQNQAGLCKKCHAKVHTDAEFQAKFKDKKEGLIKKYGALSALNQAIPFICKELLEIYSVEHVHFCTGKDTSLIRSSLGYEKTKDNQMHEVDAYCIGLAAIGADKAKRPDFNNVFKIKQFRRQDRQLVHYQKERTYYLDGKKIATNRNPRFEQKGDALSDWYKEQIKIYGQYEAEKMRSRLTVKKSKRSYNTTKRLMPGCVFYYDGQRHVMTGQSSYGRYLRAYNCGTKDFPASKCQVIQFNAGLVFV

SEQ ID NO: 13999 - protein, 464 aa, unidentified; identical to SEQ ID NO: 6574
  REGION 1..464: note = Human gut metagenome

SEQ ID NO: 14000 - protein, 544 aa, unidentified
  REGION 1..544: note = Human gut metagenome
MKQKKQKVMVYILNKKGKPLMPTTRCGHVRKLLDSKKAVVVNSNPFTIRLKYDTPNGVQDVFAGIDSGRENIGSGASNEDGDCLYLGELRTSNKSIKMKMTERVGFRRERRKHDRQNKQRKARKDHTEIQNGKDDICRATISCKSVQISYPTAEESVTHKIIRGKEGKFANRHRDGDWITPSARQLVQMHMNDLKSICKILPISHVTLERVAFDFQKLENENIKVWEYGKGKLYGYDSPEEYIHDVQDGKCLVCGKPHIDYLHHIIPRSKGGSDKVSNIAGLCYDCHYGPIGVHNCQDTQDRLPELKNEVNKQYKVSLLNSVMPVLIEEIDKFCKANSIMFSICEGHDTAKVRDMYDLQKDHCLDGFAISLVGRNVKSVDVMPDRIHQKQRYKKKSKNIIQKRNYREYYDDKKLVAINRHKGTDQKADSLEEYMNTYAETHTADECKMHFESLTVKPARRTYTFHKEGRICPLHIGDKVRYEKKNKIKGNTKVDTFICEGIYFSKDENKAKVEHNKTKSKKMKFCRAIESGCIPYIDYIKLALI

SEQ ID NO: 14001 - protein, 419 aa, unidentified
  REGION 1..419: note = Human gut metagenome
MVYVINKQGQALMPTERFGKVRRLLKNSLAHVVCRIPFTIQLDYDTTDYTQPVSLGVDAGSKHIGISATTSEKELYAADVELRNDIVDKLSTRRELRRTRRSRLRYRKARFNNRVSSKRKGWLAPSVENKIQTHLTVVEKIHKFLPITNIVVETAAFDIQKINNPSISGSEYQQGEQLDFFNVREYVLFRDNHTCQHCKGKSKDKVLNVHHIESRKTGGDSPNNLITLCETCHKAYHRGEFKLNVKRGRSFRDAAFMGIMRWSFYEKLKNIYPNVSMTFGYITKNTRITNNLPKEHYVDARCISGNPVAKPLGYYFYQKKVRCQNRQIHKANFLKGGRKKLNQAPFLVKGFRLFDLVEYQNDLYYIFGRRDSGFFDIRKLNGTKVNKGSINCKHLRLMATRKSILIEKRMQINYENTGF

SEQ ID NO: 14002 - protein, 457 aa, unidentified
  REGION 1..457: note = Human gut metagenome
MDAVAVISASGKPLMPTNPVRARKLIKKGKAVIYKYRPLFTIRLTERTDGDIQTIEYCCDTGYQHIGLSIKSRKHEYVNEQRDLLPNETERHNDSRKYRKARRRRKLRHRACRRDNRHDNQICKDGYAPSIRNKRDQHISLYRSYTEILPVERAVFEMGQFDTQVLKAIEKGEPLPQGKDYQHGERYGYATLREAVFARDDYTCICCGKNAFKDKRILCVHHLGFRIGDRTNRLANLATVCTKCHTPKNHQPKGKLYNLKPELKDFKGATFMTMVRWDMLDKLKVVSKDIQVDVTYGAATKEARRDLKIKKSHANDAYCMGSFHPSHRTDLKRYEKCRRNNRVLSKFYDATYIDIRDGKKKKANALGCNRTKRRESRRSEKNERIYRGEKVSKGRIVLRTKRAVIRPGDIVYVGKKKYIVASSKNLGKQLKLADGSLLTTSKVTKIIHCGGWKTVTL

SEQ ID NO: 14003 - protein, 425 aa, Moorena sp.
MPCNEKRARLLLARGRARVHRVIPFVIRLVDRQIGVCSFQPLRLKLDPGSRVTGMALVRETDDAIAVLNLFELVHRGRQIGEALTARRACRRRRRTNLRYRTPRFLNRTRPSGWLPPSLMHRVHITIAWVNRMRRWAPVTALSSEQVRFDMQALANPEISGVMYQQGTLAGYEVREYLLGEWSRTCIYCDATDRPLQVEHLTARARNGSNRIGNLGLACGECNQDKGALDVREYVKDPKRLARILATASRPLNDAAAVNATRRALSSALRTTGLPLELASGGQTKFNRVTHNIPKTHALDAVCVGEVAALRGWQRPSLTIRATGRGSYQRTRLTRHGFPRGYLMRQKQVQGFQTGDHVRADVPHGKKAGVHTGRVAVRATGSFNIQTAMTVVQGISHRYCKLVQRGDGYAYSLQPNDSFRQDGGG

SEQ ID NO: 14004 - protein, 518 aa, unidentified; identical to SEQ ID NO: 7468
  REGION 1..518: note = Human gut metagenome

SEQ ID NO: 14005 - protein, 427 aa, Parasutterella sp.
  SITE 159: note = misc_feature - Xaa can be any naturally occurring amino acid
LKVFVLNKRGKPLMPCSPAKARLLLKEKKAIVVRRTPFTIQLTIATGESKQPVSLGVDAGYKHVGLSASTEKAELYESEVELRQDVSDLLSARRALRQSRRNRKTRYRAPRFDNRIRTKRKGWLAPSVENRINAHLSRVETVIRLLPVTKITVETTSFXMQLLKNSDIAGKEYQEGEQLGFWNVREYVLFRDGHVCQHCHGRSKDPVLNVHHLESRRTGGNSPGNLITLCETCHKALHRGEIKLKAKRGHSFRAQAFMGIMRWEVLNRLKASHPELEVNNTYGYRTKHARIANDIAKSHCADAFCIAGNLGAERLGEFLFQKQTRRNNRQIHKLSILKGGIRKRNQVPFEVKGFRLFDKVAYKGEEGFIFGRRSSGYFDVRKLDGTHISAGISYKKLRLLEKRQTYLTEIRKEEALPPLPEGRGLRA

SEQ ID NO: 14006 - protein, 453 aa, unidentified
  REGION 1..453: note = Human gut metagenome
MLMAVAVVSRTGVPLMPTSPYRARKLLASGKAEKYGYDPFTIRLTERETGDTQPVELCMDTGYIHIGVSVKSEKHEYLALQIDTLTDEKKKHEKCREKRRNRRSRKRYRKPRFDNRKRDKGWLAPSLEHKKEIHVRAAERICRVVPVTDITMEMGNFDTQVLKAREEGRPLPQGTDYQQGERYGTATLREAVFSRDNYTCLCCGRTMKDGAYFHVHHIRYRSQGGTDRMANLATVCEKCHTPANHQPGGKLYNWKPEIKSFKGATFMTAVRWQMYREIKEKIPDVSVHLTYGAATKERRRALDIEKSHVNDAFVMGRFHPGHRARPELYIKKRRNNRVLESFYDARYIDSRDGKRKSGKELFNGRISRNHKKDSENLHKYRLRKVSKGKRSIRKKHYPIQPHDILVYCGRKYETAGCHNLGTGAILLPERRSIAVSKLKIYRYSGGYYKAEFN

SEQ ID NO: 14007 - protein, 423 aa, unidentified; identical to SEQ ID NO: 13653
  REGION 1..423: note = Human gut metagenome

SEQ ID NO: 14008 - protein, 427 aa, Oscillochloris sp.; identical to SEQ ID NO: 5291

SEQ ID NO: 14009 - protein, 430 aa, unidentified
  REGION 1..430: note = Human metagenome
MPKVYVLNRHGRPLMPCTPAKARHLLDAGKAKVRHRTPFTIQLLYGSTGYTQEVILGVDAGSKTIGLSAATETEELFSAEVKPRNDVVELMSARRQFRRARRNRTTRHRKLRFDNRVRSKHKGWLAPSVEVKIQEHMTAIRRVCVILPVSKVVVETAEFDLQLLKAVAEGKPVPQGEDYQKGEMYGHYNVRQYVLWRDGYTCQCCGAHGSVRKGVPLHVHHLESRRGGGAAPDNLVTLCTACHDKLHKGIITAADLKKRTRRSTRDATFMGIMRMTLLRRLREQLPVPVVETRGYITKATREKLLVLPKSHTNDALAIAHGPQGFHAGYLPNIRQADRLYTVRPVRHHNRQLHKATILKGGMRNANQAEKYICGFRLYDKVLYNGIECFVWGRRTSGSFLLRKLNGEKVKDGVSHRHLKLLERSQGYLVA

SEQ ID NO: 14010 - protein, 427 aa, Moorena sp.; identical to SEQ ID NO: 13724

SEQ ID NO: 14011 - protein, 423 aa, Moorena sp.
MRVFVLNKNRQPLDPCKPARARILLSTGKAKVYRRYPFTIILTEEVKNPVIHKHQVKIDPGSKTTGLAIVQGERVIWGSELTHRGSQIRDNLISRGQLRRSRRNRKTRYRQPRFLNRTKPKGWLAPSLTSRVQNILTWVKKLIRFCPITGISQELVRFDTQKLQNPELSGIEYQQGTLYGYELREYLLEKWNRKCAYCGATGTQLEIEHIKPLSKGGSNRVSNLTIACHSCNQAKSNQDIELFLSKKPSILKRILSQSKRPLADGASVNSTRWKLYHDLKSIGLPVEVGSGGLTKFNRCRQDLPKTHWLDAANVGKVETLIIEVTKPLLITAKGHGTRQLCRTNKYGFPIRHCSRIKFHKGFQTGDIVRAVVTKGKKIGTYVGRVATRKSGSFNISTLGGLVQGISHKYCRFIHRKDGYAYTN

SEQ ID NO: 14012 - protein, 493 aa, unidentified; identical to SEQ ID NO: 2644
  REGION 1..493: note = Human gut metagenome

SEQ ID NO: 14013 - protein, 436 aa, unidentified
  REGION 1..436: note = Human oral metagenome
MTKTLTTRTTQACVLDQQGKPLMPTTRLGKVYRLLKTQKAHIVSYEPFTIQLDYEPDTHVIQPMTLGVDSGAIHSGYSLANEHREYYSAEVIARNDISNRLSDRRMYRQNRRSRKTRHRQPRFSNRKNKKKGWLPPSLEQKVAVQVNEINHLHRYFPIETIIVETAEFDIQKIKNPDISGIEYQQGTLQGYNIRNYLLEKHGRKCFYCGKAVSDFEVEHMLPKSKGGSNRIDNLTLSCHDCNEKKGTLTAEEFIKQTLSAKKAATKIKQLPNEKRLFKYMAYMNATRWALYDAIKDRYPNVKMTYGYITKYNRIQAGLPKAHHIDAKCITGFATVPSMSQTVVKVKMRRHNRQLHRATFSKGHVRKAASLPTTVFGFRLYDLVCFNNHRYYIKGRRSSGYFALVSVENLKNEERSYKKLTLLAHTNAYLTNRYVNA

SEQ ID NO: 14014 - protein, 477 aa, Blautia sp.; identical to SEQ ID NO: 2707

SEQ ID NO: 14015 - protein, 479 aa, Moorena sp.
MNKVFVLDTTKQPLAPCHPAKARKLLRDGQAALYRAYPFTIILLRAVEEPVAPPLRLKIDPGSKVSGLAIVHDASGEIVWAAEVAHRGEPIRAALVQRASVRGNRRSRKTRYRKPRFLNRRRRAGWLPPSVASRVENIMIWVRRLCQLCPIQALALELARFDTQALQNPEISGVEYQQGELAGYEVKQYVLEKWGRQCAYCAATQVPLEIDHIVARDRGGSHRVSNLTLACVPCNQKKSNHNVRDFLAHDPARLARIVAQAKTPLKDAAVVNSTRWALYEALLALGLPLEVGTGGRTKWNRSMRGLPKTHWLDAACVGASTPEVLWTSGTLRPLQIRATGHGSRQMCAMDKYGFPRTRAKQAKRVQGFQTGDIVKAVVPSGKPTVGALGEAGHLCRARRRARFRQFQYPHRQWFGGGHQLSLLPPSPPRRWLCLFLERSSQEGWMAMLFQGRASAKPPLGFLPRMECVGFLALTSVRKK

SEQ ID NO: 14016 - protein, 442 aa, unidentified
  REGION 1..442: note = Human gut metagenome
MSTSVFVLDKKHRPLMPCRPARARRLLRAGRARVVKRFPFVIRLVDRTVEQSEVQPVLIKLDPGSRETGAAVVRDDGKKRHHALAFFVIKHRGGAIRDALKARSAFRRRRRSQNFRCRSPRFLNRVKPKGWLPPSLRHRVETTLSFVRRMCRYLPVSGIATELVKFDSQKLQNPEVSGVKYQQGTLFEYEVREYLLEKFGRKCVYCGAEGVPLNIDHVVPRAKGGSNRVSNLVLACVSCNQKKGARSLEDFLKGKPEVLARVRRELKTPLRDAAAVNATRWVLFNELKATGLPVETGSGALTKLNRHAFGVEKEHWLDALCVGRLNGAVTRKGLNVLEIRCMGRGSRQRTRLTKYGFPRGYLMRQKCVHGFATGDMVEANVPKGKKAGLWRGRVAVRVSGSFNIQTPKGVIQGVGWKHCRLISHNDGYGYAWLGHAPHSSPA

SEQ ID NO: 14017 - protein, 477 aa, unidentified
  REGION 1..477: note = Human gut metagenome
MASMDNIVEGQQRNSALGLPMRIAAGSMIAGKGGKMEYENANRVFLLNKDGKPLMPCRPRKARLLLKSGKAFVVKKYPFTIQLKYGSYGYKQKVSLGVDTGQRHIGFAVTSQDKVLYQSEVELRQDVHKNLYTRRIYRRSRRNRKTRYRQARFLNRVHGKRDCLWLPPSVKGKASHNIAWIKRYLAVLPNPDLHIEVGKFDMAKMVNPAISGKQYQEGSLHGWKNYEYYVLARDEYTCQLCHKHGEGVKLVVHHIVYRSQGGTDRVDNLITLCTNCHTTKNHQPGGKLYKWMKAKKKVTKQLKGATFMNILRKRIMTAFPEASCQYGYQTFFERKKFNLPKGHFTDAIAISGIKSVGQMPETVAMISQFRKKKRSLHEATARKGRKEANRTSKRNAKNTKYARGLWLNDYVHVIGTNLRGYVQSYLSKGAYVRLSDGLGNYVIKDGKNYISTKLCKLITHNGNWQKAEQKLLLYEFK

SEQ ID NO: 14018 - protein, 515 aa, unidentified; identical to SEQ ID NO: 3339
  REGION 1..515: note = Human gut metagenome

SEQ ID NO: 14019 - protein, 405 aa, unidentified
  REGION 1..405: note = Ga0307928_10001329
MLVYVKNCKDEPLMPCSPCVARRLLKNGEAKVVSRTPFTIKLLHGIRGYKQEVVAGMDTGSKFIGCAVKSNGKVLYQSEVQIRQDVSKKMKQRKMYRKSRRGRKLRYRKMRWQNRASMRKTGRLAPSIRSKIDSHLREKKFVESVLPITRWIVETAKFDIHKITNTDVKGTDYQEGDQKGFYNVKAYVIDRDSYTCQHCKGKSGDKKLVVHHITSRLIGTNSPDNLLTLCVTCHKKFHKGEIELNIKGKRSKTKHATEIGIVKSQLKKKWLGFEETFGYETKYKRENILNLPKSHINDAIAICCENNKIELNNDNIYLKKHVASGDYQQTKGKRSEKKIPTGKLFGLRKFDLVETVKGIGFIKGKRSSGFFAISNLDNSINISSVNVKKECKRILARKTVLTERG

SEQ ID NO: 14020 - protein, 455 aa, unidentified; identical to SEQ ID NO: 10285
  REGION 1..455: note = Human gut metagenome

SEQ ID NO: 14021 - protein, 424 aa, unidentified; identical to SEQ ID NO: 13447
  REGION 1..424: note = coral metagenome

SEQ ID NO: 14022 - protein, 464 aa, unidentified; identical to SEQ ID NO: 3455
  REGION 1..464: note = Human gut metagenome

SEQ ID NO: 14023 - protein, 514 aa, unidentified
  REGION 1..514: note = Human gut metagenome
MSVLVIGRNGRALMPTNPRKARLLLKKKTASVVCRHPFTIQLLYKTGCATQEGCIGIDTGSQHIGVGITCGDRVILKDEHALRSSMEKRSLLATRTVMRRGRRYRKVRYRKPKWRHHTKRMYFEKANRRGQHWRKVKTTTQSPRLKGWLPPSLQSKCDHHFRIIDRYLKYLPDPITRNLVIEAGRFDMARMNDPTIHGEMYQRGPMYDAENLRAYIFARDNYQCACCKAKAGTTRKADGTTVKLVAHHILFRSRGATDNPKYIISVCDHCHTTKAHQPGGILYSWMENNKKVARGLRDATFMNILRKRLFARYPQAAFTYGNITAADRKQLRLPKNHANDAVAISLFGKEASTVKNICQTMHYKQIRKSKRSLHEAIPRKGRKNPNTKAVRNKKNTTQVNGFKLWDSVLADGKKLFICSFTGISAYLIDKNGCYISQPGKTYKQCPLSKLKRLHPNVDILPRINPWDSLDYNNITTPYRSGYSMIFQDLATIGVPHLGWYFLAAGQMPVPISLS

SEQ ID NO: 14024 - protein, 399 aa, Moorena sp.; identical to SEQ ID NO: 6633

SEQ ID NO: 14025 - protein, 432 aa, Moorena sp.
MQPTKQQNWVFQINGDKQPLDMIHPGRCRELQNRGKLASFRRFPYVVIQQQTIESLQTKEYILKIDPGSQWTGFAIQCGDNILFRAELNHRGESIKFDLVKRAGFRRGRRSRNLRYRKKRLNRAKPEGWLAPSIRHRVLTVETWIKRFMRYCPIACIEIEQVRFDMQKLANPEIDGVEYQQGELQGYEVREYLLQKWGRKCAYCGTENVPLEVEHIQSKSKGGSSRIGNLTLACHVCNVKKGNLDVRDFLAKSPDILNQVLENSTKPLKDAAAVNSTRYAIVKMAKSICENVKCSSGARTKMNRVRQGLEKTHSLDAACVGESGASIRVLTDRPLLITCKGHGSRQSIRVNASGFPAVKNAKTVFTHIAAGDVVRFTIGKDRKKAQAGTYTARVKTPTPKGFEVLIDGARISLSTMSNVVFVHRSDGYGYEL

SEQ ID NO: 14026 - protein, 424 aa, unidentified; identical to SEQ ID NO: 3351
  REGION 1..424: note = Human gut metagenome

SEQ ID NO: 14027 - protein, 413 aa, unidentified
  REGION 1..413: note = Human gut metagenome
MTSYSFVLDANGKPLAPTKEQKAWFFIRKKRATLVSKYPMVIQLKKEIPEKEICQDEIRCGIDDGGLHVGIALVQKCKTKNKVVFKGTIEQRNDVKHLMEVRRGYRRYHRYHKRYRQARFDNRKSSKREGRIAPSILQKRQATIRVIHWLNKWINITNYWLEDVSVDIRALTDGYQSYRWQYQKSNRLDENIRKAAILRDDGKCMECGKSNCRLEVHHIKPRRRNGSNTLDNLITLCESCHQKTEGQEELYMDRYFSLLKSSDNKNLNDAQHVMIGKMWLRKQLSGLGVLYLTSGGDTANKRIDWNIEKSHTNDAVCITDLQPDTCDIKEWAIKPMRRQSKAKTDHVLGIHHRDLVEYTFKNGETHRGYVTALYPDQKAINFQSQTKHCKKVNARKCKLLWNYSKIYWFENAS

SEQ ID NO: 14028 - protein, 442 aa, unidentified; identical to SEQ ID NO: 11369
  REGION 1..442: note = Human gut metagenome

SEQ ID NO: 14029 - protein, 465 aa, unidentified; identical to SEQ ID NO: 3856
  REGION 1..465: note = Human gut metagenome

SEQ ID NO: 14030 - protein, 487 aa, unidentified
  REGION 1..487: note = Human gut metagenome
LYGLLLNIFGCLEVVGTEGVSHPGLPGKYKHKGGQLMSVAVISKTVERLMPTSEYRARKLLKSGKAIKHSYHPFTIQLTERETGDIQLIELCMDTGYIHIGISVKSKKHEYLAEQIDTLTDERGRHDACRMYRRQRRSRKRYRQARFNNRKRDQGWIAPSLEHKKKIHIQAISRINKVMPITDITMEMGNFDTQVLKAKEEGKPLPQGAEYQHGERYGIATLREAVFARDGYKCQCCGRTIKDGAILHVHHIKYRSQGGTNSMSNLATVCDKCHTPKNHKPGGKLYNWKPKLPSFKGATFMTTIRWQLYSEVKALFSDIDIYIAYGAATKERRRELDIDKSHVNDAFVMGQFHPKHRIKAVLYKKKRRNNRCLEKFYDAKYIDSRDGKKRSGQELFNGRINRNHKKDSENLHQYRLQKVTAGKRTVRKQHYKIQPHDIVIYENRKRETAGCHCNGTRMMLLPDKKSASIKKVKIYRYAGGYFKSAFN

SEQ ID NO: 14031 - protein, 475 aa, Ferroplasma sp.
MEKHMKEKQKLDRRDTYTPADAPQVRGNCDHALNREETLSVHGLKTPSNNPDVDLQSGMTGQDLRVPVINMRNESLMPTSPGKARRLLKWDKTRVISSNPFTIQLLYATGETKQPVTLGIDAGYKHIGFSAVTEKRELISGEAVMRTDIPKLNVEKSMYRRNRRNRLWYRQPRFMNRGNNREGWFAPSIDHKLQTHIRLIEKLKRILPVSKVIIEVASFDQQKMKNPEISGIEYQQGELQGYEIREYLLEKFHRKCVYCGKTNVPLEIEHLTPKSRGGSNTVDNLAISCHECNQKKNNLTAEEFGYPEVRKTASMPLRDAAFMNTVRWKLTQLTEAIHTFGYITKKNRISPGLDKSHANDAFVIAGGTTQARSTVFNVTQRRRNNRSLQINRKGFRPSIRRRRYPLQPGDVVEFGESRYGVVGVHSYGNYVIIRNGEKKMDVNIKKVKLVKYGKGLGFTTQFFPTLSHMVSLEGS

SEQ ID NO: 14032 - protein, 417 aa, unidentified
  REGION 1..417: note = Human metagenome
MFVYVISKNGQPLMPTSRFGKVRRLLKNKKAKVVSRCPFTIKLLYEPASLIVQEVVLGQDTGSKHIGTACVSNDKVLYQSEVALRDDIKKKMDSRRAFRKNRRQRKTRYRKPRFLNRANSTKEGRLSPSIRSKVQSHIDEIEFCKKVLPISKIVLEVSQFDTALMKNPSLIFEKVKHWGYQEGFDYGYSSRREAVLNRDNYTCQCCGKKHVRLEVHHIIFRSMGGTDDERNLITLCEKCHKMIHDGILVLTKKPKRTNLKYATQMSLIRSQLLKIYPDAIETFGFVTKENRNNLNLQKGHFIDACVIASGGKEFEQSNWLFKKKRIPKQNRRLCKGIRGEKKMPIGKIFGFKRFDKVKYLGKICFIKSRRNSGFFTLMDVDNNIIDFRDKGGRKTPSYKLLEKLNTRKSTLCISRII

SEQ ID NO: 14033 - protein, 425 aa, Moorena sp.; identical to SEQ ID NO: 11531

SEQ ID NO: 14034 - protein, 443 aa, unidentified
  REGION 1..443: note = Ga0315284_10090877
MVFVLSSDKKPLNPCNPARARILLKQGKACVFKQYPFTIILKSRWSFMSETDEFRLKIDPGSKVTGIAIINETTGKVVWAGEVQHRGYRIKEKLESRSASRRSRRNRHTRYRQARWMNRVRQGQMRFSYTSRKGKGWLPPSLCSRIFNVETWIRRLMKLCPIKAFSLESVKFDTQIMENPEIEGVEYQRGTLYGYELKEYLLEKWGHSCVYCGEKDVPLQIEHIKPKSMGGTNRVSNLTIACEKCNIRKNTMTVEEFLEKDRVARNYQAQLKKEHKSGFFKLYSCREFLKDVAAVNSTRKALYQKIKIYNLPIECGSGGLTKYNRVNRGLEKTHWIDALCVGKSTPDVIDVMGITPLNIKAVGHGSRQMCSVNKYGFPASKAKAGKKFFGYQTHDIVKSGNNIGRIKGVRKTGSFTMEGKDKDLNVSYKKISLTQHADGYSYR

SEQ ID NO: 14035 - protein, 390 aa, Scytonema sp.
VSNFVFVLDTNKQPLDPVPPGQARLLLKHLKAAIYRRYPFTIILKYAVKRPKTKPYQLKIDPGSKTTGLAILQNDIGIWGAELSHRGQQIKDDLESRRAIRRNRRNRKIRHRKPRFLNRTRPPGWLPPSLQSRVENTLTWVNRIRRYVPITGISQELVRFDTQAMQNPEMSGKEYQQGELAGYEVREYLLEKWGRKCAYCNTQNVSLEIEHIHPKSKGGSDRVSNLTLACRDCNQAKGNKDIKDFLTRKPDVLNRILKQAKQPLLDAAAVNSTRWELFRRLQQTGLPVEVGTGGRTKYNRTRNGLPKTHWLDAACVGVMESLKVLTQQPLLVVAKGWGSRQMCTPNKYGFPTKHRTRCKTFFGFQTGDMVRAILPTGKFAGIHVGRLTIL

SEQ ID NO: 14036 - protein, 413 aa, unidentified; identical to SEQ ID NO: 3220
  REGION 1..413: note = Human gut metagenome

SEQ ID NO: 14037 - protein, 447 aa, unidentified; identical to SEQ ID NO: 7023
  REGION 1..447: note = Human gut metagenome

SEQ ID NO: 14038 - protein, 415 aa, unidentified; identical to SEQ ID NO: 13500
  REGION 1..415: note = Human gut metagenome

SEQ ID NO: 14039 - protein, 457 aa, unidentified
  REGION 1..457: note = Human gut metagenome
VWLHQAVYNLGEGFLPSSEERTAFYWLLIYRKEHGIMQYVYVLNKHGEPLMPCSPGKARLLLKQQKACVVKRTPFTIKLLYGSAGYKQPITLGVDAGSKHVGLSASTEKRELYREEFTPRNDVVDLLSTRRQNRRSRRNRKTRYRAPRFDNRVHSKHKGWLAPSVEVKIQEHITVIKRICRILPITLVRVETAEFDTQRLKAMLKGKPLPVGTDYQLGEMYDEYNVRQYVLKRDNYTCQCCGAHPTEKKPVRLHVHHLESRHVGGNAPNNLITLCVACHKALHEGKITLDKGKKRGKPLRDAAFMGIMRNTLLARLKDELNIPVKQTYGYITKLLREKNKIPKSHVNDARCIAKAPNAKPCDTMLYTRALRHHNRQIHKAKILNGGIRKKNQAPYLVKGFRLWDKVRYNGEECFITGRRSSGYFALKKYDGTVISNSASYKKLMLLEAATNYITERS

SEQ ID NO: 14040 - protein, 431 aa, unidentified; identical to SEQ ID NO: 5232
  REGION 1..431: note = Human gut metagenome

SEQ ID NO: 14041 - protein, 414 aa, Parasutterella sp.
MPCSPAKARLLLKEKKAIVKRRTPFTIQLTIATGETKQPVSLGVDTGYKHVGLSASTEKAELYASEVELRQDITDLLSARRALRQSRRNRKTRYRAPRFDNRIRTKRKGWLAPSVENRIDAHLSRIEAVLRLLPVTKITVETASFDLQLLKNPDISGKEYQEGEQLGFWNIREYVLCRDGHVCQHCYGRSKDPVLNVHHLESRRTGGDSPGNLITLCETCHKALHRGEITLKAKRGQSFRTEAFMGIMRWEVLNRLKASHPELEVNNTYGYRTKHARIANDIAKSHCADAFCIAGNLGAERLGEFFFQKQTRRNNRQIHKLSILKGGIRKRNQAPFEVNGFRLFDKVACQGEEGFIFGRRSSGFFDVRKLDGTRISAGISYKKLHLLEKRRTYLTEIRKEEVLPPLPEGRGLRA

SEQ ID NO: 14042 - protein, 395 aa, Moorena sp.
FPFTIILKKSCPDSPVSPLRLKIDPGAKFTGMALVNDSTGEVVFAAELKHRGFAIRDALTSRSQLRHSRRARKTRYRQPRFLNRTRPEGWLAPSLQSRVENIKTWVERLRKLAPIRAISQELVRFDMQLMANPNIQGKEYQQGTLAGYETREYLLEKWSRQCAYCGVKDVPFQVEHIHPRAKGGSNSITNLALSCEKCNTKKGTKDIKDFLKKDPLKLEKILKQAKRSLADAAAVNTTRLALLEVLKATGLPVETGSGGLTKFNRSQQNLEKTHWIDAACVGQSTPILNIKGVKPLLITANGHGTRQSCRTDKYGFPSRYVPRFKFVNGFQTGDIVKAVVTKGKKIGTYIGRVAVRTSGSFNISTISGLIQGISYKYCKSIHKKDGYEYGKSKIC

SEQ ID NO: 14043 - protein, 434 aa, Anoxybacillus sp.; identical to SEQ ID NO: 8088

SEQ ID NO: 14044 - protein, 447 aa, Marinobacter sp.; identical to SEQ ID NO: 8246

SEQ ID NO: 14045 - protein, 457 aa, Scytonema sp.; identical to SEQ ID NO: 6260

SEQ ID NO: 14046 - protein, 532 aa, unidentified; identical to SEQ ID NO: 3169
  REGION 1..532: note = Human gut metagenome

SEQ ID NO: 14047 - protein, 437 aa, Clostridium sp.
MVYVLSKKGKPLMPTNRYAKVRVLLKFKKAVVVSSKPFTIKLLYNTKDFVQPITLGIDSGYLNIGFSAITKEKELISGEVKLLKCMSERLKEKAMYRRQRRSRLRYRKPRFDNRKRSENWLAPSIQHKYDSHIRFIDKLKKLLPITNIIIEVANFDTHKLKNPSIEGTAYQNGEQKDFFNLREYILYRDGHKCQNPNCKNKSPEPILQVHHIGFWKQDRSDRPGNLITLCNKCHTPKNHKGKGFLYGWHPKVKSFKEATFMSMIRWRLVNTLGCKHTYGYITKHNRIALNLEKTNYNDAFCIAGGSNQNRVKPLIFEQIKRNSRSLEKFYDAKVIDIRTNTKVSGAELFNGRRTRNKSFNSENLRKYRGIKISKGQRRIRTKRYFYQPGDLVKYEDKIYTVKGTQNKGKYIALKELKKVPKVELLAPYKFRKGLVCV

SEQ ID NO: 14048 - protein, 431 aa, Moorena sp.; identical to SEQ ID NO: 8468

SEQ ID NO: 14049 - protein, 470 aa, unidentified; identical to SEQ ID NO: 7775
  REGION 1..470: note = Human gut metagenome

SEQ ID NO: 14050 - protein, 423 aa, Lyngbya sp.; identical to SEQ ID NO: 2845

SEQ ID NO: 14051 - protein, 424 aa, Moorena sp.; identical to SEQ ID NO: 8578

SEQ ID NO: 14052 - protein, 413 aa, unidentified; identical to SEQ ID NO: 2636
  REGION 1..413: note = Human gut metagenome

SEQ ID NO: 14053 - protein, 426 aa, unidentified; identical to SEQ ID NO: 7828
  REGION 1..426: note = Human gut metagenome

SEQ ID NO: 14054 - protein, 512 aa, unidentified; identical to SEQ ID NO: 3769
  REGION 1..512: note = Human gut metagenome

SEQ ID NO: 14055 - protein, 427 aa, Moorena sp.
MRVFVLDKNRKPLDPCHPAKARKLLKSGRAKVLRRYPFTIIIKDLEVSNCVTHDHQLKIDPGAKTTGLAIVQGSRVVWGAELTHRGFQIREALTSRRQLRRSRRNRKTRYRQPRFLNRTRPKGWLPPSLMSRIHNVLTWVKKLIKFCPVTGISQELVRFDTQKMLNPEISGIEYQQGTLYGYELREYLLEKWNRTCAYCGANNTRLEIEHIKPKSKGGSDRVSNLAIACHDCNQAKGNLEIEVFLSSKPSILKRILSQAKKPLADAAAVNAARWKLYDELKLIGLPVEVGSGGLTKYNRCRQNLPKTHWLDAANVGKVDTLYIEDYQPLLITAKGHGTRQTCRTDKFGFPRLHCSQRKTHKGFQTGDIVKAVVTKGKKIGTYMGRIATRKTGSFDITTAQGKVSGISYKYCQAIHRKDGYSYQFHGG

SEQ ID NO: 14056 - protein, 430 aa, unidentified
  REGION 1..430: note = Human gut metagenome
MVYVLDISGNPLTPTKRHGKVRHLLKTGKAVCVKRCPFTIRLTYQNAGPEPKGLSLGVDCGSKHIGLSVSSEEQEYYSSEVELRQDIPANLSTRREFRRARRHRKTRYRKPRFLNRTASKKKGWLAPSVMQRVESHLNRIDKAVKMLPIREIKVEVAAFDLQKLQADLKGLKRPKGEEYQQGPQLDFWNVREYVLFRDHHECQCCHGKSGDKVLNVHHLRSRKVGGDAPDNLITLCGYCHVQYHKGELELPESAKKPKPLRDAVFMGIMRWMLYNRLKEIYEPQGIKVKLTYGYITKHTRIENGLEEKSHRLDALCIAGHPKAKRCEEWFLQKKVRCHNRQLHKATIQKGGVRKANQLPTVIKGFRLYDKVLFQNRECFIWGRRKTGYFTLKTLDGIMICDGVSSKKLTLLEKRKSYLTERRKQELCNSF

SEQ ID NO: 14057 - protein, 452 aa, unidentified
  REGION 1..452: note = Human gut metagenome
MVFVLSSTNKKLMPTNEYRARKLLKSGKAAVYKHRPFTIILTKRKDGYTQPIEYCCDTGYQHIGISIKSQKHEYVNEERILLKDETERHNDCRKYRRTRRNKLRYRKARWSNRHNNLICKDGFAPSIRNKRDVHINLFKMYHEVCPITSATFEMGQFDTQLLKTVENGDNVPQGTDYQHGERYGYSTLREAVFARDNYKCVCCRKSTIKSGLILKMHHLGYRIGDRSNRMSNLATVCSNCHTSKNHQKGGKLYDLKPKLKTFKGATFMTMVRYDMFSKLKESAPDIKFNMTYGALTKLKRKDYSIKKSHSNDAYCMGVFHPKHRTDFKCYQKLRRNNRILSKFYDAKYIDLRDGTVKSGKQLSCNRTNRRELRNSNKNERIYRGPKISKGKTVVRKQHYQYRPYDFVWYKNVKYAVKGVQDKGKRIALQNHLPVSISKIKRSVHVNGWKLVI

SEQ ID NO: 14058 - protein, 415 aa, Parasutterella sp.
LMPCSPAKARLLLKEKKAIVKRRTPFTIQLTIATGETKQPGSLGVDTGYEHVGLSASTEKAELYASEVELRQDITDLLSARRALRQSRRNRKTRYRAPRFNNRLCTKRKGWLAPSVENRINAHLSRIKAVLRLLPVTKITVETASFDLQLLKNPDISGKEYQEGEQLGFWNIREYVLCRDGHVCQHCYGRSKDPVLNVHHLKSRRMGGDSPGNLITLCETCHKALHRGEITLKAKRGQSFRAEAFMGIMRWEVHNRLRALHPGIEVSNTYGYRTKHARIANGIAKSHCADAFCIAGNLGAERLCEFFFQKQTRRNNRQIHKLSILKGGIRKRNQAPFEVKGFRLFDKVACQGEEGFIFGRRSSGFFDVRKLDGTRISAGISCKKLHLLEKRRTYLTEIRKEEALPPLPEGRGLRA

SEQ ID NO: 14059 - protein, 412 aa, unidentified; identical to SEQ ID NO: 6913
  REGION 1..412: note = Human gut metagenome

SEQ ID NO: 14060 - protein, 414 aa, unidentified
  REGION 1..414: note = Human gut metagenome
MPCSPAKARLLLKEKKAIVKRRTPFTIQLTIATGETKQPVGLGVDAGYKHVGLSASTDKAELYASQVELRQDITDLLSARRALRRARRNRKTRYRAPRFNNRIRTKRKGWLAPSVENRINAHLSRIEAVLRLLPVTKITVETASFDMLLLKNPDIAGKEYQEGEQLGFWNVREYVLFRDGHVCQHCYGRSKDPVLNVHHLESRRTGGDSPGNLITLCETCHEALHRGEIALKTKRGHSFRAEAFMGMMRWEVLNRLKASHSELEVNNTYGYRTKHARIVNGIDKSHCADAFCIAGTLGAERLCEFFFQKQTRRNNRQIHKLSILKGGIRKRNQAPFEIKGFRLFDKVACKGEESFIFGRRSSGYFDVRKLDGTRISAGISYKKLRLLEKRRTYLTEIRKEEALPPLPEGRGLRA

SEQ ID NO: 14061 - protein, 406 aa, unidentified; identical to SEQ ID NO: 2874
  REGION 1..406: note = Human gut metagenome

SEQ ID NO: 14062 - protein, 411 aa, unidentified; identical to SEQ ID NO: 3731
  REGION 1..411: note = Human gut metagenome

SEQ ID NO: 14063 - protein, 410 aa, unidentified
  REGION 1..410: note = Human gut metagenome
MFVDMVYVQDIDGKPMMPTTRHGKVRRLLKDKKAVVVNLCPFTIRLTYVTSDYKQEIVLGVDAGTKHVGLSATTKSKELYSSEVILRNDIVDLLSTRRELRRTRRNRLRYRKHRFNNRIKSRRPGWVAPSVRYKIDAHIRVIDNVCSILPISRIVIEVAQFDTQKINNPNISGKEYQEGNKLGFWNVREYVLARDGHKCQYCKGKSKSKILNVHHLESRKTGGDSPSNLITLCETCHKEYHKGNIDLKIKRGSSLRDAAVMGIMKWKLYEELRSRYDRVSMTFGYITKHNRIKYGIEKSHTSDAFVISKNINAKRIGCQYLKRLIRRHNRQIHKMKILKGGKKKNNQAPFEVFGFRLFDKVLYNNKICFVYGRRKSGSFNIRDFNGENSKDVSRKKFKLIRGKRHPIILK

SEQ ID NO: 14064 - protein, 423 aa, unidentified; identical to SEQ ID NO: 6991
  REGION 1..423: note = Microcoleaceae bacterium UBA9251

SEQ ID NO: 14065 - protein, 477 aa, unidentified
  REGION 1..477: note = Human gut metagenome
MKSHKSVLVIGMNGIGLMPTTACKARKLLEAKKAKVYSKMPFTIKLLYKTGCAVQNISLGIDTGSQHIGVAVTTDNCVQLKDEHELRSTMEKRKLIETRAEARRSRRYRKTRYRKPKFKPHCKHVYMNSMTKRHGHKTHWHNVKNEYGTNRQPGWVPPSIQQKIDHHIQIINRYLEALPKKTKVNIEVGRFDTQKVKNPDIKGKQYQLGRMYDYENKKAYILAKYDYKCPICGRKFGSVRENGSIVKFRKHHLHFVSNGATDNPDSYMAICDCCHTAEAHGDGGILNKIMKESKKTSRGLRDMPFMNILRRRLWNAFPEACFTYGNITNADRKWISLPKTHANDAVAIAMHEYLQQAKSYDVKDVPYTKIYKEVRKKKRSLHEMNPRKGRRIPNMSATRNSKNTKSVINKHRTFSLYDKVRYAGQIGWITGFSGTNTAYLKNKEGKYITIQGKNYKNIPLSNVQILERNNTWITYTK

SEQ ID NO: 14066 - protein, 458 aa, Moorena sp.
MQVFVLDQRKQPLMPCPPARARELLRCGRATVYRRYPFTIRLTGRRDGDVQPLRLKLDPGSHMTGVALVREEGKNQHVLFLAEITHRGQQIRQALLKRRAFRRRRRHANLRYRAKRFDNRMRHEGWLPPSLQHRVDTVLSWVDRLRRLSPLVSISTELVRFDMQQIENPEVAGMEYQQGELAGYEVREYLLEKWGRACAYCGVENTPLQVEHIHPRVRGGSDRVSNLTLACEPCNTRKGAMPVEAFLAKKPEALARILAQAKRPLKDAAAVNATRWALFHTLKATGLPVEVASGGRTKWNRTRLGIPKTHALDAACVGAVEAITGWQRPMLAIKATGRGSYQRTRLDKYGFPRGYLTRSKRVHGFQTGDLVVATVTAGKKAGVHVGRVAIRATGRFNIQTAQGLIQGLSYRVCCLLQRADGYGYVLLAHTRKESENWGRAVHAALPLPGLNPKVSRAN

SEQ ID NO: 14067 - protein, 470 aa, unidentified; identical to SEQ ID NO: 2825
  REGION 1..470: note = Human gut metagenome

SEQ ID NO: 14068 - protein, 424 aa, unidentified
  REGION 1..424: note = Human oral metagenome
MLVYVLKQNGQPFMPTERFGKVRRLLKEGKAKVVRREPFTIKLLYEPETDVVQECYCGVDTGSKHIGVAVVGNDKVLYQSQTKLRSDIKRKMDIRRMYRRNRRFRKIRYRKPRFLNRRNSIKKDRLPPSVKHKVQAHIDEIEFCKKILPVSDLILEVSQFDTALMKNPSLMNEKIRKWGYQKGFNYGYSSRRSAILHRDNYTCQCCGKKNCRLEVHHIKFKSNGGTDDEENLITLCEDCHKGVHTGTITLSKKPKKRKNLKHATHMSIIRSYLLKKYQDAIETFGFVTSENRNHLKLEKDHFIDACVVASGGLEFKELEVIFYKRRVSKGDYQLTKGIRGEQKLPTGKIYGFRKFDKVEYLGEKYFIKGRMSSGFAILMNIFGEKVDFSSMPKGLKTPKLSNCNRISTRRSRLCIREKITLNIV

SEQ ID NO: 14069 - protein, 425 aa, Mastigocladopsis sp.; identical to SEQ ID NO: 12179

SEQ ID NO: 14070 - protein, 452 aa, unidentified; identical to SEQ ID NO: 14057
  REGION 1..452: note = Human gut metagenome

SEQ ID NO: 14071 - protein, 457 aa, unidentified; identical to SEQ ID NO: 3236
  REGION 1..457: note = Human gut metagenome

SEQ ID NO: 14072 - protein, 424 aa, unidentified; identical to SEQ ID NO: 4126
  REGION 1..424: note = Human gut metagenome

SEQ ID NO: 14073 - protein, 537 aa, unidentified
  REGION 1..537: note = Human gut metagenome
MQYVYVVDKHGKALMPTTRYRHVRKLLKSGKAVAICNKPFTIRLKYESSTYTQDLWEGIDTGRQNIGDAVSNEKGENVYLADVRTNNKSIKSNMQDRAGFRRERRRHDRQSKQRKAKHDGTEIQNGDDDTVRTKHSCKSIKISYPTANEPVIHKVIRGKEGKFANRKRPEGWITPSARQVIQITMNEIRQTARILPVNHINLERVSFDFQKLENQDIRRWEYGKGALYGYKTYKDYIWDEQHGKCACCGKPITQYHHIIHRAEGGIDSVKNIIGLCNGCHNKIHASKDAEDKLKELKEGVRQRYYVGLLNSVIPALIEEVSAYCDEHGIEFTVTDGKTTAETREKYGLFKDHCTDAYAISLADRDVKSVSVSDRIYEKRRFKKKSGNIIAKRNQRVYKFDGKIIAYNRHKATNQKDDSFEEYMTKYAETHTDKECRQHVAQIEIIPAKRTYTYHKQGLVAPCHAGDIVRYEKHNKIKGNTKKDTFVATSVEMNGEGHIKYGDACGSRKIKFCRPIDSGCLQAVHNYQADEYLRKIAE

SEQ ID NO: 14074 - protein, 420 aa, unidentified
  REGION 1..420: note = Human gut metagenome
MQYVYVLNKHGEPLMPCSPGKARILLKQQKACVVKRTPFTIKLLYGSAGYKQPITLGVDAGSKHVGLSASTEKRELYSEEFTPRNDVVELLSTRRQNRRSRRNRKTRYRAPRFNNRIHSKHKGWLAPSVEVKIQEHITVIKRICRILPITLVRVETAEFDTQRLKAMLAGKPLPVGTDYQLGEMYDEYNARQYVLKRDHYTCQCCGAHTTTMKSVKLHVHHLESRKVGGNAPSNLITLCTTCHDNLHKRKVTLDGKKRGKTLRDAAFMGIMRKALMARLKEELSIPVQETYGYITKMRREQNDIKKSHVNDARCISKHPLAEPCSVCYRTKAIRHHNRQIHKANFSKGGYRKRSQMSYIVEGYRLWDKVLYKGQECFISGRRASGRFALKKLDGTSISKSVTFKKLRLLEPATNYLIERM

SEQ ID NO: 14075 - protein, 456 aa, unidentified; identical to SEQ ID NO: 4979
  REGION 1..456: note = Human gut metagenome

SEQ ID NO: 14076 - protein, 512 aa, unidentified
  REGION 1..512: note = Human gut metagenome
MSTVYVLNKDGKPLMPTTRCGHVRYLLKEKKARVVASKPFTIQLLYETDDVVQPLYLGIDPGRSNIGVAVVKTDGMAVFTAHLETRNKEIPKLMKKRKDSRRARRTNGRRCRRQRRAKANGTISKKCVKQTTAQNGSVSKRAKEIGVIKRHLPGCEKDVLCIGIKNKEAKFNNRTRPTGWLTPTANQLLQTHINLVKKIQKFLPISDVVLEVNKFAFMQLDNPNIQKWQYQKGPLYQKESLKSAVSEMQEHHCLFCKKKIDHYHHVVPQHKNGSNTIDNIVGLCTQHHDLVHKDATWQKRLAKKKTGLNKKYGALSVLNQIIPALTKELSSLFPKHFFVTNGKSTYDYRAAHGVSKDHWLDAYCIACSVLPNDTCDKTINSCVPYELKQFRRHDRRALNNENMSRVYTFNGKMVATNRHKATEQTTDSLEEFRQRQPNDVCNLKVKEHHPTYRNMSRNYPGSIFLVEKQVHIMQGIAGSKDGKATTYKDTNANSIAAGKCKFVAKNSGILFV

SEQ ID NO: 14077 - protein, 502 aa, unidentified; identical to SEQ ID NO: 11560
  REGION 1..502: note = Human gut metagenome

SEQ ID NO: 14078 - protein, 421 aa, unidentified; identical to SEQ ID NO: 5759
  REGION 1..421: note = Human oral metagenome

SEQ ID NO: 14079 - protein, 426 aa, unidentified
  REGION 1..426: note = Human gut metagenome
LAKDHYRSIDREETNLRVYVLNKRGEPLMPCSAAKARILLKEKKAKVKRRTPFTIQLTIATGETTQPVNLGVDAGYEHIGLSASTEKAELYASEIELRQDISELLAARRALRGARRSRKTRYRAPRFDNRKRDKGWLAPSVENRIGAHVSRVEAVLRILPVTKIIVETASFDVQRIKNPDVQGVEYQEGEQLGFWNVREYVLFRDGHECQHCHGKSKDKVLNVHHIESRRTGGDAPNNLITLCETCHKAFHRGEIELKVKRGRSFQAETFMGVMRWTFFERLRARHPEIEVRNTYGYLTKDTRIANKIEKSHCADAFCIAGNLKAKRLGYYFFQKQTRRHNRQIHKLTILKGGVRKRHQTPYEIKGFRLYDKVLYRGKTAFIFGRRSSGYFDIRTLDGERISAAVNSKKLRLLEKRRTFLIELRRN

SEQ ID NO: 14080 - protein, 442 aa, unidentified; identical to SEQ ID NO: 3658
  REGION 1..442: note = Human gut metagenome

SEQ ID NO: 14081 - protein, 414 aa, unidentified; identical to SEQ ID NO: 2588
  REGION 1..414: note = Human gut metagenome

SEQ ID NO: 14082 - protein, 428 aa, Moorena sp.
MQNQVFVIDSDKQPLTPTSPAQARKLLDSGKAAVFRHYPFTIALKRKVEEAKPAELQLKIDPGSKTTGLAILNGALVIWAAELTHRGQQIKNDLESRRAIRSGRRNRKTRYRKPRFLNRVRPEGWLAPSLNHRVETVMTWVYRLSRYSPIKSVAQELVRFDLQKMQNPEISGVEYQQGELQGYEVREYLLEKWGRQCAYCGAKDTPLEVEHIHPKSKGGSNRISNLSMACHDCNQTKGNSDIRDFLSQKPSVLARILKQAKAPLKDAAAVNSTRWALFNMLKATGMNVSTGSGGRTKFNRCSQDIPKHHWTDAACVGDTPQLSFKTAQPLLIRATGHGNRQMCGTDKFGFPKRHRTNQKVHFGFQTGDMIRADVPKGKKAGIHTGRVLCRKTGSFDISVHGGRVAGINHKYCKPIHKADGYQYSHCGF

SEQ ID NO: 14083 - protein, 458 aa, Lactobacillus sp.; identical to SEQ ID NO: 4474

SEQ ID NO: 14084 - protein, 430 aa, unidentified; identical to SEQ ID NO: 11856
  REGION 1..430: note = Cyanobacteria bacterium UBA9226

SEQ ID NO: 14085 - protein, 380 aa, Arthrospira sp.; identical to SEQ ID NO: 3156

SEQ ID NO: 14086 - protein, 406 aa, unidentified
  REGION 1..406: note = Human gut metagenome
MRGKPLMPCSPAKARHMLKAGKAFVVRRTPFTIKLTIATGETKQDVTLGVDAGARHVGISATTEKEEVFASEVKFRQDITGLLADRLAFRRARRNRKTRYRAPRFNNRVRSKHKGWLAPSVENRIQAHISRIEAVCRLLPVTKIVIETASFDIQKIRNPEVEGTGYQQGDQLGFWNVREYVLFRDGHVCQHCHGRSRDKILNVHHLESRKTGGDAPNNLITLCETCHKAYHAGKIKLKVKRGQSFRAEAFMGIMRWTLLDRVRKTHPKLPVENTYGYLTKHKRIALGLPKTHCADAFCIAGNLKALRRGDFLFQQQTRKHNRQIHKCSILKGGVRKLNQAPFLVKGFRLFDKVRIGGQIGFVFGRRVRGTFNIRRLDKTVIGTDINCKKLSLLETRKTFLTELRKE

SEQ ID NO: 14087 - protein, 512 aa, unidentified; identical to SEQ ID NO: 12069
  REGION 1..512: note = Human gut metagenome

SEQ ID NO: 14088 - protein, 512 aa, unidentified; identical to SEQ ID NO: 6308
  REGION 1..512: note = Human gut metagenome

SEQ ID NO: 14089 - protein, 427 aa, Enterococcus sp.; identical to SEQ ID NO: 5630

SEQ ID NO: 14090 - protein, 536 aa, unidentified
  REGION 1..536: note = Human gut metagenome
VLRPRYQYPTRWYPSREQGSGNGCLSGEENTDLEQEVSGTLSKGDHSHPGEQDFCVPAITIQGGPAMSVFVVGLNGCRLMPTSERKARLLLKHGKASVYRKVPFTIKLNYKTGSTTQSGYLGIDTGSQHIGVSVVREDGTVLHKEEIGLRDSMSKRKLMQSRASSRRGRRHRKTRYRHPKWRPKAKRVYCEIPDRKGRHWKKKEITFASKRPKGWLPPSLQSKTDHHIRWIKKLQDLLPEGYRLSIELGRFDPARLKDPEIHGELYQKGPQYDYENVRAYVLNRDRYTCQVCGKKGGKLHVHHILYRSYGATDDPQYMATVCSDCHNTENHQQGGILYQWMQKQKKFTRGLRDATFMNILRKRLIEAFPGATFTYGNITKADRERLKLPKSHGNDATAIAIVKTGIMTVKDKEPVIYIQQVRRKKRSLHEETPRKGRKEPNRKASRYDKNTKAVTVTKRKNKKKISITGCLFDRVELNGKKGWISGFTDKSCYVKDENDQYIRTSPKYKQVSLSKLKILHHCGNWAIGARRSLGKG

SEQ ID NO: 14091 - protein, 436 aa, unidentified
  REGION 1..436: note = metagenome
MTKTLTTHTTQACVLDRQGKPLMPTTRLGKVYRLLKAQKAHIVSYEPFTIQLDYEPDTHVIQPMTLGVDSGAIHSGYSVANEHREYYSAEVIARNDISNRISDRRMYRQNRRSRKTRYRKPRFNNRKNKKKGWLPPSLEQKVVVQVNEIDHIHRYFPIETIIVETAEFDIQKIKNPDISGIEYQQGTLQGYNIRNYLLEKHGRKCFYCGKTVSGFEVEHMLPKSRGGSSRIDNLTLSCHDCNEKKGTLTAEEFIQQTLPVKKAASKLKQLPNEKRLFKYMAYMNATRWALYDAIKEKYPNVKMTYGYITKYNRIQAGLPKAHYIDAKCITGFATVPPMNQTVVKVKMRRHNRQLHRATFSKGHVRKAASLPTITFGFQLYDIVCFNNHRYYIKSRRSSGYFALVSVENLKNEERSYKKLTLLAHTNAYLTNHYINL

SEQ ID NO: 14092 - protein, 443 aa, Anoxybacillus sp.; identical to SEQ ID NO: 4313

SEQ ID NO: 14093 - protein, 420 aa, unidentified
  REGION 1..420: note = Human gut metagenome
MQYVYVLNKHGEPLMPCSPGKARLLLKQQKACVVKRTPFTIKLLFGSAGYKQPITLGVDAGSKHVGLSASTEKRELYSEEFTPRSDVVELLSTRRQNRRSRRNRKTRYRVPRFDNRVHSKHKGWLAPSVEVKIQEHITVIKHICKILPISLVRVETAEFDTQRLKAMLAGKPLPVGTDYQLGEMYDEYNVRQYVLKRDHYTCQCCGTHNTAKKVVKLHVHHLESRKTGGNAPSNLVTLCTTCHKNLHKGRVTLDGKERGKPLRDAAFMGIMRKTLMIRLKEELPIPVQGTYGYITKMRREQNDIKKSHTNDARCISKHPLAEPCSVCYRTKAIRHHNRQTHKANFSKKGIRKRSQMPYLVEGFRLWDKVLYKGQECFVSGRRSSGSFALKKLDGTSISKGVTFKKLRLLEPATNYLIERM

SEQ ID NO: 14094 - protein, 627 aa, unidentified
  REGION 1..627: note = Lachnospiraceae bacterium
MQELEACICAVGDTMNAPTALVQVVALLQFMVKFRVHGIRNTVTLLPQKVPHWMHSNAVYDSELSFQKDVTVYMYVRVIAKDGTPLMPTRRCGNVRHLLETGMAVAIRTKPFTIRLKYETSKYVQALYAGIDTGRENIGSAVSKENGENVYLADTRSNNGTVHSKMYDRAGFRRKRCRHDRQNKQRKAKFDGTEMKKGDADKVRTTHDCISRKVSYPVAEKSVTHKVIQGKEGKFNNRKHPDGWITPSAKQLVQITMNEVKFMCDTMPIRQLSVERVSFDFQKLANVNIRAWEYGKGPLYGYRSYKDYICDEQKGKCPFCGEDIAHYHHIMPRHRRGTDTVRNIIGVCESCHEKIHSGQITDEMLHEVKDGVAESFEVGLLNSVMPALIDAMKQFCDARNIRLVVMDGRTTSETRNRYHIRKDHCTDAYCISLAGRNIDPADVKLDDFIFMKRRFKKKSKNIINTLNQRVYYDGKKPVAYNRHRAMDQKTDSLEEYMTKYRRTHTGAETDKHFRSLTVRPAKRTYTFHKNGTIAAVHAGDVVRYVKYNKTYGNTKIDTFVALSCEMFGEGHVKYGNGTQGRKLKFCKTIASGALQCVGIEKTDTYLREVALEEAKRRAARVRRKRTG

SEQ ID NO: 14095 - protein, 416 aa, unidentified; identical to SEQ ID NO: 8117
  REGION 1..416: note = Human gut metagenome

SEQ ID NO: 14096 - protein, 413 aa, Moorena sp.; identical to SEQ ID NO: 2636

SEQ ID NO: 14097 - protein, 413 aa, unidentified; identical to SEQ ID NO: 12039
  REGION 1..413: note = Human gut metagenome

SEQ ID NO: 14098 - protein, 420 aa, unidentified; identical to SEQ ID NO: 2681
  REGION 1..420: note = Human gut metagenome

SEQ ID NO: 14099 - protein, 405 aa, unidentified
  REGION 1..405: note = Human oral metagenome
VPFTIILKYVPEGEPTPVQIKLDPGSRTTGIALTMKRKGKDEVIWAAELKHKGLEVKTKLDKRRAVRRSRRSRKTRYRPARFLNRRRKEGWLPPSLESRVGNVVSWMWWLCRWAHVDSIVMELVRFDTQRLQNQEISGTEYQQGTLFGYEVREYLLEKWKRRCAYCGAENVPLEVDHIVPRSHGGSNRVSNLTLACHACNQKKGVRPIEEFLSRKPEVLEKVLEQAKTPLRDTAAVNMSRFALLNRLRATDLPVKCGSGARTKYNRTAQGYPKVHWIDAACVGESGNNVQLDPEMHILSIKAMGRGSWQMCCMDRFGFPRTRPKGARFVYGFRTGDFVRADVPKGRHAGIHTGYVAVRATGSFRIGNADGISWQHCHLLQHGDGYQYNGILQSKGLVGTSNSFNV

SEQ ID NO: 14100 - protein, 512 aa, unidentified
  REGION 1..512: note = Human gut metagenome
MSTVYVLNKDGKPLMPTTRGGHVRHLLKEQKARVVRTNPFTIQLLYETDNLVQPLYLGIDPGRTNIGVAVVKTDGTAVFTAHLETRNKEIPKLMQGRKKARRARRTNGRRCRRQRRAKANGTISKKCVKQTTAQNGSVSKRAKEIGVIKRHLPGCEKEVLCIGIKNKEAKFSNRVRPEGWLTPTANQLLQTHINLVKKIQKFLPISDVVLEVNKFAFMQLDNPNIQKWQYQQGPLYQKASFEEAVSEMQEHHCLFCKKPIDHYHHVVPQHKNGSNTIGNIVGLCAKHHDLVHKDTTWQKKLAKKKTGLNKRYGALSVLNQIIPALTKELSSLFPKHFFATNGKSTYDYRAAHGVSKDHWLDAYCIASSVLPNDACDNNINNHVPYELKQFRRHDRRALHKENMGRVYTLNGKSVATNRHKATEQTTDSLEEFRQCQPDDVCKLKVKEHHPEYRNPKRNFPGCVFLVGKHTHVIQGTSGSHNGKADGYYDTNGNSYSSGKCKFVAKNEGIVFT

SEQ ID NO: 14101 - protein, 512 aa, unidentified
  REGION 1..512: note = Human gut metagenome
MSTVYVLNKDGKPLMPTTRGGHVRHLLKEQKARVVRAKPFTIQLLYETNDVVQPLYLGIDPGRTNIGVAVVKANGTAVFTAHLETRNKEIPKLMQDRKKARRARRTNGRRCRRQRRAKANGTISKKCVKQTTAQNGSVSKRAKDIGVIKRRLPGCEKDVLCIGIKNKETKFTNRTRPEGWLTPTANQLLQTHINLVKKIQKFLPISDVVLEVNKFAFMRLDNPNIQKWQYQQGPLYKKESLGSAVSEIQEHHCLFCKKPIDHYHHVVPQHKNGSNTIGNIVGLCAKHHDLVHKDSAWEKKLAKKSTGLYKKYGALGVLNQIIPTLTNELSSLFPKHSFVTNGKSTYDYRAAHGVSKDHWLDAYCIACSVLPSNVCDSNINNHMPYELKQFRRHDRRVLNNENMNRVYTLNNKAVAINRHKAKDQKTVSLEEFRKEHPDDVCKLKVKEHHPTYRNMNRNFPGSVFLVGKQIHVMQGIASSKDGKATKYNDTSATAIAAGKCKFVAKNTGILFV

SEQ ID NO: 14102 - protein, 472 aa, unidentified; identical to SEQ ID NO: 8142
  REGION 1..472: note = Human gut metagenome

SEQ ID NO: 14103 - protein, 421 aa, unidentified
  REGION 1..421: note = Human gut metagenome
MVYVISISGRPLMPTAHCGKVKHLLKDGKAKVVHREPFTIQLLYETTEYTQTTTLGVDTGSGTFGAAVVTDDSHKVLYMSEVEVRNDISKKMKQRSKYRRNRRYRKTRYRKARFDNRKNSIKDNRFSPTMQSKINAHEREIKFIKSILPVTHLVLETGTFDVALMNNPTLANPKIARWGYQKGPNYGFANTKAMVKARDGYTCAICKGKHKDRRLDVHHIIFRSQGGSDEAKNLITLCHTCHKKLHDGEIIYSGKGKRKGSLSFATQMNSIRKQLLARHPEAIETFGYITSENCQLYGLPKTHCIDAVVIASDVYKPIFATQDVFYKRCIAKGTYQCTKGVRSEKSMPKTKIAGFKQFDKVKYQNNLYFIKGRMSVGYAVLSDIYGTKIDFPHVPKLKEMQRIAARKSIIYITAKIDLKVS

SEQ ID NO: 14104 - protein, 427 aa, Enterococcus sp.; identical to SEQ ID NO: 2410

SEQ ID NO: 14105 - protein, 393 aa, unidentified
  REGION 1..393: note = activated sludge metagenome
LLKAGKAKVIKRTPFTIKLLWDCEENTQEVVAGMDTGSKTIGCAATANGKVIYQSEVQIRQDVSKKMEQRRMYRRIRRSRKTRYRKARWQNRASMRKEGRLAPSITSKVDSHLREKKFVESILPVSCWKVEIASFDIHKISNPDVKRWDYQKGNQKGFYNVKAYVLHRDGYQCQKCKTKKGKLHVHHVVFRSNGGTDSPENLIVLCSDCHEKLHNGEFEIKGARSKTKHATEIGIVKSQLRKRFGDFEETFGYETKFKREQILQLPKSHHFDAVAICCEEGEIVELSDNIYFKKHVSNGDYQQTKGSRSEKRIPTGKLFGLRKFDYIQTPKVTGFIKGKRSTGFFTISDLEGKVINPSVNVKKNCTRLTARTTTLIERRGTFLHGACPVVSCA

SEQ ID NO: 14106 - protein, 408 aa, unidentified
  REGION 1..408: note = Human gut metagenome
MVYVQDINGKPLMPTTRRGKVRRLLKDKKAVVVNLCPFTIKLTYVTSDYKQEIVLGVDAGTKHVGLSATTKSKELYSSEVILRNDIVDLLSTRRELRRSRRNRLRYRKPRFDNRIKSKRPGWVAPSVKYKVDAHIRVIDNVCSILPISRIVIEVAQFDTQKINNPNISGKEYQEGDQLGFWNVREYVLARDGHKCQHCKGKSKDPVLNVHHIESRKTGGDSPSNLITLCETCHKEYHKGNIDLKIRRGKSLRDAAVMGIMKWRLYEELKSKYDNISMTFGYVTKYNRIKHGIEKSHVFDAFVISKNFDAIRLGYYYKVRLVRRHNRQIHKQKIPKGGIKRPNQSPFEVFGFRLFDRVMFENSYYFIFARRKTGSFNIRDIDGKNQRDITYKKLKLSRCKRFMVQKEMD

SEQ ID NO: 14107 - protein, 512 aa, unidentified; identical to SEQ ID NO: 6489
  REGION 1..512: note = Human gut metagenome

SEQ ID NO: 14108 - protein, 427 aa, Nostoc sp.; identical to SEQ ID NO: 2670

SEQ ID NO: 14109 - protein, 453 aa, unidentified; identical to SEQ ID NO: 9775
  REGION 1..453: note = Human gut metagenome

SEQ ID NO: 14110 - protein, 451 aa, Blautia sp.; identical to SEQ ID NO: 11030

SEQ ID NO: 14111 - protein, 406 aa, unidentified; identical to SEQ ID NO: 3157
  REGION 1..406: note = Human gut metagenome

SEQ ID NO: 14112 - protein, 424 aa, unidentified
  REGION 1..424: note = Human gut metagenome
MRVFVLNMRGEPLMPCSQRKARLLLKSNKAVIYKYNPFTIQLTYATGETKQDCHIGIDTGSKHIGAAITSEDKVLWKSEIELRQDVKSNIDAKRIYRRSRRNRKTRYRKPRFLNRKRNDEWLPPSLQNRINHTFHWIDTLNSLVPKPILHIEVGKFDTAKMINPEIHGVDYQYGQTYGFFDERYYVFARDNYTCQCCGKSKNKILNTHHIIYRSNGGTDRVDNLITVCTDCHTSQNHKKGGIFYKWQEQHKKVKQYKEPPFMNTLRKRIFVAYPNAEITYGVETTSKRKAMKLDKTHYNDAIVISGINEISENHEEWLLIKQFRKKKRSLHEATARKGRKILNRNQVRNCKNVPYYKGFYLNDKVSIFGKSGHVTGFTTNGAYVKDDNGNYITLPTKSYKQVSINKMRLKYHNNNWQYMAKRAV

SEQ ID NO: 14113 - protein, 465 aa, unidentified; identical to SEQ ID NO: 3603
  REGION 1..465: note = Human gut metagenome

SEQ ID NO: 14114 - protein, 474 aa, unidentified
  REGION 1..474: note = mine drainage metagenome
VAVFVVDKRKNPLMPCSEKRATKLLGSGRARVHRLIPFSIRVLDREVAGCVLQPVKIKIDPGSKFTGIAVVRETKSIDVATGETGIAVHVLNLFELVHRGRQISEALTARRQMRRRRRGNLRYREPRFLNRGNKDKGWLAPSLQHRVDTTAAWASRLCRLAPVRGISQELVRFDMQKIENPEISGVEYQQGTLAGFEVREYLLNKWDRKCAYCDAKEVPLQIEHIHSKACGGSNRVSNLTLACEPCNQRKGAQDVRVFLAKDTKRLERILAQAKRPLKDAAAVNATRWALFNSLKTTGLPVTTGSGGLTKYNRTQLGIPKTHALDAVCVGAVSAATSWQKPTLTIKATGRGSYQRTRLDAFGFPRGYLTRKKRINGFQTGDMVSADITKGKNIGFYVGRVAVRATGSFNIQTAQGVVQGVSHRHCRLVQRADGYGYSQVAERKEMRNQVSRKARNASRSALYLTSLKDSVSRAQ

SEQ ID NO: 14115 - protein, 504 aa, unidentified; identical to SEQ ID NO: 3854
  REGION 1..504: note = Human gut metagenome

SEQ ID NO: 14116 - protein, 279 aa, unidentified
  REGION 1..279: note = Human gut metagenome
VVVETAEFDLQLLKAIADGKPVPQGEDYQKGEMYGHYNVRQYVLWRDNYTCQCCGTHPSKKKEVRLHVHHLESRKVGGDAPDNQVTLCESCHEKLHKGLIAEKDFKKRKRKSTRDATFMGIMRKTLMQRLCSELPIPVVKTRGYITKATREKLLVLPKSHTNDALAIAQGKRGFNVGYLPEIAQIDKIYTIRPVRHHNRQLHKATILKGGIRKSNQTGKYVFGYRLFDKVQFNGQDCFIWGRRTTGIFTIKTINGKMIKDGISFKKLKPVEKSTGYLIA

SEQ ID NO: 14117 - protein, 465 aa, unidentified; identical to SEQ ID NO: 12395
  REGION 1..465: note = Human gut metagenome

SEQ ID NO: 14118 - protein, 512 aa, unidentified
  REGION 1..512: note = metagenome
MSTIYVLNKDGKPLMPTTRGGHVRHLLKEQKARVVQSNPFTIQLLYETDDAVQPLYLGIDPGRTNIGVAVVKTDGTAVFTAHLGTRNKEIPKLMQGRKKARRARRTNGRRCRRQRRAKANGTISKKCVKQDTAQNGSVSKRAKKIGVIKRHLPGCEKEVLCIGIKNKEAKFNNRTRPEGWLTPTANQLLQTHVNLVKKIQKFLPISDVVLEVNKFAFMQLDNPNIQKWQYQQGPLYQKANLEEAVSEMQEHHCLFCKKKIDHYHHVVPQHKNGSNTIGNIVGLCTKHHDLVHKDSAWEKKLAKKSTGLYKKYAALGVLNQIIPALTNKLSVLFPKHFFVTTGKSTHDYRESHGVSKDHWLDAYCIACSALPGSVCDSDINNHVPYELKQFRRHDRRALHKENMSRVYTLNGKKVATNRHKAVEQTTDSLEEFRQCQPNDVCKLKVKEHHPTYRNMNRNYPGSVFLVDGQIHVMQGVGGSHNGKADGYYDTNSNAYPYYKCKFVAKNEGIVFA

SEQ ID NO: 14119 - protein, 424 aa, unidentified; identical to SEQ ID NO: 6692
  REGION 1..424: note = Human gut metagenome

SEQ ID NO: 14120 - protein, 509 aa, unidentified; identical to SEQ ID NO: 4404
  REGION 1..509: note = Human gut metagenome

SEQ ID NO: 14121 - protein, 420 aa, unidentified
  REGION 1..420: note = Human gut metagenome
MQYVYVLNKHGEPLMPCSPGKARLLLKQQKACVVKRTPFTIKLLFGSAGYKQPITLGVDAGSKHVGLSASTEKRELYSEEFTPRSDVVELLSTRRQNRRSRRNRKTRYRVPRFDNRVHNKHKGWLAPSVEVKIQEHITVIKHICKILPISLVRVETAEFDTQRLKAMLAGKPLPVGTDYQLGEMYDEYNVRQYVLKRDHYTCQCCGTHNTAKKVVKLHVHHLESRKTGGNAPSNLVTLCTTCHKNLHKGRVTLDGKERGKPLRDAAFMGIMRKTLMVRLKEELPIPVQGTYGYITKMRREQNDIKKSHTNDARCISKHPLAEPCSVCYRTKAIRHHNRQTHKANFSKKGIRKRSQMPYLVEGFRLWDKVLYKGQECFVSGRRSSGSFALKKLDGTSISKGVTFKKLRLLEPATNYLIERM

SEQ ID NO: 14122 - protein, 419 aa, Geobacillus sp.; identical to SEQ ID NO: 9987

SEQ ID NO: 14123 - protein, 427 aa, unidentified
  REGION 1..427: note = Human gut metagenome
MVYVLAIDGEPLMPTERHGKVRRLLKENKAKVVKRCPFTIQLLYDSTRYVQEINLGIDAGSKHIGVSATTKEKVLYEADVELRNDIVDLISTRRELRHLRRIRKTRYRKARFNNRVSTKKTGWLAPSVKQKIHTHLTVINNVYKILPIKNLIVETASFDIQKIKNPDISGEEYQQGEQKDFWNVREYVLFRDNHTCQCCKGKSKDKVLNVHHIESRKIGGNAPNNLITLCETCHKGYHNGSVKLPKSIHRGMSFRDAAFMGIMRKTLLSELRKIYPNVKETYGYITKNTRITYNLPKDHYIDARCISGNPDAKPLGYYFYQKKARCHNRQIQKMSILRGGLRKNNQAEYLVKGFRLFDKVKHNSKEYFIFGRRKTGYFDIRNFFGEKVNKGSVSYKKLKFLETRHNMLTERRKTIPYPAIKAEGLLA

SEQ ID NO: 14124 - protein, 415 aa, Bacillus sp.; identical to SEQ ID NO: 2671

SEQ ID NO: 14125 - protein, 442 aa, unidentified; identical to SEQ ID NO: 4653
  REGION 1..442: note = Human gut metagenome

SEQ ID NO: 14126 - protein, 415 aa, unidentified; identical to SEQ ID NO: 3582
  REGION 1..415: note = Human gut metagenome

SEQ ID NO: 14127 - protein, 442 aa, unidentified
  REGION 1..442: note = Human gut metagenome
MVTVQQSTHHLPFGRVFIRRNLFMVYVISQDGKPLMPCSDPIARLLLKQGKAKVKKREPFTIKLTYETTNHTQGLTLGVDTGSGTIGTAVSKDNGDIVYMSEVVVRNDITDKMTQRAKYRRNRRNRKTRYRKARWLNRASSIKKDRFSPTMQSKLHSHVREIEYIQSILPVTEMVFETGQFDMQLMKNPSLANPKVRPWGYQKGANYGFENTKAMVLNRDNYTCQCCKGKHKDSKLEVHHIVFRSQGGSDEESNLLTLCHTCHKDLHSGKINPKLSGKVKGNLKYATQMNSIRKQLFRFYPNAIETFGYVTKANRLHLGVDKEHYYDACTIATQGNAFNVKSNLYKKKCVSDGDFQKTKGIRSEQPIVTDKICGFRKFDKVRYFGNDYFIKGRMSTGYAILMDIYGNKIDFSTMPRGYKTPKLSNCKRITARSTVMTQVKVV

SEQ ID NO: 14128 - protein, 458 aa, Lactobacillus sp.; identical to SEQ ID NO: 3968

SEQ ID NO: 14129 - protein, 408 aa, unidentified; identical to SEQ ID NO: 5302
  REGION 1..408: note = Human gut metagenome

SEQ ID NO: 14130 - protein, 465 aa, unidentified; identical to SEQ ID NO: 5709
  REGION 1..465: note = Human gut metagenome

SEQ ID NO: 14131 - protein, 279 aa, unidentified
  REGION 1..279: note = Human gut metagenome
VVVETAEFDLQLLKAIADGKPVPQGEDYQKGEMYGHYNVRQYVLWRDNYTCQCCGAHATKKKEVRLHVHHLESRKVGGDAPDNQVTLCESCHEKLHKGLIAEKDFKKRKRRSTRDATFMGIMRKTLMQRLCSELPIPVIETRGYITKATREKLLVLPKSHTNDALAIAQGKRGFNVGYLPEIAQIDKIYTIRPVRHHNRQLHKAAILKGGIRKSNQAGKYVFGYRLFDKVQFNGQDCFIWGRRTTGIFTIKTINGKMIKDGISFKKLKPVEKSTSYLIA

SEQ ID NO: 14132 - protein, 435 aa, unidentified
  REGION 1..435: note = Human metagenome
MTKTLTTQTIQACVLDRQGKPLMPTTRLGKVYRLLKAKKAHIVSYEPFTIQLDYEPDTQVIQPMTLGVDSGAIHSGYSVANEHREYYSAEVIARNDISNRLSDRRMYRQNRRSRKTRYRKPRFNNRKNKKKGWLPPSLEQKVAVQVNEIDHIHRYFPIETIIVETAEFDIQKIKNPDISGIEYQQGTLQGYNIRNYLLEKHKRKCFYCGKTVSGFEVEHMLPKSKGGSNRIDNLTLSCHGCNQEKDTLTAEEFIQQTLPAKQAATKLKQLPNEKRLFKYMAYMNATRWALYDAIKERYPNVKMTYGYITKYNRIQAGLPKAHHIDAKCITGFSTVPSMSQTVVKVKMRRHNRQLHRATFSKGHVRKAASLPTTVFGFQLYDLVCFDNHRYYIKGRRSSGAFALVSIEGLKDENRNYKKLTLLAHTNAYLTNHYVN

SEQ ID NO: 14133 - protein, 447 aa, unidentified; identical to SEQ ID NO: 3915
  REGION 1..447: note = Human gut metagenome

SEQ ID NO: 14134 - protein, 489 aa, Streptomyces sp.
LALEFESADNPGIRDETGLGRRKAPGVGHVRGETTSSTPAAGGVTADQQVREPGREADPAVFVLDKHGTPLQPTTPARARKLLASGRAVVARHTPFVIRLKDRTANHSEVAGVEIGIDPGSKHTGIAVFTTVTGERRGRYSIQLDHRGATIRKKLEQRAAYRRGRRSRNLRYRAPRFLNRTRPKGWLPPSLQHRVDTTTSWVDRLARWVRVTAVHVERVAFDTNAISAGRPLEGAEYQHGTLHGMEVREYLLAKFGRACVYCGAMGVPLNIDHIRPRSRGGSDRVANLTLACIPCNQTKGNRPVEEFAPKRAAEILKRAKAPLRDATAVNATRWALWRALDARMPTRTASGGRTKWNRTRCALPKTHTLDALAVGTLDTVTVWPRTVLVIGATGRGQYARTRTDKHGFPRLRLPRVKQFFGFATGDLVRAVVPSGKNTGTHTGRVAVRSSGSFAVRTASGLYTARHKHFRLLQRADGYAYTRQPEGTTP

SEQ ID NO: 14135 - protein, 415 aa, Moorena sp.; identical to SEQ ID NO: 13870

SEQ ID NO: 14136 - protein, 438 aa, unidentified
  REGION 1..438: note = Human oral metagenome
MNSHGHWREGQFSERKAAEMLNNQKEYAFVLDAEGKKLDPTIIQNAWRLVRQKKATLIAKRPMTIQLKKVVDTPNNDEIRMGIDDGAKYVGLALVQKCKTKNKVIFVATMEHRIDVHKKIVQRHEYRRYRRYLKRYRKDKSLNRANSRKQGWISPTIKQKRHAVIRIVDVLSKYICIDSIYLEDVAIDIRVLTEGHQIYGEQYQISNRLDENLRKATVLRDNCKCQLCGKKNCRLEVHHITPRRMNGSNTIGNLITLCSDCHSKVTGREMEFADQFYSKIGKKRNNYGLIYASHVMIGKTWLREELAKRAQLTLTTGGDTANKRINWNLEKSHEVDAVCITSLRPEFVNVKKWRIKPLRHQIKKRKTIEVLRFRHRDIVSYVYRNGEYHEGYVTAIFPLSKRRKENLSFQSQTKHCCRVAINKCKFICRPNKFYWLSS

SEQ ID NO: 14137 - protein, 442 aa, unidentified; identical to SEQ ID NO: 7213
  REGION 1..442: note = Human gut metagenome

SEQ ID NO: 14138 - protein, 423 aa, Moorena sp.; identical to SEQ ID NO: 11977

SEQ ID NO: 14139 - protein, 425 aa, unidentified; identical to SEQ ID NO: 3714
  REGION 1..425: note = Fremyella sp.

SEQ ID NO: 14140 - protein, 450 aa, Moorena sp.; identical to SEQ ID NO: 4205

SEQ ID NO: 14141 - protein, 413 aa, unidentified
  REGION 1..413: note = Human gut metagenome
MTSYSFVLDANGKQLAPTKEQKAWFLIRKKRAALVSKYPMVIQLMKEIPEKEICQDEIRCGIDDGGLHVGIALVQKCKTKNKVVFKGTMEQRNDVKHLMEVRRGYRRYHRYHKRYRQARFDNRKSSKREGRIAPSILQKRQATIRVIHWLNKWINITNYWLEDVSVDIRALTDGYQSYRWQYQKSNRLDENIRKAAILRDGGKCMECGKSNCRLEVHHIKPRRRNGSNTLDNLITLCESCHQKTEGQEELYMDRYFSLLKSSDNKNLNYAQHVMIGKMWLRKQLSGLGVLYLTSGGDTANKRIDWNIEKSHANDAVCITDLQPDTCDVKEWTMKPMRRQSKAKTDHVLGIHHRDLVEYTFKNGETHRGYVTALYPEQKAINFQSPTKHCKKVNARKCKLLWKYSKIYWFENAS

SEQ ID NO: 14142 - protein, 431 aa, unidentified
  REGION 1..431: note = Human gut metagenome
MPNKVYVINKHGRPLMPCSPAKARHLLDAGKAKVKKRTPFTIQLVYGSSGYTQEVILGVDAGSKTIGMSASTTKEELLSAEVKPRNDVVDLLSTRREFRRARRNRKTRYRKPRFDNRVRSKHKGWLAPSVEVKIQEHITSIKRVCRILPVSKVVIETAEFDLQLLKAIEEGKPVPQGEDYQQGEMYGHYNVRQYVLWRDGYTCQCCGAHATKKKEVRLHVHHLESRKVGGDAPDNQVTLCESCHEKLHKGLIAEKDFKKRKRKSTRDATFMGIMRKTLMQRLCSELPIPVVKTRGYITKATREKLLVLPKSHTNDALAIAQGKQGFNVGYLPGIVQINKIYTIRPVRHHNRQLHKATILKGGIRKSNQTEKYVFGYRLFDKVQFNGQDCFIWGRRTTGIFTIKTINGKMIKDGISFKKLKLVEKSTSYLIA

SEQ ID NO: 14143 - protein, 419 aa, unidentified
  REGION 1..419: note = Human gut metagenome
MVYVISQDGKPLMPCSDPIARLLLKQGKAKVKRREPFTIKLTYETTNHTQGLTLGVDTGSGTIGTAVSKDNGDIVYMSEVVVRNDITDKMTQRAKYRRNRRNRKTRYRKARWLNRASSIKKDRFSPTMQSKLHSHVREIEYIQSILPVTEMVFETGQFDMQLMKNPSLANPKVRPWGYQKGANYGFENTKAMVLNRDNYTCQCCKGKHKDSKLEVHHIVFRSQGGSDEESNLLTLCHTCHKDLHSGKINPKLSGKVKGNLKYATQMNSIRKQLFRFYPNAIETFGYVTKANRLHLGVDKEHYYDACTIATQGNAFNVKSNLYKKKCVSDGDFQKTKGIRSEQPIVTDKICGFRKFDKVRYFGNDYFIKGRMSTGYAILMDIDGNKIDFSTMPRGYKTPKLSNCKRITARSTVMTQVKVV

SEQ ID NO: 14144 - protein, 521 aa, unidentified
  REGION 1..521: note = Human gut metagenome
MNYIDFVFVTDKDSLPCNPINEGYAGKLLRTGKAKIVNHDPLVIKRLDDYSSKNENRHTITLKVDTGFGNIGFSASDDKHEYIAGQVELLSGISDRLVTKKGYRTQRRSRLRYRRNKNIDYKTVNNPTYKNGNKDGWLAPSVIHKIESHVRVIDRIASWIPIDKVIIETANFDIQKIKATLNGTAINGIDYQKGEMYGFENAKQYVRERDNYTCQICKEKLTDKRHVVIEVHHIIPKSKGGSNKPDNMISLCHCCHKKVHENNNDNKLFRELRQRKIINTYKDATFMNTMRWELYNRLKENYDVSMSFGYITRMNRKNAGLEKYHYTDAVCISEYHKITLTKNIYLVEQKRCNDRCMESFFDAKYIDSRDGKVKKGSELCKSRVATASSKRSTKKEDIDNKRIYRQEKVSKGKRRYENHSYCLKPGDLIYINYGNHKGNIAEVTTMQKNPNGTYKIVFSYANPKCKIPSINIKEKEYVELTHNQCEKIKIVRTRRGMIWRKVNRLEFEENTTEQIDRKVKK

SEQ ID NO: 14145 - protein, 492 aa, unidentified; identical to SEQ ID NO: 4486
  REGION 1..492: note = Human gut metagenome

SEQ ID NO: 14146 - protein, 420 aa, unidentified; identical to SEQ ID NO: 11172
  REGION 1..420: note = Human gut metagenome

SEQ ID NO: 14147 - protein, 424 aa, unidentified; identical to SEQ ID NO: 3351
  REGION 1..424: note = Human gut metagenome

SEQ ID NO: 14148 - protein, 419 aa, unidentified; identical to SEQ ID NO: 6987
  REGION 1..419: note = Human gut metagenome

SEQ ID NO: 14149 - protein, 442 aa, unidentified; identical to SEQ ID NO: 3161
  REGION 1..442: note = Human gut metagenome

SEQ ID NO: 14150 - protein, 369 aa, unidentified
  REGION 1..369: note = metagenome
VDTGSGTIGTAVSNDNSDIVYMSEVIVRNDIMDKMTQRRKYRKNRRGRKTRYRKARWLNRANSTKTDRFSPTMQSKLHSHVKEIEYIKSILPITTMVFETGQFDTHLMKNPNLANPKVKHWGYQKGGNYGFENTKAMVLNRDNYTCQCCKGKHKDSKLEVHHIIFRSQGGSDEESNLITLCHTCHKDLHSGTINFKLKGKLKGNLKYATQMNSIRKQLFRIYPDAIETFGYVTKANRLVLGIDKEHYYDACTIATQGNIFTVKSNLYKKKCVSDGDFQKTKGIRSEQPIVTDKICGFRKFDKVRYFGNDYFIKGRMSTGYAILMDIDGNKADFSAMPKGYKTPKMVKLKRIEARTTWMITTVEVTPNIA

SEQ ID NO: 14151 - protein, 465 aa, unidentified
  REGION 1..465: note = Human gut metagenome
MSTCVCVLSNSGERLMPTFRLGKVRHLLKDGKAKIVKHHPFTIQLLYDSKTNTQPIEICEDVGYNYIGISVKSESHEYVSAQYDTLQDEKKHHDDCRKYRRTRRNRLRYRKPRFDNRKRSEGWFAPSLRHKKELNVNVVKMYCAVMPITHATVEVGSFDTMLVKAIQEGKAIPEGADYQKGPRYNLATLREAVFYRDNYVCKVCGRKATEGAILHVHHMFYWKGRHGNSLSELITVCEKCHTPANHQKGGKLYGFGENVKFADLSGAAFMNTVRWQIVNELYAAFGKDFVTVTYGAMTKEKRIALRLEKSHNNDAYAMGEFHPNCRCTFEHYEKVRRNNRILEKFYDSRYIDIRTGEIATGKELFNGRINRNHKKDSENLHRYRGKRTYAGHRALLRKKVNLNPGDLVSLNGEVLVVHSTHTNKKGAVNVEFKTPGKSGQKSASLKKLKIVKAADSMHSAWEKIS

SEQ ID NO: 14152 - protein, 416 aa, unidentified
  REGION 1..416: note = Human gut metagenome
MTNVKEYVFVLDAEGKQLSPMRIEKAWYKIRHNQAKLVNKYPMVVQLYKVVPEDEICKDEVRCGIDDGGLHVGIALVQKCQTKNKVFLKGTIEQRNDVKKLMSERKMYRKYRRKFKRYREERFSNRASAKRKGRIAPSILQKRQATMRVINQLNKWINISGYWLEDVAIDIRAMTDGYKSYGWQYQKSNRLDENIRKAVILRDGCKCMECGKSNCRLEVHHIKPRRNNGSNTMSNMITLCSKCHNKTEGKEGQFMDRYFSMINGYDNKHLNYASHVMIGKTWLREQLSNLAPLHLTTGGDTANKRIDWSIEKSHSNDAICITGLMPDTVNVKDWVLKPIRRKCKGKTDNVNGFKYKDYVQYTYQNGATYRGYVTVLCPKSNAISFQSNYKKCAKVNAHKCKLLWRFNSIYWLSERR

SEQ ID NO: 14153 - protein, 429 aa, Parasutterella sp.; identical to SEQ ID NO: 4241

SEQ ID NO: 14154 - protein, 524 aa, unidentified
  REGION 1..524: note = Human gut metagenome
MEILRIDWKDICPTGRSGLPQKELFMRPVYVLDMNGKPLMPTCRFGKVRRMLKSGEAKVVDTLPFTIQLDRPTKTHVVQSVTLGCDPGRTNIGLAAVRSDGTDLYRSHCETRNKEIVDLMDARRAARRASRRGERLARKRLAAKHETATTFPDGRKHPGCEKPIMLKDIINTEARFNNRVRPAGWLTPTATQLLWTHLNLIKRISRILPVSDIALEINKFAFMQLDEPDKNKWNIDFQHGPLYGTGGLKAAVRQLQNNTCLLCQENVIEHFHHLIPRSKRGDNTINNIAGLCQKCHEAVHKSADTAEKLSTLKKGQTKRYGGTSVLNQIIPKLVEELGKTYHEHLHLTYGWQTKEFRTKHKLEKTHDTDAYCIAAGTMQTVKPNIRTDVYEIKQFRRHNRANIHHQTERTYKLNGQTVARNRRKRTDQKTDSLAEWFENTVKQYGQQKAEHLRAGLKVRKSTRYYNFKDRVMPGAVFQYEGNRYVVTGQPSGGQYYRAYGKGNQNFPAKKIRIISLNRGLVYVA

SEQ ID NO: 14155 - protein, 418 aa, unidentified; identical to SEQ ID NO: 6419
  REGION 1..418: note = Human gut metagenome

SEQ ID NO: 14156 - protein, 438 aa, unidentified
  REGION 1..438: note = Human gut metagenome
LTTGKYITSAQPWQEEKFSERKVSEMTSYAFVLDADGKQLAPTKEQKAWFLIRKKRAALVSKYPMVIQLNKEIPDEEICKDEIRCGIDDGGLHVGIALVQKCQTQNKVVFKGTIEQRNDVKHLMDIRRGYRRYHRYHKRYRQARFNNRSSSKQKGRIAPSILQKRQATVRVINQLNKWINITDYWLEDVAIDIRAMTDGYKSYKWEYQKSNRLDENIRKAVILRDGCKCMECGESNCKLEVHHIKPRRLKGSNTLGNLITLCTKCHQKTKGVEELYMDRYFALLNSSDDKNLNYAQHVMIGKKWLREQLSSLGILHLTNGGDTANKRIDWDITKSHSNDAICITNLRPNKCEIKEWTIKPMRRQSKAKTDNVLGIKHRDFVEYTFRNSETHRGYVTALYPEQNALNFQSPTKHCKKVNARKCKVIWKYSKIYWLDNVS

SEQ ID NO: 14157 - protein, 436 aa, unidentified
  REGION 1..436: note = Human oral metagenome
MTKTLTTQTTQACVLDQNGKPLMPTTRLGKVYRLLKTKKAHIVSYEPFTIQLDYEPNTHIIQPMTLGVDSGAIHSGYSVTNEHREYYNAEVIARNDISRNLSNRHMYRRTRRTRKTRYRKPRFNNRKNKKKGWLPPSLEQKVATQLNEIDHLHRYFPIETIIVEVAEFDIQKIKNPDISGIEYQQGTLQGYNIRNYLLEKHGHKCFYCGKTVSDFEVEHMLPKSRGGSNRIDNLTLSCHDCNEKKGTLTAEEFIQQTLSAKKAVSKLKQLPNEKRLFKYMAYMNATRWALYDAIKGTYRNVKMTYGYITKYNRIHAGLPKAHHIDAKCITGFLTVPSMSQTVVKVKMRRHNRQLHRASFSKGHIRKIACLPTTVFGFQLYDLVCFNNHRYYIKSRRSSGAFTLASVEGLKNEKRTYKKLTLLAHTNAYLTNRYVNA

SEQ ID NO: 14158 - protein, 512 aa, unidentified
  REGION 1..512: note = Human gut metagenome
MSTVYVLNKDGKPLMPTTRGGHVRHLLKEQKARVVRTKPFTIQLLYKTDDVVQLLYLGIDPGRTNIGVAVVKADGTAVFTAHLETRNKEIPKLMKKRKDSRRARRTNGRRCRRQRRAKANGTISKKCVKQATAQNGSASKRAKKIGVIKRHLPGCEKDILCIGIKNKEAKFNNRTRPAGWLTPTANQLLQTHINLIKKIQKLLPISDVVLEINKFAFMQLDNPNIQKWQYQQGPLYQKANLEEAVSEMQEHHCLFCKKKIDHYHHVVPQHKNGSNTIDNIVGLCTKHHDLVHKDTAWHEKLTKKKTGLNKKYGALSVLNQIIPALTKELSSIFPKHFFVTTGKSTYDYRAAHGVSKDHWLDAYCIACSVLPNDVCNSSINNRVPYELKQFRRHDRRALNNENMSRVYTLNDNVVATNRHKATKQTTDSLEEFRQNHPDDVCKLKVKEHHPTYRNMNRNYPGSVFLIGKQVHVMQGIAGSKDGEATTYKNTNANSIAAGKCKFVAKNSGILFV

SEQ ID NO: 14159 - protein, 507 aa, unidentified
  REGION 1..507: note = Human gut metagenome
MPEYIYVLGMDGKPQMPTTRRRHVQKLLDTGKARIAESVPFTIQLLYDNDPVLQPVTLAEDPGRTNIGLAILDLKGELLLSAVVETRNKEIAKLMEKRRQCRRASRNGERKARQRLAKKYGTMIKAGMVMRKLPLYKADKFITCKFIRNTEARFCNRKRKDGWLTPSARHLVQTHVNLIHKIQKYLPVTDVALEVNRFAFMQLEDPSVCGVDFQNGPLKGYDDRDAAVYDLQDGKCLMCRHGITQYHHIVARSRNGSNTLENIAGLCDACHDRVHKDVKFAKQLKDKKEGLDKKYGALSVLNQAIPFICQKLEAEFGKEHVHYCTGRETSLVRRSIGYHKTKKNQLHEVDAWCIGFLSLNQIPERIPDFTEVHLIRQFRRQDRSLIKAQTERTYKLDGKTVAKNRKKRTGQETDSLEDWYNKQMKSYGKQKADRMRSRLTAEKSLRRYNDPSRVLPGTVFLYEGKRYVLSGQLTGGKYFRAVGDTKTNYPAAKCRILRQNEGLVFIR

SEQ ID NO: 14160 - protein, 407 aa, unidentified
  REGION 1..407: note = Human gut metagenome
VPPGFPERGAQGKAAAGEEVRDDDQGRYDDAEVPQYAAEKFITCKIIRNTESRFCNRKRKDGWLTPSARHLVQTHVNLVHKIQKYLPVTDVALEVNRFAFMLLEDPSVCGVDFQNGPLKGYDDRDAVVYDLQDGKCLMCKNEITQYHHIVPRSRNGSNTINNIAGLCDKCHDRVHKDADFAKQLKDKKAGLDKKYGALSVLNQAIPFICQKLEAEFGKEHVHYCTGRETSLVRRSIGYHKTKKNQVHEVDAWCIGALSLKQIPEDVPDFKDVHLIKQFRRQDRSLIKAQTERVYKLDGKTVAKNRKKRTGQETDSLEDWYNRQVETYGKQAADRMRSQLKVTESRRRYNNPDRMMPGAVFLYQGVRYVMRGQHCKGAYLQAVGMGNKDFSAKECKIVTQNTGLVFVS

SEQ ID NO: 14161 - protein, 413 aa, unidentified; identical to SEQ ID NO: 2636
  REGION 1..413: note = Human gut metagenome

SEQ ID NO: 14162 - protein, 470 aa, unidentified; identical to SEQ ID NO: 2825
  REGION 1..470: note = Human gut metagenome

SEQ ID NO: 14163 - protein, 433 aa, unidentified; identical to SEQ ID NO: 6602
  REGION 1..433: note = Microcoleaceae bacterium UBA9251

SEQ ID NO: 14164 - protein, 428 aa, unidentified
  REGION 1..428: note = Human gut metagenome
LKVFVLNMRGQPLMPCSPAKARHLLKAGKAVVKRRTPFTIQLRIATGETKQNVTLGVDAGAKHVGLSATTEKEEVFASEVELRQDITGLLAARLSLRRDRRHRKTRYRAPRFLNRVRSKHKGWLAPSVENRIQAHMSRIDAVCRLLPVTKIVIETASFDIQKIKDPSVEGTDYQQGDQLGFWNVREYVLFRDGHVCQHCHGRSKDKILNVHHLESRQTGGDAPNNLITLCETCHKAYHAGKIKLKVKRGQSFRAEAFMGIMRWTLLDRVRKAHPGLPVENTYGYLTKHTRITHGLPKTHCVDAYCIAGNLKAVRRGVHLYQRQVRKHNRQIHKCTVLSKTLKDGTKIGYRKLNQTPHLVKNFRLFDKVRCLGQTGFIFGRRSSGYFDVRRLDGVKLSSGISYRKLTLLEKRSTYLTELRKEDGASSPV

SEQ ID NO: 14165 - protein, 425 aa, Moorena sp.; identical to SEQ ID NO: 3655

SEQ ID NO: 14166 - protein, 426 aa, unidentified; identical to SEQ ID NO: 3614
  REGION 1..426: note = Human gut metagenome

SEQ ID NO: 14167 - protein, 468 aa, Moorena sp.; identical to SEQ ID NO: 5996

SEQ ID NO: 14168 - protein, 420 aa, Moorena sp.
VYVKNEDGTPLMPCTPAKARKLLRDGRARIVRYRPFTIQLSWACETHVQEVTLGIDKGSSVTGFSAVGNGRVLLSGDIHHRRDVKEKMDTRRGHRRQRRNCLRYRQPRFLNRGSSKRSGRLPPSIRTNVEEVVRVVERIPLPISAIVVEDVQVDIARLNNPTLRGRHYQDPTRLDENLRIACLMRDRYQCQHCGTRTGKRLEAHHIVHREHGGKDTLTNLITLCSSCHRKVHAGTVTLNQTGMSGHLDQIAQRTQQGKTHLYDQVRRIAPVSLVYGYETAAFRKALGVEKAHDGDALCIATLQTGDVVPFHRDCFWSVSFRSRRTRRQYHSLPIKGKGRVRYQVNEELDGFRKGDLVLVKGQWFKQVNSIYSTGRLAFHRVAGEPSSALPRDCRLLEKQRTIIWKKETENATKCHISKER

SEQ ID NO: 14169 - protein, 485 aa, unidentified
  REGION 1..485: note = Termite gut metagenome
MTYVLGKRGNPLMPTRRNAHVCYLLNHKLAVVVSYNPFTIRLKYETPEITQPLMLGIDPGRTNIGAAVVIEDGECVFSAHGTTNNKDVPKRTKKRKAHRQASRRGERKRRQRRAKKNGTCFTEKQRTLPGCEEPITCKTIKNSEARFNNRKRPKGWLTPTANHLLLCHLNKIDKIAKILPVTGVTLEVSKFAFMATENPNTQRWEYQRGPLYDKGSVEEAVYVQQGGKCLLCDKDIDHYHHLEPSHKNGSEGIENRAGLCNEHHDLVHKDKEWRKKLAETKAGLNKKYHALSVLNQVTPFLADELAKRFPGSFFVTDGKSTAAFRDVNLIPKDHHLDAYCIACSTLGLVTPKPPTQHYELRRFRRHDRAATSRVEERKYYLDKELVAKNRNKRTEQFDDSLAEFRNKQPEDVARLTVKKGGPRYTDTKRVLPGAIFLVDGKRLVLQGRQGRTKNGESISFDFVGYGKTPPKNCIFVNNGGGWQYV

SEQ ID NO: 14170 - protein, 416 aa, Moorena sp.
LVYILSKNGNPLMPTNRHGKVKHLLKDGKAKVVRRTPFTIQLLYDSPEYTQPITLGVDAGSKVVGLSATTEKKELFVSEATLRDDITELLSTRRQNRRTRRNHLRYRMARFLNRTASKKEGWLAPSVKHKVDSHLKVIGNVHRILPISRIVIETASLDIQKIRNPEISGREYQQGEQLGFWNTREYVLWRDNHECQHCHGKSKDRILNVHHKESRKTGGDSPGNLVTLCETCHKSHHAGRIKLKLTPNKSYRDASFMGIMRWYVFNSLNELYPEVSITYGYITKNNRIRNNIEKTHSADAYCISGNLNAMRIDEIYYQVFKRKHNRQIHKANFLKGGKKELDQSAYEVKGFRLFDHVRYRDEDCFIFGRRISGYFDLRKLDGSVVHRSASFKELTLLKRQNTILIERKECKGVLLS

SEQ ID NO: 14171 - protein, 418 aa, unidentified; identical to SEQ ID NO: 4424
  REGION 1..418: note = Human gut metagenome

SEQ ID NO: 14172 - protein, 408 aa, unidentified; identical to SEQ ID NO: 6729
  REGION 1..408: note = Human gut metagenome

SEQ ID NO: 14173 - protein, 423 aa, unidentified
  REGION 1..423: note = Human metagenome
MVFVLDKSKKPLDMISNAEARILLRKKLAIIHKIYPFTIRLRDNSCGSDDKTYTVKIDPGSKTTRIAIVDNKDSVVMLAEIEHRGHLIKRNLGKRRAVRNSRRQRKTRYRAARFLNRTRPQGWLAPSIRSRANNVINFIKKYKKLININKVMIENVSFDVAQMSFNTKLWGNAYQQGPLYQNKLRSFIFNRSNNKCVYCGAKATEIDHIIPRAKGGTNSTYNLVASCRACNQMKSNLTLKAFGKMMNKDYSRLEPKKLPKDAAIVQSSRNYMVREITKLVSDTTTHDAWMTQYNRDQLGLPKQHYYDALSVGEVPNKFNFLTDKILLISAKGRGSRQMCRMDKYGFPRTSAKVSKSVRGFQTGDIVRAIVTEGLKKGEYLGKVAVRSSGYFDIQTKTQVIEGIGYKYCRIIQRGDGYLYSYKE

SEQ ID NO: 14174 - protein, 413 aa, unidentified
  REGION 1..413: note = Human gut metagenome
MVYVLNINGHSLMPTERFSKVRRMLRDGKAKVIKRCPFTIQLLYQTTNNVQPVNLGVDAGSKHIGLSATTKNKVLYEADVELRNDIVTLLATRAELRRTRRNRKTRYRKPRFNNRIATKKEGWLAPSIKNKIQTHLSVVDKVYKILPVSKIIVETASFDIQKIKNPDINNEDYQQGEQLGFWNVREYVLFRDNHQCQCCKGKSKDKILNVHHLESRKTGGDAPNNLITLCEYCHKQYHLGKLNLPKNIHRGMKFNDAAFMGIMRWNFYDNLKKKYESSGVPVSLTYGYITKHTRIQYNLPKEHYIDARCISGNPTADSNGEYFYQKKVRCHNRQIHKMKILKGGKKKNNQAPFEVFGFRLFDKVLYNNEINFIYGRRKSGNFNIRDFNGENPKDVSYKKLKLIRGKRHPIILK

SEQ ID NO: 14175 - protein, 442 aa, unidentified; identical to SEQ ID NO: 2903
  REGION 1..442: note = Human gut metagenome

SEQ ID NO: 14176 - protein, 417 aa, unidentified
  REGION 1..417: note = Human gut metagenome
MPCSPAKARLLLKEKKAIVKRRTPFTIQLTIATGESKQPVTLGVDSGYKHIGLSATTERAELYASQVELRQDITDLLSARLALRRSRRSRKTRYRAPRFNNRVASKHKGWLAPSVENRIAAHLSRVEAVMRVLPVTAITVETAAFDTQLLKDPDIAGGAYQQGEQLGFWNVREYVLFRDGHVCQHCRGKSKDPVLNVHHIESRRTGGDAPNNLITLCETCHKAFHRGEIELKVKRGKSFKAETFMGIMRWTLFERLKKAHPELSVRNTYGYLTKHKRISHGIAKSHCADAYCIADNLGAKRLEGFFFQKQTRKHNRQIHKLSILKGGLRKKNQAPYEVKDFRLFDKVICKSEEAFIFGRRTSGSFDVRRLDGTRISAGISYKKLRLLEPRTTYLTEFRKEAALPPLHKCRGFRAEFL

SEQ ID NO: 14177 - protein, 449 aa, Moorena sp.
MTIFVISAEGERLMPTMNIRKIRKLLRSGRAKIVKHQPFTVQLLYDTTSGVQPVELSVDTGYQHIGVSLKSEKQEYVSAEYTLLKDEKQHHDDQRREVRRPRRNRKRYRKVRFDNRNKPEGWLAPSLRNKADRHIDIFRMYDEVCPITKVTLEMGQFDPAVLTVVEQGKPIPVGTDYQHGPRYGYDTLREAVFARDGYRCLCCGKSAIHDGVILRIHHVGFRAGDRSNRLSNLATVCEKCHSPKNHKPGGKLWDLKPPKGMASASFMNTVKWHIYEDVKSFGVEASITYGAVTKRTRIDLNIGKSHANDAYCIGSLRPKHRTRTLYFEKRRRNNRILEKFYDAKYVDIRDGKTKKAAELGCNRTSRSIPRSNSQNERIFRGKKVSKGRRSIRTQRYLYQPGDIVIFEGRNRTVKGTHNKGASVQLIGGGDISPRKIRLLHHVGGWRQVM

SEQ ID NO: 14178 - protein, 415 aa, unidentified; identical to SEQ ID NO: 6534
  REGION 1..415: note = Human gut metagenome

SEQ ID NO: 14179 - protein, 409 aa, Moorena sp.
MKVFVRNQDGTPLMPCTPAKARKLLRAGKARVVAHTPFTIQLGWQCEGQVQAVVVGIDKGSSVTGISCVGNGAVLLAAEIHHRRDVKDKLDTRRAHRRSRRLRKWYRPARFLNRASSKRSGRLPSSIKTNVEEVIRVVRQLPLPISQIVAEDVQVDIARLNDSTLRGSRYQDPNRLDENLRIACLMRDRYTCRHCGTRNCRLEAHHIVYREHGGKDTLANLLTLCERCHEKVHASTITLKVTGVSGQFDQIAQRSMQGKTYLYTTLGATVPLTTVFGYETSAFRKRRGLAKTHTADALCVATLGSGEIVTPDCPNTYRIAFRPRQTRRQFHDLPRKGLGRVRYQVHEELAGFRKGDIVRVKGRWVKQINSIYSNGLVAFKRVPGEPATARPRNCRLLERGRTIVWEQVV

SEQ ID NO: 14180 - protein, 419 aa, Moorena sp.; identical to SEQ ID NO: 6711

SEQ ID NO: 14181 - protein, 489 aa, unidentified
  REGION 1..489: note = Human gut metagenome
MTMVYVQNKDGKPLMPTTRYCYVRLLLKEKKARVVCTTPFTIQLNYDTPDITQDLILGIDPGRTNIGVAVVKEDGQCVFSAHLETRNKDVPLLMKKRAAFRRNHRTLDRRRKRQRRAKAAGTTIAEGSVERLLPGYEKPIVCNHIRNKEARFNNRSRPAGWLTPTANHLLQTHINLIAKVAKFLPITKVVIELNRFAFMAMDNPNIRRWEYQQGPLYGLGSVEDAVYAQQDGHCLFCEKPIDHYHHVVPRHKGGSETLANRCGLCARHHDLVHTDKSWAEKLVTRKGGMNKKYHALSVLNQIIPHLIEHLGSETPYEAYATDGKSTKGFRIAKNVPKEHYTDAYCIACSILDTDIEVSAPTSPFELKQFRRHDRQACIRQMVDRKYLLDGKVVATNRHKAIEQKSDSLQEFREAYGSAAVSQLTVKPHPPQYKDMTRIMPGAVMDFNGTIGVMQSSIVGRFYKSTKGYKAAPRRCVLLAQNAGMVFLPA

SEQ ID NO: 14182 - protein, 456 aa, unidentified
  REGION 1..456: note = Marine metagenome
MNHYVYVLDHTGNPLMPTKRHGWVRRALRDGKATVVKRSPFTIKLTYESETITQDVSLHLDSGYANIGFSAQANSRELLGGVLELLKGMSERIKERAMYRNNRRSRLRYRKPKFKKGGDFVSNRTDGWLAPSIQHKLDSHLNLIRKIQQILPITSIQIETASFDIQKINNPDIESTRYQQGEQLGFWNLREYILHRDNHTCQNPDCKNKGKEKILQVHHLGYWKQDRSDRPANLITLCTKCHTPKNHQKNGFLHGWEPRLKSFKPETFMTTVRRRLVNQAREIFDLPVTETFGYLTKASRIQKELPKSHHYDAFAMGNAITLSRPYTINQTRRNNRSLENFNDAKYLHKETKEKVSGQKLSSGRRTRNKESHLNEPNLRHLRGHKISKGYRAIRRRRYPLQPNDTIRYEGKICKVIGTHSLGRMVKFKLSCGKIANKSVNKVKQIASCKGLAFELC

SEQ ID NO: 14183 - protein, 415 aa, unidentified; identical to SEQ ID NO: 10558
  REGION 1..415: note = Human gut metagenome

SEQ ID NO: 14184 - protein, 413 aa, unidentified
  REGION 1..413: note = Human gut metagenome
MTSYAFVLDANGKQLAPTKEQKAWFLIRKKRAALVSKYPMVIQLKKEIQENEICKDEIRCGIDDGGLHVGIALVQKCKTKNKVVFKGTIEQRNDVKHLMEVRRGYRRYHRYHKRYRQARFNNRKSSKREGRIAPSILQKRQATIRVINQLNKWINITNYWLEDVSIDIRVLTDGYKSYRWQYQKSNRLDENIRKATILRDGGKCMECGKSNCRLEVHHIKPKRRNGSNTLDNLITLCESCHQKTEGQEELYMDRYFSLLKSSDNKNLNYAQHVMIGKMWLRKQLSGLGVLYLTSGGDTANKRIDWNIEKSHANDAVCITDLQPDTYDMKEWTMKPMRRQSKAKTDHVLGIHHRDLVEYTFKNGETHRGYVTALYPEQKAINFQSPTKHCKKVNARKCKLLWKYSKIYWFENAS

SEQ ID NO: 14185 - protein, 419 aa, unidentified; identical to SEQ ID NO: 4877
  REGION 1..419: note = Human gut metagenome

SEQ ID NO: 14186 - protein, 419 aa, unidentified; identical to SEQ ID NO: 6355
  REGION 1..419: note = Human gut metagenome

SEQ ID NO: 14187 - protein, 420 aa, unidentified; identical to SEQ ID NO: 6507
  REGION 1..420: note = Human gut metagenome

SEQ ID NO: 14188 - protein, 420 aa, unidentified; identical to SEQ ID NO: 6017
  REGION 1..420: note = Human gut metagenome

SEQ ID NO: 14189 - protein, 425 aa, unidentified; identical to SEQ ID NO: 10997
  REGION 1..425: note = Human gut metagenome

SEQ ID NO: 14190 - protein, 424 aa, unidentified; identical to SEQ ID NO: 3351
  REGION 1..424: note = Human gut metagenome

SEQ ID NO: 14191 - protein, 421 aa, unidentified
  REGION 1..421: note = Human gut metagenome
MRGQPLMPCSPAKARHLLKAGKAVVKRRTPFTIQLRIATGETKQNVTLGVDAGAKHVGLSATTEKEEVFASEVELRQDITGLLAARLSLRRDRRHRKTRYRAPRFLNRVRSKHKGWLAPSVENRIQAHMSRIDAVCRLLPVTKIVIETASFDIQKIKDPSVEGTDYQQGDQLGFWNVREYVLFRDGHVCQHCHGRSKDKILNVHHLESRQTGGDAPNNLITLCETCHKAYHAGKIKLKGKRGQSFRAEAFMGIMRWTLLDRVRKAHPGLPVENTYGYLTKHTRITHGLPKTHCVDAYCIAGNLKAVRRGVYLHQRQMRKHNRQIHKFTVLSKRLEDGTKIGYRKLNQSPYLVHGFRLFDKVRCLGQIGFIFGRRSSGYFDVRRLDGVKLSPSISWRKLTLLEKRSTYLTELRKQDGASSPV

SEQ ID NO: 14192 - protein, 414 aa, unidentified
  REGION 1..414: note = Human gut metagenome
MPCSPAKARLLLKEKKAIVKRRTPFTIQLTIATGETKQPVGLGVDAGYKHVGLSASTDKAELYASQVELRQDITDLLSARRALRRARRNRKTRYRAPRFNNRIRTKRKGWLAPSVENRINAHLSRIEAVLRLLPVTKITVETASFDMLLLKNPDIAGKEYQEGEQLGFWNVREYVLFRDGHVCQHCYGRSKDPVLNVHHLESRRTGGDSPGNLITLCETCHEALHRGEIALKTKRGHSFRAEAFMGMMRWEVLNRLKASHSELEVNNTYGYRTKHARIVNGIDKSHCADAFCIAGNLGAERLCEFFFQKQTRRNNRQIHKLSILKGGIRKRNQAPFEIKGFRLFDKVACKGEEGFIFGRRSSGYFDVRKLDGTRISAGISYKKLRLLEKRRTYLTEIRKEEALPPLPEGRGLRA

SEQ ID NO: 14193 - protein, 490 aa, unidentified; identical to SEQ ID NO: 3566
  REGION 1..490: note = Human gut metagenome

SEQ ID NO: 14194 - protein, 431 aa, unidentified; identical to SEQ ID NO: 7543
  REGION 1..431: note = Human gut metagenome

SEQ ID NO: 14195 - protein, 528 aa, Glycomyces sp.; identical to SEQ ID NO: 9621

SEQ ID NO: 14196 - protein, 427 aa, Enterococcus sp.; identical to SEQ ID NO: 2410

SEQ ID NO: 14197 - protein, 414 aa, unidentified; identical to SEQ ID NO: 4779
  REGION 1..414: note = Human gut metagenome

SEQ ID NO: 14198 - protein, 436 aa, unidentified
  REGION 1..436: note = Candidatus Thiomargarita nelsonii
MQRVFVLDLEKKPLMPCHPARARELLNKGRAAVYKRYPFTLILKDKIGGDVQPVELKFDPGSKTTGIALVGHFERGLEIVFGANLNHRGQKIKKDLESRRANRRGRRNRKTRYRPARFNNRRRTEGWLPPSLMSRVFNVETWAKRLQGLIPITSIAVETVRFDTQKMQNPEVSDVEYQQGELAGYEVREYLLEKWGRQCAYCGAEKVPLEIEHIQPKSKGGSNRVFNLTIACRKCNQKKGNRSIEDFLKRKPTVLKRIKAQTKKSLKDTAAVNVTRYAIGNALKQFGLPVTFWSGGRTKFNRTQQKYPKDHWIDAACVGETGEHVLIPKTLKPLSVTAVGHGSRQMCRVDQYGFPRTTAKKQKVVKGFQTGDIVKAVVTRGKKIGTYIGRVAVRASGSFNISTKNGTTQGISWKYCQRIQAVDGYSYLTEDRQFLH

SEQ ID NO: 14199 - protein, 511 aa, Acrocarpospora sp.; identical to SEQ ID NO: 4856

SEQ ID NO: 14200 - protein, 415 aa, unidentified
  REGION 1..415: note = Human gut metagenome
MVYVLDKNGQPLMPTDRHRKVRLMLQSGQAKVIKRCPFTIQLNYDSGHQTQEISLGIDAGSKHIGVSATTKIKVLYEADVELRNDIVDLLSSRRELRRGRRNRKTRYRQAKFNNRRRGNSWLAPSIRQKIGTHLTVVENICKILPISRIMVETASFDIQKIKNTDIQGAEYQQGDQLGFWNVREYVLFRDGHTCQCCKGKSKDKILNVHHIESRKTGGNAPNNLITLCETCHTGYHKGTVQLPKAIKRGMRFKDAAFMGIMRWAFYEALKQQYEPVALVHNTYGYITKHTRIAYNLPKEHYVDARCISGNPEASSNGEYYYQKKVRCHNRQIHKLTVLKGGIRKQNQATYLVKGYRLFDKVSYQGKGYFVFGRRQSGFFDIRTLSGEKVNKGSLSCKKLKFIATRTYYLTERRAV

SEQ ID NO: 14201 - protein, 415 aa, unidentified; identical to SEQ ID NO: 5047
  REGION 1..415: note = Human gut metagenome

SEQ ID NO: 14202 - protein, 415 aa, Bacillus sp.; identical to SEQ ID NO: 5533

SEQ ID NO: 14203 - protein, 459 aa, unidentified; identical to SEQ ID NO: 9971
  REGION 1..459: note = uncultured beta proteobacterium

SEQ ID NO: 14204 - protein, 204 aa, unidentified
  REGION 1..204: note = Human gut metagenome
VWLYQAVYNLGEGFLPSSEERTAFYWLLIYRKEHGIMQYVYVLNKHGEPLMPCSPGKARLLLKQQKACVVKRTPFTIKLLYDSAGYKQPITLGVDAGSKHVGLSASTEKRELYREEFTPRNDVVDLLSTRRQNRRSRRNRKTRYRAPRFDNRVHSKHKGWLAPSVEVKIQEHITVIKRICRILPITLVRVETAEFDTQCLKAML

SEQ ID NO: 14205 - protein, 453 aa, Lactobacillus sp.; identical to SEQ ID NO: 4050

SEQ ID NO: 14206 - protein, 459 aa, Ammonifex sp.; identical to SEQ ID NO: 4898

SEQ ID NO: 14207 - protein, 443 aa, Anoxybacillus sp.; identical to SEQ ID NO: 12144

SEQ ID NO: 14208 - protein, 415 aa, unidentified
  REGION 1..415: note = Human gut metagenome
MVYVVANDGQPLMPTERHGKVCRMLKSGMAKVIKKCPFTIQLQYESERNVQPVSLGVDAGSKHIGISATTKTKVLYESDVELRDDIVKLLATRRQLRRSRRNRKTRYRPARFDNRKRKEGWLAPSIRQKMESHLTVVANVCKILPVSRIIVETASFDIQKIKNPDIQGVEYQQGEQMDFWNIREYVFFRDGHTCQCCKGRSKDKILNVHHIESRKTGGNAPNNLITLCETCHKGYHNGTVILPKNIKRGMKFKDAAFMGIMRWAFYNALKEQYEPAIPVSMTYGYLTKNTRIRHNLPKEHHIDARCISGNPDAVSDGTYYYQKKVRCHNRQIHKQTILKGGIRKSNQAEYLVKGYRLFDKVRYHGREYFIFGRRKTGFFDIRTLSGEKVNKGSISVKKLTFADTRKNYLTERRTV

SEQ ID NO: 14209 - protein, 512 aa, unidentified; identical to SEQ ID NO: 8121
  REGION 1..512: note = Human gut metagenome

SEQ ID NO: 14210 - protein, 423 aa, unidentified
  REGION 1..423: note = Human gut metagenome
VPIMVYVLNINGQPLMPTNRHGKVKCLLKQGKAKVIRRCPFTIKLLYQSTAYTQNLTLGVDTGSGIIGTAVSKDNGNIVYMSETIVRNDITDKMTQRAKYRRNRRNRKTRYRKTRWLNRKNSIKTDRFSPTMQSKLHSHVKEIEYIKSILPVTTMVLETGQFDTHLMKNPSLANPNVKHWGYQKGANYGFENTKAMVLNRDNYTCQCCEGKHKDSKLEVHHIVFRSQGGSDEESNLITLCHTCHKDLHSGKINPKLKGKVKGTLKYATQMNSIRKQLFRVYPDAIETFGYVTKANRLALGIDKKHYYDACTIATQGNIFIVKSNLYKKKCVSDGDFQKTKGIRSEQSIVTDKICGFRKFDKVKYFGKEYFIKGRMSTGYAILMDIDGHKINFSTMPKGYKIPKLSNCKRVTARTSQMLQAVVI

SEQ ID NO: 14211 - protein, 447 aa, unidentified
  REGION 1..447: note = Human gut metagenome
VPAYRIKHITKKEAPYMVYVLDIDGQPLMPTSRHRKVRKLLNSHLAKVVKRCPFTIQLLYQSTKETQPVSLGVDAGSRHIGLAATTEQKVVYQEELVPRNDVVKLLSARRALRSSRRSRKTRYRKPRFNNRVHSKHKGWLAPSVEVKIQEHITAIKRICQILPISKIHVEISEFDLQRLKAMEEGRTLPVGTDYQLGEQYDFYNTRQYVLHRDEYTCQCCGTHDNNVKLHVHHIESRQTGGDAPNNLITLCEHCHKLLHAGKTILPKGKKRGKSYRDATFMGIMRKTLLERLRKEVDVPASGTYGYITKYWRERAGLEKSHINDAICISKHPYARPLETYYLTKAVRHHNRQIHKTKFSKGGIRKRNQAPYLVKGFRLFDKVLYQDESYFIFGRRITGYFDIRTLDGTKVNKGSTSYKKLRIQDTAEAYLTEVRAIPHMNEFTCVLA

SEQ ID NO: 14212 - protein, 429 aa, Moorena sp.; identical to SEQ ID NO: 13847

SEQ ID NO: 14213 - protein, 446 aa, Moorena sp.; identical to SEQ ID NO: 2419

SEQ ID NO: 14214 - protein, 420 aa, unidentified
  REGION 1..420: note = Human gut metagenome
MQYVYVLNKHGEPLMPCSPGKARLLLKQQKACVVKRTPFTIKLLFGSAGYKQPITLGVDAGSKHVGLSASTEKRELYSEEFTPRSDVVELLSTRRQNRRSRRNRKTRYRVPRFDNRVHSKHKGWMAPSVEVKIQEHITVIKHICKILPISLVRVETAEFDTQRLKAMLAGKPLPVGTDYQLGEMYDEYNVRQYVLKRDHYTCQCCGTHNTAKKVVKLHVHHLESRKVGGNAPSNLITLCTTCHDALHKGKVSLDGKERGKPLRDAAFMGIMRKALMARLREELPIPVQGTYGYITKMRREQNDIKKSHVNDARCISKHPLAEPCSVCYRTKAIRHHNRQTHKANFSKGGIRKRSQMPYVVEGYRLWDKVLYKGQECFVSGRRASGSFTLKKLDGTRISKGVTFKKLRLLEPATNYLIERM

SEQ ID NO: 14215 - protein, 414 aa, unidentified
  REGION 1..414: note = Human gut metagenome
MVYVINKQGQALMPTERFGKVRRLLKNSLAHVVCRIPFTIQLDYDTTDYTQPVSLGVDAGSKHIGISVTTSEKELYAADVELRNDIVDKLSTRREQRRTRRSRLRYRKARFNNRVSSKRKGWLAPSVENKIQTHLTVVEKIHKFLPITNIVVETASFDIQKINNPIISGSEYQQGEQLDFFNVREYVLFRDNHTCQHCKGKSKDKVLNVHHIESRKTGGDSPNNLITLCETCHKAYHRGEFKLNVKRGKSFRDSAFMGIMRWSFYDRLKNIYPNVSMTFGYITKNTRTTNNLPKDHYVDARCISGNPTAKPLGYYFYQKKVRCQNRQIHKANFLKGGRKKLNQAPFLVKGFRLFDLVEYQKELYYIFGRRSNGSFDIRKLNGTKVNKGSINCKQIRLIDTRKSILIEKRTQVNL

SEQ ID NO: 14216 - protein, 504 aa, unidentified
  REGION 1..504: note = Human gut metagenome
MVWEAIQTRRIKPHDIGEGTLRRHAAGTVSFPVLCKNRKETLMSVLVIGRNGRALMPTNPRKARLLLKKKTASVVCRHPFTIQLLYKTGCATQKGSIGIDTGSQHIGVGITCGDKVILKDEHALRSSMEKRSLLATRAVMRRGRRYRKVRYRKPKWRHHTKRMYFEKANRRGQHWRKVKTTTQSPRSKGWLPPSLQSKCDHHFRIIDRYLKYLPDPITRNLVIETGRFDMARMNDPTIHGEMYQRGPMYDAENRRAYIFARDNYQCACCKAKAGTTRKADGTTVKLVAHHILFRSRGATDNPKYMVSVCDHCHTTKAHQPGGILYSWMENNKKVTRGLRDATFMNILRKRLFARYPQAAFTYGNITAADRKQYHLPKSHVNDAVAVSLFGKEVPTVRDTCQTTYYKQVRKSKRSLHEAIPRKGRKRPNTKAVRNKKNTTQVNGFKLWDSVLANGKKLFICSFTGTSAYLIDKNGCYISQPGKTYKQWPLSKLKRLHPNGNWLMA

SEQ ID NO: 14217 - protein, 418 aa, unidentified
  REGION 1..418: note = Human oral metagenome
MFVYVISKDGQPLMPTNRFGKVRRLLKNKKAKVVSRCPFTIKLLYEPESLVVQKVVLGQDTGSKHVGTACVADDKVLYQSEVTLRDNIKKKMDNRRAFRKNRRRRKTRYRKPRFLNRANSNKKDRLPPSVKSKVQSHVDEIEFCKKILPISKIVLEVSQFDTALMKNPNLIDEKVKHWGYQKGFNYEYSSRREAVLHRDSYTCQCCGKKHVRLEVHHIIFRSLGGTDDEKNLITLCEKCHKAVHDGMLVLTKKPKKLNLKYATHMSIIRSQLLKIYPDAIETFGFVTKENRNNFDLQKDHFIDACVVASGGEKFKFNDIIYQKRRVAKGDYQLTKGVRGQQKIPVGKIQGFRKFDKVRYLKQEYFIKGRMSVGLSILMNIFNEKIDFSYLPRGWKIPKLSNLKRISARSSCLCISQRV

SEQ ID NO: 14218 - protein, 419 aa, unidentified; identical to SEQ ID NO: 4877
  REGION 1..419: note = Human gut metagenome

SEQ ID NO: 14219 - protein, 451 aa, unidentified
  REGION 1..451: note = Human gut metagenome
MSVAVINKTGERLMPTSEHRARKLLKSGKAIKHNYHPFTIQLTERESGDVQPIELCMDTGYIHVGTSVKSEKHEYLAEQIDTLTDEKARHDACRMYRRQRRSRKRYRHPRFNNRKRNDRWIAPSLEHKKSIHIQAILRICKVMPVTDITLEMGNFDTQVLKAREEGKPLPHGADYQHGERYGIATLREAVFTRDDYKCQCCGRTIKDGAILHVHHIKYRSQGGTNRMSNLITVCDKCHTPANHKQGGKLYNWKPKIASFKGATYMTTIRWKLYNEVKALFPDIDIHITYGAETKERRRALDIDKSHVNDAFVMGQFHPKHRSKPICYKKKRRNNRCLEKFYDAKYIDSRDGKKRSGQELFNGRISRNHKKDSENLHQYRLQKVTPGRRAIRRQHYPIQPHDIIVYNGNKIEVSGCQHKGTRVVFSKTKKSVQISKIKLFKYAGGYSKSVFN

SEQ ID NO: 14220 - protein, 442 aa, unidentified
  REGION 1..442: note = Human gut metagenome
MVYVLNKDGQPLMPTNRHGKARRLLKTKKARVIKRCPFTIQLLYDTTNHTQDITLGVDAGSKHIGLSATTEDKVLFEADVELRNDISKLLEARYTFRRSRRNRKTRYRKKRFDNRVSSKHKGWLAPSIEHKIQSHFAMVEKVHRILPVTKIVVETASFDTQLLKAQLESKPIPEGTDYQNGELAGWNIREYIFHRDNYTCQWCKGKSKDSILVTHHHAYWKGDHTNKPSSLITLCNTCNDSKYHKKEANRLWGWEPKITNSYKHAAFMGVMRWTFYNRLKEIYPNVSMTYGYITKNTRIENNLPKAHYVDARCISGHPKAKSNGEYFYYKKVRCHNRQLHKANTLKGGIRKRNQAEYTVKGFRLFDRVEYKNNEYFIFGRRASGFFDIRTLDGQKVNKGSISFKKLKLKETSKTYLIERRMADTGVSLAPLTTEVTSLRQTG

SEQ ID NO: 14221 - protein, 359 aa, unidentified
  REGION 1..359: note = Human gut metagenome
VKEELFAAEVMPRNDVVENLSTRREFRRARRNRTTRYRKPRSDNRVRSNHERWLAPSVKVKIQEHITSIKRVCTILPISKVVIETAEFDLQLLKAIQEGKPIPEGEDYQKGEMYGSYNVCQYVLWRDNYTCICCGVRGTPKNPVRLHVHHFESRKHGGNAPDNYGTLCEDCHKKLHLGIITDISLKTRKRPSTRGAAFMGIMRKTLMQRLITGLSIPVAETKGYITKAAREEILKLPKTHTNDALAIAQGRHGFGIREQAYVKPTNRIYTVRPVRHHNRQLHKATMLKGGIRKLNQASKYIFGFRLYDKVLYQGGECFVWGRRRSGSFLLRTIDGTKVKDGVGYRNLTLLERSTNYLIA

SEQ ID NO: 14222 - protein, 431 aa, unidentified; identical to SEQ ID NO: 6230
  REGION 1..431: note = Human gut metagenome

SEQ ID NO: 14223 - protein, 383 aa, unidentified
  REGION 1..383: note = Human gut metagenome
MVYVQDIDGRPLMPTTRHGKVRRLLKSKKATVVNLCPFTIRLLYDTTGYKQEITLGVDTGTKHVGLSATTKSKELYASEVILRSDVVDLLSTRRELRKIRRYRLRYRKPRFMNRIKSKKRGWIAPSLIIEVAQFDTQKIKNPEISGKEYQEGEQLGFWNVREYVLARDGHKCQHCKGKSKDPVLNVHHIESRKTGGDSPSNLITLCKTCHKEFHKGNIKLKVNRGESLRDAAVMGIMKWKLYEELKSLYPNVKMTFGYITKYNRINHGIEKSHVSDAFVISRNFDSERLGYYYKRKLVRRHNRQIHKMKAPKGGNKRMNQSPFKVFGFRLFDKVMFQGKERFIYARRLRGIFNIRDINGENKKDISYKKLEYVSHGLISIVVG

SEQ ID NO: 14224 - protein, 413 aa, unidentified; identical to SEQ ID NO: 3587
  REGION 1..413: note = Human gut metagenome

SEQ ID NO: 14225 - protein, 427 aa, Enterococcus sp.; identical to SEQ ID NO: 2410

SEQ ID NO: 14226 - protein, 424 aa, unidentified; identical to SEQ ID NO: 3434
  REGION 1..424: note = Human gut metagenome

SEQ ID NO: 14227 - protein, 502 aa, unidentified; identical to SEQ ID NO: 2616
  REGION 1..502: note = Human metagenome

SEQ ID NO: 14228 - protein, 420 aa, unidentified; identical to SEQ ID NO: 8162
  REGION 1..420: note = Human gut metagenome

SEQ ID NO: 14229 - protein, 518 aa, unidentified; identical to SEQ ID NO: 8622
  REGION 1..518: note = Human gut metagenome

SEQ ID NO: 14230 - protein, 442 aa, unidentified; identical to SEQ ID NO: 4522
  REGION 1..442: note = Human gut metagenome

SEQ ID NO: 14231 - protein, 431 aa, Moorena sp.
MRVFVLDKNLKPLDPCRPARARLLLKQGRAKVLRRYPFTIILSDLEVENCRTHNYQLKIDPGAKTTGLAIRQDNTVIWGAEITHRGFQIRDALTSRRQLRRSRRSRKTRYIKPRFLNRKRPSGWLAPSLMSRVHNILTWVKKLIRFCPIAGISQELVRFDTQKMENPEISGTEYQQGTLCGYEIREYLLEKWNRKCAYCGATDARLEVEHIKPKSLGGSDRVSNLAIACHDCNQAKGSQEIEQFLSGKPDVLKQVLSQAKRSLADAAAVNATRWKLYNELKFTGLPVETGSGGQTKYNRRRFNLVKTHWIDAACVGNVQNIYVEDYQFLSIMAKGHGTRQICRTDKFGFPKRYCSRTKIHKGFQTGDIVKAIVTKGKKIGTYVGRVATRKTGSFNISTSNGLIQGISHKYCTLIHKKDGYAYQINTLSSLS

SEQ ID NO: 14232 - protein, 529 aa, Moorena sp.; identical to SEQ ID NO: 8434

SEQ ID NO: 14233 - protein, 536 aa, unidentified
  REGION 1..536: note = Human gut metagenome
VMYRLTTEAGVPLIPERLYDTKKRKETSRMSEYIYVIGMDGDPQMPTKRKRHVEKLLQTGRARVFRQVPYTIQLTYKNQPVLQPVTIAEDPGRSNIGMAVVSLSGELLSAAVVQTRNKEIVKLMEKRKLHRRASRNGERKARQRLAKRCHTMLKAGFLMRKLPMYRKDKRVKCLVIRNTEARFCNRKREDGWLTPSAEHLVRTHINLIHKMQKFLPITDVAIEINRFAFLSLEDPSISGVDFQKGPLKGYDDLNAAVEDLQDGHCLMCDSPIEHRHHIVPRSMQGSNTIGNIAGLCCKCHERVHKDARFEDRLKKKKAGLDKRYAAVSALNQAIPFICKRLEQEFGKEHVHYCSGRDTAMVRRSFGYYKTKEEQLHEVDAWCIAVLSLQQVPEKAPEFDHVHEILQFRRQDRSIINAQTSRRYYHEGKKIAKNRKKAEGQREDSLQEWRKRQVERYGEEQTRKMISQLKVKKSIRRYNRLNRLMPGAVFYYQGVRYVMRGQHCEGTYLQAVGMGSKDFPAKKCKIVANNEGLVFAS

SEQ ID NO: 14234 - protein, 348 aa, Enterococcus sp.; identical to SEQ ID NO: 9214

SEQ ID NO: 14235 - protein, 423 aa, Microcoleus sp.
MSNFIFVLDANKKPLTPCKPSMARKLLIAGKAAVFRRFPCTIILKKAVTGTVESISLKLDPGSKTTGIALLQGEKVIFGAELTHRGQAIKASLDSRRSLRRGRRNRHTRYRQARFLNRTRKKGWLAPSLQHRVETTLTWVNKLRRLVPIDLIVQELVRFDLQQLENPEISGIEYQQGELQGYEVRQYLLDKWNRKCAYCGTENVPLQVEHIHPKAKGGSNRISNLCLACEKCNLKKGTQNIEQFLAKKPDILKQIIAQAKRPLKDAAAVNSTRWVLFSRLRETGLPVVTGSGGLTKFNRTRLQLPKTHWLDAACVGQIESLEVLTNKPLLIKATGHGTRQMCRTDRFGFPSRYVPQNKFVKGFQTGDIVKSVVTSGKKIGEYVGRVAVRTTGSFNISASGLVQGISHKYCKIVHRKDGYSYAF

SEQ ID NO: 14236 - protein, 381 aa, unidentified
  REGION 1..381: note = Human gut metagenome
LYKFLPQLLYGSSGYKQSVILGVDAGSKTIGLSASTEKQELFAAEVKPRNDVVKLLSTRREFRQARRNRKTRYRTPRFDNRVKSKHKGWLAPSVEVKIQEHITAIARVCALLPIANVIVETAEFDTHRLKAMLEGHPLPVGTDYQLGEMYDEYNVRQYVLKRDNYTCQCCGAHPSAKKGVKLHVHHLESRKTGGNSPNNLITLCEHCHKLLHKGKITLDKKKRGHSMRDAAFMGIMRKTLILRLRSELAIPVVETYGYITKLVRETHHMDKSHTVDALCIAGHPLADASDVIYLIKPVRRHNRQLHKATILKGGVRKANQAPRSVFGFRLFDRVRYQGQECFIWGRRSSGSFLLKKLDGTKVKDGISYKKLTLLERETNYL

SEQ ID NO: 14237 - protein, 413 aa, unidentified
  REGION 1..413: note = Human gut metagenome
MTSYSFVLDVNGKPLAPTKEQKAWFLIRKKRAALVSKYPMVIQLMKEIPENEICQDEIRCGIDDGGLHVGIALVQKCKTKNKVVFKGTMEQRNDVKHLMEVRRGYRRYHRYHKRYRQARFDNRKSSKREGRIAPSILQKRQATIRVIHWLNKWINITNYWLEDVSVDIRALTDGYQSYRWQYQRSNRLDENIRKAAILRDGGKCMECGKSNCRLEVHHIKPRRRNGSNTLDNLITLCESCHQKTEGQEELYMDRYFSLLKSSNNKNLNYAQHVMIGKRWLRKQLSGLGVLYLTSGGDTANKRIDWNIEKSHANDAVCITDLQPDTCDMKEWTMKPMRRQSKAKTDHVLGIHHRDLVEYTFKNGETHRGYVTALYPDQKAINFQSQTKHCKKVNARKCKLLWNYSKIYWFENAS

SEQ ID NO: 14238 - protein, 451 aa, unidentified; identical to SEQ ID NO: 3061
  REGION 1..451: note = Human gut metagenome

SEQ ID NO: 14239 - protein, 493 aa, unidentified; identical to SEQ ID NO: 3781
  REGION 1..493: note = Human gut metagenome

SEQ ID NO: 14240 - protein, 491 aa, Pseudomonas sp.; identical to SEQ ID NO: 6873

SEQ ID NO: 14241 - protein, 362 aa, Butyrivibrio sp.
MVYILNKHNEPMMPCSERKARLLLKQGRAVIYRKDVFTIKLINGSYGYKQHITMGIDCGSKHIGISATTNKKELFSANAELRNDIVKLLSDRKSLRRNRRYRKTRYRKPRFDNRRIKEGWLAPSIRQKIDSHVRIVSLIHKLLPVKQVNVEVAAFDIQKIKNPYIKSSEYQMGEQLDSYNVREYVLFRDNHICQHCKGKSKDDVLQVHHIESRKTGGNAPNNLVTLCKTCHEKYHSGEITLNVNRGKSFRDASVMSTMRWFLYEELKSRFSNVNITYGYITKYKRIKLGLSKEHYNDAYCITGNLNTSRLCNHHLIRFIPRHSRILHVQTFSKGGNRRSASAPYWLNGGKSSKVGIKFTMFY

SEQ ID NO: 14242 - protein, 535 aa, Anaerostipes sp.
MYRLTTEAGIPLIPERLHDTKKRKEASRMSEYIYVLGVDGDPQMPTKRKRHVEQLLQTGRARVFRQIPFTIQLTYENKPVLQPITIAEDPGRSNIGMAVVSLSGELLSAAVVQTRNKEIVKLMDKRKQHRRASRNGERKARQRLAKKCHTMIKAGFLMRKLPMYGKDKRVKCLVIKNTESRFCNRKREDGWLTPSAEHLVQTHINLIHKMQKFLPITDVAIEINRFAFLSLEDPSISGVDFQKGPLKGYDDLNAAVEDLQDGHCLMCNSPIEHRHHIVPRSMQGSNTIGNIAGLCCKCHEKVHKDSAFEDSLKKKKAGLNKRYAAISTLNQAIPFICKRLEQEFGKEHVHYCSGRDSSMVRRSLGYHKTKEEQLHEVDAWCIAVLSLQQIPEKAPEFDHMHEILQFRRQDRSRIKAQTSRAYYHERKKIAKNRKKTEGQREDSLQEWRKRQVERYGEEQTRKMISQLKVKKSIRRYNRLDRLMPGAVFYYQGVRYVMRGQHCEGTYLQAVGMGSKDFPAKKCKIVANNEGLVFVS

SEQ ID NO: 14243 - protein, 451 aa, unidentified; identical to SEQ ID NO: 4938
  REGION 1..451: note = gut metagenome

SEQ ID NO: 14244 - protein, 420 aa, unidentified; identical to SEQ ID NO: 5866
  REGION 1..420: note = Human gut metagenome

SEQ ID NO: 14245 - protein, 423 aa, Arthrospira sp.; identical to SEQ ID NO: 2900

SEQ ID NO: 14246 - protein, 480 aa, unidentified; identical to SEQ ID NO: 2726
  REGION 1..480: note = Human gut metagenome

SEQ ID NO: 14247 - protein, 414 aa, Parasutterella sp.; identical to SEQ ID NO: 12593

SEQ ID NO: 14248 - protein, 424 aa, unidentified
  REGION 1..424: note = Human gut metagenome
MRVFVFNMRGRPLMPCSQRKARLLLRENKAMIYKYHPFTIQLTYTTGETKQDCHIGIDTGSKYIGAAVRSEDKVFWKGEIELRQDIRSNLDTKRIYRRSRRNRKTRYRKPRFLNRKRRDEWLPPSLQSRINHTFHWIDTLSSLVPNPILHIEVGKFDVAKMINPEIHGVDYQHGQTYGFFDERYFVFARDNYTCQCCGKSKNKILNTHHIIYRSNGGTNRVDNLITVCTDCHTSQNHRKGGIFYQWQEQHKKVKQYKEPPFMNTLRKRIFVAYPDAEITYGYATTPKRKAMKLDKAHYNDAIVISGINEIKENPEEWLLIKQFRKKKRSLHEATARKGRKKPNRNQTRNSKNTPYYKGFYLNDKVSVFGKSGYITGFTSNAAYIKDENNDYITLPNKTYKQVSINKMKLECHNNNWQYIIKNAV

SEQ ID NO: 14249 - protein, 242 aa, unidentified
  REGION 1..242: note = Human gut metagenome
MPNKVYVINKHGRPLMPCSPAKARHLLDAGKAKIKKRTPFTIQLVYGSSGYTQEVILGVDAGSKTIGMSVSTTKEELLSAEVKPRNDVVDLLSTRRESRRARRNRKTRYRKPRFDNRVRSKHKGWLAPSVEVKIQEHITSIKRVCRILPVSKVVIETAEFDLQLLKAIADGKPVPQGEDYQKGEMYGHYNVRQYVLWRDNYTCQCCGAHATKKKEVRLHVHHLESRKTGGDAPGNLVTLWRC

SEQ ID NO: 14250 - protein, 424 aa, unidentified
  REGION 1..424: note = Human gut metagenome
LVWNKRGKPLMPCSPAKARLLLKEKKAIVVRRTPFTIQLTIATGETKQPVSLGVDAGYKHVGLSASTEKAELYASEVELRQDITDLLSARRALRQSRRNRKTRYRAPRFDNRIRTKRKGWLAPSVENRIDAHLSRIEAVLRLLPVTKITVETASFDLQLLKNPDISGKEYQEGEQLGFWNIREYVLCRDGHVCQHCYGRSKDPVLNVHHLESRRTGGDSPDNLLTLCETCHKALHRGEITLKAKRGQSFRAETFMGIMRWEVLNRLKASHSELKVHNTYGYLTKHARIENGIAKSHGADAFCIAGNLGAERLGEFFFQKQTRRNNRQIHKLSILKGGIRKRNQAPFEVKGFRLFDKVACQGEEGFIFGRRSSGFFDVRKLDGTRISAGISCKKLHLLEKRRTYLTEIRKEEALPPLPEGRGLRA

SEQ ID NO: 14251 - protein, 492 aa, unidentified; identical to SEQ ID NO: 4486
  REGION 1..492: note = Human gut metagenome

SEQ ID NO: 14252 - protein, 470 aa, unidentified; identical to SEQ ID NO: 2825
  REGION 1..470: note = Human gut metagenome

SEQ ID NO: 14253 - protein, 294 aa, Bacteroides sp.
PSVEVKIQEHITVIKHICKILPISLVRVETAEFDTQRLKAMLAGKPLPVGTDYQLGEMYDEYNVRQYVLKRDHYTCQCCGAHNTAKKVVKLHVHHLESRKTGGNAPSNLVTLCTTCHKNLHKGKVTLDGKERGKPLRDAAFMGIMRKTLMARLKKELPIPVQGTYGYITKMRREQNDIKKSHTNDARCISKHPLAEPCSVCYRTKAIRHHNRQTHKANFSKKGIRKRSQMPYLVEGYRLWDKVLYKEQKCFVSGRRSSGSFTLKKLDGTSVSKGVTFKKLRLLEPATNYLIERM

SEQ ID NO: 14254 - protein, 320 aa, unidentified
  REGION 1..320: note = Human gut metagenome
LWGWLQVISHKITKRGGHQEMSVFVLAKDGRPLMPCSPAKAKHLLKKGLAKVRRRTPFTIQMLVVTKHCTQEVILGVDAGSKTVGLSCGTAAKELFAGEMIPRNDVVEKLSARREFRRARRNRKTRYRQPRFNNRVKSKHKGWLAPSVEVKIQEHITVIRRICRLLPVSKVIIEGAEFDLQLIKAVAEGKPVPQGEDYQKGEMLGYYNVRQYVLWRDGYKCRNCGAHKDVKLRTHHLESRKIGGDAPNNLVTLCGRCHDLFHKGTIQLKARRGSSYRDAAFMGIMRKALISRLRVELNIPAYETRGYITKHTREYQMHLT

SEQ ID NO: 14255 - protein, 413 aa, unidentified; identical to SEQ ID NO: 2636
  REGION 1..413: note = Human gut metagenome

SEQ ID NO: 14256 - protein, 502 aa, unidentified; identical to SEQ ID NO: 2616
  REGION 1..502: note = Human gut metagenome

SEQ ID NO: 14257 - protein, 422 aa, unidentified; identical to SEQ ID NO: 5333
  REGION 1..422: note = Human gut metagenome

SEQ ID NO: 14258 - protein, 434 aa, Mitsuokella sp.; identical to SEQ ID NO: 9304

SEQ ID NO: 14259 - protein, 472 aa, unidentified
  REGION 1..472: note = Human gut metagenome
VVDNRLLSIKPLINIGEGVIYSSICTGLLLQTYQKRKEVPCMVYVLDINGQPLMPTTRHGKVRRLLNSHLAKVVKRCPFTIQLLYQSTKEIQPVSLGVDAGSKHIGMAATTEKKVVYQEELSPRNDVVKLLSLRRASRSSRRSRKTRYRKPKFNNRVHSKHKGWLAPSVEVKIQEHITAIKRICQILPISEIQVETAEFDFQRLKAMKEWKPLPVGTDYQLGEQYDFYNTRQYVLHRDGYTCQCCGTHDNNIKLHVHHIESRQTGGDAPSNLITLCEHCHKALHKGKLELPKGKKRGKTYRDATFMGIMRKTLLERLRKEVDVPVSGTYGYITKYLREKTDLEKSHINDAICISKYPYAKPLDTYYLTKVVRNHNRQIHKSNFSKGGIRKRNQAPYLIKGFRLFDKVLYQGKEYFIFGRRATGYFDIRTLDGTKVNKGSISYKKLRIQDTAKAYLKEARAIPHMNKFTCVLA

SEQ ID NO: 14260 - protein, 477 aa, Azohydromonas sp.; identical to SEQ ID NO: 2409

SEQ ID NO: 14261 - protein, 512 aa, Selenomonas sp.; identical to SEQ ID NO: 5832

SEQ ID NO: 14262 - protein, 465 aa, unidentified; identical to SEQ ID NO: 6446
  REGION 1..465: note = Human gut metagenome

SEQ ID NO: 14263 - protein, 406 aa, unidentified
  REGION 1..406: note = Human gut metagenome
MVYVQDINGKPLMPTTRHGKVRRLLKDKKAVVVNLCPFTIKLTYVTSDYKQEIVLGVDAGTKHVGLSATTKSKELYSSEVILRNDIVDLLSTRRELRRARRNRLRYRKPRFNNRIKSKRPGWTAPSVKYKIDAHIRVIDNVCSILPIFRIVIEVAQFDTQKIKNPNISGKEYQEGDQLEFWNTREYVLARDGHKCQYCKGKSKDSILNVHHIESRKTGGDSPSNLITLCETCHKEYHKGNIDLKIRRGKSLRDAAVMGIMKWRLYEELKSRYDRVFMTFGYITKHNRIKYGIEKSHTSDAFVISKNINAKRIERQYLKRLIRRHNRQIHKMKILKGGKKKNNQAPFEVFGFRLFDKVLYNNKICFVYGRRKSGSFNIRDFNGENSKDVSRKKFKLIRGKRHPIILK

SEQ ID NO: 14264 - protein, 457 aa, Scytonema sp.; identical to SEQ ID NO: 2735

SEQ ID NO: 14265 - protein, 411 aa, unidentified; identical to SEQ ID NO: 6901
  REGION 1..411: note = Human gut metagenome

SEQ ID NO: 14266 - protein, 431 aa, unidentified; identical to SEQ ID NO: 3235
  REGION 1..431: note = Human gut metagenome

SEQ ID NO: 14267 - protein, 414 aa, unidentified
  REGION 1..414: note = Human gut metagenome
MPCSPAKARLLLKEKKAIVKRRTPFTIQLTIATGEAKQPVSLGIDAGYKHVGLSASTEKAELYASEVELRQDITDLLSARRALRQSRRNRKTRYRAPRFDNRISTKRKGWLAPSVENRINAHLSRIEAVLRLLPVTKITVETASFDLQLLKNPDISGKEYQEGEQLGFGNIREYVLCRDGHVCQHCYGGSKDPVLNVHHLESRRTGGDSPDNLLTLCETCHKALHRGEITLKTKRGQSFRAETFMGIMRWEVLNRLKASHSELKVHNTYGYLTKHARIENGIAKSHGADAFCIAGNLGAERLGEFFFQKQTRRNNRQIHKLSILKGALRKRNQAPFEVKGFRLFDKVACKGEEGFIFGRRSSGFFDVRKLDGTRISAGISYKKLHLLEKRQTYLMEIRKEEAFPPLPEGRGLRA

SEQ ID NO: 14268 - protein, 480 aa, unidentified
  REGION 1..480: note = Human gut metagenome
LYTKPLDNIGEGSLLPSGEINLKGMTFMVYVKSIDGKALMPTSNAKARKLLKQKKAKVVSLRPFVIKLTYKTKTEYTQKLNLGVDSGYSNIGFSVIDAKQEYIAGEVKLLEGMKKRLLEKASYRRIRRSRLRYRKARWNNRVKSKKKGWLAPSLKHKLDTHIKFIDYLKNILPIGKITIEVANFDIQKMKDDLISGVDYQNGDMFSFWNVREFVLHRDGHKCQNPNCKHKDKKEQILKIHHIRYRSKGGSDRPENLITLCSKCHTPANHKKGKFLYDWCVNGKKVRGFKDATFMSMIRWYLVNDLKSKHNNVSITYGYITKNHRIQNGIEKSHLNDAFAIAKGTNQARTKDRFLVIQDRLKNRSLEKFYDSKIIDIRTGKKVSGGELSCGRSTRNKNLNTENLRKYRGDKISKGQRRIRKQKYFYQPNDLVKYDGKVYTVKGTQNEGKYIALKEIKKVPKVELLIPYVFKKGLNWSYGLC

SEQ ID NO: 14269 - protein, 470 aa, Thermoanaerobacterium sp.; identical to SEQ ID NO: 4433

SEQ ID NO: 14270 - protein, 437 aa, unidentified
  REGION 1..437: note = Human gut metagenome
VGGVKAHLKSRNKEIPKLMQDRKRARRARRTNGRRHRRQRRAKANGTISKKCVKQTTAQNGSVSKRAKDIGVIKRRLPGCEKDVLCIGIKNKETKFTNRTRPEGWLTPTANQLLQTHINLVKKIQKFLPISDVVLEVNKFAFMRLDNPNIQKWQYQQGPLYKKESLESAVSEIQEHHCLFCKKPIDHYHHVVPQHKNGSNTIGNIVGLCAKHHDLVHKDSAWEKKLAKKSTGLYKKYGALGVLNQIIPTLTNELSSLFPKHSFVTNGKSTYDYRAAHGVSKDHWLDAYCIACSVLPSNVCDSNINNHMPYVLKQFRRHDRRVLNNENMNRVYTLDNKAVAINRHKATEQEAASLEEFRKEHPNDVCKLKVKEHHPTYRNMNRNYPGSIFLVGKHVHIMQGIAGSKDGKATTYKDSNANSITASKCKFVAKNSGILFV

SEQ ID NO: 14271 - protein, 456 aa, Halomonas sp.
MAVFVLGKNKQPLMPCSEKRARLLLERGRAAVVNLTPFVIRLRDRCLSDCTLQPTLLAADPGSKETGLALMRLGNNATEEKAPATRHVLCLFQLVHRGFQIRQALEQRAGFRRRRRSKNLRHRKPRFDNRTRKKGWLPPSLQHRVDTTMAWVDKLCRWAPVTHLNMELVRFDLQKMENPEISGVEYQQGTLLGYEVREYLLEKWGRECAYCGTGDTPLEIEHVVAKSRNGSSRVSNLTVACHDCNIAKDNQSLADFFATDKGLKRRLKANGLSAEMRLARVQRQLKLPLRDATAVNATRWALFGAMKSTGLPVAVGSGGRTKYNRQRLGIPKTHALDAACVGKFDTLKGWRVPTQVIKAMGRGSYKRTRLDKYGFPRGYLMRQKQVQGFQTGDRVRAIVPTGKKAGTHTGRVAIRKTGSFNIQTEQGAVQGISWPYCTLLQRGDGYGYHQIPTTQH

SEQ ID NO: 14272 - protein, 469 aa, unidentified; identical to SEQ ID NO: 6998
  REGION 1..469: note = Bioreactor metagenome

SEQ ID NO: 14273 - protein, 337 aa, unidentified
  REGION 1..337: note = Human gut metagenome
SARRALRQSRRNRKTRYRAPRFNNRLCTKRKGWLAPSVENRINAHLSRIEAVLRLLPVTKITVETASFDMQLLKNPDISGKEYQEGEQLGFWNIREYVLCRDGHVCQHCYGRSKDPVLNVHHLESRGTGGDSPGNLITLCETCHKALHRGEITLKAKRGQSFRAEAFMGIMRWEVHNRLRALHPGIEVSNTYGYRTKHARIANGIAKSHCADAFCIAGNLGAERLGEFFFQKQTRRNNRQIHKLSILKGGIRKRNQAPFEVKGFRLFDKVACQGEEGFIFGRRSSGFFDVRKLDGTRISAGISCKKLHLLEKRRTYLTEIRKEEALPPLPEGRGLRA

SEQ ID NO: 14274 - protein, 412 aa, unidentified
  REGION 1..412: note = Human gut metagenome
MVYVQDIDGKPLMPTTRHGKVRRLLKDKKAVVVNLCPFTIKLMYVTSDYKQEIVLGVDAGTKHVGLSATTKSKELYASEVILRNDIINLLSTRRELRKARRNRIRYRKPRFNNRIKSKRQGWIAPSVCQKIDSHIKVVSFIHSILPVSRLIIETSQFDTQKIKNPDILGKEYQQGEQLGFWNVREYILFRDGHKCQHCKGKSKNPILNIHHIESRKTGGDSPSNLITLCETCHKEYHKGNIKLKVKRGTSLRDAAAMGIMKWKLFDKLKSLYPNVSMTFGYITKHNRIKHRIEKSHVSDAFVISENFKAKRLGYHFKMKLTRRHNRQIHKMKMQKGGIKRMNQSPFRVFGFRLFDKVMFYGEKRFIYARRLSGSFKIKDIDGENEKNISYKKLKYIGHGLTSIEVDQSYGYK

SEQ ID NO: 14275 - protein, 425 aa, unidentified
  REGION 1..425: note = Human gut metagenome
MVYVLNKNGQSLMPTNRHGKVKHLLKDGKAKVVKRCPFTIKLTYETTNYTQDLTLGVDTGSGTIGTAVSKDSGDIIYMSEIVVRNDITDKMSQRAKYRRNRRNRKTRYRQARWLNRRNSIRKDRFSPTMQSKLHSHVKEIEYIKSILPITTMVFETGQFDMHLMKNPMLANPKVKHWGYQKGTNYGFENTKAMVLNRDNYTCQYCKGKHKDSKLEVHHIIFRSQGGSDEDSNLITLCHTCHKNLHDGKIAPNFKGKAKGTLKYATQMNSIRKQLFRLYPEAIETFGYVTKANRVAIGIEKEHYYDACTIATQGKPFIVKTNLYKKKCVSDGDFQKTKGIRSEQPIVTDKIYGFRKFDKVKYFGKEYFIKGRMSTGYAILMDIEGNKVDFLTMPKGFKTPKMINLKRLEARSSWMVTTVEVTPNIV

SEQ ID NO: 14276 - protein, 428 aa, Enterococcus sp.
MVYVLSIDNEPLMPCSNVIARLLLKQGKAKVKYREPFTIKLTYETTTYTQPLTLGVDTGSQTFATAVTNGKGNILYTSEVVLREDKNHSIKKKMDQRRMYRRNRRNRKTRYRKARFNNRKNSKRKNRFSPTMTSKLHSHQKEIEFIKSILPIAKLILETGTFDPHLMKNPSLANLKVKPWGYQQGPNYGFENMKARILARDNHTCQICKKKPKNERLEVHHIIFRSQGGSDEENNLVTVCHSCHVELHKGLIHPNFEGSLKNALKYATQMNSIRVQLLKLYPDAIETFGYVTKANRLNLGLPKEHYVDAAVIATAGNQVNFACNLMIKRCIPKGDFQRTKGIRSEKIIPKGKIDGFKKYDKVRYFGNEYFVKGRMTTGYIQLMNIYGEKISFNHMPKGFKTPKTKNCQRISARKTWITTTEPLIKNIA

SEQ ID NO: 14277 - protein, 417 aa, unidentified; identical to SEQ ID NO: 5720
  REGION 1..417: note = Human gut metagenome

SEQ ID NO: 14278 - protein, 437 aa, unidentified
  REGION 1..437: note = Wastewater metagenome
MPCSEKRARLLLARGRACVHRLVPFVIRLTDRQLDTCTLQPLRIKLDPGSKTTGLALVRDTEHLNTDTGEIQRGVAVLSLIELVHRGRQISEALTARRQMRRRRRGCLRYRAPRFLNRGNKQRGWLAPSLQHRINTTMAWVARIRRWSPVTALSAELVRFDMQRLQNPEISGVEYQQGTLAGYEVREYLLAKWSRKCAYCGVENVPLQIDHVHPKAKGGTNRVSNLTLACGPCNARKSAQSVDAFLAKDPKRLTALLAQAKRPLKDAAAVNATRWALVGALKATGLPVETASGGCTKFNRSRLAIPKTHALDAVCVGAVSVVTNWQKPSLTIKCTGRGSYQRTRLDKYGFPRGYLMREKSVKGFKTGDLVRAIVPTGKKAGRHTGRVAIRKSGSFNIQTLAGVVQGIGYRHCRLLQRADGYGYFFNKAACDTAQKRE

SEQ ID NO: 14279 - protein, 416 aa, unidentified
  REGION 1..416: note = Human gut metagenome
LRVFVLNKRGKPLMPCSPAKARLLLKEKKAIVKRRTPFTIQLTIATGETKQPVGLGVDAGYKHVGLSASTDKAELYASQVELRQDITDLLSARRALRRARRNRKTRYRAPRFNNRIRTKRKGWLAPSVENRINAHLSRIEAVLRLLPVTKITVETASFDMLLLKNPDIAGKEYQEGEQLGFWNVREYVLFRDGHVCQHCYGRSKDPVLNVHHLESRRTGGDSPGNLITLCETCHEALHRGEIALKTKRGHSFRAEAFMGMMRWEVLNRLKASHSELEVNNTYGYRTKHARIVNGIDKSHCADAFCIAGNLGAERLCEFFFQKQTRRNNRQIHKLSILKGGIRKRNQAPFEIKGFRLFDKVACKGEESFIFGRRSSGYFDVRKLDGTRISAGISYKKLRLLEKRRTYLTEIRKEEAL

SEQ ID NO: 14280 - protein, 418 aa, unidentified
  REGION 1..418: note = coral metagenome
MPNYVFVIDTNKQPLNPISPKKARRLLDKGKAAVFRMYPFTIILKTAIANPTISPCQIKIDPGSKTTGFALVQNDQVIWAMELEHKGSLIKKKLESRSAVRRGRRNRNTRYRKPRFLNRRRPEGWIAPSLEHRVLTTETWVKRLIKFCPVNEIGIELVKFDTQKMQNPEVNGVEYQQGDLAGYEVREYLLEKWGRECAYCSKQNTPLQIEHIHPKSKGGSDRVSNLCLACEKCNQKKGNKPIEEFLKKKPDLLRKILAKAKQPLTDAAAVNTTRNKIVKVLKAIKPVVTGTGAQTKYNRTRLGLPKQHWIDAACVGDIKDLVLKTSQPLLVTCKGQGGRQKAALNKYGYPIRHNPLRPIKGWSTGDIARHQKLGIGKVTPRSKGSFGFTPLGAKGYKSCKPQDIFAVHRKDGYIYSFS

SEQ ID NO: 14281 - protein, 381 aa, unidentified
  REGION 1..381: note = metagenome
MVYVINKQGQALMPTERFGKVRRLLKNSLAHVVCRIPFTIQLDYDTTDYTQPVSLGIDAGSKHIGISATTSEKEMYAADVELRNDIVDKLSTRREQRRTRRSRLRYRKARFNNRISSKRKGWLAPSVENKIQTHLTVVEKIHKFLPITNIVVETASFDIQKINNPSISGSEYQQGEQLDFFNVREYVLFRDNHICQHCKGKSKDKVLNVHHIESRKTGGDSPKNLITLCETCHKAYHRGDFELNVKRGKSFRDSAFMGIMRWKLYDRLKNIYPNVSMTFGYITKNTRITNNLPKDHYIDARCISGNPVAKPLGYYFYQKKVRCQNRQIHKSNFLKGGRKKLNQAPFLVKGFRLFDLVEYQKDLYYIFGRRDSGFFDIRKLD

SEQ ID NO: 14282 - protein, 413 aa, unidentified; identical to SEQ ID NO: 8345
  REGION 1..413: note = Human gut metagenome

SEQ ID NO: 14283 - protein, 436 aa, unidentified
  REGION 1..436: note = Human oral metagenome
MTKTLTKQTTQACVLDQQGKPLMPTTRLGKVYRLLKTQKAHIVSYEPFTIQLDYEPDTHVIQPMTLGVDSGAIHSGYSLANEHREYYNAEVIARDDISKRLSDRRMYRQNRRSRKTRYRKPRFKNRKNKKKRWLPPSLEQKVAVQVNEIDHLHRYFPIETIIVEVAEFDIQKIKDPNISGIDYQQGTLQGYNIRNYLLEKHGRKCFYCGKSVSKFEVEHMLPKSRGGSNRIDNLTLSCHDCNQKKDTMTAKEFIKQTLPAKKAATKLKQLPNEKRLFKYMTYMNATRWALYNAINEKYPNVEMTYGYITKYNRIKAGLQKTHHIDAKCITGFATVPSIDQTVVKVKMRRHNRQLHRATFNKGHVRNAACLPTVVFGFQLYDLVLFNNHRYYIKGRRSSGSFALASVEGLKDEKRTYKKLTILAHTNAYLTNRYVDL

SEQ ID NO: 14284 - protein, 419 aa, Moorena sp.; identical to SEQ ID NO: 6711

SEQ ID NO: 14285 - protein, 413 aa, unidentified
  REGION 1..413: note = gut metagenome
LKVFVLNMRGKPLMPCSPAKARHMLKAGKAFVVRRTPFTIKLTIATGETKQDVTLGVDAGARHVGISATTEKEEVFASEVALRQDITGLLADRLAFRRARRNRKTRYRAPRFNNRVRSKHKGWLAPSVENRIQAHISRIEAVCRLLPVTKIVIETASFDIQKIRNPEVEGTGYQQGDLLGFWNVREYVLFRDGHICQHCRGRSKDPILNVHHLESRKTGGDAPNNLITLCETCHKAYHAGKIKLKVKRGQSFRAEAFMGIMRWTLLDRVRKTHPKLPVENTYGYLTKHKRIALGLPKTHCADAFCIAGNLKALRRGDFLFQQQTRKHNRQIHKCSILKGGVRKLNQAPFLVKGFRLFDKVRIGGQIGFVFGRRVRGTFNIRRLDKTVIGTDINCKKLSLLETRKTFLTELRKE

SEQ ID NO: 14286 - protein, 413 aa, unidentified
  REGION 1..413: note = Human gut metagenome
LKVFVLNMRGKPLMPCSPAKARHMLKAGKAVVVRRTPFTIKLTIATGETKQDVTLGVDAGARHVGISATTEKEEVFASEVALRQDITGLLADRLAFRRARRNRKTRYRAPRFNNRVRSKHKGWLASSVENRIQAHMSRIDAVCRLLPVTKIVIEAASFDVQKIKNPTIEGTDYQQGDQLGFWNVREYVLFRDGHVCQHCHGRSRDKILNVHHLESRKTGGDAPNNLITLCETCHKAYHAGKIKLKVKRGQSFRAEAFMGIMRWTLLDRVRKTHPKLPVENTYGYLTKHKRIALGLPKTHCADAFCIAGNLKALRRGDFLFQQQTRKHNRQIHKCSILKGGVRTLNQAPFLVKGFRLFDKVRIGGQIGFVFGRRVRGTFNIRRLDKTVIGKDINCKKLRLLETRKTFLTELRKE

SEQ ID NO: 14287 - protein, 553 aa, unidentified
  REGION 1..553: note = Mouse gut metagenome
MNVLQSGYPPQKGDSMKQKTFVYVLNKKGKPLMPTTRCGHIRKLLKEKKAVPVCNNPFTIRLKYETPDVVQSLYLGIDTGRENIGIAVSEENGNCVYLAELKTHNKSIKKKMTERREFRSERRRHKRISKQRKAIKNGTIIQNGEDTILRSKKECKSKTVIYPGMKEGITHKVIQGAEAQFNNRKRKENWITPSGRQLIQMHMNAIKSVQKILPISHIIIERVSFDFQKLANQNIYTWQYGKGPLYGFKDYKDYIDSEQNGICLLCGKNHIEYYHHIVSKSNGGSDNINNIAGLCYNCHYGNDGVHKNPEASRQLQTLKEGLKQKYKISLLNSVTPVLIEEISEFCINNNYKFSVTDGYSTSLTRKQMNLPKTHCIDAYCIGIANRLIQCKILPFVIYEQRRFKKKSNNLIHKRNNREYYIKEGDKLVLVAKNRHKATEQSFPSLEEYLSEYALTHTEYECIKQARSLIIKPCRRTYTYHKEKKVVLIHPGDIVKYEKHNKINGNIKTEIFVADGLDISNNKVCYGTKNKKFKYCKRILSTSIPYISKRLLQI

SEQ ID NO: 14288 - protein, 434 aa, Moorena sp.
MKVFVLNKHGNPLMPCNPRKARLLLKQQKAVVAKQMPFTIRLLYGSSGYKQPVSLGVDAGSKHIGIAATTEKEVLFAEELTPRNDVVNLLSSRRQNRRSRRNRKTRYRKVRFDNRVRSKHKGWLAPSVEVKIQEHVTAIKHVQQILPITEVHVETAEFDTQRMKAAEEGRPLPVGTDYQLGEMYDSYNVRQYVLKRDNYTCQCCGKHGDGVKFHVHHLETRKTGGNAPDNLITLCEDCHKAIHAGTKTLPARKAKRSTKSLRDAAFMGIMRKTLLERLRAELAIPVTGTYGFITKLCRDLYHIEKSHINDAIVISKHFTAVPDDVWYFAKAVRRHNRQIHRSKILKGGIRKRNQATHVVKGCRLFDSVKYADHSYFVFARRTSGQMDLRTLAGVKANSGSLSFKKFSIQHCNAGALLERRKAISPTDKSVGFLA

SEQ ID NO: 14289 - protein, 413 aa, unidentified; identical to SEQ ID NO: 3620
  REGION 1..413: note = Fermentation metagenome

SEQ ID NO: 14290 - protein, 424 aa, Moorena sp.
MRVFVLDKNRKPLDPCQPARARILLKQGRAKVIRRYPFTIIMLDLEAENCLTHKHQLKIDPGSKTTGLAIVQNDKIIWGAELTHRGFQIKDALTSRRQLRRFRRNRKTRYRKPRFLNRKPPEGWLAPSLMSRVHNILTWTKKLMKFCPITGISQELVRFDTQKMENPEISGVEYQQGTLYGYELREYLLEKWNRQCAYCGAADTPLEIEHIKPLAKRGSNRASNLAIACHKCNQAKGAQEIEQFLSSKPSVLKRVLAQTKKPLADAAAVNSTRVRLYNELKFTGLQIETGSGGLTKYNRCRQKLPKTHWLDAANVGQVDNLRIEDYQPLLITAKGHGTRQMCRTNKFGFPSRYVTRLKFVKGFQTGDIVNAIVTKGKKIGTYTGRVAIRKSGSFNISTKNGLIQGISHKYCTIVHRKDGYSYSF

SEQ ID NO: 14291 - protein, 494 aa, unidentified
  REGION 1..494: note = Human gut metagenome
MTMVYVQNKDGKPLMPTTRYCYVRLLLKEKKARVVCTTPFTIQLHYDTPDITQDLILGIDPGRTNIGVAVVKEDGSCVFSAHLETRNKEVPLLMKKRAAFRRNHRTLDRRRKRQRRAIAAGTTVESNTIERLLPGYEKPVVCHHIRNKEARFNNRKRPQGWLTPTANHLLQTHINLIAKIAKVLPITKVVVELNRFAFMAMDNPNIRRWEYQQGPLYGLGSVEDAVYAQQDGHCLFCKKPIDHYHHVVPRHKGGSETLANRCGLCAKHHDLVHKDKAWAEKLVTRKGGMNKKYHALSVLNQIIPHLIEHLGSETPYDVYATDGRSTKGFRIAKNVPKEHYTDAYCVACSILDTDIDVSAPAEPFELKQFRRHDRQACIRQMVDRKYLLDGKVVAANRHKAIEQKSDSLEEFREAYGDAAVSQLTVRPHLPQYKDMTRIMPGAAMDFDGTVGVFQGSSGRNNGTPNYYNSTKGARVLTNRCALLAKNVGMVFIPA

SEQ ID NO: 14292 - protein, 465 aa, unidentified
  REGION 1..465: note = Human gut metagenome
MNTCVCVLSNNGERLMPTIRLGRVRHLLKDGKAKIIKHHPFTIQLLYDSKTNTQPIEICEDVGYNYIGISVKSQSHEYVSAQYDTLQDEKACHDSCRKLRRTRRNRLRYRKPRFDNRKRGEGWLAPSLKHKKELNVNVVKMYCTVMPITHATVEVGSFDTMLVKAIQEGKVIPEGADYQKGPRYNLATLREAVFYRDNYVCKICGRKATEGAILHMHHMFYWKGRHGNSLNELLTVCEKCHTPANHQKSGKLYGFGEKIKFADLSGAAFMNTVRWQIVNELYVAFGKPFVTITYGAMTKEKRIALQLEKSHNNDAYAMGEFHPNLRCMFEHYEKARRNNRILEKFYDSRYIDIRTGEIATGKELFNGRINRNHKKDSENLHKYRGKRTYAGHRALLRKKVNLNPGDLVSLNGENLIVHSTHTKKNGAVNVEFETPAKSGQKSASLKKLKIVKAANSIHPAWKKIS

SEQ ID NO: 14293 - protein, 408 aa, unidentified; identical to SEQ ID NO: 5560
  REGION 1..408: note = Human gut metagenome

SEQ ID NO: 14294 - protein, 425 aa, unidentified
  REGION 1..425: note = Human gut metagenome
MENTLKVFVLNMRGQPLMPCSPPKARKLLRAGKAVPVRRTPFVIQLTVPTGETKQPITLGVDAGYKHVGLSATTAKEELLASEVELRQDVTGLLSNRLALRRARRNRKTRYRAPRFDNRVRSKHKGWLAPSVENRIQAHISRIEAVCRVLPITKIVIETASFDIQKIKNPEIEGEGYQQGEQLGFWNVREYVLFRDGHVCQACKGRSKDLILNVHHIESRKTGGDAPGNLITLCEACHKAYHAGKLKQFSPRRGASFRAETFMGIMRWTVLNRLRERHPELPVTNTYGYLTKHKRIVAGLPKTHCADAFCIAGVLDAKRRGEYLFQKQTRRHNRQIHKLTILKGGVRKRHQAPYLVHGFRLFDKVLCKGEVGFIFGRRSSGAFDVRRLDGTKISAGISYKKLSLLEKRKMFLTELRKEGRDSSRV

SEQ ID NO: 14295 - protein, 415 aa, Bacillus sp.; identical to SEQ ID NO: 4797

SEQ ID NO: 14296 - protein, 485 aa, unidentified
  REGION 1..485: note = Human gut metagenome
DVFAGIDSGRENIGSGASNEDGDCLYLGELKTSNKSIKIKMAERTGFRRERRRHDRQSKQRKAKKDHTEIQNGNDDICRTTISCKSVQISYPVAEESVTHKIIRGKEGKFANRHRDEGWITPSARQLVQMHMNDLKSMCKILPISHVTLERVAFDFQKLENENIKVWEYGKGKLYGYDSPEEYIHDVQDGKCLVCGKPHIDYLHHIIPRSKGGSDKVSNIAGLCYDCHYGPIGVHNCQDTQDRLPELKNEVNKQYKVSLLNSVMPVLIEEIDKFCKANSIMFSICEGHDTAKVRDMYDLQKDHCLDGFAISLVGRNVKSVDVMPDRIHQKQRYKKKSKNIIQKRNYREYYDDKKLVAINRHKGTDQKADSLEEYMNTYAETHTADECKNQFESLTVKPARRTYTFHKEGRICPFHIGDKVRYEKKNKIKGNTKVDTFICEGIYFSKDENKAEVEHNKTKSKKMKFCRTIESGCIPYIDYRKLALI

SEQ ID NO: 14297 - protein, 415 aa, unidentified; identical to SEQ ID NO: 2674
  REGION 1..415: note = Human gut metagenome

SEQ ID NO: 14298 - protein, 418 aa, Moorena sp.; identical to SEQ ID NO: 6948

SEQ ID NO: 14299 - protein, 414 aa, unidentified
  REGION 1..414: note = Human gut metagenome
MVYVINKQGQALMPTERFGKVRRLLKNSLAHVVCRIPFTIQLDYDTTDYTQPVSLGIDAGSKHIGISATTSEKELYAADVELRNDIVDKLSTRREQRRTRRSRFRYRKARFNNRVSSKRKGWLAPSVENKIQTHLTVVEKIHKFLPITNIVVETASFDIQKINNPIISGSEYQQGEQLDFFNVREYVLFRDNHTCQHCKGKSKDKVLNVHHIESRKTGGDSPNNLIILCETCHKAYHRGEFELNVKRGKSFRDAAFMGIMRWSFYDRIKNIYPNVSMTFGYITKNARITNNLPKDHYVDARCISGNPVAKPLGYYFYQKKVRCQNRQIHKANFLKGGRKKLNQAPFLVKGFRLFDLVEYQKDLYYIFGRRDSGFFDIRKLDGTKVNKGSINCKYLRLVDKRKSILIEKRMQVNL

SEQ ID NO: 14300 - protein, 413 aa, unidentified
  REGION 1..413: note = metagenome
LKVFVLNMRGKPLMPCSPAKARHMLKAGKAFVVRRTPFTIKLTIATGETKQDVTLGVDAGARHVGISATTEKEEVFASEVALRQDITGLLADRLAFRRARRNRKTRYRAPRFNNRVRSKHKGWLAPSVENRIQAHISRIEAVCRLLPVTKIVIETASFDIQKIRNPEVEGTGYQQGDQLGFWNVREYVLFRDGHICQHCRGRSKDPILNVHHLESRKTGGDAPNNLITLCETCHKAYHAGKIKLKVKRGHSFRAEAFMGIMRWTLLNRMRKAHPSLPVENTYGYLTKHKRIALGLPKTHCADAFCIAGNLKALRRGDFLFQQQTRKHNRQIHKCSILKGGVRKLNQAPFLVKGFRLFDKVRIGGQIGFVFGRRVRGTFNIRRLDKTVIGTDINCKKLSLLETRKTFLTELRKE

SEQ ID NO: 14301 - protein, 420 aa, unidentified
  REGION 1..420: note = Human gut metagenome
MQYVYVLNKHGEPLMPCSPRKARLLLKQKKACVIKRTPFTIKLLYGSTGYKQPVTLGVDAGSKHIGISATTEKHELYREEATPRNDVVDLLSARRAFRRSRRNRKTRYRAPRFDNRVHSKHKGWLAPSVEVKIQEHITLIEHVCRILPVTLVRVETAEFDTQRLKAMLEGKPLPVGTDYQLGEMYDEYNVRQYVLKRDNYTCQCCGAHSTKTKGVKLHVHHIETRRTGGNAPNNLITLCKACHKALHAEKVTLDGKKRGKPLKDAAFMGIMRKTLMERMRKELKIPVQGTYGYITKYLREKNGIPKSHTNDARCISKNPLAIPCDTCYYTKAVRHHNRQLHKATILKGDIRKANQAPYIVKGYRLWDKVAYNGTECFITGRRTSGYFALKKLDGTVASNSISYKKLRLLEAATNYIIERK

SEQ ID NO: 14302 - protein, 442 aa, unidentified; identical to SEQ ID NO: 3218
  REGION 1..442: note = Human gut metagenome

SEQ ID NO: 14303 - protein, 283 aa, Parasutterella sp.
LLPVTKITVETASFDLQLLKNPDISGKEYQEGEQLGFWNIREYVLCRDGHVCQHCYGRSKDPVLNVHHLESRRTGGDSPGNLITLCETCHKALHRGEITLKAKRGQSFRAEAFVGIMRWEVHNRLRALHPGIEVSNTYGYRTKHARIANGIAKSHCADAFCIAGNLGAERLCEFFFQKQTRRNNRQIHKLSILKGGIRKRNQAPFEVKGFRLFDKVACQGEEGFIFGRRSSGFFDVRKLDGTRISAGISCKKLHLLEKRRTYLTEIRKEEALPPLPEGRGLRA

SEQ ID NO: 14304 - protein, 518 aa, unidentified
  REGION 1..518: note = Human gut metagenome
LLNLKLIDALLEKTEYIYVLGIDGKPQMPTNRKVRIRSLFKSGRAKIVDTVPFTIRLLYENDAVLQSITIAEDPGRTNIGTAVLTQLGDLVFSTVVETRNKSIKKLMTDRKAHRQASRRGERKARQRLAKKHGSMIKAGMMMRKLPQYAADKFVTCKIIKNTEARFCNRKRMPDWLTPTVNHLVQTHINLIKKIEKYLPITDVAIEVNRFAFMQMENPNINGLDFQNGPLNGFDDVKAAIREQQHGKCLMCKNDIEHFHHIVPRSKGGSDTIQNQAGLCKKCHAKVHTDSEFLAKFKDKKEGLIKKYGALSALNQAVPFICKELIKIYGVEHVHFCTGKDTSLIRSSLGYEKTKENQMHEVDAYCIGLAAIGADKVKRPSFNNVFKIKQFRRQDRQRVHYQKERTYYLDGKKIATNRKPRFEQKGNALSDWYKEQIEAYGQHEAGKMRSRLTVKKSKRSYNTAKRLMPGCIFYYDGQRHVMTGQSSYGRYLRAYNCGTKDFHASKCQIIRFNTGLVFV

SEQ ID NO: 14305 - protein, 456 aa, Halomonas sp.
MAVFVLGKNKQPLMPCSEIRARLLLERGRAVVVNLTPFMIRLRDRCLSDCTLQPTLLAADPGSKETGLALMRLENNATEEKAPATRHVLCLFQLVHRGFQIRQALEQRAGFRRRRRSKNLRYRQPRFDNRTRKKGWLAPSLQHRVDTTMAWVDKLCRWAPVTHLSMELVRFDLQKMENPEISGVEYQQGTLLGYEVREYLLEKWGRECAYCGTGDTPLEIEHVVAKSRDGSGRVANLTIACHDCNQAKDSQWLADFFATNKGLKKRLKANGLSAEVRLERVQRQHKLPLRDATAVNATRWALFGAMKSTGLSVAVGSGGRTKYNRQRLGIPKPHALDAACVGKFDTLKGWRVPTQVIKAMRRGSYQRTRLDKFGCPRGYLMRQKQVKGFQTGDRVRAIVPAGKKTGSHTGRVAIRKTGSFNIQTEQGAVQGISWRHCTLLQRGDGYGYHQIPTTQH

SEQ ID NO: 14306 - protein, 436 aa, unidentified
  REGION 1..436: note = Human gut metagenome
MVFVLSSTNKKLMPTNEYRARKLLKSGKAAVYKYHPFTIILVERKDGYTQSIEYCCDTGYQHIGISIKSQKHEYVNEERILLKEETERHNDCRKYRRARRNKLRYRKARWNNRHDNLICKDGFAPSIRNKRDVHISLFKMYYEVCPITSAIFEMGQFDTQLLKAVENGDNVPQGTDYQHGERYGYSTLREAVFARDNYKCVCCGKSAIKNGLILKIHHLGYRVGDRSNRMSNLATVCSNCHTSKNHQKGGKLYDLKPKLKTFKGATFMTMVRYNMFSKLKKSALDVKFNMTYGALTKLKRKDCNIKKSHSNDAYCMGNFHPKHRTDFKCYQKLRRNNRILSKFYDAKYIDLRDGTVKSGKQLSCNRVNRRELRSSNKNERVYRGTKISKGKTVVRKQHYQYRPYDFVWYENIKYAVKGVQDKGKRIALQNHLPIPI

SEQ ID NO: 14307 - protein, 451 aa, Ruminococcus sp.; identical to SEQ ID NO: 2436

SEQ ID NO: 14308 - protein, 419 aa, unidentified; identical to SEQ ID NO: 6954
  REGION 1..419: note = Human gut metagenome

SEQ ID NO: 14309 - protein, 427 aa, Nostoc sp.
MSKVFVLDTEKRPLDPIHSAQARQLLRNKKAAVFRRFPFTIILKESRPDASVSDLRIKLDPGAKITGIALVNDSTGEVVFAAELKHRGFAIRDALISRRQLRCSRRNRKTRYRKPRFLNRTRPEGWLAPSLMSRVHNVETWVNRLRKFAPITAISTELVKFDMQLMRNPEIEGKEYQQGTLAGYETREFLLEKWNRQCAYCGIKDIPLQIEHIHPRSKGGSNSITNLTLSCEKCNVKKGTKDIKDFLKKDPTRLQKILAQAKKPLADTAAVNATRYKLLEVLKSTDLPVECGSGGLTKFNRTNQQLQKTHWLDAACVGQSTPILIIKGIKPLLITANGHGTRQMCRTDKFGFPNRYVPKLKFIKGFQTGDIVKAVVTNGKKIGEYIGRVAVRSTGSFNISAQRGLIQGINYKFCKSIHKKDGYSYSS

SEQ ID NO: 14310 - protein, 420 aa, unidentified; identical to SEQ ID NO: 3546
  REGION 1..420: note = Human gut metagenome

SEQ ID NO: 14311 - protein, 428 aa, Pelotomaculum sp.
VVFVLDKHKKPLMPCKEKRARLLLLKGHAVVHKMAPFTIRLKDRVVEESELQPLRLKIKPGAKETGMAVLREDLPDKSEVVMMLEIRHKPGIKAGLDSRRSLRRSRRNRKTRYRKPRFNNRKRKKGWLPPSLEARVNQTMTTVNKLTSFLPALAISTEHAKFDTQLLQNPEISSIEYQQGELFGYEVREYLLEKWGRKCAYCGKTDIPLEIEHIIPKSRGSSGRVSNLTLACHDCNQEKGTLTAEEFGHPEVQAIAKRPMKEEAIINATRWKLFNKLISIGLSLECGTVARTKKQRIEHSFPRTKYHEACCVGASTPERIIVKQNYVSVWSAKGRGTRKMCNTDKFGFPKNNRSNKKVYFGFQTGDLVVANIPKGKYTGRWIGRVIVRSSGYFDVKDGAGKWLCQGASHKHFRLLQRNNGWQYHKINT

SEQ ID NO: 14312 - protein, 423 aa, Arthrospira sp.; identical to SEQ ID NO: 3735

SEQ ID NO: 14313 - protein, 520 aa, unidentified
  REGION 1..520: note = Human gut metagenome
MNYLDFVLMVDKNKVPCIPIKESTAAYLLRHNKAKIINHDPTVIQRLDEYSADYEIRNIFELKIDSGYLNIGFSVSDSEHEYLAGQVNLLQGMSERLTVRASNRRFKRARLRYRKNKNVDYKTVHNPTYKNGNQDGWIAPSIQHKIDSHIRLIKKIAQWVPIDRIIIEVAKFDIQKMIADLDGRIISGKDYQNGEMKGYENVTAYVRDRDKHTCQMCLSSGKVKNKNNDTIEVHHIIPRAAGGTNRPSNLICLCHHHHRLVHSNNNNNKYFKELQNKKMPDTYKDSTFMNIVRYKIYNALCADFKDVELAYGYETKINRRLIGLPKFHYTDAVCLKEWKNISLTKFIYIVDQKRCNDRKMESFFDAKYIDIRDGKTKSGTELCYTRLDNASSWRTTCKNEVDNLRQYREKKITKGRKQRECHFYCLKPGDLIFINLGNHKGNLAEVKTMQIHKGKYKIFFTYKNQKVDNPTISLSPEEYGQLKKNECSKVKIVRTRRGMIWRKYNRLEYENTYKDQYDKN

SEQ ID NO: 14314 - protein, 423 aa, unidentified; identical to SEQ ID NO: 3951
  REGION 1..423: note = Human gut metagenome

SEQ ID NO: 14315 - protein, 443 aa, Anoxybacillus sp.; identical to SEQ ID NO: 4041

SEQ ID NO: 14316 - protein, 415 aa, unidentified
  REGION 1..415: note = Human gut metagenome
MENEMAYCFVVDKNNRPLAPTKVNKGWYLVRKGRAKIKSRYPMVIQLEKEVEPDKYDESRMVVGIDDGSAHVGLAIVQKCPTKNKVVFKGTIEQRQNVKHLMDVRRGYRRYRRHHKRYRQARFNNRHSSKRSGRLAPSIKQKKDAILRVLYQLNRWIDIQEYCLEDVCIDIRAMTDGHNPYKWKYQKSNRLDENLRKAAIIRDGCKCQECGKSNCVLEVHHIRARKYGGADTIGNLIALCSGCHQKTEGREREFEDRYFKIIGSKPKRFDYAMHVMQGKNYLREKISELGPLHLTNGGETANKRIDWNIEKSHSNDAICITNCNPDTCDVKEWIIKPMRRKSKAKTDNVLGIRHRDLVSYTYKNGEIHTGYVTALYPELLALNFQSKTKHCKKVNARKCRLLWKFDKIYWLEQRV

SEQ ID NO: 14317 - protein, 443 aa, Anoxybacillus sp.; identical to SEQ ID NO: 4769

SEQ ID NO: 14318 - protein, 431 aa, unidentified
  REGION 1..431: note = Human gut metagenome
MDAWDIIVVLNKRGKPLMPCSPAKARLLLKEKKAIVKRRTPFTIQLTIATGESKQPVSLGVDAGYKHVGLSASTEKAELYASEVELRQDITDLLSARRALRQSRRNRKTRYRAPRFDNRIRTKRKGWLAPSVENRINAHLSRIEAVLRLLPVTKITVETASFDTQLLKNPDIAGKEYQEGEQLGFWNVREYVLFRDGHVCQHCHGRSKDPVLNVHHLESRRTGGDSPGNLITLCETCHKALHRGEITLKAKRGQSFRAEAFMGIMRWEVLNRLKASHPELEVNNTYGYWTKHARIANGIAKSHCADAFCIAGNLGAERLGEFFFQKQTRRNNRQIHKLSILKGGIRKRNQAPFEVKGFRLFDKVACQGEEGFIFGRRSSGFFDVRKLDGTRISAGISYKKLHLLEKRRTYLTEIRKEEALPPLPEGRGLRA

SEQ ID NO: 14319 - protein, 414 aa, unidentified
  REGION 1..414: note = Human gut metagenome
MPCSPAKARLLLKEKKAIVVRRTPFTIQLTIATGESKQPVSLGVDAGYKHVGLSASTEKAELYASEVELRKDITDLLSARRALRQSRRNRKTRYRAPRFDNRIRTKRKGWLAPSVENRINAHLSRIEAVLRLLPITKITVETASFDMQRLKNPDISGKEYQEGEQLGFWNVREYVLFRDGHVCRHCHGRSKDPVLNVHHLESRRTGSDSPDNLITLCETCHKALHRGEITLKAKRGQSFRAQAFMGIMRREVLNRLKASYPELKVHETYGYLTKHARIANGIVKSHGADAFCIAGNLGAERLGEFFFQKQTRRNNRQIRKLSILKGGIRKRNQAPFEAKGFRLFDKVACQGEEGFIFGRRSSGSFDVRKLDGTRISAGISCKKLRLLERRRTYLTEIRKEEALPPLPEGRGLRA

SEQ ID NO: 14320 - protein, 428 aa, Vibrio sp.; identical to SEQ ID NO: 4673

SEQ ID NO: 14321 - protein, 419 aa, unidentified; identical to SEQ ID NO: 4877
  REGION 1..419: note = Human gut metagenome

SEQ ID NO: 14322 - protein, 426 aa, unidentified
  REGION 1..426: note = Human oral metagenome
MVVYVLDLNGQPLMPTVRFGKVRRLLRDKKAKVVRRCPFTIRLLYETETNVVQDCYCGVDTGSKHIGVAVVGNDKVLYQSQTELRNNIKKKIDARRAYRRNRRSRKTRYRKPRFLNRKNSMKLNRLPPSVKHKVQTHIDEIEFCKKILPVSDLILEVSQFDTALMKNPSLIDEIVRHWCYQKGFDYGYSSRREAVLHRDNYTCQCCGKKNCRLEVHHIKFKSQGGTDDEENLITLCEDCHKAIHVGTIVLNKEPKKMNLKYATHMSIIRSQLLKIYPQAVETFGFVTSENRNRLGLEKSHFIDACVIAGGGEKFECNDEIFYKRRVAYNDRKLTKGIRGEQSIPVGKVQGFRKFDKVKYFGKEYFINSRISRGGYAVLMDIFNNKIDFSYMPNGFKIPKLLNCKRISARRSTICTEIEVKAIHLQI

SEQ ID NO: 14323 - protein, 416 aa, unidentified
  REGION 1..416: note = Human gut metagenome
MVYVLDKNGQPLMPTDRHRKVRLMLQSGQAKVIKRCPFTIQLNYDSGHQTQEISLGIDAGSKHIGVSATTKIKVLYEADVELRNDIVDLLSSRRELRRGRRNRKTRYRQAKFNNRRRGNGWLAPSIRQKIGTHLTVVENICKILPISRIMVETASFDIQKIKNPDIQGAEYQQGDQLGFWNVREYVLFRDGHTCQCCKGKSKDKILNVHHIGSRKTGGNAPNNLITLCETCHTGYHKGTVQLPKAIKRGMRFKDAAFMGIMRWAFYEALKQQYEPVGTPVHNTYGYITKHTRIAYNLPKEHYVDARCISGNPEASSNGEYYYQKKVRCHNRQIHKLTVLKGGIRKQNQATYLVKGYRLFDKVSYQGKGYFVFGRRQSGFFDIRTLSGEKVNKGSLSCKKLKFIATRTYYLTERRAV

SEQ ID NO: 14324 - protein, 536 aa, unidentified
  REGION 1..536: note = metagenome
VIEQKHDACVPSGMALRDFSSPATLQSRHLMPYIYVLGMDGKPQMPTTRRRHVQRLLDTGRARIASHVPFTIQLLYKNDPILQPVTLAEDPGRTNIGLAALSLKGDLLFSAKVETRNKEISKLMDKRRQSRRASRNGERKARQRLAKKFGTMLKAGMLMRKLPQYAADKYITCHVIRNTQARFSNRKRPDGWLTPSARHLIQTHINLVHKMMKYLPVTDVVLEVNRFAFMQLEDPSISGVDFQNGPLKGFDDLHAAVRDLQDGKCMLCKNEIQDFHHIVPRSRHGSNTIGNIAGLCTKCHEKVHKDEKAEKRLKDKKKGLDKKYGALSILNQAIPFICKELETEFGKEHVHYCTGRETALVRRSLRYHKTKEEQYHEVDAWCIGALSLDRIPEKAPAFEEVHTIMQFRRQDRASIKAQTSRTYKLDGETVAWNRKKRTDQKNDSLEDWYQKQVQIHGQKEADRMRSRLTVKISQRRYNNLERMLPGAVFLYKGKRYVMKGQLSNGKYLRAVGDGKTNYPVKECRIGKRNQGLVFID

SEQ ID NO: 14325 - protein, 237 aa, unidentified; identical to SEQ ID NO: 5189
  REGION 1..237: note = Human gut metagenome

SEQ ID NO: 14326 - protein, 397 aa, Moorena sp.; identical to SEQ ID NO: 4965

SEQ ID NO: 14327 - protein, 476 aa, unidentified; identical to SEQ ID NO: 8081
  REGION 1..476: note = Human gut metagenome

SEQ ID NO: 14328 - protein, 520 aa, Micromonospora sp.; identical to SEQ ID NO: 13703

SEQ ID NO: 14329 - protein, 524 aa, Butyricicoccus sp.; identical to SEQ ID NO: 8949

SEQ ID NO: 14330 - protein, 416 aa, unidentified
  REGION 1..416: note = Human gut metagenome
VPEMANYAFVLDANGKQLAPTKETKAWYLIRKKRATLVSKYPMVIQLNKKIPDDKICKDEIRCGIDDGGLHVGIALVQKCQTKNKVLFKGTIEQRSDVKHLMEVRRGHRYYHRYHKRYRQARFNNRSSSKRRGRVAPSILQKRQSILRIINQLSKWIDITSYWLEDVYIDIRALTDGYKPYRWQYQKSNRLDENIRKAVILRDGYKCMECGKSNTRLEVHHIKPRRLNGSNTLNNLISLCEKCHQKTEGKEELFMIKYFSLLNSSDNKHLNYASHVMIGKMWLREHLSSIGELNLTTGGDTANKRIDWDIDKSHSNDAICITDLKPDTCNIKEWIIKPMRRQSKAKTDNVLGIKHRDLVEYTYKNGETHRGYVTALYPELNALNFQSSTKHCKKVNAKKCRLLWKFNKIYWLDNAS

SEQ ID NO: 14331 - protein, 512 aa, unidentified
  REGION 1..512: note = Human gut metagenome
MSTVYVLNKDGKPLMPTTRGGHVRHLLKEQKARVVRTKPFTIQLLYETDDVVQLLYLGIDPGRTNIGVAVVKTDGTAVFTAHLETRNKEIPKLMKKRKNSRRARRTNGRRCRRQRRAKANGTISKKCVKQDTAQNGSVSKRAKKIGVIKRHLPGCEKEVLCIGIKNKEAKFSNRVRPEGWLTPTANQLLQTHINLVKKIQKFLPISDVVLEVNKFAFMQLDNPNIQKWQYQQGPLYQKANLEEAVSEMQEHHCLFCKKPIDHYHHVVPQHKNGSNTIGNIVGLCTKHHDLVHKEAAWQEKLAKKKTGLNKKYGALSVLNQIIPALTKELSSLFPKHFFATNGKSTYDYRAAHGVSKDHWLDAYCIACSVLADDVCDNNINSHVPYELKQFRRHDRRALHKENMSRVFTLNGKSVATNRHKATEQTTDSLEEFRQCQPDDVCKLKVKEHYPEYRNPKRNFPGCVFLVGKHTHVMQGTSGSHNGKADGYYDTNGNSYSSGECKFVAKNEGIVFA

SEQ ID NO: 14332 - protein, 456 aa, Halomonas sp.; identical to SEQ ID NO: 14305

SEQ ID NO: 14333 - protein, 455 aa, Moorena sp.
VSVFVLSKNKKPLMPCSEKRARLLLSRGRAVVHLMAPFTIRLKDRKDGTLQPVHVKIDPGSKQTGLGLVFESRQDLKVLWLAVLHHRSHQISEQLTARRAMRRRRRNQLWHRPARLDNRTRKADWLPPSLQHRVDTTLAWVKKLSKLVPVSDIGLERVKFDMQKMLNGDISGVEYQQGTLFGFEVKEYLLDKHNHTCAYCGGVSGDNRLEVEHVHPRSKGGSNSVKNLVMACRTCNEAKSNILLADWKRMLGRSKLDKARAVGIEKTLKGKWVGLKDAAAVNATRNALLSQILFFAKDEKSVCTGTGAMTKFNRKQQGMPKHHTLDAVCVGEVNHPIVNWQQPVLDIQCTGRGSYQRTRLDKYGFPRGYLMRQKAVYGFQTGDQVKAIVPSGKKQGNYTGRVAVRASGSFNIQTSDGLVQGISHKHCTLIQRGSGYGFNLTTIAIINGGSEKQAA

SEQ ID NO: 14334 - protein, 470 aa, unidentified; identical to SEQ ID NO: 5320
  REGION 1..470: note = Human gut metagenome

SEQ ID NO: 14335 - protein, 446 aa, unidentified; identical to SEQ ID NO: 11087
  REGION 1..446: note = Ga0373629_0001011

SEQ ID NO: 14336 - protein, 451 aa, unidentified
  REGION 1..451: note = Human gut metagenome
MSVAVISKTGIVLMPTSEYRARKLLDSGKAIIYGYRPFTIQLTERETGDVQPVELCVDTGYIHIGVSVKSEKHEYLGLQVDTLTDEKAKHDDRRMYRRQRRNRKRYRKSRFDNRKRKSGWLAPSLEHKKEIHLQIITAICGVYPIADITLEMGNFDTQVLKAKEEGKQIPQGTDYQHGERYGIATLREAVFTRDGYKCQCCDRGIKDGAILHAHHIQYRSQGGTNRMSNLITVCEKCHTPANHKPGGKLYGWKPKIASLKDATYMTAVRWQLYRKVKEMFPGIHVKITYGAETKERRRILDIKKSHVNDAFVMGQFHPKHRSLPVLYKKKRRNNRCLEKFYDAKYIDSRNGKTRSGQELFNGRISRNHKKDSENLHRYRKKKVSRGKRNIRVQRYKIQPHDIVLFDGKKYETTGCHNKGTRAILLPEKKSKSVEKLTIYKYAGGYYPSKFA

SEQ ID NO: 14337 - protein, 470 aa, unidentified; identical to SEQ ID NO: 2949
  REGION 1..470: note = Human gut metagenome

SEQ ID NO: 14338 - protein, 431 aa, unidentified; identical to SEQ ID NO: 4306
  REGION 1..431: note = Human gut metagenome

SEQ ID NO: 14339 - protein, 442 aa, unidentified; identical to SEQ ID NO: 7529
  REGION 1..442: note = Human gut metagenome

SEQ ID NO: 14340 - protein, 561 aa, Xylanimicrobium sp.
LSPGELQGLIDQTTSPRDKEMEVTALTARQQIDRRVLPQPAALEPVPADTDGVSTKRGTGATAMPGHRSGQQGRGETGSSSPAAVGVTPAPAGSPVGAGAGTGDRPLLVGRVFVLDRHGRPLMPTRPARARELLRKGRARVHRVVPFIIRLVDVDATTPGIDVDGVELGIDPGSKHSGLALFTTTRDGERTAVTLIDLVHRGLTIKNAMTSRAQLRRGRRSRNLRYRAPRFDNRRRHPVDGLNTWLAPSTRHRVVTTLSWVDRLTRWAPITGVHVEAVRFDTQAMENPEIGGVEYQQGTLAGFEAREYLLTKYRHTCVYCDATGVPLNIDHVRPRSKGGSNRVSNLVLACVTCNQAKDAQPVEVFLACDPARLARVKAGLKRPLRDAAAVNSTRWALTHAIEARGFPVKTSTGGRTKYNRTVHAVPKTHALDALCVGDVTGVTGWPATTLVVTCAGRGRYRRVNVDKYGFPRTTKDGTPAKVNRTKIHHGYATGDLVRAVVPTGKKQGTHVGRVAVRATGSFNITTAHTTIQGINHKHVRLLQRGDGYTYQTTPTLTGDEK

SEQ ID NO: 14341 - protein, 544 aa, unidentified
  REGION 1..544: note = Human gut metagenome
MKQKKQKVMVYILNKKGKPLMPTTRCGHVRKLLDSKKAVVVSSNPFTIRLKYDTPNGVQDVFAGIDSGRENIGSGASNEDGDCLYLGELKTSNKSIKMKITERAGFRKERRRHDRQNKQRKARKDHTEIQNGNADICRTTISCKSVQISYPAAEKSVTHKIIRGKEGKFANRHRDEGWITPSARQLVQMHMNDLKSMCKILPISHVTLERVAFDFQKLENENIKAWEYGKGKLYGYDSPEEYIHDVQGGKCLICGKPHIDYLHHIIPRSKGGSNKVSNLAGLCYDCHYGPMGVHNCQDTQDRLPELKNEANKQYKVSLLNSVMPVLIEEMDKFCKANSIIFSICEGHDTAKVRDIYDLQKDHCVDGFAISLVGRNVKSVDVMPDRIHQKQRYKKKSKNIIKKRNCREYYDGKKLVAVNRHKGTDQKADSLEEYMNTYAETHTADECKKHFESLTVKPARRTYTFHKEGRICPFHIGDKVRYEKKNKIKGNTKVETFICEGIRFPKDENKAKVEHNKTKSKKMKFCRVLEPGCTPYIDYRKLVLI

SEQ ID NO: 14342 - protein, 419 aa, unidentified
  REGION 1..419: note = Human gut metagenome
MPTKRKRHILKLLNTGKARIAEKVPFTIQLKYENIPVLQPVTLAEDPGRTNIGVAVLSPLGNLMFAAVIETRNKEIKKLMADRKAHRQASRRGERRARQRLAKKYGTIIKAGMAMRKLPQYAADKFVACKFIRNTEARFCNRKRRTDWLTPTVNHLVQTHLNVIKKISRYLPVTDIAIEVNRFAFMQMENPNASGVDFQNGPLKGFNDVKAAIREQQHGKCLMCKNDIEHFHHMVPRSKGGSDTIQNQVGLCPKCHAKVHTDTSFRKKLGDKKSGLLKKYGALSALNQAIPFICKGLLEEYGEKHVRFCTGKETSLIRTSLGYEKTNENQMHEVDAYCIGLAMLGVKNIKFQQFDNTKSSSFAVRTGVSSITRQKGLIISVSRRLLQTANQGLSKQEMPFLIGMKNSLRPAKMVKLASC

SEQ ID NO: 14343 - protein, 442 aa, unidentified; identical to SEQ ID NO: 11369
  REGION 1..442: note = Human gut metagenome

SEQ ID NO: 14344 - protein, 436 aa, unidentified
  REGION 1..436: note = Human gut metagenome
MFVFVLDKKHEPLMPCHPARARKLLKAGRARVVKTYPFTIRLVDRLLENSAVQPVAVKVDPGSEQSGMAVVRDDGKAHHHALFFINLVHRGQVIQERMTARSAFRRRRRGANLRYRAPRFNNRKRPEGWLPPSLQHRVDTTMSWVKKLRKLVPVTALWVENVKFDTQKLQNPEVSGVEYQQGTLFGFEVREYLLEKFERRCVYCGAENTPLNIDHVVPRAKGGSDRVSNLVLACTECNQKKGAQPLEVFLKGKPEQFERIRRQLKAPLRDAAAVNATRWALFNALKQTGLPVATGTGAQTKFNRKSFGIPKEHWLDALCVGRINGTDHPEGMGVLQVRCTGRGSYQRTRLNKYGFPRGYLMRQKRVHGFATGDIVKAVKKGVTFQGRVAVRARGSFVLQTPDGKVDGIHWRHCRLISRNDGYGYAWLRPALHSSSV

SEQ ID NO: 14345 - protein, 425 aa, Arthrospira sp.; identical to SEQ ID NO: 3231

SEQ ID NO: 14346 - protein, 440 aa, Clostridium sp.; identical to SEQ ID NO: 8300

SEQ ID NO: 14347 - protein, 428 aa, Chamaesiphon sp.; identical to SEQ ID NO: 3970

SEQ ID NO: 14348 - protein, 414 aa, unidentified
  REGION 1..414: note = Human gut metagenome
MPCSPAKARLLLKEKKAIVKRRTPFTIQLTIATGETKQPVSLGVDAGYEHVGLSASTEKAELYASEVELRQDITDLLSARRTLRQSRRNRKTRYRAPRFDNRIRTKRKGWLAPSVENRINAHLSRIEAVLRLLPVTKITVETASFDLQLLKNPDISGKEYQEGEQLGFWNIREYVLCRDGHVCQHCYGRSKDPVLNVHHLESRRTGGDSPGNLITLCETCHKALHRGEITLKAKRGQSFRAEAFMGIMRWEVHNRLRALHPGIEVSNTYGYRTKHARIANGIAKSHCADAFCIAGNLGAERLCEFFFQKQTRRNNRQIHKLSILKGALRKRNQAPFEVKGFRLFDKVACQGEEGFIFGRRSSGFFDVRKLDGTRISAGISCKKLHLLEKRRTYLTEIRKEEALPPLPEGRGLRA

SEQ ID NO: 14349 - protein, 490 aa, unidentified; identical to SEQ ID NO: 6170
  REGION 1..490: note = Human gut metagenome

SEQ ID NO: 14350 - protein, 414 aa, unidentified; identical to SEQ ID NO: 2588
  REGION 1..414: note = Human gut metagenome

SEQ ID NO: 14351 - protein, 420 aa, unidentified; identical to SEQ ID NO: 4992
  REGION 1..420: note = Human gut metagenome

SEQ ID NO: 14352 - protein, 420 aa, Moorena sp.
MVYVLNKQGQPLMPTKRYGKVRRMLRDGLAHVVRLVPFTIQLDYTSGKEVQEVTLGIDAGSKHIGVSATTEKHELLAMQVEERDDVVKLIADRREARRTRRNRKTRYRAARFDNRRRKEGWFAPSTENRISAHLRIIKLVFSILPVTKTNIEVAQFDSQKIKDDKITGVEYQKGEQLGFWNVREYVLARDGHVCQHCKGKSKDKILNVHHIESRKTGGDAPNNLITLCETCHKAYHRGDIQLKVRRGTSLRDAAAMSIMRWEVYNRAKQEFANVHLTYGYITKHNRINHDIEKTHCADAFCITGNVGARRLTWFLGIRMQRRHNRSLHLYKPKKGGLRQGNVASHWIGKSRLQQYDYVEWNGQKAFISGSQNGRPYLKNFDNKYIMSPKASVNAKTVKFIRRRRGSMIIEQLPKMLDYKP

SEQ ID NO: 14353 - protein, 429 aa, unidentified
  REGION 1..429: note = Human gut metagenome
MLWKFYRLIGRTSVRPISLAYRKKELFMRPVYVLDMNGKPLMPTCRFGKVRRMLKSGEVKVVDTLPFTVQLDRPTKTHVVQSVTLGCDPGRTNIGLAAVRSDGTDLYRSHCETRNKEIVDLMDARRAARRASRRGERLARKRLAAKHETATTFPNGRKLPGCKEPIMLKDIINTEARFNNRVRPAGWLTPTATQLLRTHLNLIKRISRILPVSDIALEINKFAFMQLDEPDKNKWNIDFQHGPLYGTGGLKAAVRQLQNDTCLLCQENVIEHFHHLVPRSKRGDNTINNIAGLCQKCHEAVHKSADTAEKLSTLKKGQTKHYGGTSVLNQIIPKLVEELGKTYHENLHLTYGGQMKEFRTKHKLEKTHDTDAYCIAAGTMQTVKPNIRTDVYEIKQFRRHNRANIYHQTERAYKLNGQTVTRNRRKRTD

SEQ ID NO: 14354 - protein, 334 aa, unidentified
  REGION 1..334: note = Human gut metagenome
MVYVVANDGQPLMPTERHGKVCRMLKSGMAKVVKKCPFTIQLQYESERNVQPVALGIDAGSKHVGVSATTKAKVLYESDVELRDDIVKLLATRRQLRRRRRSRKTRYRPARFDNRRRKEGWLAPSIRQKIESHLTVVANVCKILPVSQIIVETASFDIQKIKNPDIQGIEYQQGEQMDFWNIREYVLFRDGHTCQCCKGKSKDKVLNVHHIESRKTGGNAPNNLITLCETCHKGYHNGTVTLPKNIKRGMKFKDAAFMGIMRWTFYNTLKEQYEPDIPVHYTYGYITKNTRINHNLLKGHCIDARCISGNPDAVSDGTYYYQKKVRCHNRQIHK

SEQ ID NO: 14355 - protein, 376 aa, Bacillus sp.; identical to SEQ ID NO: 4597

SEQ ID NO: 14356 - protein, 416 aa, unidentified
  REGION 1..416: note = Human gut metagenome
MVYVLDKNGQPLMPTDRHRKVRLMLQSGQAKVIKRCPFTIQLTYNTGHQAQEISLGIDAGSKHIGVSATTKTRVLYEADVELRNDIVDLLSSRRELRRGRRNRKTRYRPARFDNRRREDGWLAPSIRQKIGTHLTVVENICKILPISRITVETASFDIQKIKNPDIQGAEYQQGDQLGFWNNREYVLFRDNHTCQCCKGKSKDKILNVHHIESRKTGGNAPNNLITLCEICHTGYHKGAIQLPKTVKRGMRFKDAAFMGIMRWAFYEALKQQYEPVGTPVHNTYGYITKHTRIAYNLPKEHYVDARCISGNPEASSNGEYYYQKKVRCHNRQMHKLTILKGGIRKQNQATYLVKGYRLFDKVSYQGKGYFVFGRRQSGFFDIRTLSGEKVNKGSLSCKKLKFIATRTHYLTERRAV

SEQ ID NO: 14357 - protein, 430 aa, Moorena sp.
MSNFVFVLNTNKKPLEPVPPGQARRLLKQGKAAIYRRYPFTIIAKYTVSNPKTKAHQLKIDPGSKTTGLAIVQDDKVIWGAELTHRGQQIKNDLESRRAIRRSRRNRKTRYRKPRFLNRTRQLGWLPPSLQSRVENVLTWVNRIRRYVPITGISQELVKFDTQAMPNPEISGKEYQQGELAGYEVRQYLLEKWGRKCAYCNTQNLPLEIEHIQAKSKGGSNRVSNLTLACRPCNQAKGNRDIKDFLVQKPDVLNQVLKQAKQPLKDVAAVNSTRWALFNRLKETGLPIETGTGGRTKYNRVRLGLPKTHWLDSACVGSVESLQVLIQRPLLITARGWGNRQMCTPNKHGFPTKHRTRCKTFFGFQTGDIVQATLPTGKFTGVHVGRLTVRESGVFEMRTPIGKISPVRHKYCKLIHRNDGYMYAFCTNVQ

SEQ ID NO: 14358 - protein, 545 aa, unidentified
  REGION 1..545: note = Human gut metagenome
VQFAWWLCHPKPSDNIEDVNHETALMLLQIKAGTETFGTAPCGSGPKAEGVSHERKSMNIVSVVTNTNKPLMPTSPYRARKLLSSGKAKIVKHRPFTILLVNRSDGNVQEIEYKSDTGYLHVGISVCSEKREFVREQRDLLPDEREKHNDRRKYRRTRRKRKRYRKARFDNRIGKIRKKEKNKHVWLPPSLDHKVDAQVQLFLRLYQVMPIKRAVFEMGQFDPALMKALEKGEAAPQGIDYQMGERYQIATRRAAVFTRDRYACVFCGRSIKDHAILHVHHIGFWKQDRSNRLDNLATCCEQCHTSENHRPGGILYDVEPKLKSLASATYMNVVRFELLRRLKEAAPDVEFHISYGAKTSVIRKQRSISKSHTNDAYCLGQYFPKLRAEEIGFQKIRRNDRILQKFYDAEYLDSRDGTTKKGKELTNGRISRNHKKDHKNLHQYRGKKLSKGRITIRRGRSSLKTGSLVRFDGELLTVHGTHRSRKKNKAGHIKVSVNVEFECPSKTGRKSAALSKCQIISRSYNTGWKQIQLRKEEQGRIAAVV

SEQ ID NO: 14359 - protein, 557 aa, unidentified
  REGION 1..557: note = Human gut metagenome
MIYNLVSIRERSFMKQKKQKVMVYILNKKGKPLMPTTRCGHVRKLLDSKKAVVVSSNPFTIRLKYDTPNGVQDVFAGIDSGRENIGSGASNEDGDCLYLGELKTSNKSIKMKITERAGFRKERRRRDRQNKQRKARKDHTEIQNGNADICRTTISCKSVQISYPAAEKSVTHKIIRGKEGKFANRHRDEGWITPSARQLVQMHMNDLKSMCKILPISHVTLERVAFDFQKLENENIKAWEYGKGKLYGYDSPEEYIHDVQGGKCLICGKPHIDYLHHIIPRSKGGSNKVSNLAGLCYDCHYGPMGVHNCQDTQDRLPELKNEANKQYKVSLLNSVMPVLIEEMDKFCKANSIIFSICEGHDTAKVRDIYDLQKDHCVDGFAISLVGRNIKSVDVMPDRIHQKQRYKKKSKNIIKKRNCREYYDGKKLVAVNRHKGTDQKADSLEEYMNTYAETHTADECKKHFESLTVKPARRTYTFHKEGRICPFHIGDKVRYEKKNKIKGNTKVETFICEGIRFPKDENKAKVEHNKTKSKKMKFCRVLEPGCTPYIDYRKLVLI

SEQ ID NO: 14360 - protein, 285 aa, unidentified
  REGION 1..285: note = Human gut metagenome
LRLLPITKITVETASFDMQRLKNPDISGKEYQEGEQLGFWNVREYVLFRDGHVCRHCHGRSKDPVLNVHHLESRRTGSDSPDNLITLCETCHKALHRGEITLKAKRGQSFRAQAFMGIMRREVLNRLKASYPELKVHETYGYLTKHARIANGIVKSHGADAFCIAGNLGAERLGEFFFQKQTRRNNRQIHKLSILKGGIRKRNQAPFEAKGFRLFDKVACQGEEGFIFGRRSSGSFDVRKLDGTRISAGISCKKLRLLEKRRTYLTEIRKEEALPPLPEGRGLRA

SEQ ID NO: 14361 - protein, 441 aa, unidentified
  REGION 1..441: note = Fermentation metagenome
MELRITYCKVEYFQGVDTLVYVISIDGKPLMPCKPVIARLLLKQHKAKVIKKYPFTIKLLYKTKTEYTQPLTLGIDTGSSKIGSAVVDENNNVLYLSQVEVRNDITDKMKQRAKYRRNRRNRKTRYRKARWLNRKNSIKEDRFSPTIVSKINSHLKEINFVKSILPIQNVILETATFDPHALKNPAVLHNKWLYQKGVNYGFANTRAYVLDRDNYTCQYCKGKSKDSKLEVHHIIFRSQGGSDESKNLITLCKTCHGKLHNGKINLKKNGKVKGQLKHATQMNSIRQQLLRLLPEAAETFGFITKEHRQLMKLPKEHYYDAVAIACLNNIENTGLIGVNFKTKNILFKRCIADGDFQQTKGIRSEQRIITGKIQGFRKLDKVEYQGKEYFIKGRMSTGYAILMDIEGNKINLKPIPKFEKMKRMQARKSWIISQETIQNIC

SEQ ID NO: 14362 - protein, 408 aa, Moorena sp.
MKVYVINKDGSQLMPCNPAKARKLLRDGKAKSVKRIPFTIQLEWDCEENIQEITIGIDKGSHTTGYCAIANGEILISGYINHRTDIKNKMQKRAANRRQRRARLWYRKRRFNNRSSSKRAFRLPVSIKANVEEVIRTINQLPLPIKAVVIEDVQIDIARLNETKLNGKYYQQSKRLHENLRLATLIRDNFTCQCCKAKKTSLEAHHIHYRKDGGSETINNLITVCSTCHSRIHDGTKTLKKKGVDGFKDQIAQRTMQGKIYLYSELNKKYKVTKVYGYETSAFRKEQGLPKDHDADALAVATLRTGEVIPFHKENFYTINFRATQTRRQFHDLPKKGKGRVRYQVNSSFGKFSKGDIVLVFDKFLKQINSIYSNGRLAFKRVPGEPFSSIPKNCRLLERQSSLVFSSI

SEQ ID NO: 14363 - protein, 512 aa, unidentified; identical to SEQ ID NO: 13755
  REGION 1..512: note = Human gut metagenome

SEQ ID NO: 14364 - protein, 418 aa, unidentified; identical to SEQ ID NO: 2425
  REGION 1..418: note = Human gut metagenome

SEQ ID NO: 14365 - protein, 454 aa, unidentified
  REGION 1..454: note = Human gut metagenome
MQYVYVLNKHGEPLMPCSPRKARLLLKQKKACVVKRTPFTIKLLYGSTGYKQPITLGVDAGNKHVGLSASTEKRELYREEATPRNDVVDLLSARRAFRRSRRNRKTRYRAPRFNNRVHSKHKGWLAPSVEVKIQEHITLIKRVCRILPVTLVRVETAEFDTQRLKAMLEGKPLPVGTDYQLGEMYDEYNVRQYVLKRDKYTCQCCGAHPTKTKAVKLHVHHIETRRTGGNAPNNLITLCTACHKALHAGKVTLNGKKRGKPLKDAAFMGIMRKTLMERLLKELKIPVQETYGYITKYLREKHSIPKSHTNDARCISKNPLAIPCDTCYYTKAIRHHNRQLHKATILKGGIRKANQAPYTVKGYRLWDKVSYNGSECFITGRRTSGYFALKKLDGTVISNSASYEKNCGYKKLQQIILQKEGEGAIPPMTEVTGILAQLNEYQYSLARRLYCGHL

SEQ ID NO: 14366 - protein, 442 aa, unidentified; identical to SEQ ID NO: 2834
  REGION 1..442: note = Human gut metagenome

SEQ ID NO: 14367 - protein, 413 aa, unidentified; identical to SEQ ID NO: 3476
  REGION 1..413: note = Human gut metagenome

SEQ ID NO: 14368 - protein, 448 aa, unidentified
  REGION 1..448: note = Human gut metagenome
MSTGLRAVQAEPAGIRKGDALKVFVLNMRGQPLMPCSPAKARHLLKAGKAAVRRRTPFTIQLRIATGETKQSVTLGVDAGAKHVGLSAATEKEEVFASEVELRQDITGLLAARLSLRRDRRHRKTRYRAPRFLNRVRSKHKGWLAPSVENRIQAHMSRIDAVCRLLPVTRIVIETASFDVQKIRNPEVEGTGYQQGDQLGFWNVREYVLFRDGHVCQHCHGHAKDKILNVHHLESRQTGGDAPNNLITLCETCHKACHAGKIKLKVKRAQSFRAEAFMGIMRWTLLDRVRKAHPGLPVENTYGYLTKNTRITLGLPKAHCVDAYCIAGNLKAVRRGVYLHQRQVRKHNRQIHKCTVLSKTLKDGTKIGYRKLNQTPHLVKNFRLFDKVRCLGQTGFIFGRRSSGYFDVRRLDGVKLSSGISYRKLTLLEKRSTYLTELRKEDGASSPV

SEQ ID NO: 14369 - protein, 429 aa, unidentified
  REGION 1..429: note = Human oral metagenome
MLVYVLKQNGQPFMPTERFGKVRRLLKEKKAKVVRREPFTIKLLYEPETDVVQECYCGVDTGSQHIGVAVVGNDKVLYQSQTELRSDIKKKMDRRRAYKKLRRYRKTRYRKPRFLNRRNSIKKDRLPPSVRHKVQAHIDEIEFCKKILPVSDLILEVSQFDTALMKNPNLMNEKVRHWGYQQGFNYGYSSRRSAILHRDGYTCQCCGKKNCRLEVHHVKFRSDGGTDDEENLITLCVDCHKGVHAGTVVLNKKPKKSKNLKHATHMSIIRSRLLREYPDAIETFGFVTSENRHRLNLSKDHYIDACVIASGGLEFRELDVIYRKRRVSVQDRILTKGIRGERRIPTCKIHGFKRYDKIRYLEEVCFVKGRKTKGAFVLMNINNDSIDFRDRGGVQSPSYKNIERINARRSVLCIKEKIEREVRFIPVLN

SEQ ID NO: 14370 - protein, 410 aa, Bacillus sp.; identical to SEQ ID NO: 5906

SEQ ID NO: 14371 - protein, 227 aa, Eubacterium sp.
MVYVLGKDGQPLMPTDRHGKIRRLLKSNKAKVVRKCPFTIQLLYESTTHTQEITLGVDSGSKHIGISATTKDKVLFEADVELRNDIVDNISTRRQFRRTRRNKKTRYRKARFDNRRRKDGWLAPSVQQKVDCHLTMIDKVNKILPITKIIVEVASFDIQKIKNPKISGTDYQQGEQLDFWNVREYVLFRDNHICQCCKGKSKDKVLNIHHIESRKTGGNAPNNLITL

SEQ ID NO: 14372 - protein, 427 aa, Moorena sp.; identical to SEQ ID NO: 3696

SEQ ID NO: 14373 - protein, 448 aa, unidentified; identical to SEQ ID NO: 8365
  REGION 1..448: note = Human gut metagenome

SEQ ID NO: 14374 - protein, 457 aa, unidentified; identical to SEQ ID NO: 3236
  REGION 1..457: note = Human gut metagenome

SEQ ID NO: 14375 - protein, 410 aa, Ktedonobacter sp.
MSYVFVIDQEKRPLDPVHPGRARKLLSSGKAAVYRRFPFVLILKHPVSEAHPQPLRLKIDPGSKTTGLAVLNDTSGQVLWAAELVHRGEEVHQALQKRAGVRRGRRSRHTRYRAARFSNRRRKRGWLAPSLCSRMQNVQTWTRRLMRWCPLGAISYEAVRFDTQAIQNPEIKGVAYQHGTLAGLEVKEYLLLKWRHKCVYCQKGDIPLEVEHIVPKRRGGSDRITNLTLACEACNQQKGSQTAQAFGFPHLQAQALQPLKDAAAVNSTRWALYERLKATGLPIEVSTGGQTKWNRKQRGIPKSHWLDAVCVGPSTPERVQWQHVIPLLITARGRQCRQLCNVDGWGFPRSRPKGPSKVFGFQTGDMVQAVVTRGKRMGTYVGRVAIKTDGYFKITGTHGMVEGIHGRHCP

SEQ ID NO: 14376 - protein, 442 aa, unidentified; identical to SEQ ID NO: 2903
  REGION 1..442: note = Human gut metagenome

SEQ ID NO: 14377 - protein, 456 aa, unidentified; identical to SEQ ID NO: 3505
  REGION 1..456: note = Human gut metagenome

SEQ ID NO: 14378 - protein, 512 aa, unidentified
  REGION 1..512: note = Human gut metagenome
MPTVYVLNKDGKPLMPTTRGGHVRHLLKEQKARVVRAKPFTIQLLYETDDAVQLLYLGIDPGRTNIGVAVVKANGTAVFTAHLESRNKEILKLMQDRKKARRARRTNGRRHRRQRRAKANGTISKKCVKQDTAQSKNPSKRAKEIGVIKRRLPGHKKDLLCIGIKNKEAKYTNRARPEGWLTPTANQLLQTHINLVKKIQKFLPISDVVLEVNKFAFMRLDNPDIQKWQYQQGPLYQKGSLENAVSEMQEHHCLFCDKPIDHYHHVVLQSENGSNTIANIVGLCSEHHNLVHKDAAWQKKLAEEKVGLNKKYGALSLLNQIIPALTNKLSVLFPKHFFVTTGKSTHDYRESHSVSKDHWLDAYCIACSVLPSNVCDSNINNHVPYELKQFRRHDRRALHKENMSRVYTLNGKAVATNRHKAIKQTTDSLEEFRQSHPGDVCKLKVKEHHPAYRNLNRNHPGSVFFVGEQAHVMQSIVASKDGKATRYKDTNVNKIAAGQCRFVAKNEGIVFT

SEQ ID NO: 14379 - protein, 421 aa, unidentified
  REGION 1..421: note = Ga0315279_10042333
VASGILSCNNPEMGLRKRVSGRKVIVPVLSITGSPLMPCTPAKARHLLERRKAKVVSLNPFAIKLTFECENKTQEVSLGIDSGYKYIGFSAVTKTKELVSGEVELDDKTSKRLTERKMYRGHRRNRLRYRKPRFNNRKTPEEWLPPSVQRRFDTHVNMIAKLKELTPVKKVTVEIGAFDIQKLMDSEISGKGYQQGDLYGYNNLKAFLFYREQGKCQFCGKKIDKGEKAHLHHIKLRSETGTDRPSNMALLHEDCHDKLHKKGLYKKLKAPKEYKAETFMSIMAARLKKALNCDVTYGYETAIKRNLLGIEKSHVNDAFVIAGGTNQERCLPCRVEQKRINNRTLQTNRKGFAPSIRKQRHKIQNRDFIWIGDKKYLCGGIASKGAMIYYFDGIEKKTIYYKEVNKFYSTGSLAWINYVSL

SEQ ID NO: 14380 - protein, 396 aa, unidentified; identical to SEQ ID NO: 9891
  REGION 1..396: note = Human gut metagenome

SEQ ID NO: 14381 - protein, 420 aa, unidentified; identical to SEQ ID NO: 11688
  REGION 1..420: note = Human oral metagenome

SEQ ID NO: 14382 - protein, 375 aa, unidentified
  REGION 1..375: note = Human gut metagenome
LNYDSGHQTQEISLGIDAGSKHIGVSATTKIKVLYEADVELRNDIVDLLSSRRELRRGRRNRKTRYRQAKFNNRRRGNGWLAPSIRQKIGTHLTVVENICKMLPISRIMVETASFDIQKIKNPDIQGAEYQQGDQLEFWNVREYVLFRDGHTCQCCKGKSKDKILNVHHIESRKTGGNAPNNLITLCETCHTGYHKGTVQLPKAIKRGMRFKDAAFMGIMRWAFYEALKQQYEPVGTPVHNTYGYITKHTRIAYNLPKEHYVDARCISGNPEASSNGEYYYQKKVRCHNRQIHKLTVLKGGIRKQNQATYLVKGYRLFDKVSYQGKGYFVFGRRQSGFFDIRTLSGEKVNKGSLSCKKLKFIATRTYYLTERRAV

SEQ ID NO: 14383 - protein, 453 aa, Lactobacillus sp.; identical to SEQ ID NO: 2687

SEQ ID NO: 14384 - protein, 423 aa, unidentified; identical to SEQ ID NO: 9087
  REGION 1..423: note = Firmicutes bacterium OM04-13BH

SEQ ID NO: 14385 - protein, 417 aa, unidentified
  REGION 1..417: note = Human gut metagenome
MPCSPAKARLLLKEKKAIVKRRTPFTIQLTIATGEPKQPVTLGVDSGYKHIGLSATTEKAELYASQVELRQDITDLLSARLALRRSRRSRKTRYRAPRFNNRVASKHKGWLAPSVENRIAAHLSRVEAVMRVLPVTAITVETAAFDTQLLKDPDIAGGAYQQGEQLGFWNVREYVLFRDGHVCQHCRGKSKDPVLNVHHIESRRTGGDAPNNLITLCETCHKAFHRGEIELKVKRGKSFKAETFMGIMRWTLFERLKKAHPELSVRNTYGYLTKHKRISHGIAKSHCADAYCIADNLGAKRLEGFFFQKQTRKHNRQIHKLSILKGGLRKKNQAPYEVKDFRLFDKVICKSEEAFIFGRRTSGSFDVRRLDGTRISAGISYKKLRLLEPRTTYLTEFRKEAALPPLHKCRGFRAEFL

SEQ ID NO: 14386 - protein, 465 aa, unidentified
  REGION 1..465: note = Human gut metagenome
MSTCVCVLSNNGERLMPTIRLGRVRHLLKDGKAKIIKHHPFTIQLLYDSKTNTQPIEICEDVGYNYIGISVKSESHEYVSAQYDTLQDEKEHHDDCRMHRRTRRNRFRYRKPRFDNRKRGEGWLAPSLKHKKELNVNIVKMYCAVMPITHATVEVGSFDTMLVKAIQEGKAVPEGADYQKGPRYNLATLREAVFYRDNYVCKVCGRKATEGAILHMHHMFYWKGRHGNSLDELLTVCEKCHTPANHQKSGKLYGFGEKIKFADLSGAAFMNTVRWQIVNELYVAFGKPFVTITYGAMTKEKRIALQLEKSHSNDAYAMGEFHPNRRCTFKHYEKARRNNRILEKFYDSRYIDIRTGEIATGKELFNGRINRSHKKDSENLHKYRGKRTYTGHRALLRKKVNLNPGDLVSLNGENLIVHSTHTKKNGAVNVEFETPAKSGQKSASLKKLKIVKAADSIHPAWEKVS

SEQ ID NO: 14387 - protein, 470 aa, Rhodanobacter sp.; identical to SEQ ID NO: 3168

SEQ ID NO: 14388 - protein, 424 aa, unidentified; identical to SEQ ID NO: 3434
  REGION 1..424: note = Human gut metagenome

SEQ ID NO: 14389 - protein, 442 aa, unidentified; identical to SEQ ID NO: 2903
  REGION 1..442: note = Human gut metagenome

SEQ ID NO: 14390 - protein, 421 aa, unidentified; identical to SEQ ID NO: 4235
  REGION 1..421: note = Human gut metagenome

SEQ ID NO: 14391 - protein, 375 aa, unidentified
  REGION 1..375: note = Human gut metagenome
LGVDAGSKTIGVSALTKKEELFAANVIPRNDVVDLLSTRREFRRARRNCKTRYRKPRFDNRVRSKHKGWLAPSVEVKIQEHITTIRRVYGILPVSKVVVETAEFDLQLLKAIADGKPVPQGEDYQKGEMYGHYNVRQYVLWRDDYTCQCCGAHATKKKEVRLHVHHLESRKVGGDAPDNQVTLCESCHEKLHKGLIAEKDFKKRKRKSTRDATFMGIMRKTLMQRLCSELPIPVIETRGYITKATREKLLVLPKSHTNDALAIAQGKQGFNVGYLPGILQIDKIYTIRPVRHHNRQLHKATILKGGIRKSNQTEKYVFGYRLFDKVQFNGQDCFIWGRRTTGIFTIKTINGKMIKDGISFKKLKLVEKSTSYLIA

SEQ ID NO: 14392 - protein, 446 aa, Halomonas sp.; identical to SEQ ID NO: 4517

SEQ ID NO: 14393 - protein, 515 aa, unidentified
  REGION 1..515: note = Human gut metagenome
MATVYVLNKDSKPLMPTTRCGHVRYLLKEKKARVVRANPFTIKLLYETDDVVQPLYLGIDPGRTNIGVAVAKGDGTAVFTAHLETRNKEIPKLMAKRKEYRQGRRHYRRCKRQRRAAAHGTLSKRCKKQDTAQGSNISERAQKIGVFERNLPGCEKPVLCIGIKNKEARFNNRVRPAGWLTPTANQLLLTHINFVKKICKFLPISDVVLEINKFAFMALDNPNIQKWQYQQGPLYQKGSLENAVSEQQDHHCLFCKKAIEHYHHVVPRSENGSNTIANIVGLCTKHHDSVHKDTAWQKKLAKKKTGLNKKYGALSVLNQIIPALTKELSSLFPKHFFATNGKSTYDYRAAHGVSKDHWLDAYCIACSVLPDGCFDNTVNSRIPHELRQFRRHDRQVCHQQNAKRKYYLDRKLVAINRHKATEQKTDSLEEYRNNGGATDKLVVKEHKPTSKRLNRILPGALMTANGKLNVMMASKGLHNGIPDYYVFADNSEAKPTKYTLINKNKGIVFVLNSVS

SEQ ID NO: 14394 - protein, 457 aa, unidentified
  REGION 1..457: note = Human gut metagenome
VWLYQAVYNLGEGFLPSSEERTAFYWLLIYRKEHGIMQYVYVLNKHGEPLMPCSPGKARLLLKQQKACVVKRTPFTIKLLYGSAGYKQPITLGVDAGSKHVGLSASTEKRELYREEFTPRNDVVDLLSTRRQNRRSRRNRKTRYRAPRFDNRVHSKHKGWLAPSVEVKIQEHITVIKRICRILPITLVRVETAEFDTQRLKAMLKGKLLPVGTDYQLGEMYDEYNVRQYVLKRDNYTCQCCGAHPTEKKPVRLHVHHLESRHVGGNAPNNLITLCVACHKALHEGKITLDKGKKRGKPLRDAAFMGIMRNTLLARLKDELNIPVKQTYGYITKLLREKNKIPKSHVNDARCIAKAPNAKPCDTMLYTRALRHHNRQIHKAKILNGGIRKKNQAPYLVKGFRLWDKVRYNGEECFITGRRSSGYFALKKYDGTVISNSASYKKLMLLEAATNYITERS

SEQ ID NO: 14395 - protein, 490 aa, unidentified
  REGION 1..490: note = Mouse gut metagenome
KYETPDIVQSLYLGIDTGRENIGIAVSEENGNCIYLAELETRNKSIKKKMTERREFRSERRRYKRISKQRKAIKNGTTIQNGEDAVLRSKKECKSKTVIYPGMEEGITHKIIQGAEAQFNNRKRKENWITPSGRQLIQMHMNAIKLVQKILPISHIIIERVSFDFQKLENQNIHTWQYGRGPLYGFKDYKNYINSEQNGICLLCRKNHIEYYHHIVSKSNGGSDNINNIAGLCYNCHYGNNGVHKNPKASKQLQTLKEGLKQKYKISLLNSVMPVLIEEVSEFCINNNYKFSVTDGYSTSVTRKQMNLPKTHCIDAYCISMTNKLFQCKMLPSVIYEQRRFKKKSGNIISKRNNREYYVKERDKLVLVAKNRHKATEQSFLSLEEYLSEYALTHTEYECIKQARSLLVKPCRRTYTYHKEKKVASIHPGDIVKYEKHNKKGNTKTEVFIAESIKISTNQICYETKSKNLKLCKRIMSTSVPYVSKRTLVI

SEQ ID NO: 14396 - protein, 428 aa, Moorena sp.; identical to SEQ ID NO: 4440

SEQ ID NO: 14397 - protein, 431 aa, Escherichia sp.; identical to SEQ ID NO: 3801

SEQ ID NO: 14398 - protein, 442 aa, unidentified
  REGION 1..442: note = Human gut metagenome
MVTVQQSTHHLPFGRVFIRRNLFMVYVISQDGKPLMPCSDPIARLLLKQGKAKVKKREPFTIKLTYETTNHTQGLTLGVDTGSGTIGSAVSKDNGDIVYMSEVVVRNDITDKMTQRAKYRRNRRNRKTRYRKARWLNRASSIKKDRFSPTMQSKLHSHVREIEYIQSILPVTEMVFETGQFDMQLMKNPSLANPKVRPWGYQKGANYGFENTKAMVLNRDNYTCQCCKGKHKDSKLEVHHIVFRSQGGSDEESNLLTLCHTCHKDLHSGKINPKLSGKVKGNLKYATQMNSIRKQLFRFYPNAIETFGYVTKANRLHLGVDKEHYYDACTIATQGNAFNVKSNLYKKKCVSDGDFQKTKGIRSEQPIVTDKICGFRKFDKVRYFGNDYFIKGRMSTGYAILMDIDGNKIDFSTMPRGYKTPKLSNCKRITARSTVMTQVKVV

SEQ ID NO: 14399 - protein, 423 aa, Merismopedia sp.; identical to SEQ ID NO: 3144

SEQ ID NO: 14400 - protein, 415 aa, Moorena sp.; identical to SEQ ID NO: 3370

SEQ ID NO: 14401 - protein, 442 aa, unidentified
  REGION 1..442: note = Human gut metagenome
LRDYMTPKKRKEASRMSEYIYVLGMDGDPQMPTKRKRHVEKLLQAGRARVFRQIPFTIQLTYENKPVLQPVTIAEDPGCSNIGMAVVSLSGELLSAAVVQTRNKEIVKLMEKRKQHRRASRNGERKARQRLAKKCHTMIKTGFLMRKLPMYGKDKRVRCNVIKNTEAKFCNRKREDGWLTPSAEHLVRTHINLIHKMQKFLPITDVAIEINRFAFLSLEDPSISGVDFQNGPLKGYDDLNVAIEDLQDGHCLMCNSPIEHRHHIVPRSMQGSNTIGNIAGLCCKCHERVHKDARFEDRLKKKKAGLNKRYAAVSVLNQAIPFICKRLEQEFGKEHVHYCSGRDTSMVRRSLGYHKTKEEQLHEVDAWCIAVLALQHVPEKAPEFDHVHEILQFRRQDRSRIKAQTSRAYYHEGKKIAKNRKKAEGQKDDSLQGWRKRQVERY

SEQ ID NO: 14402 - protein, 426 aa, unidentified
  REGION 1..426: note = Human gut metagenome
MVYVQDIDGKPMMPTTRYGKVRRLLKNKKAVVVNLCPFTIKLTYVTSDYKQEIVLGVDAGTKHVGLSATTKSKELYSSEVILRNDIVDLLSTRRELRRARRNRLRYRKPRFNNRIKSKRPGWIAPSVKYKIDAHIRVVENVCSILPISRIVIEVAQFDTQKIKNPNISGKEYQEGDQLGFWNTREYVLARDGHKCQYCKGKSKDKILNVHHIESRKTGGDSPSNLITLCETCHKEYHKGNIDLKIRRGKSLRDAAVMGIMKWRLYEEIKSKYDRVSMTFGYVTKYNRINHGFEKSHVSDAFVISKNFNAIRLGYYYKVRLVRRHNRQIHKQKIQKGGIKRLNQSPFEVFGFRLFDRVMFENSYYFIFGRRKTGSFDIRYIDGKNQKNVTYKKLKLSRCKRFMIQMELNKKTRTCFENERNSDRDAA

SEQ ID NO: 14403 - protein, 442 aa, unidentified
  REGION 1..442: note = Human gut metagenome
MVTVQQSTHHLPFGRVFIRRNLFMVYAISQDGKPLMPCSDPIARLLLKQGKAKVKKREPFTIKLTYETTNYTQGLTLGVDTGSGTIGTAVSKDNGDIVYMSEVVVRNDITDKMTQRAKYRRNRRNRKTRYRKARWLNRASSIKKDRFSPTMQSKLHSHVREIEYIQSILPVTEMVFETGQFDMHLMKNPSLANPKVRPWGYQKGANYGFENTKAMVLNRDNYTCQCCKGKHKDSKLEVHHIVFRSQGGSDEESNLLTLCHTCHKDLHSGKINPKLSGKVKGNLKYATQMNSIRKQLFRFYPNAIETFGYVTKVNRLHLGVAKEHYYDACTIATQGNAFNVKSNLYKKKCVSDGDFQKTKGIRSEQPIVTDKICGFRKFDKVRYFGNDYFIKGRMSTGYAILMDIDGNKIDFSTMPRGYKTPKLSNCKRITARSTVMTQVKVV

SEQ ID NO: 14404 - protein, 430 aa, unidentified
  REGION 1..430: note = Human gut metagenome
MPKVYVLNRHGRPLMPCTPAKARHLLDAGKAKVRHRTPFTIQLLYGSTGYTQEVILGVDAGSKTIGLSAATETEELFSAEVKPRNDVVELMSARRQFRRARRNRTTRYRKPRFDNRVRSKHKGWLATSVEVKIQEHMTAIRRVCVILPISRVVVETAEFDLQLLKAVAEGKPVPQGEDYQKGEMYGHYNVRQYVLWRDGYTCRVCGAHGSVKKGVPLHVHHLESRKVGGDAPDNLVTLCTACHDKLHKGIITAADLKKRKRRSTRDATFMGIMRMTLLRRLREQLPVPVVETRGYITKATREKLLVLPKSHTNDALAIAHGPQGFRAEYLPNIRQADRLYTICPVRHHNRQLHKATILKGGVRKANQAEKYICGFRLYDKVLYNGIECFVWGRRTSGSFLLRQLNGEKVKDGVSYKHLKLLERSQSYLVA

SEQ ID NO: 14405 - protein, 406 aa, unidentified; identical to SEQ ID NO: 3498
  REGION 1..406: note = Human gut metagenome

SEQ ID NO: 14406 - protein, 397 aa, unidentified
  REGION 1..397: note = Human gut metagenome
LRVFILNKRGKPLMPCSPAKARLLLKEKKAIVKRRTPFTIQLTIATGEAKQPVSLGIDAGYKHVGLSASTEKAELYASEVELRQDITDLLSARRTLRQSRRNRKTRYRAPRFDNRIRTKRKGWLAPSVENRINAHLSRIEAVLRLLPVTKITVETASFDLQLLKNPDISGKEYQEGEQLGFWNIREYVLCRDGHVCQHCYGRSKDPVLNVHHLESRRTGGDSPGNLITLCETCHKALHRGEITLKAKRGQSFRAEAFVGIMRWEVHNRLRALHPGIEVSNTYGYRTKHARIANGIAKSHCADAFCIAGNLGAERLCEFFFQKQTRRNNRQIHKLSILKGALRKRNQAPFEVKGFRLFDKVACQGEEGFIFGRRSSGFFDVRKLDGTRISAGISCKKL

SEQ ID NO: 14407 - protein, 442 aa, Sutterella sp.
MSTSVFVLDKKHRPLMPCRPARARRLLRAGRARVVKRFPFVIRLVDRTVEQSEVQPVLIKLDPGSRETGAAVVRDDEKKRHHALAFFVIKHRGGAIRDALKARSAFRRRRRSQNFRCRSPRFLNRVKPKGWLPPSLRHRVETTLSFVRRMCRYLPVSGIATELVKFDSQKPQNPEVSGVKYQQGTLFEYEVREYLLEKFGRKCVYCGAEGVPLNIDHVVPRAKGGSNRVSNLVLACVSCNQKKGARSLEDFLKGKPEVLARVRRELKTPLRDAAAVNATRWVLFNELKATGLPVETGSGALTKLNRHAFGVEKEHWLDALCVGRLNGVVTRKGLNALEIRCMGRGSRQRTRLTKYGFPRGYLMRQKCVHGFATGDMVEANVPKGKKAGLWRGRVAVRVSGSFNIQTPKGVIQGVGWKHCRLISHNDGYGYAWLGHAPHSSPA

SEQ ID NO: 14408 - protein, 427 aa, Moorena sp.; identical to SEQ ID NO: 3696

SEQ ID NO: 14409 - protein, 512 aa, unidentified; identical to SEQ ID NO: 5549
  REGION 1..512: note = Human gut metagenome

SEQ ID NO: 14410 - protein, 470 aa, unidentified; identical to SEQ ID NO: 2825
  REGION 1..470: note = Human gut metagenome

SEQ ID NO: 14411 - protein, 442 aa, Moorena sp.; identical to SEQ ID NO: 3161

SEQ ID NO: 14412 - protein, 427 aa, Enterococcus sp.; identical to SEQ ID NO: 2410

SEQ ID NO: 14413 - protein, 424 aa, unidentified
  REGION 1..424: note = Human gut metagenome
MRVFVFNMRGRPLMPCSQRKARLLLMENKAMIYKYHPFTIQLTYTTGETKQDCHIGIDTGSKYIGAAVRSEDKVFWKGEIELRQDIRSNLDTKRIYRRSRRNRKTRYRKPKFLNRKRRDEWLPPSLQSRINHTFHWIDTLSSLVPNPILHIEVGKFDVAKMINPEIHGVDYQHGQTYGFFDERYFVFARDNYTCQCCGKSKNKILNTHHIIYRSNGGTNRVDNLITVCTDCHTSQNHRKGGIFYQWQEQHKKVKQYKEPPFMNTLRKRIFGAYPDAEITYGSETTPKRKAMKLDKTHYNDAIVISGINEIKENPEEWLLIKQFRKKKRSLHEATARKGRKKPNRNQTRNSKNTPYYKGFYLNDKVSVFGKSGYITGFTSNAAYIKDENNDYITLPNKTYKQVSINKMKLECHNNNWQYIIKNAV

SEQ ID NO: 14414 - protein, 518 aa, unidentified; identical to SEQ ID NO: 13109
  REGION 1..518: note = Human gut metagenome

SEQ ID NO: 14415 - protein, 416 aa, unidentified
  REGION 1..416: note = Human gut metagenome
RKKARRARRTNGRRCRRQRRAKANGTISKKCVKQTTAQNGSVSKRAKDIGVIKRRLPGCEKDVLCIGIKNKETKFTNRTRPEGWLTPTANQLLQTHINLVKKIQKFLPISDVVLEVNKFAFMRLDNPNIQKWQYQQGPLYKKESLESAVSEIQEHHCLFCKKPIDHYHHVVPQHKNGINSIGNIVGLCAKHHDLVHKDSAWEKKLAKKSTGLYKKYGALGVLNQIIPTLTNELSSLFPKHSFVTNGKSTYDYRAAHGVSKDHWLDAYCIACSVLPSNVCDSNINNHMPYELKQFRRHDRRVLNNENMNRVYTLNNKAVAINRHKAKDQKTVSLEEFRKEHPDDVCKLKVKEHHPTYRNMNRNFPGSVFLVGKQIHVMQGIASSKDGKATKYNDTSATAIAAGKCKFVAKNTGILFV

SEQ ID NO: 14416 - protein, 442 aa, unidentified; identical to SEQ ID NO: 4418
  REGION 1..442: note = Human gut metagenome

SEQ ID NO: 14417 - protein, 463 aa, Moorena sp.
MAVFVLDRSGRPLMPCTEKRARLLLARGRARVHKVMPFTIRVVDRLAEDNEFQALRVKLDPGSKTTGMALVRETAENGVAVINLFELMHRGIQISEALTARRGHRSLRRSRLRYRPARRLNRGNKKSGWLAPSLQHRVDTTLAWVNRIQRYAPVSAISTELVRFDMQALENPEIEGAQYQQGTLAGYEVREYLLEKWHRTCAYCGAKNVPLQIEHIHPKSKSGSDRISNLTLACQCCNAKKAALPVEVFLAKQPERLKRIQAQAKRPLKDAAAVNATRWALINALKTTGLVVETASGGRTKFNRIELGIPKTHALDAACVGPMNSMTGWRKPTLCIKAMGRGSYQRTRLDKFGCVRGYLTRSKNIQGFQTGDRVKAIVTKGKKAGCHIGRVAVRASGSFNIQTSNGLVQGVSHRYCTVVQRGDGYGYQLVAKTEATGTQPKQGDALHPALYLPGLKAGISRAN

SEQ ID NO: 14418 - protein, 532 aa, Acidithiobacillus sp.; identical to SEQ ID NO: 4458

SEQ ID NO: 14419 - protein, 518 aa, Anaerostipes sp.; identical to SEQ ID NO: 4915

SEQ ID NO: 14420 - protein, 410 aa, unidentified
  REGION 1..410: note = Human gut metagenome
MFVYMVYVQDINGKPMMPTTRYGKVRRLLKDKKAVVVNLCPFTIKLTYVTSDYKQEIVLGVDAGAKHVGLSATTKSKELYSSEVILRNDIVDLLSTRRELRRTRRNRLRYRKPRFDNRIKSKRPGWVAPSVKYKIDAHIRVVENVCSILPISRIVIEVAQFDTQKIKNPNISGKEYQEGDQLGFWNTREYVLARDGHKCQYCKGKSKDAILNVHHIESRKTGGDSPSNLITLCETCHKEYHKGNIDLKIKRGSSLRDAAVMGIMKWKLYEELRSRYDRVFMTFGYITKHNRIKYGIEKSHTSDAFVISMNINAKRIERQYLKRLIRRHNRQMHKMKILKGGKKKNNQAPFEVFGFRLFDKVLYNNKIFFVYGRRKSGSFNIRDFNGENSKDVSRKKFKLIRGKRHPIILK

SEQ ID NO: 14421 - protein, 331 aa, unidentified
  REGION 1..331: note = Human gut metagenome
VKYRRNRRNRKIRYRKARWLNRANSIKNDRFSPTMQSKLHSHVKEIEYIKSILPITEMVFETGQFDTHFMKNPSLANPKVKHWGYQKGTNYGFENTKAMVLNRDSYTCQCCKGKHKDSKLEVHHIVFRSQGGSDEESNLITLCHTCHKDLHSGKINPKLSGKVKGNLKYATQMNSIRKQLFRLYPNAIETFGYVTKANRLHLGVNKEHYYDACTIATQGNAFNVKSNLYKKKCVSDGDFQKTKGVCSEQPIVTDKICGFRKFDKVRYFGNDYFIKGRMSTGYAILMDIDGDKVDFSAMPKGYKTPKMVNLKRLEARSTWMITTVEVTPNIA

SEQ ID NO: 14422 - protein, 406 aa, unidentified
  REGION 1..406: note = Human gut metagenome
MVYVQDIDGKPMMPTTRHGKVRRLLKANKATVVNLCPFTIQLTYKSTDHKQPVTLGIDAGAKHIGFSATTEKEELFACETTLRTDIVDLLSMRLQNRRTRRSRLRYRKSRFNNRGSSKKKGWVAPSVKQRIDSHLNEVNEIHKILPITKIVIEVAQFDTQKMKNHDISGADYQNGEQLGFWNVREYVLFRDGHKCSHCKGKSKDPVLNVHHLESRKTGGDSPSNLITLCESCHKAFHKGEIELKKKRGKSLRDAAVMGIMKWKLYEELKSRYDNVSMTFGYITKHNRIKYGIEKNHTSDAFVISRNFNAKRIEYQYLKRLVRRHNRQIHKMKILKGGKKKNNQAPFEVFGFRLFDKVLYNNEICFIYGRRKSGNFNIRDFNGENPKDVSHKKFKLIRGKRHPIILK

SEQ ID NO: 14423 - protein, 427 aa, Anabaena sp.
MSKVFVLDTNFTPLNPIHSAQARQLLRSKKAAIFRQFPFTIILKKSRPDSPISSLRLKIDPGAKFTGMALVNDLTGEVVFAAELKHRGFAIRDALTSRRQLRRSRRARKTRYRQPRFLNRTRPEGWLAPSLQSRVENIKTWVKKLLNFAPIQAISQELVRFDMQLMANPDIQGQEYQQGTLAGYETREYLLEKWGRQCAYCGAKDVPFQVEHIHPRAKGGSNSITNLTLSCEKCNTKKGTKDIKDFLKKDFSKLEKILKQAKRPLADAAAVNTTRTALLKVLKATGLPVETGSGGLTKFNRSEQNLEKTHWIDAACVGQSTPILNIKGVKLLLITANGHGSRQSCRTDKYGFPNRHVPREKIHFGFQTGDIAKAVVTTGKKIGICVGKVAIRSTGSFNISTKNGLIQGISHKFCKRIHAKDGYSYAV

SEQ ID NO: 14424 - protein, 535 aa, unidentified; identical to SEQ ID NO: 6116
  REGION 1..535: note = Human gut metagenome

SEQ ID NO: 14425 - protein, 494 aa, unidentified
  REGION 1..494: note = Human gut metagenome
MAMVYVQNKDGKPLMPTTRYCYVRLLLKEKKARVVCTTPFTIQLNYDTPDITQDLILGIDPGRTNIGVAVVKEDGQCVFSAHLETRNKDIPLLMKKRAGFRRQHRTLDRRRKRQRRARAAGTTIAEGSVERLLPGYEKPVVCHYIRNKAARFNNRSRPAGWLTPTANHLLQTHINLIAKVAKFLPITKVVVELNRFAFMAMDNPNIHRWEYQQGPLYGLGSVEDAVYAQQDGHCLFCKKPIDHYHHVIPRHKGGSETLANRCGLCAKHHDLVHKDKAWADKLVTRKEGMNKKYHALSVLNQIIPFLMEYLGSETLYDVYAIDGRSIKGFRIAKNVPKEHYTDAYCIACSILDTDNKVSAPVEPFELKQFRRHDRQSCIRQMVDRKYLLDGKVVATNRHKAIEQKSDSLEEFREAYGDAAVSQLTVRPHSPQYKDMARIMPGAVMDFDGIVGVFKGSSGRNNGTPNYYNSTKGARVLTKRCALLAKNAGMVFIPA

SEQ ID NO: 14426 - protein, 431 aa, Petrotoga sp.; identical to SEQ ID NO: 11274

SEQ ID NO: 14427 - protein, 442 aa, unidentified; identical to SEQ ID NO: 2903
  REGION 1..442: note = Human gut metagenome

SEQ ID NO: 14428 - protein, 549 aa, Streptomyces sp.
MTTFPAGEQTHQAVLPQQPALESVGADTPGSRDETAHGHPASARGTGREHGRGETDGRGATTRRRHAKDAAMAAEAAENGSGDAPPHKPNYTGGAGANRVFVLSKDGKPLMPCHPARARELLNKGRAVIARQMPFAIRLKDRTHAESEVDGLQLRIDPGSKGTGLSLTDVKKETDQQGTVVTVRRGLVAVELRHRGDQIHKAMQQRAGYRHRRRSANLRYRAARFHNRSHRAGWLPPSLRHRVDTAFSQAARLCRYAPVTEIHLEHAAFDTHAISAGRPLTASEYQQGTLAGTETRAYLHTQWNSACAYCGTSGVPLNIDHVRPRSRGGSNRISNLVLACVPCNQTKGNTSVEAFLAHRPERLAKILKQVSPPLQDAAAMNATRWQLAEVLSDLGRPVHTWSGGRTKGNRDAMGLEKTHTLDALSVGQLEHESGDAIVRFPSQVLVVKATGRGSYARTTPDRFGFPRLRRARVKRHFGYVTGDLVRANVPSGKWVGTWTGRIAVRARGQHILTTPAGRINVRHQHLQLLQRADGYGYSSRPEPASRKMG

SEQ ID NO: 14429 - protein, 451 aa, Blautia sp.; identical to SEQ ID NO: 7022

SEQ ID NO: 14430 - protein, 533 aa, unidentified
  REGION 1..533: note = Human gut metagenome
MSTVYVLNKDGKPLMPTTRGGHVRHLLKEQKARVVQSNPFTIQLLYETNDAVQPLYLGIDPGRTNIGVAVVKADGTAVFTAHLKSRNKEIPKLMQDRKRARRARRTNGRRHRRQRRAKANGTISKKCVKQTTTQNGSVSKRAKEIGIIKRHLPGCEKDVLCIGIKNKETKYTNRERPEGWLTPTANQLLQTHVNLVKKVQKLLPISDVVLEVNKFAFMRLDNPDIQKWQYQQGPLYKKESLESAVSEMQEHHCLFCKKPIDHYHHVVPKSENGSNTIANIVGLCAEHHNLVHKDVAWQEKLAEEKTGLNKKYGALSVLNQIIPALTNKLSVLFPKHFFVTAGKSTHDYRAAHGVSKDHWLDAYCIACSVLPSNVCDSNINNHVPYELKQFRRHDRRVLHKANMSRVYTLNGKAVATNRHKAIKQTTDSLEEFRQNYPDDVYKLKVKEHHPAYRNLNRNYPGSVFLVGKQAHVMQGIASSKDGKTTKYNDTNATTITAGKCKFVAKNSGILFVQCKFRKTLSDGTTKKLQYPVR

SEQ ID NO: 14431 - protein, 418 aa, unidentified; identical to SEQ ID NO: 4327
  REGION 1..418: note = Human gut metagenome

SEQ ID NO: 14432 - protein, 424 aa, unidentified
  REGION 1..424: note = Human gut metagenome
MRVFVFNMRGRPLMPCSQRKARLLLRENKAMIYKYHPFTIQLTYTTGETKQDCHIGIDTGSKYIGAAVRSEDKVFWKGEIELRQDIRSNLDTKRIYRRSRRNRKTRYRKPKFLNRKRRDEWLPPSLQSRINRAFNWIDTLSSLVPNPILHIEVGKFDVAKMINPEIHGVDYQHGQTYGFFDERYFVFARDNYTCQCCGKSKNKILNTHHIIYRSNGGTNRVDNLITVCTDCHTSQNHRKGGIFYQWQEQHKKVKQYKEPPFMNTLRKRIFVAYPDAEITYGSETTPKRKAMKLDKTHYNDAIVISGINEIKENPEEWLLIKQFRKKKRSLHEATARKGRKKPNRNQTRNSKNTPYYKGFYLNDKVSVFGKSGYITGFTSNAAYIKDENNDYITLPNKTYKQVSINKMKLECHNNNWQYIIKNAV

SEQ ID NO: 14433 - protein, 412 aa, Moorena sp.
MVYVLSKTGQPLMPTENHAKVRILLKQGKAKVVHSCPFTIQLLYSSTNYTQKVTLGVDSGSKHIGLSATTKDKVLFESDVELRNDIVDLLSTRRELRRSRRGRKLRYRKPRFNNRRRSDRWLAPSVKQKVDSHITMIAKVHKILPISNIVVEVASFDIQKIKNPTICGVDYQQGEQLDFWNVREYVLFRDGHTCQCCKGKSKDKILNVHHIESRKTGGDAPNNLITLCETCHTGYHKGTVKLPKTIHRGMSFKDATFMGIMRWALYEKLKAIYSDVKLTYGYITKNTRIKNSLPKDHYIDARCISGNPNAVSNGDVYYYKKVRCHNRQIHKNTILKGGYRKRNQAPYEVMGFRLFDKVQWKGCKCFIFGRRSTGRMDLRLLDGKHINASVGYKNLKLLKMCSSYLIEQRKVG

SEQ ID NO: 14434 - protein, 447 aa, Allochromatium sp.; identical to SEQ ID NO: 7851

SEQ ID NO: 14435 - protein, 406 aa, unidentified; identical to SEQ ID NO: 6445
  REGION 1..406: note = gut metagenome

SEQ ID NO: 14436 - protein, 442 aa, unidentified; identical to SEQ ID NO: 3218
  REGION 1..442: note = Human gut metagenome

SEQ ID NO: 14437 - protein, 419 aa, unidentified; identical to SEQ ID NO: 10184
  REGION 1..419: note = Human gut metagenome

SEQ ID NO: 14438 - protein, 408 aa, unidentified; identical to SEQ ID NO: 8232
  REGION 1..408: note = Human gut metagenome

SEQ ID NO: 14439 - protein, 426 aa, unidentified
  REGION 1..426: note = Human metagenome
MVFVLDKSKKPLNMISHAKARILLKNRLAVVHKIYPFTIRLKDNSCVGNDKTYTVKFDPGSKHTGVAITDNKDSVVMLAEIEHRGHLIKKDLTSRRMIRRHRRNRKTRYREARFQNRTKPEDWLAPSVKSRANNVINFIKKYKKILNINKVLIERVSFDVAQMTSDTKLWGVAYQQGPLYQTKLKSYLFKKCNGRCVYCGNKAEEIEHIVPKSKGGTDSPYNLVIACKKCNKLKGKSSLKEFGELMNKDYSHLEPKKLPRDASIVQAARNYMVKEITKLVSDTTLHDAWFTKYNRDELGLPKEHYYDALSVGEVPSKFNFLTDKILLISAKGRGSRQMCRVDKYGFPRTSPKGSKSVKGFQTGDMVKAIVPKGLKQGEYLGKVAVRSSGKFDIQTKTKTIEGINHKYCHLIQRGDGYLYSYKEREF

SEQ ID NO: 14440 - protein, 423 aa, Moorena sp.; identical to SEQ ID NO: 6814

SEQ ID NO: 14441 - protein, 518 aa, Moorena sp.; identical to SEQ ID NO: 7410

SEQ ID NO: 14442 - protein, 465 aa, unidentified; identical to SEQ ID NO: 10382
  REGION 1..465: note = Human gut metagenome

SEQ ID NO: 14443 - protein, 465 aa, unidentified; identical to SEQ ID NO: 6840
  REGION 1..465: note = Human gut metagenome

SEQ ID NO: 14444 - protein, 414 aa, unidentified
  REGION 1..414: note = Human gut metagenome
MPCSPAKARLLLKEKKAIVKRRTPFTIQLTIATGETKQPVGLGVDAGYKHVGLSASTDKAELYASQVELRQDITDLLSARRALRRARRNRKTRYRAPRFNNRIRTKRKGWLAPSVENRINAHLSRIEAVLRLLPVTKITVETASFDMQRLKNPDISGKEYQEGEQLGFWNVREYVLFRDGHVCRHCHGRSKDPVLNVHHLESRRTGSDSPDNLITLCETCHEALHRGEIALKTKRGHSFRAEAFMGMMRREVLNRLKASHSELEVNNTYGYRTKHARIVNGIDKSHCADAFCIAGNLGAERLCEFFFQKQTRRNNRQIHKLSILKGGIRKRNQAPFEIKGFRLFDKVACQGEEGFIFGRRSSGYFDVRKLDGTRISAGISYKKLRLLEKRRTYLTEIRKEEALPPLPEGRGLRA

SEQ ID NO: 14445 - protein, 296 aa, unidentified
  REGION 1..296: note = Human gut metagenome
LSRIEAVLRLLPVTKITVETASFDLQLLKNPDISGKEYQEGEQLGFWNIREYVLCRDGHVCQHCYGRSKDPVLNVHHLESRRTGGDSPGNLITLCETCHKALHRGEITLKAKRGQSFRAEAFMGIMRWEVHNRLRALHPGIEVSNTYGYRTKHARIANGIAKSHCADAFCIAGNLGAERLCEFFFQKQTRRNNRQIHKLSILKGGIRKRNQAPFEVKGFRLFDKVACQGEEGFIFGRRSSGFFDVRKLDGTRISAGISCKKLHLLEKRRTYLTEIRKEEALPPLPEGRGSAPKCDE

SEQ ID NO: 14446 - protein, 477 aa, unidentified; identical to SEQ ID NO: 5307
  REGION 1..477: note = Human gut metagenome

SEQ ID NO: 14447 - protein, 390 aa, Scytonema sp.; identical to SEQ ID NO: 14035

SEQ ID NO: 14448 - protein, 426 aa, unidentified
  REGION 1..426: note = Human gut metagenome
MVYVQDINGKPLMPTTRHGKVRRLLKDKKAVVVNLCPFTIKLMYVTSDYKQEIVLGVDAGTKHVGLSATTKSKELYSSEVILRNDIVDLLSTRRELRRARRNRLRYRKPRFNNRIKSKRPGWIAPSVKYKIDAHIRVVENVCSILPISRIVIEVAQFDTQKIKNPNISGKEYQEGDQLGFWNTREYVLARDGHKCQYCKGKSKDKILNVHHIESRKTGGDSPSNLITLCETCHKEYHKGNIDLKIKRGKSLRDAAVMGIMKWRLYEEIKSKYDRVSMTFGYVTKYNRINHGFEKSHVSDAFVISKNFNAIRLGYYYKVRLVRRHNRQIHKQKIQKGGIKRLNQSPFEVFGFRLFDRVMFENSYYFIFGRRKTGSFDIRYIDGKNQKNVTYKKLKLSRCKRFMIQMELNKKTRTCFENERNSDRDAA

SEQ ID NO: 14449 - protein, 423 aa, Moorena sp.; identical to SEQ ID NO: 7848

SEQ ID NO: 14450 - protein, 420 aa, unidentified
  REGION 1..420: note = Human gut metagenome
MQYVYVLNKHGKPLMPCSPGKARLLLKQQKAHVVKRTPFTIKLLYGSTGYKQPITLGVDAGNKHVGLSASTEKRELYCEEFTPRNDVVDLLSTRKQNRRSRRNRKTRYRAPRFDNRVHSKHKGWLAPSVEVKIQEHITVIKRICRILPVALVRVETAEFDTQRLKAMLEGKPLPVGTDYQLGEMYDEYNVRQYVLKRDHYTCQCCEAHTTTKKTVKLHVHHLESRKVGSNAPSNLITLCTTCHDALHKGKVSLDGKERGKPLRDAAFMGIMRKALMARLREELPIPVQGTYGYITKMRREQNDIKKSHVNDARCISKHPLAEPCSVCYRTKAIRHHNRQTHKANFSKGGIRKRSQMPYVVEGYRLWDKVLYKGQECFVSGRRASGSFTLKKLDGTRISKGVTFKKLRLLEPATNYLIERM

SEQ ID NO: 14451 - protein, 442 aa, unidentified; identical to SEQ ID NO: 6809
  REGION 1..442: note = Human gut metagenome

SEQ ID NO: 14452 - protein, 396 aa, unidentified; identical to SEQ ID NO: 4508
  REGION 1..396: note = Human gut metagenome

SEQ ID NO: 14453 - protein, 399 aa, unidentified
  REGION 1..399: note = Human gut metagenome
LRVFVLNKRGQPLMPCSPAKARLLLKEKKAIVKRRTPFTIQLTIATGEAKQPITLGVDSGYKHIGLSATTEKAELYASQVELRQDITDLLSARLALRRSRRSRKTRYRAPRFNNRVASKRKGWLAPSVENRITAHMSRVEAVMRVLPVTAITVETAAFDTQLLKNPDIAGEAYQQGEQLGFWNVREYVLFRDGHVCQHCRGKYKDPILNVHHIESRRTGGDAPNNLITLCETCHKAFHRGEIKLKVKRGKSFKAATFMGIMRWTLFERLKKAHPELSVRNTYGYLTKHKRISHGIAKSHCADAYCIADNLGAKRLEGFFFQKQTRKHNRQIHKLSILKGGLRKKNQAPYEVKGFRLFDKVICKGKEAFIFGRRTSGSFDVRRLDGTRISAGISYKKLRL

SEQ ID NO: 14454 - protein, 474 aa, unidentified
  REGION 1..474: note = Ga0307928_10008592
MLVFVTDARNNIGHPTRRSGWINKKLKNGSAKKLKRYKNLIQVQLLDRIFSKEETIDCEFRIGIDPGYKHIGFCIYKIFNRKIVKLFSGELTTRTEEIKRLLQERKMYRRNRRRNRRKNVIRKYGTCKFRSPRWKNRRDKLDWNPTLNHLISTHCNLLNKFINLVGLEQTKIHIEYCTFDVHKIINPKVHSFWYQLGPKYKYQNTKMYVKKRDEYKCQRCGSRDIVNLTVHHIIQQIDGGTDRPDNLITVCRDCHDYIHKHNIKIKHTQKVFRDVGVLNSCMKKIFETLENVVPTQHTYGYITEVMRKEQGLEKTHSIDASIIALCDARGYQEEFSDYEYEYLENELEFVQKRRHVRNHVKRIEDRKYYVSGSKKFIAKNRRKRQTQKEDSLEDFRKKNLQVQVTVKPGVRRSRISNMKVLFKPGDKIWYNNDISTCYGWASTQGKVGLIEYDQYVPKRFCQVIARNSGIVCTN

SEQ ID NO: 14455 - protein, 396 aa, unidentified; identical to SEQ ID NO: 4508
  REGION 1..396: note = Human gut metagenome

SEQ ID NO: 14456 - protein, 396 aa, Geobacillus sp.; identical to SEQ ID NO: 11619

SEQ ID NO: 14457 - protein, 413 aa, unidentified; identical to SEQ ID NO: 3695
  REGION 1..413: note = Human gut metagenome

SEQ ID NO: 14458 - protein, 442 aa, unidentified; identical to SEQ ID NO: 2834
  REGION 1..442: note = Human gut metagenome

SEQ ID NO: 14459 - protein, 424 aa, unidentified; identical to SEQ ID NO: 2862
  REGION 1..424: note = Human gut metagenome

SEQ ID NO: 14460 - protein, 452 aa, unidentified
  REGION 1..452: note = Ga0315273_10116256
MQKLQVEFKNVPRNTSLVPCSTNPVLNREETLSVQDKVLACNNPEVNQSQHTERLKVKVYVIAKEGHPLMPCSCAKAKKLLKEGKAKVIKRDPFTIQLNWVCENQVQETILGIDTGYGNIGFSATTKKEELVSGMVKLDGKTKERLDEKRMYRRGRRNKLWYREPRWLNRKRKEDWLPPSIERRYQTHLNLIKKIKNLLPVSRVIIETAKFDIQKLENPDVKGKKYQQGDLYEYQNVRSYLMSREKGLCEYCKKDFKNSSGHIHHRKPKSKNGSNRLGNLMLLHKECHKKIHKKPELLKKYKNLSIKEYKQSTFMSIINKRFFNDIKDLEVTYGNITFVNRNKLGLTKTHCNDAFIISKGTNQVRTKHIEIIQKHRNNRVLQVNRKGFKPSIKRNRSIIAPLDLFWVGKIKYSCKTMFGYGRYIAYGDMKKKEYFNINKIKKYFNNGSLVWN

SEQ ID NO: 14461 - protein, 420 aa, unidentified; identical to SEQ ID NO: 3288
  REGION 1..420: note = Human gut metagenome

SEQ ID NO: 14462 - protein, 435 aa, Desulfovibrio sp.; identical to SEQ ID NO: 9014

SEQ ID NO: 14463 - protein, 536 aa, unidentified
  REGION 1..536: note = Human gut metagenome
VLRPRYQYPTRWYPSREQGSGNGCLSGEENTDLKQEVSGTLSKGDHSHPGEQDFCVPAITIQGGPAMSVFVVGLNGCRLMPTSERKARLLLKHGKASVYRKVPFTIKLNYKTGSTTQSGYLGIDTGSQHIGVSVVREDGAVLHKEEIGLRDSMSKRKLMQSRASSRRGRRHRKTRYRHPKWRPKAKRVYCKTPDRKGRHWKKRKITFASKRPKGWLPPSLQSKTDHHIRWIKKLQDLLPEGYRLSIELGRFDPARLKDPEIHGKLYQKGPQYDYENVRAYVLNRDRYTCQVCGKKGGKLHVHHILYRSYGATDDPQYMATVCSDCHNTENHHQGGILYQWMQKQKKFTRGLRDATFMNILRKRLIEAFPGATFTYGNITKADRERLRLPKSHGNDATAIAIVKTGIMTVKDKEPVIYIQQVRRKKRSLHEETPRKGRKEPNRKASRYDKNTKAVTVTKRKNKKKISITGCLFDRVELNGKKGWISGFTDKSCYVKDENDQYIRTSPKYKQVSLSKLKILHHCGNWAIGARRSLGKG

SEQ ID NO: 14464 - protein, 428 aa, unidentified
  REGION 1..428: note = Human gut metagenome
LKVFVLNMRGQPLMPCSPAKARHLLKAGKAVVKRRTPFTIQLRIATGETKQNVTLGVDAGAKHVGLSATTEKEEVFASEVELRQDITGLLAARLSLRRDRRHRKTRYRAPRFLNRVRSKHKGWLAPSVENRIQAHMSRIDAICGLLPVTKIVIETASFDIQKIKHPDVEGTDYQQGDQLGFWNVREYVLFRDGHVCQHCHGHAKDKILNVHHLESRQTGGDAPNNLITLCETCHKACHAGKIKLKVKRGQSFRAEAFMGIMRWTLLDRVRKAHPGLPVENTYGYLTKNTRITLGLPKAHCVDAYCIAGNLKAVRRGVHLYQRQVRKHNRQIHKCTVLSKTLKDGTKIGYRKLNQTPHLVKNFRLFDKVRCLGQTGFIFGRRSSGYFDVRRLDGVKISSCISYRKLTLLEKRSTCLTELRKEDGASSPV

SEQ ID NO: 14465 - protein, 440 aa, Clostridium sp.; identical to SEQ ID NO: 10846

SEQ ID NO: 14466 - protein, 509 aa, unidentified; identical to SEQ ID NO: 5057
  REGION 1..509: note = Human gut metagenome

SEQ ID NO: 14467 - protein, 423 aa, unidentified
  REGION 1..423: note = metagenome
MVYVLNIDGQPLMPTDKHGKVRHLLKDGRAEVVKRCPFTIRLLYDSTHYTQDIVLGVDAGSKHIGLSATTETKELYASDVELRNDIVDLISTRRQNRRSRRNRKIRYRKARFQNRVSGKKNWLAPSIRQKVDTHMTVVSRVCMILPVTKIIVETASFDIQKIKDPDISGTGYQQGEQLDFWNVREYVLSRDGHTCQCCKGKSKDPVLNVHHIESRKTGGDAPNNLITLCETCHKGYHSGAVQLPKAIHRGMRFKDATFMGVMRWNFYNKLKEIYELQGIEIRMTFGYLTKNTRIRHYLPKEHYIDARCISGHPEAIPSNEVFYQKKVRCHNRQIHKNTILKGGIRKRNQAGYLVKGFRLFDKVAYKGREYFIFGRRQSGFFDLRNLSGCKVNKGSLSYRKIRFLEPRQYYLCERRVMDTQGCA

SEQ ID NO: 14468 - protein, 464 aa, unidentified; identical to SEQ ID NO: 3455
  REGION 1..464: note = Human gut metagenome

SEQ ID NO: 14469 - protein, 414 aa, unidentified; identical to SEQ ID NO: 2588
  REGION 1..414: note = Human gut metagenome

SEQ ID NO: 14470 - protein, 485 aa, unidentified
  REGION 1..485: note = Candidatus Brocadiae bacterium
MIVYVISKEKKPLMPTKRFGKVRRLLKEGKAKVVSTKPFTIQLLYETKGYTQTLYMGIDPGTKNIGISVRKETGEVVYLGEVETRSQEVTEKMKERSTARKARRRHQREKRKRRAKKAKKIFERKSFKIKGRKEPLVCKGIKPKLVKFQNRKRKKGWLTPTARHLLESHQAIVEKIKKILPIKKVSVEYGQFDIQKLENPEIQGKEYQNGRMKGYRNASEYVLSRDKHTCQLCEKRQGKLEVHHVVWKQEGGQDVPENLVTLCEKCHAQVHKNQKMKAKLAEIFTGMEKKYTPATLLNTIMPFFYQWLQSQFKEVNITYGYETKEKRLSQQLSKSHTLDAYLISLEEEIIHPEFYNFVPYRFQQFRRHNRQLIYALRDRNYKLGKDIVAKNRNKKTGQTKESLHEFILDKGASCLSSLKVYPGTKVHRSKFDKFRRGDTVYYQKKRYVVKGYGEMGRSLGFVGEKKYVLAKECKLIAKNTGLVCL

SEQ ID NO: 14471 - protein, 512 aa, unidentified; identical to SEQ ID NO: 3741
  REGION 1..512: note = Human gut metagenome

SEQ ID NO: 14472 - protein, 434 aa, Marinobacter sp.; identical to SEQ ID NO: 13211

SEQ ID NO: 14473 - protein, 377 aa, Anoxybacillus sp.
IKATYRLKIDYGSRHTGLAILRGQEVVWLGQLDHRTDIKERIDKRRAFRRARRNRKTRYRKPRFLNRKRKEGWLPSSLESRVQNIQTWVNRLKKLCPIGYISYENAKFDTQLMRNPEINGVEYQQGTLQGYEVREYLLEKFGRKCCYCGKENVPLEVEHIIPKSRGGTDRVDNLCLACHDCNQRKGSKTAEEFGYPHIQKQVKESLKDTSAINSTRWKVYEVLKQTGLDVECGTGARTKMNRIRLDLPKTHYFDACCVGESTTNHLYFKTKEVLFIKAKGRGSRSRTNLDRYGFPRGYLARQKFFFGFQTGDMVKAVVPRGKYQGVWFGEVACRKTGSFDIKGKDGKRIAQGINYRYVQVIQRFDGYAYGKGVAELA

SEQ ID NO: 14474 - protein, 456 aa, unidentified
  REGION 1..456: note = Human gut metagenome
MSTCVCVLSNSGERLMPTFRLGKVRHLLKDGKAKIVKHHPFTIQLLYDSKTNTQPIEICEDVGYNYIGISVKSQSHEYVSAQYDTLQDEKACHDSCRKYRRTRRNRLRYRKPRFDNRKRSEGWLAPSLRHKKELNVNVVKMYCAVMPITHATVEVGSFDTMLVKAIQEGKAIPEGADYQKGPRYNLATLREAVFYRDNYVCKVCGRKATEGAILHVHHMFYWKGRHGNSLSELITVCEKCHTPANHQKSGKLYGFGENVKFADLSGAAFMNTVRWQIVNELYAAFGKDFVTVTYGAMTKEKRIALHLEKSHNNDAYAMGNCHPAHRCEFGHYQKRCRNNRVLEKFYDATYIDTRTGNKAKGKELFNGRISRNHKKDSEDLHKYRSKKVSKGRRSIRRQRYAIQPYDTVRLESKSYITSGCHNKGTRLLIPANGKSKSVAISKVQVVCHAGAWIQII

SEQ ID NO: 14475 - protein, 408 aa, unidentified; identical to SEQ ID NO: 8232
  REGION 1..408: note = Human gut metagenome

SEQ ID NO: 14476 - protein, 382 aa, Moorena sp.
MVYVLSKTGQPLMPTENHAKVRILLKQGKAKVVNRCPFTIQLLYSSTNYTQKVTLGVDSGSKHIGLSATTKDKGLFESDVELRNDIVDLLSTRRELRRSRRNRKLRHRKPRFNNRRRNDGWLAPSVKQKVDSHITMIAKVHKILPISNIVVEVASFDIQKIKDPTISGMDYQQGEQLGFWNVREYVLFRDGHKCQCCKGKSKDKILNVHHIESRKTGGDAPNNLITLCETCHTGYHKGTVKLPKTIHRGMSFKDATFVGIMRWALFEKLKAIYSDVKLTYGYITKNTRIKNGLPKDHYIDARCISGNPNAVSNGNVYYYKKVRCHNRQIHKTNFIKGGYRKRNQAPYGPVERSEVLYFWPQGNRAHGFEAFRWNTCQCLCRI

SEQ ID NO: 14477 - protein, 431 aa, unidentified
  REGION 1..431: note = Human gut metagenome
MPDKVYVISRLGHPLMPCSPAKARHLLDDKKAKVVKRMPFTIRLLYGSTKYIQPIILGVDAGSKTIGLSASTAKEEVFAAEVMPRNDVVENLSTRREFRRARRNRTTRYRKPRSDNRVRSNHERWLAPSVKVKIQEHITSIKRVCTILPISKVVIETAEFDLQLLKAIQEGKPIPEGEDYQKGEMYGSYNVCQYVLWRDNYTCICCGVRGTPKNPVRLYVHHFESCKYGGNAPDNHGTLCDDCHKKFHLGIITDVKLKTRRRQSTRDAAFMGIMRKTLMWRLRTELFIPVAETKGYITKATREKLLVLPKSHTRDALAIAQGRHGFGIKEYAYVEPANHIYTVRPVRHHNRQLHKASILKGGIRKRNQASKYVFGFRLYDKVLYQGKACFVWGRRTSGTFLLRTIDGIKVKDGVSYRNLTLLERSSNYLIA

SEQ ID NO: 14478 - protein, 353 aa, unidentified
  REGION 1..353: note = Human gut metagenome
LRVLVWNKRGKPLMPCSPAKARLLLKEKKAIVVRRTPFTIQLTIATGESKQPVSLGVDAGYKHVGLSASTEKAELYASEVELRQDITDLLSARRALRQSRRNRKTRYRAPRFDNRIRTKRKGWLAPSVENRINAHLSRIETVIRLLPVTKISVETTSFDMQLLKNSDIAGKEYQESEQLGFWNVREYVLFRDGHVCQHCHGRSKDPVLNVHHLESRRTGGDSPGNLITLCETCHKELHRGEITLKAKRGQSFRAETFMGIMRWEVLDRLKASHPKLEVQNTYGYRTKHARIVNGIAKSHCADAFCIAGNLGAERLGEFLFQKQTRRNNRQIHKLSILKGGIRKRNQVPFEVKG

SEQ ID NO: 14479 - protein, 231 aa, unidentified
  REGION 1..231: note = Human gut metagenome
MVYVQDINGKPMMPTTRHGKVRRLLKDKKAIAVNLCPFTIKLMYVTSDYKQEIVLGVDAGTKHVGLSATTKSKELYSSEVILRNDIVDLLSTRRELRRSRRNRLRYRKPRFDNRIKSKRPGWVAPSVKYKVDAHIRVIDNVCSILPISRIVIEVAQFDTQKINNPNISGKEYQEGDQLGFWNVREYVLARDGHKCQHCKGKSKDPVLNVHHIESRKTGGDSPSNLITLCET

SEQ ID NO: 14480 - protein, 419 aa, unidentified; identical to SEQ ID NO: 8591
  REGION 1..419: note = Human gut metagenome

SEQ ID NO: 14481 - protein, 512 aa, unidentified; identical to SEQ ID NO: 5549
  REGION 1..512: note = Human gut metagenome

SEQ ID NO: 14482 - protein, 462 aa, unidentified
  REGION 1..462: note = Human gut metagenome
MSVLVIGRNGRALMPTNPRKARLLLKKKTASVVCRHPFTIQLLYKTGCATQEGCIGIDTGSQHIGVGITCGDRVILKDELALRSSMEKRSLLATRTVMRRGRRYRKVRYRKPKWRHHTKRMYFEKANRRGQHWRKVKTTTQSPRLKGWLPPSLQSKCDHHFRIIDRYLKYLPDPITRNLVIEAGRFDMARMNDPTIHGEMYQRGPMYDAENLRAYIFARDNYQCACCKAKAGTTRKADGTTVKLVAHHILFRSRGATDNPKYIISVCDHCHTTKAHQPGGILYSWMENNKKVARGLRDATFMNILRKRLFARYPQAAFTYGNITAADRKQLRLPKSHANDAVAISLFGKEASTVKNICQTMHYKQIRKSKRSLHEAIPRKGRKNPNTKAVRNKKNTTQVNGFKLWDSVLADGKKLFICSFTGTSAYLIDKNGCYISQPGKTYKQWPLSKLKRLHPNGNWLMA

SEQ ID NO: 14483 - protein, 420 aa, unidentified
  REGION 1..420: note = Human gut metagenome
MVYVLNKNNEPVMPCSERKARLLLKQGMAVIYRKDVFTIKLINGSYGYKQHITLGIDCGSKHIGVSATTDKQELFSANAELRNDVVKLLSDRRMLRRSRRFRKTRYRKPRFDNRRIKEGWLAPSIRQKIDSHVRIVSLIHKLLPVKQVNVEVAAFDMQKIKNPDIKSSEYQMGEQLDSYNVREYVLSGDNHICQHCKGKSKDDVLQVHHIESGKTGGNAPNNLVTLCKTCHEKYHSGEITLNVNRGKSFRDASAMSTMRWFLYEELKSRFSNVNITYGYITKYKRIKLGLSKEHYNDAYCITGNLNTSRLCNHHLIRFIPRHSRILHMQKFSKGGVRRSASASYWLNGGKPSKSGAMFTMFDKVKFNGIVCFISGSSNGYAALRDINWNKVHGCKTTVTVNKLALVSRRRGSMLFGELCG

SEQ ID NO: 14484 - protein, 406 aa, unidentified; identical to SEQ ID NO: 2752
  REGION 1..406: note = Human gut metagenome

SEQ ID NO: 14485 - protein, 442 aa, unidentified
  REGION 1..442: note = Human gut metagenome
MKHENANRVFLLNKDGKPLMPCCPRKARLLLKSGKAFVVKKYPFTIQLKYGSYGYKQKVSLGVDTGQRHIGFAIVSQNKVLHQSEVELRQDVHKNLYTRKIYRRGRRNRKTRYRQARFLNRVHGKRDGLWLPPSIKGKVSHNIAWIKRYLAVLPNPDLHIEVGKFDMAKMVNPEISGKQYQEGSLKDWKNYEYYVLARDEYTCQLCHKHGEGVKLVVHHIVYRSQGGTDRVDNLITLCTNCHTTKNHQPGGKLYKWMKAKKKVTKQLKGATFMNILRKRIMTAFPEASFQYGSQTYVDRKNLLLPKGHFMDAIAISGIKSVGQMPDTVTMISQFRKKKRSLHEATARKGRKQPNTSSKRNEKNTKHARGLWLNDYVRVVGNHVKGYVKGFKSNGYYVYLTDGLGNYVLNSGRNYVNTKQCQLIMHNGNWQKAEQKLSLYEFK

SEQ ID NO: 14486 - protein, 420 aa, unidentified; identical to SEQ ID NO: 3504
  REGION 1..420: note = Human gut metagenome

SEQ ID NO: 14487 - protein, 465 aa, unidentified
  REGION 1..465: note = Human gut metagenome
MSTCVCVLGNNGERLMPTFRLGKVRRLLKDGKAKIVKHHPFTIQLLYDSKTNTQPIEICEDVGYNYIGISVKSESHEYVSAQYDTLQDEKACHDSCRKYRRTRRNRLRYRKPRFDNRKRSEGWLAPSLRHKKELNVNVVKMYCAVMPITHATVEVGSFDTMLLQAIQKGKSKPEGVDYQKGPRYNLATLREAVFYRDNYTCQVCGRKIADGAILHMHHMFYWKGRHGYQLDELVTACEKCHTPANHQKGGKLYGFGEDKEFANLSGAAFMNAVRWQIVNALYATYGKEFVTITYGAMTKEKRIALHLEKSHNNDAYAMGSFHPVNRCAFEHYEKMKRNNRILEKFYDSQYIDTRTGELTNGKSLFNGRISRSHKKDSENLHKYRGKRICKGHRALRRKKLALNPGDLVSLNGEILVVHGTHTNKKGAVNVEFKAPAKNGQKSASLKKLKIVKAADSIHPAWEKVS

SEQ ID NO: 14488 - protein, 427 aa, Moorena sp.; identical to SEQ ID NO: 7460

SEQ ID NO: 14489 - protein, 406 aa, unidentified; identical to SEQ ID NO: 4082
  REGION 1..406: note = Human gut metagenome

SEQ ID NO: 14490 - protein, 470 aa, unidentified; identical to SEQ ID NO: 2949
  REGION 1..470: note = Human gut metagenome

SEQ ID NO: 14491 - protein, 413 aa, unidentified; identical to SEQ ID NO: 8326
  REGION 1..413: note = Human gut metagenome

SEQ ID NO: 14492 - protein, 427 aa, Parasutterella sp.; identical to SEQ ID NO: 6030

SEQ ID NO: 14493 - protein, 541 aa, unidentified
  REGION 1..541: note = Wastewater metagenome
LQLRRKVRPANASSVRGSRRRWCRQAIGYARNGPAIQAGLQHGRGEMHRKVCVTRPLRAGCWKDSNLFWRNGLSVFVLDRQGVAVMPCTQKRARLLLARGRARVHRLVPFVIRLVDVKAEHCNLQPLSLKIDPGSKTTGMALVRDAQKLDIDTGEISKGAAVLSLVEIAHRGRQISEALTARRQMRRRRRGQLRYRAPRFLNRGNKGKGWIAPSLQHRVDGTLAWVNRIMRWAPVRSISQELVRFDTQAMQTPGIEGIEYQQGTLAGYELREFLLEKWDRKCAYCGAENVPLQIEHIHPRSKGGSNRESNLTLACQCCNEKKAALPIEVFLAKKPEVLKRILSQAKKPLRDAAAVNTTRWVLFECLRETGTPVFASSGGRTKFNRQQNHVPKTHALDAACVGDVDWVVNWNRPTLQIKCTGRGSYQRTRLDKFGFPRGYLMREKSVKGFATGDLVKAVVPAGKKAGCHQGRVAIRATGSFNIQTQEGVVQGISHRHCTRVQRGDGYGYQQQSKPDAGRDRASHDALCLPGMNAGVSRAIHG

SEQ ID NO: 14494 - protein, 490 aa, Anaerostipes sp.; identical to SEQ ID NO: 6170

SEQ ID NO: 14495 - protein, 518 aa, unidentified; identical to SEQ ID NO: 7468
  REGION 1..518: note = Human gut metagenome

SEQ ID NO: 14496 - protein, 423 aa, Moorena sp.; identical to SEQ ID NO: 3576

SEQ ID NO: 14497 - protein, 406 aa, unidentified; identical to SEQ ID NO: 6079
  REGION 1..406: note = Human gut metagenome

SEQ ID NO: 14498 - protein, 420 aa, unidentified; identical to SEQ ID NO: 7360
  REGION 1..420: note = Human gut metagenome

SEQ ID NO: 14499 - protein, 453 aa, Moorena sp.
MVYVRNIEGKALMPTSNAKARKLLKQKKAKVISLKPFVIKLNYKTETEYTQNLHLGIDSGYSNVGFSIIDAKQEYIAGEVKLLEGMKKRLLEKSMYRKIRRSRLRHRKARWNNRIKSKKKGWLAPSLKHKLDTHIKFIDYLKSIIPIRKITIEVANFDIQKMKDDMISGIDYQNGDMLGFWNIREYVLHRDGHKCQNPNCKYKDKKDQILKIHHIKYRSEDGSDRPENLITLCSKCHTPANHKKGKFLYEWCMEGKKVRGFKNATFMSMIRWYLVNELKSKHNDVSITYGYITKNHRIKNKIEKSHLNDAFAIAKGTTQIRTNEKFLVVQDRLKNRNLEKFYDSKIIDIRTGEKVFGAYLNCGRSTRNKSQNTENLRKYRGAKISKGQRRIRKKKYFYQPNDLVKYEGKIYTVKGTQNEGKYIALKEIKKVPKVELLTPYMFKKELNWTYGLC

SEQ ID NO: 14500 - protein, 442 aa, unidentified; identical to SEQ ID NO: 4886
  REGION 1..442: note = Human gut metagenome

SEQ ID NO: 14501 - protein, 413 aa, unidentified
  REGION 1..413: note = Human gut metagenome
LKVFVLNMRGKPLMPCSPAKARHMLKAGKAFVVRRTPFTIKLTIATGETKQDVTLGVDAGARHVGISATTEKEEVFASEVALRQDITGLLADRLAFRRARRNRKTRYRAPRFNNRVRSKHKGWLASSVENRIQAHMSRIEAVCRLLPVTKIVIETASFDIQKIRNPEVEGTGYQQGDQLGFWNVREYVLFRDGHICQHCRGRSKDPILNVHHLESRKTGGDAPNNLITLCETCHKAYHAGKIKLKVKRGQSFRAEAFMGIMRWTLLNRMRKAHPSLPVENTYGYLTKHKRIALGLPKTHCADAFCIAGNLKALRRGDFLFQQQTRKHNRQIHKCSILKGGVRKLNQAPFLVKGFRLFDKVRIGGQIGFVFGRRVRGTFNIRRLDKTVIGTDINCKKLSLLETRKTFLTELRKE

SEQ ID NO: 14502 - protein, 350 aa, Anabaena sp.; identical to SEQ ID NO: 7152

SEQ ID NO: 14503 - protein, 440 aa, unidentified
  REGION 1..440: note = Human gut metagenome
LLLKKKTASVVCRHPFTIQLLYKTGCATQEGRIGIDTGSQHIGVGVTCEDRVILKDEHKLRSSMEKRSLLVTRAAMRRGRRYRKVRYRKPKWRHHTKRMYFEKVNRKGQHWRKVKTTTQSPRPKGWLPPSLQSKCNHHFRIIDRYLKYLPDSITRNLVIEVGRFDMARMNDPTIHGEMYQRGPMYDAENLRAYIFARDDYQCACCKAKAGTTRKADGTTVKLVAHHILFRSRGATDNPKYIISVCDHCHTTKAHQPGGILYSWMENNKKVARGLRDAAFMNILRQRLFARYPQAAFTYGNITAADRKQLLLPKSHANDAVAISLFGKEVSAVRNTCQTIYYRQVRKSKRSLHEAIPRKGRKNPNTKAVRNKKNTTQVNGFKLWDSVLANGKKLFICSFTGTSAYLIDKNGCYISQPGKTYKQWPLSKLKRLHPNGNWLMA

SEQ ID NO: 14504 - protein, 414 aa, unidentified; identical to SEQ ID NO: 2588
  REGION 1..414: note = Human gut metagenome

SEQ ID NO: 14505 - protein, 442 aa, unidentified; identical to SEQ ID NO: 7396
  REGION 1..442: note = Human gut metagenome

SEQ ID NO: 14506 - protein, 434 aa, Moorena sp.
MKVFVLNKHGNPLMPCNPKKARLLLKQQKAVVAKQMPFTIRLLYGSSGYKQPVSLGVDAGSKHIGIAATTEKEVLFAEELTPRNDVVNLMSVRRQNRRSRRNRKTRYRKVRFDNRVHAKHKGWLAPSVEVKIQEHITAIKHVQQILPITEVHVETAEFDTQRMKAVEEGRPLPVGTDYQLGEMYDSYNVRQYVLKRDNYTCQCCGKHGDGVKFHVHHLESRKTGGNAPGNLITLCEDCHKAIHAGAKTLHARKAKRSTKSLRDAAFMGIMRKTMLERLRAEPGIPVNGTYGYITKLYRDLYRIEKSHINDAIVISKHFTAVPDDVWYFAKAVRRHNRQIHKNKILKGGIRKRNQAPHVVKGCRLFDSVKYARNTYFIFGRRASGQMDIRTLDGVKVSGGSLSFRKFSVQHCNAGALLERRKAIPPTNESVGFLA

SEQ ID NO: 14507 - protein, 420 aa, unidentified; identical to SEQ ID NO: 7168
  REGION 1..420: note = Human gut metagenome

SEQ ID NO: 14508 - protein, 453 aa, Lactobacillus sp.; identical to SEQ ID NO: 2687

SEQ ID NO: 14509 - protein, 427 aa, Enterococcus sp.; identical to SEQ ID NO: 12295

SEQ ID NO: 14510 - protein, 453 aa, Lactobacillus sp.; identical to SEQ ID NO: 7420

SEQ ID NO: 14511 - protein, 424 aa, Anabaena sp.; identical to SEQ ID NO: 5550

SEQ ID NO: 14512 - protein, 428 aa, unidentified
  REGION 1..428: note = Human gut metagenome
LKVFVLNMRGQPLMPCSPAKARHLLKAGKAAVRRRTPFTIQLRIATGETKQSVTLGVDAGAKHVGLSAATEKEEVFASEVELRQDITGLLAARLSLRRERRQRKTRYRAPRFLNRVRSKHKGWLAPSVENRIQAHMSRIDAICGLLPVTKIVIETASFDIQKIKHPDVEGTDYQQGDQLGFWNVREYVLFRDGHVCQHCHGHAKDKILNVHHLESRQTGGDAPNNLITLCETCHKACHAGKIKLKVKRGQSFRAEAFMGIMRWTLLDRVRKAHPGLPVENTYGYLTKNTRITLGLPKAHCVDAYCIAGNLKAVRRGVHLYQRQVRKHNRQIHKCTVLSKTLKDGTKIGYRKLNQTPHLVKNFRLFDKVRCLGQTGFIFGRRSSGYFDVRRLDGVKISSCISYRKLTLLEKRSTYLTELRKEDGASSPV

SEQ ID NO: 14513 - protein, 431 aa, unidentified; identical to SEQ ID NO: 8285
  REGION 1..431: note = Human gut metagenome

SEQ ID NO: 14514 - protein, 487 aa, unidentified; identical to SEQ ID NO: 11019
  REGION 1..487: note = Human gut metagenome

SEQ ID NO: 14515 - protein, 412 aa, unidentified; identical to SEQ ID NO: 4932
  REGION 1..412: note = Human gut metagenome

SEQ ID NO: 14516 - protein, 419 aa, unidentified
  REGION 1..419: note = Human gut metagenome
MYVYVLNKHGEPLMPCSSRKARTLLDNKKACVAKRTPFTIKLLHGSAGYKQPITLGVDAGSKHVGLSASTETHELYREEFTPRNDVVDLLSTRREFRRARRNRKTRYRAPRFNNRVHSKHKGWLAPSVEVKIQEHITVIKHVCQIMPVSLVRVETAEFDTQRLKAMLEGKPLPVGTDYQLGEMYDEYNVRQYVLKRDNYTCQCCGAHATKTKQVKLHVHHLESRKTGGNAPSNLITLCSTCHKAIHEGKKTLDTKKRGKPLRDAAFMGIVRKTLLMRLRKKLSIPVQQTYGYITKMLREKNNLPKSHMNDALCIAKHPKAAPCENCYRSKAVRHHNRQIHKATILKGGIRKNNQAPYTVKGFRLWDKVLCNGQECFISGRRATGYFALKKLDGTVVTNSVSYQKLRLLETAKNYLRERM

SEQ ID NO: 14517 - protein, 512 aa, unidentified; identical to SEQ ID NO: 2745
  REGION 1..512: note = Human gut metagenome

SEQ ID NO: 14518 - protein, 443 aa, unidentified
  REGION 1..443: note = Human gut metagenome
LTKDENRPSGRTTGLRAEQAEPAGIRKGDTLKVFVLNMRGKPLMPCSPAKARHMLKAGKAFVVRRTPFTIKLTIATGETKQDVTLGVDAGARHVGISATTEKEEVFASEVKFRQDITGLLADRLAFRRARRNRKTRYRAPRFNNRVRSKHKGWLAPSVENRIQAHMSRIEAVCRLLPVTKIVIETASFDIQKIRNPEVEGTGYQQGDQLGFWNVREYVLFRDGHICQHCRGRSKDPILNVHHLESRKTGGDAPNNLITLCETCHKAYHAGKIKLKVKRGQSFRAEAFMGIMRWTLLDRVRKTHPKLPVENTYGYLTKHKRIALGLPKTHCADAFCIAGNLKALRRGDFLFQQQTRKHNRQIHRCSILKGGVRKLNQAPFLVKGFRLFDKVRIGGQIGFVFGRRVRGLFNIRRLDKTVIGTDINCKKLSLLETRKTFLTELRKE

SEQ ID NO: 14519 - protein, 493 aa, unidentified; identical to SEQ ID NO: 2644
  REGION 1..493: note = Human gut metagenome

SEQ ID NO: 14520 - protein, 421 aa, unidentified; identical to SEQ ID NO: 2610
  REGION 1..421: note = Human gut metagenome

SEQ ID NO: 14521 - protein, 456 aa, unidentified; identical to SEQ ID NO: 13627
  REGION 1..456: note = Human gut metagenome

SEQ ID NO: 14522 - protein, 463 aa, Moorena sp.
MEYRVYVISKSGKPLMPTTHFAKVRRRLKENRAKVVKREPFTIQLLYETTEYTQPITLGIDAGYQKIGFSAVSEKEEIIAGEVEMLKGQTERNEERRMYRRQRRHRERYRKPRFENRKKDKGWLAPSIQHKLDTHLRLVDFLKMILPISFVRIEVADFDIQRIQNPDIQGTEYQEGNQKGFSNLREYIFYRDGYKCQNTDCKNRNTSPILVVHHIDFNRTNNHHSNLITLCNRCHIPANHKGFLKDWKPKLKPLKAETFMSTVRWRMVNQLQCQHTYGYQTKQKRFEHGLEKSHANDAFVIAGGGKPKASVAFCAKTKSCVASCRDGPRCVQYEVKQVRRNNRSLEKFYDATYIDTRDGKQKKGVELFCGRTTRNKNKNGENLRKYRLNKVSKGRRSIRRKRHSFQPNDLVRYEQQLYHVAGLQNLGTYVRLRELKKAVSVKKIQLVKYAKGLCWEKAAFIPD

SEQ ID NO: 14523 - protein, 431 aa, unidentified
  REGION 1..431: note = Human metagenome
MPNKVYVINKHGRPLMPCSPAKARHLLDAGKAKVKKRTPFTIQLVYGSSGYTQEVILGVDAGSKTIGMSASTTKEELLSAEVKPRNDVVDLLSTRREFRRARRNRKTRYRKPRFDNRVRSKHKGWLAPSVEVKIQEHITAIRRVCGILPVSKVVVETAEFDLHLLKAIADGKPVPQGEDYQKGEMYGHYNVRQYVLWRDDYTCQCCGAHATKKKEVRLHVHHLESRKVGGDAPDNQVTLCESCHEKLHKGLIAEKDFKKRKRRSTRDATFMGIMRKTLMQRLCSELPIPVVKTRGYITKATREKLLVLPKSHTNDALAIAQGKRGFNVGYLPEIAQIDKIYTIRPVRHHNRQLHKAAILKGGIRKSNQAGKYVFGYRLFDKVQFNGQDCFIWGRRTTGIFTIKTINGKMIKDGISFKKLKLVEKSTSYLIA

SEQ ID NO: 14524 - protein, 534 aa, unidentified
  REGION 1..534: note = Human gut metagenome
MNSIKQEKNMIYVLDKDGNPLDPTYRNHKVRELLVDKKAFVKYYKPYTIQLLYEPEIKITGTHIAAIDPGRTNIGTAVVDENGVEEYAAHITTRNKEVPKKMKERAEHRRNSRSGERKVRQRQAKRNGTIFPFDEKHPYVDNTVRERILPKCENPIHIKYISNTEAKYCNRMRPDGWHCPTVNQLLQTHINSVELMCDILPITDFVLEINKFNFERLQHSNIKPWEYGNGPLKNTTVEELVAEEQNHHCLLCKNEIEHYHHIVHQSKNGSNTVSNLVGLCKKHHNQVHNNKKVEQKVLEKKEGLEKQFDALSVLNQIFKSFIEYLILKFGEEHVFFTDGKTTATFRANHQIDKSHHNDAYCIACSILENVKIDYSSQVYEIKQFRRYNRQLISARRERKYYEVEDITTTKILKNGKEKTITKQKKTLVATNRHKRCNQKTDSLRQYYQKLREEYDKQTSKQIVSRLVVEKGLNRYRDTNLIMPGAVFIYEGKHYVLSGNSHYGQYYMAIGCGAKTFPAKKCKIVQKNKGLVYLY

SEQ ID NO: 14525 - protein, 431 aa, unidentified; identical to SEQ ID NO: 7994
  REGION 1..431: note = Human gut metagenome

SEQ ID NO: 14526 - protein, 448 aa, unidentified; identical to SEQ ID NO: 8365
  REGION 1..448: note = Human gut metagenome

SEQ ID NO: 14527 - protein, 450 aa, Moorena sp.; identical to SEQ ID NO: 2935

SEQ ID NO: 14528 - protein, 417 aa, Petrotoga sp.
CHSARARELLKKGKAAVFRYHPFTIILKEREGGDTQPIQVKIDPGSKITGVTLVGDFKNGKKVIWGAEIHHRGQSIKKALDTRRGVRRSRRNRKIRYRIARFDNRKRSKGWLPPSLISRVENILTWIKRIRRFSPITGISLELVRFDTQKLQDPEINGIEYQRGTLYGYEIKEYLLEKWGRKCVYCGKENVPLEIEHIVPKSKGGSDRISNLTLACHECNQKKGNQSIEEFLTNNPERLKQIKSESKRPLKDTAALNATRWYIFNQLRGNSLTAGKEELPIEVGTGGRTKYNRETQNYPKKHWIDAACVGESGQNVQIEPDMQVLEIKAMGHGMRRMCFVDKYGFPKSYRPKERTYMGYKTGDIVLAVIPKGKNMGIHIGRIAIRHRPSFLLNGVGDVHPKYLTLLQKNDGYGYQIS

SEQ ID NO: 14529 - protein, 420 aa, unidentified
  REGION 1..420: note = Human gut metagenome
MQYVYVLSKHGKPLMPCSPGKARLLLKQQKACVVRRTPFTIKLLYESAGYKQPITLGVDAGSKHVGLSASTEKRELYREEFTPHNDVEKLLSTRRQNRRSRRSRKTRYRAPRFDNRVHSKHKGWLAPSVEVKIQEHITIIKRICKILPISLVRVETAEFDTQRLKAMLAGKPLPVGTDYQLGEMYDEYNVRQYVLKRDHYTCQCCGAHNTAEKVVKLHVHHLESRKTGGNAPSNLVTLCTTCHKNLHKGKVTLDGKERGKPLRDAAFMGIMRKTLMARLKEELPIPVQGTYGYITKMRREQNDIKKSHTNDARCISKHPLAEPCSVCYRTKAIRHHNRQTRKANFSKKGIRKRSQMPYLAEGFRLWDKVLYKGQECFVSGRRSSGSFALKKLDGTSISKGVTFKKLRLLEPATNYLIERM

SEQ ID NO: 14530 - protein, 512 aa, unidentified
  REGION 1..512: note = Human gut metagenome
MSTVYVLNKDGKPLMPTTRCGHVRHLLKEQKARVVRTKPFTIQLLYETDDVVQLLYLGIDPGRTNIGVAVVKTDGTAVFTAHLETRNKEIPKLMKKRKESRRARRTNGRRCRRQRRAKANGTISKKCVKHDTAQNGSVSKRAKEIGVIKRHLPGCEKDVLCICIKNKEAKFSNRTRPEGWLTPTANQLLQTHINLVKKIRKFLPISDAVLEINKFAFMRLDNPNVQKWQYQQGPLYQKANLEETVSEMQEHHCLFCKKKIDHYHHVVPQHKNGSNTIDNIIGLCTQHHDLVHKDTAWQKKLAKKKTGLNKKYGALSVLNQIIPALTKELSSLFPKHFFATNGKSTYDYRSAHGVSKDHWLDAYCIACSVLPNDVCDSGINNRVPYELKQFRRHDRRALNNENMSRVYTLNDNVVATNRHKATKQTTDSLEEFRQNHPDDVCKLKVKEHHPTYRNMNRNYPGSVFLVGNQVHVMQGIAGSKDGEATTYKDTNANSIAAGKCKFVAKNSGILFV

SEQ ID NO: 14531 - protein, 442 aa, Selenomonas sp.; identical to SEQ ID NO: 4776

SEQ ID NO: 14532 - protein, 420 aa, unidentified
  REGION 1..420: note = Human gut metagenome
MQYVYVLNKHGEPLMPCSPRKARLLLKQKKACVIKRTPFTIKLLYGSTGYKQPVTLGVDAGSKHIGISATTEKHELYREEATPRNDVVDLLSARRAFRRSRRNRKTRYRAPRFDNRVHSKHKGWLAPSVEVKIQEHITLIEHVCRILPVTLVGVETAEFDTQRLKAMLEGKPLPVGTDYQLGEMYDEYNVRQYVLKRDNYTCQCCGAHSTKTKGVKLHVHHIETRRTGGNAPNNLITLCKACHKALHAEKVTLDGKKRGKPLKDAAFMGIMRKTLMERLRKELKIPVQGTYGYITKYLREKNGIPKSHTNDARCISKNPLAIPCDTCYYTKAVRHHNRQLHKATILKGGIRKANQAPYIVKGYRLWDKVAYNGTECFITGRRTSGYFALKKLDGTVASNSISYKKLRLLEAATNYIIERK

SEQ ID NO: 14533 - protein, 413 aa, Moorena sp.; identical to SEQ ID NO: 13794

SEQ ID NO: 14534 - protein, 451 aa, unidentified; identical to SEQ ID NO: 7526
  REGION 1..451: note = Human gut metagenome

SEQ ID NO: 14535 - protein, 536 aa, unidentified; identical to SEQ ID NO: 4526
  REGION 1..536: note = Human gut metagenome

SEQ ID NO: 14536 - protein, 423 aa, unidentified; identical to SEQ ID NO: 3951
  REGION 1..423: note = Human gut metagenome

SEQ ID NO: 14537 - protein, 452 aa, Lactobacillus sp.; identical to SEQ ID NO: 3322

SEQ ID NO: 14538 - protein, 427 aa, Moorena sp.; identical to SEQ ID NO: 5902

SEQ ID NO: 14539 - protein, 466 aa, Moorena sp.
VAVFVLDRHKKPLMPCSEKRARKLLEKGRARVHRLMPFSIRLVDRTVNDSVLQPVTLKLDPGSKATGIAVVRESETIDEETGEIKTTVYVLTLFELQHRGKQISESLTARRQMRRRRRGNLRYRAPRFLNRTKPKGWLAPSLQHRVDTVSAWVQRFQRLAPITGIAQELVRFDLQQMENPEISGVEYQQGTLHGFETKEYLLEKWNRECAYCGTKNIPLQVEHIQPKANGGSHRVSNLTLACQPCNQKKGAQAIEIFLAKAPKRLAKIKAQVKRPLKDASAVNSTRWALFNALKATGLPILTGSGGRTKFNRSTLGIPKDHALDAACVGIMEAIHHWDKPALAIKATGRGSYQRTRLNAFGFPRGYLTRQKRIKGFQTGDMVKAEVPTGKKIGSYRGRVAVRASGSFNIQTATGLIQGISHRYCKVTQRADGYGYSQQLNPKEVALAGDPLSLPALKGGVSRGKSR

SEQ ID NO: 14540 - protein, 442 aa, Lactobacillus sp.
MKHENANRVFLLNRDGKPLMPCRPRKARLLLKSGKAFVVKKYPFTIQLKYGSYGYKQKVSLGVDTGQRHIGFAVVSQEKVLCQSEVELRQDVHKNLYTRKIYRRSRRNRKTRYRQACFLNRVHGKRDGLWLPPSVKGKVNHNIAWIKRYLAVLPNPDLHVEVGKFDMAKMLNPQISGKQYQEGSLKGWKNYEYYVLARDKYTCQLCRKHGKGVKLVVHHIIYRSQGGTDRVSNLITLCTDCHTTNNHQPGGKLYKWMKAKKKVTTHLKGATFMNILRKRMMAAFPEASFQYGSQTYVNRKNLNLPKGHFMDAIAISGIKLVGQMPETVTMISQFRKKKRLLHEATARKGRKQPNKAAKRNAKNTKYARGIWLNDYVRVIGNNAKGYVQGFKSNGYFVYLTDGLGNYVLNSGKNYINRKQCQLIMHNGNWQKAEQKLSLYEFK

SEQ ID NO: 14541 - protein, 172 aa, unidentified
  REGION 1..172: note = Human gut metagenome
MVYVQDIDGKPMMPTTRHGKVRRLLKDNKAVVVNTCPFTIKLTYKTSDYKQEIVLGVDSGTKHVGLSATTKSKELYASEVILRSDVVDLLSTRRGLRRTRRSRLRYRKQRFNNRVKSKKDGWIAPSVRHKIDSHIRIISFVYSILPVSKLIVEVAQFDTQKIKNPEISGKEY

SEQ ID NO: 14542 - protein, 441 aa, unidentified
  REGION 1..441: note = Human gut metagenome
MDPGRTNIGNCAVETNGKVLYSSLVETRNKEIPKLMRERKGHRQMSRRGERKRLQRRAIRADKTGMARATEYWRMLTGQRKPIRCKVIRNQEVKFQNRKRQAGWLTPTAEQLARTHLNVVRKIQKILPVSAIVIEINRFDFARMENPDIENWEYQRGRLAGYADVREAVSRQQRGKCLLCGRKQIEHYHHIVPKSRGGSESIDNYAGLCITCHEKVHQDESVKGKLQSKKQGIQKKYHALSVLNQIMLTLLRELPKLVPAFITTGYETHRIRESVRLQEKQKGDNTHYMDAWCIAMSIVGAYETEPDFSGLYRIKQFRRHDRARVKAQKERTYYHNGKAVAKNRHKRTGQADAKVPFPSLAEYLQEHPEHKGRLTVRKSIRSYNNTKRNLPGTVYTECGTPFVLRATQSNGTRLYGMGEGKDYHKTVRCKLSQHNAGLVYI

SEQ ID NO: 14543 - protein, 535 aa, unidentified
  REGION 1..535: note = Human gut metagenome
MYRLITEAGIPLIPERLHDTKKKKGASRMSEYIYVLGMDGNPQMPTKRKRHVEQLLQTGRAHVFRQVPFTIQLTYKNQPVLQPVTIAEDPGRSNIGMAVVSLSGELLSAAVVQTRNKEIVKLMEKRKQYRRASRNGERKARQRLAKKCHTMIKAGFLMRKLPMYGKDKRVKCLVIKNTEARFCNRKREDGWLTPSAEHLARTHINLIHKMQKFLPITDVAIEINRFAFLSLEDPSISGVDFQNGPLKGYDDLNAAIEDLQDGHCLMCNSPIEHRHHIVPRSMQGSNTIGNIAGLCCKCHEKVHKSTAFEDSLKKKKAGLNKRYGAISTLNQAIPFICKRLEQEFGKEHVHYCSGRDTSMVRRSFGYHKTKEEQLHEVDAWCIAVLSLQQIPEKAPEFDHMHEILQFRRQDRSRIKAQTSRAYYHERKKIAKNRKKAEGQREDSLQEWRKRQVERYGKEQTRKMISQLEVKESIRRYNRLDRLMPGAVFYYRGNRYVMRGQHSNGQYLQAVGMGKKDFPVKDCMIVAHNEGLIFVS

SEQ ID NO: 14544 - protein, 452 aa, unidentified
  REGION 1..452: note = Ga0315284_10004537
MSKQTLQREFKNVPTGAPLACSSTSTPLNRLETVSVASGILSCNNPEVGQRKQVSGLKVTVPVLSINGSPLMPCSLTKARHLLERRKAKIINLNPFAIRLTFECENKVQEVSLGVDSGYNHIGFSAITKTKEITSGEISLDDKTSKRLTERRMYRRNRRNRLRYRKPRFNNRKTPEGWLPPSVQRKLDTHINMVNKLKELTPVKKVTVEIGEFDIQKLMNPDIYGKEYQQGDLYGYNNLKAFLFSREHGRCQFCGKNIVKGEKAHTHHIKPRSETGTDSPSNMALLHEDCHDELHKRGLYRKLKAPKEYKAEIFMSIIAARLKKALNCGVTYGYETATKRNLLGIEKSHVNDAFIIAGGINQERCLPYKVEQKRINNRTLQTNRKGFVPSIRTQRYVIQNRDFIWISDKKYLCGGVANRGIMIYYFDDTKKKLIYYKKVNKFYSTGSLTWIN

SEQ ID NO: 14545 - protein, 442 aa, unidentified
  REGION 1..442: note = Human gut metagenome
MSTSVFVLDKKHRPLMPCRPARARRLLRAGRARVVKRFPFVIRLVDRTVEQSEVQPVLIKLDPGSRETGAAVVRDDEKKRHHALAFFVIKHRGGAIRDALKARSAFRRRRRSQNLRCRSPRFLNRVKPKGWLPPSLRHRVETTLSFVRRMCRYLPVSGIAAELVKFDSQKLQTPEVSGIEYQQGTLFEYEVREYLLEKFGRKCVYCGAEGVPLNIDHVVPRAKGGSNRVSNLVLACVSCNQKKGARSLEDFLKGKPEVLARVRRELKTPLRDAAAVNATRWVLFNELKATGLPVETGSGALTKFNRHAFGVEKEHWLDALCVGRLNGVVTRKGLNVLEIRCMGRGSRQRTRLTKYGFPRGYLMRQKCVHGFATGDMVEANVPKGKKAGLWRGRVAVRVSGSFNIQTPKGVIQGVGWKHCRLISHNDGYGYAWLGHAPHSSPA

SEQ ID NO: 14546 - protein, 441 aa, unidentified
  REGION 1..441: note = Fermentation metagenome
MELRITYRKVKYFQGVDILVYIISIDGKPLMPCKPVIARLLLKQHKAKVIKKYPFTIKLLYKTKTEYTQPLTLGIDTGSSKIGSAVVDENNNVLYLSQVEVRNDITDKMKQRAKYRRNRRNRKTRYRKARWLNRKNSIKEDRFSPTIVSKINSHLKEINFVKSILPIQNVILETATFDPYALKNPAVLHNKWLYQKGVNYGFANTRAYVLGRDNYTCQYCKGKSKDSKLEVHHIIFRSQGGSDESKNLITLCKTCHGKLHNGKINLKKNGKVKGQLKHATQMNSIRQQLLRLLPEATETFGFITKEHRQLMKLPKEHYYDAVAIACLNNIENTGLIGVNFKTKNILFKRCIADGDFQQTKGVRSEQRIITGKIQGFRKLDKVEYQGKEYFIKGRMSTGYAILMDIEGNKINLKPIPKFERMKRMQARKSWILSQEVIQNIC

SEQ ID NO: 14547 - protein, 512 aa, unidentified; identical to SEQ ID NO: 2792
  REGION 1..512: note = Human gut metagenome

SEQ ID NO: 14548 - protein, 417 aa, unidentified
  REGION 1..417: note = Human gut metagenome
MPCSPAKARLLLKEKKAIVKRRTPFTIQFTIATGEARQPVTLGVDSGYKHIGLSATTEKDELYASQVELRQDITDLLSARLALRRSRRSRKTRYRAPRFDNRVASKRKGWLAPSVENRIAAHMSRVEAVMRVLPVTAITVETAAFDTQLLKNPDIAGEAYQQGEQLGFWNVREYVLFRDGHVCQHCRGKYKDPILNVHHIESRRTGGDAPNNLITLCETCHKAFHRGENKLKVKRGKSFKAETFMGIMRWTLFERLKKAHPELRVRNTYGYLTKHKRISHGIAKSHCADAYCIADNLGAKRLEGFFFQKQTRKHNRQIHKLSILKGGLRKKNQAPYEVKGFRLFDKVICKGEEAFIFGRRTSGSFDVRRLDGTRISAGISCKKLRLLEPRTTYLTEFRKEAALPPLHKCRGFRAEFL

SEQ ID NO: 14549 - protein, 425 aa, unidentified
  REGION 1..425: note = Ga0315279_10041265
MRDKPLQHWRRLLTGAILYYSEGVFVVYIISKTGKPLMPTKRLGKVRHLLKDGLAKVVQRTPFTIQLLYDSDEYTQPITLGIDAGSKTIGLSATTDKKELFSAEVQLRTDIVDLLSTRRQNRRARRSHKIDTHLTVVDKIHKILPITNIIVEVAQFDIQKIKNPDISGVEYQQGEQLDFFNVREYVLYRDDHKCQLCNGKSKDKILNVHHIESRKTGGDAPNNLITLCETCHKKQHNSSLELKVKRGQLFKDASFMGIMRWAFYNTLKEKYPNVLMTYGYITKNTRIANNLPKDHKTDALCITGNPTVKGLDTWYFYKKVRCQNRQIHKNTINKGGARKLNQSPFIILGFRLFDKVKYNDQECFVFGRRVSGSFDIRLLDGTTVNAGVGYKKVKVLEQRKTILIERRRAIKRTCPPTAKVRWFLA

SEQ ID NO: 14550 - protein, 470 aa, unidentified; identical to SEQ ID NO: 5320
  REGION 1..470: note = Human gut metagenome

SEQ ID NO: 14551 - protein, 442 aa, Anaerostipes sp.; identical to SEQ ID NO: 2903

SEQ ID NO: 14552 - protein, 451 aa, Moorena sp.; identical to SEQ ID NO: 3199

SEQ ID NO: 14553 - protein, 512 aa, unidentified; identical to SEQ ID NO: 8071
  REGION 1..512: note = Human gut metagenome

SEQ ID NO: 14554 - protein, 451 aa, unidentified; identical to SEQ ID NO: 3061
  REGION 1..451: note = Human gut metagenome

SEQ ID NO: 14555 - protein, 410 aa, Bacillus sp.; identical to SEQ ID NO: 10447

SEQ ID NO: 14556 - protein, 442 aa, unidentified; identical to SEQ ID NO: 2903
  REGION 1..442: note = Human gut metagenome

SEQ ID NO: 14557 - protein, 428 aa, unidentified
  REGION 1..428: note = Candidatus Thiomargarita nelsonii
MQRVFVLVSNKQPLMPCHPARARKLLRKEKAAVYRRYPFTIIMTHRVGGDLQPIEIKFDPGSRTTGVALVGHFNRGSEVIWAGNLNHRGAQIKRNLNSRRAIRSSRRNRKTRYRPARFLNRRRPKGWLPPSLRSRVDNVKNWMLKLDKLAPLTQIAVETVRFDTQKMQNPEISGVEYQQGDLAGYELREYLLEKWGRECAYCGAKNVPLEIEHIVARSKGGSDRVSNLTLACTPCNIDKGNKDIKDFLKRKQKRLKKIQAQAKTPLKDAAAVNATRYATGNVLKGFSLPIVFSSGGRTKFNRIKLGYKKDHWIDAACVGESGSHVIIPQAITPLIITAKGRGSRQKCSMNQYGFPRTGPKKHKRVKGFQTGDLVKAIVTKGKKIGTYVGRVVVRASGSFDIGSGEEKVAGISYKYCRLLQRSDGYEYT

SEQ ID NO: 14558 - protein, 457 aa, unidentified; identical to SEQ ID NO: 3236
  REGION 1..457: note = Human gut metagenome

SEQ ID NO: 14559 - protein, 424 aa, unidentified
  REGION 1..424: note = Human gut metagenome
MASMQYVYVLNKHGEPLMPCSPGKARLLLKQQKACVVKRTPFTIKLLYGSAGYKQPVALGIDAGSKHVGLSASTEKRELYREEFTPRNDVVELLSTRRQNRRSRRNRKTRYRAPRFDNRVHSKHKRWLAPSVEVKIQEHITVIKRICRILPITLVRVETAEFDTQRLKAMLKGKPLPVGTDYQLGEMYDEYNVRQYVLKRDNYTCQCCGAHPTEKKPIRLHVHHIESRHVGGNAPNNLITLCVACHKALHEGKITLDKGKKRGKPLRDAAFMGIMRNTLLARLKDELNIPVKQTYGYITKLLREKNKIPKSHVNDARCIAKAPNAKPCDTMLYTRALRHHNRQIHKAKILKGGIRKKNQAPYLVKGFRLWDKVRYNGEECFITGRRSSGYFALKKYDGTVISNSASYKKLMLLEAATNYITERS

SEQ ID NO: 14560 - protein, 552 aa, Streptomyces sp.; identical to SEQ ID NO: 3032

SEQ ID NO: 14561 - protein, 431 aa, unidentified; identical to SEQ ID NO: 6055
  REGION 1..431: note = Human gut metagenome

SEQ ID NO: 14562 - protein, 426 aa, unidentified
  REGION 1..426: note = Human gut metagenome
MVYVQDIDGKPMMPTTRYGKVRRLLKNKKAVVVNLCPFTIRLTYVTSDYKQEIVLGVDAGTKHVGLSATTKSKELYSSEVILRNDIVDLLSTRRELQRARRNRLRYRKPRFNNRIKSKRPGWIAPSVKYKIDAHIRVVENVCSILPISRIVIEVAQFDTQKIKNPNISGKEYQEGDQLGFWNTREYVLARDGHKCQYCKGKSKDKILNVHHIESRKTGGDSPSNLITLCETCHKEYHKGNIDLKIRRGKSLRDAAVMGIMKWRLYEEIKSKYDRVSMTFGYVTKYNRINHGFEKSHVSDAFVISKNFNAIRLGYYYKVRLVRRHNRQIHKQKIQKGGIKRLNQSPFEVFGFRLFDRVMFENSYYFIFGRRKTGSFDIRYIDGKNQKNVTYKKLKLSRCKRFMIQMELNKKTRTCFENERNSDRDAA

SEQ ID NO: 14563 - protein, 418 aa, unidentified; identical to SEQ ID NO: 2425
  REGION 1..418: note = Human gut metagenome

SEQ ID NO: 14564 - protein, 450 aa, unidentified
  REGION 1..450: note = Human gut metagenome
VGDFCRGAAPQTTACSCLHYLLNQIKNTIERIAYQMVYVLNVNGVPLMPTDRHGKVRRLLKSKQARVVKRTPFTIQLLYDTPTCVQPLTLGVDAGSKHIGLSVSSENKEVYAGQIEPRQDVSKKLNERRQYRRSRRNRLRYRKPRFNNRTASKPKGWIAPSIACKIESHVAVIGQLHQILPITEIVVEVADFDTQKILNPDIQGKEYQTGPLFNSNLRQYTFARDGYTCQWCKGKSKNKILHVHHWNYWRGDHTNKPSSVITLCDVCNDSKNHKKGGFLYGWEPKITNNLKDAAFMNISRWALYSRLKEIYPNVRLTYGYITKVVRNDNGLEKSHVNDALCIANHPNATRLPYCYLIKKNRVHNRQIHKANKLKGGRLKLNQAPHLVKSYRLNDIVKCDGQNYVITGRKKTGYFQLKNFTTGEKLPSVNYKKLKLLEKAKYYTTERIARN

SEQ ID NO: 14565 - protein, 466 aa, unidentified
  REGION 1..466: note = Human gut metagenome
MSTCACVLSKNGERLMPTIRLGKVRHLLKDGKAKIIKHHPFTIQLLYDSKTDTQPIEICEDVGYNYIGISMKSESHEYVSVQYDTLQDEKDCHDSCRKMRRIRRNRLRYRKPRFDNRKRNKDWLGPSLEHKKELNVNVIKMYCEVVPITHVTVEVGSFDTMLVKAIQEGKAIPEGADYQKGPRYNLATLREAVFYRDNYTCKVCGRKAKNDSAILHVHHMFYWKGRHGNSLNELLTVCEKCHTPANHQKGSKLYGFGENIKFANLSGAAFMNTVRWQIVNELYATFGKLFVTFTYGAMTKEKRIALHLEKCHNNDAYAMGNFHPVDRCAFEHYKKVKRNNRILEKFHDSQYIDIRTGKVANGRSLFNGRINRSHKKDSENLHKYRGKRTRKGYRALRRKKVALNPGDLVSLNGEILVVHSTHAGKNGYVGVEFKTPSKSGKKSASLKKLKIVKTSNSMHSAWTKVS

SEQ ID NO: 14566 - protein, 417 aa, unidentified
  REGION 1..417: note = Human gut metagenome
MPCSPAKARLLLKERKAIVKRRTPFTIQLTIATGEAKQPVALGVDSGYKHIGLSATTEKAELYASEVELRQDITDLLSARLALRRSRRSRKTRYRAPRFDNRVASKREGWLAPSVENRIVAHMSRVEAVMRVLPVTAITVETAAFDTQLLKNPDITGAAYQQGEQLGFWNVREYVLFRDGHVCQHCSGKSKDPILNVHHIESRRTGGDAPNNLITLCETCHKAFHRGEIKLKVKRGKSFKAETFMGIMRWTLFERLKKAHPELSVRHTHGYLTKHKRISHGIAKSHCADAYCIAGNLGAMRLNSYLFQKQTRKHNRQLHKLSILKGGLRKKNQAPYEVKGFRLFDKVICKDEEAFIFGRRSSGSFDVRRLDGTRISAGISYKKLRLLEPRTTYLTEFRKEAALPSLHKCRGFRAEFL

SEQ ID NO: 14567 - protein, 443 aa, Anoxybacillus sp.; identical to SEQ ID NO: 2800

SEQ ID NO: 14568 - protein, 366 aa, unidentified; identical to SEQ ID NO: 11303
  REGION 1..366: note = Human gut metagenome

SEQ ID NO: 14569 - protein, 423 aa, Arthrospira sp.; identical to SEQ ID NO: 10370

SEQ ID NO: 14570 - protein, 442 aa, unidentified; identical to SEQ ID NO: 4418
  REGION 1..442: note = Human gut metagenome

SEQ ID NO: 14571 - protein, 480 aa, Moorena sp.
LYTKPLDNIGEGSLPPSGEINLKGMTFMVYVKSIDGKALMPTSNAKARKLLKQKNAKVVSLRPFVVKLTYKTKTEYTQKLNLGVDSGYSNIGFSVIDAKQEYIAGEVKLLEGMKKRLLEKASYRRIRRSRLRYRKARWNNRVKSKKKGWLAPSLKHKLDTHIKFIDYLKDILPIGKITIEVANFDIQKMKDDLISGIDYQNGDMFGFWNVREFVLHRDGHKCQNPNCKHKDKKEQILKVHHIRYRSEGGSDRPENLITLCSKCHTPVNHRKGKFLYDLCVNGKKVRGFKEATFMSMIRWYLVNELKSKHNNVSITYGYITKNHRIQNGIEKSHLNDAFAIAKGTNQARTKDRFLVIQDRLKNRSLEKFYDSKIIDIRIGKKVSGGDLSCGRSTRNKNLNTENLRKYRGVKISKGQRRIRKQKYFYQPNDLVKYDGKVYTVKGTQNEGKYIALKEIKKVPKVELLIPYVFKKGLNWSYRLC

SEQ ID NO: 14572 - protein, 442 aa, Deinococcus sp.; identical to SEQ ID NO: 5259

SEQ ID NO: 14573 - protein, 469 aa, unidentified
  REGION 1..469: note = Sponge metagenome
MTYTNYQPTPVFSSDGQPIMPCHPARARKLLTKGRAVPHHVRGIFGIRILDRSRADCQVQDVALNIDTGSSTTGFAVVSDDEKGQRTVLAAVELTHRARVIKATMTRRRQLRHTRRGRLRHRAPRFNNRRRKPGTLPPSVDSLRTDTMRVVNTLTSMYPISHISIEHKKFDTQLMVYPDIRSVEYQRGTLFGWQIRAYILERDQGRCVYCRRSRVRLELDHVRPRATGSDRVDNLVACCRECNVKKANQPIEQFLTDQPELLKRILERLQRSNLASAAHINAALPAIIRDLWQLGLPLSSTDAASVSWARQQLNVPKTHCYDAALQGHDFTSVVSLPSRVLVLRPNNGRSKQKANVDRHGTPIGRPFRQQQALQHHLRRHNPAVGHSDRRQRHGPQLISTGDTVRFTHQDVLHTGRAVIKSAGRRVAIHGTKPEISTKIERCSRLARNPKWVIRRAAPSQQTRAEAATK

SEQ ID NO: 14574 - protein, 416 aa, unidentified; identical to SEQ ID NO: 7736
  REGION 1..416: note = Human gut metagenome

SEQ ID NO: 14575 - protein, 476 aa, unidentified; identical to SEQ ID NO: 3164
  REGION 1..476: note = Human gut metagenome

SEQ ID NO: 14576 - protein, 415 aa, unidentified
  REGION 1..415: note = Human gut metagenome
MVYVLANDGQPLMPTERHGKVCRMLKSGIAKVVKKCPFTIQLQYESERNVQPVALGIDAGSKHVGVSATTKAKVLYESDVELRDDIVKLLATRRQLRRRRRSRKTRYRPARFDNRRRKEGWLAPSIRQKIESHLTVVANACKILPINQIIVETASFDIQKIKDPEIQGIEYQQGEQMDFWNIREYVLFRDGHICQCCKGRFKDKILNVHHIESRKTGGNAPNNLITLCETCHKGYHNGTVILPKNIKHGMQFKDAAFMGIMRWTFYNTLKEQYEPDIPVSMTYGYLTKNTRIEHGLPKEHYIDARCISGNPDAVSDGTYYYQKKVRCHNRQIHKQTILKGGIRKSNQAEYLVRGFRLFDKVRYQGREYFIFGRRKSGFFDIRTLSGEKVNKGSISVKKLTFADTRKNYLIERRTV

SEQ ID NO: 14577 - protein, 415 aa, Bacillus sp.; identical to SEQ ID NO: 2671

SEQ ID NO: 14578 - protein, 418 aa, unidentified
  REGION 1..418: note = Human gut metagenome
MSMVYVISQDGQPLMPTANGGKVRVLLKEKKAKVIKACPFTIQLLYKTTSYTQPLILGVDAGSKKVGLSVRTDEKEVYAGEVELRNDIVKLLSEKRQYRRSRRNRLRYRAPRFDNRNRTEGWLAPSIRNKVEAHLRVVEDLHKILPITSIRAEVASFDIQKIQAILEGKEVPEGKGYQEGVQLGFWNIREYVFFRDNHECQHCHGKSKDKILNVHHIESRQTGGDRPDNLVTLCETCHKLYHAGKITLHLKKKYGFRDAAFMGIMRWAFYNELKERYPDVALTYGYITKNTRIQAGLPKEHYIDALCITGKPDVERCEEYYYIKQTRRHNRQIHKANLLKGGRKKLNQAPFQVKGYRLFDRVKVGNQVGFIFGRRSTGYFDIRKLDGTRIHAGISYKKIQLIETRKRYLVERRFKEAA

SEQ ID NO: 14579 - protein, 420 aa, unidentified; identical to SEQ ID NO: 11059
  REGION 1..420: note = Human gut metagenome

SEQ ID NO: 14580 - protein, 470 aa, unidentified
  REGION 1..470: note = gut metagenome
MSVFVVGLNGCRLMPTSERKARLLLKHGKASVYRKVPFTIKLNYKTGSTTQSGYLGIDTGSQHIGVSVVREDGTVLHKEEIGLRDSMSKRKLMQSRASSRRGRRHRKTRYRHPKWRPKAKRVYCEIPDRNGRHWKKKEITFASKRPKGWLPPSLQSKTDHHIWWIKKLQDLLPEGYRLSIELGRFDPARLKDPEIHGELYQKGPQYDYENVRAYVLDRDRYTCQVCGKKGGKLHVHHILYRSHGATDDPQYMATVCSDCHNTENHQQGGILYQWMQKQKKFTKGLRDATFMNILRKRLIEAFPGATFTYGNITKADRERLRLPKSHGNDATAIAIVKTRIMTVKDKEPVIYIQQVRRKKRSLHEETPRKGRKEPNRKASRYDKNTKAVTVTKRKNKKKITITGCLFDRVELNGKKGWISGFTDKSCYVKDENDQYIRTSPKYKQVSLSKLKILHHCGNWAIGARQSLGKG

SEQ ID NO: 14581 - protein, 428 aa, unidentified
  REGION 1..428: note = cyanobacterium TDX16
MSKVFVIDSEKRPLTPIHSAQARQLLRNKKAAVFRRFPFTIILKESRPPDAPVSFLRLKIDPGAKHTGIALVDDNSGEVVFAAELKHRGFAIRDALTSRRQLRRSRRNRKTRYRQPRFLNRTRPDGWLPPSLNSRVENIKTWVERLRKFAPIAAISQELVRFDMQLICNPNIQGKEYQQGTLAGYETRQYLLEKWNRQCAYCDVKDVPLQVEHIQPRAKRGSNSITNLCLSCEKCNIKKGTQDIRDFLKKDSPRLEKILEQVKILLADAAAVNTTRFAVLEVLKATGLPVETGSGGLTKFNRCTQNLEKQHWIDAACVGTSTPILSIKGVKPLLIAANGHGTRQSCRTDKYGFPIRHCSRTKFHFGFQTGDIVKAVVTSGKKIGEYVGRIATRATGSFNILTHVGLVQGISHKYCNHVHRKDGYSYVA

SEQ ID NO: 14582 - protein, 472 aa, unidentified; identical to SEQ ID NO: 8020
  REGION 1..472: note = Human gut metagenome

SEQ ID NO: 14583 - protein, 455 aa, Thiomicrospira sp.; identical to SEQ ID NO: 5231

SEQ ID NO: 14584 - protein, 582 aa, unidentified
  REGION 1..582: note = Human gut metagenome
MYLDGVFGHLKDAGTCRYSSSLQHRRVYAKSRKTIPGQCLGLQPMRKNRFFVGRYCPTLIRRQHLANLKLIDTLLEKTEYIYVLGADGKPQMPTNRKVRVRSLFKSGLAKIVDTVPFTIRLLYENNAVLQPITLAEDPGRTNIGVAVLTQFGDLVFSAVVETRNKYIKKLMSDRKAHRQASRRGERKARQRLAKKHGSMIKSGMIMRKLPRYAADKFVTCKFIKNTEARFCNRKRIPDWLTPTVNHLVETHINIIRKISKYIPVTDIAVEVNRFAFMQMENPETTGIDFQNGPLKGFNDVKAALRVQQHGKCLMCKNDISDFHHIVPRSQGGSDNIQNQVGLCPKCHKKAHTNENFKQKLADKKVGLLKKYGALSALNQAVPFICKSLLEIYGKDHVHFCTGKDTSLIRTGLGYEKTKDNQMHEVDAYCIGLAAVGADIVNLPKFENIYKIKQFRRQDRSIINYQRERTYYLDGKKIATNRKPRFEQKKDAFSDWYSKRVKSDGKEQADKLTGRVTVKKSIRGYNSKNRLMPGTIFYYNGKRLVLTGQLTGGKYYRAYGDSKTNYPAAKCQVYKQNEGLVFV

SEQ ID NO: 14585 - protein, 431 aa, Escherichia sp.; identical to SEQ ID NO: 3801

SEQ ID NO: 14586 - protein, 461 aa, unidentified; identical to SEQ ID NO: 4910
  REGION 1..461: note = Human gut metagenome

SEQ ID NO: 14587 - protein, 451 aa, unidentified; identical to SEQ ID NO: 5875
  REGION 1..451: note = Human gut metagenome

SEQ ID NO: 14588 - protein, 420 aa, unidentified; identical to SEQ ID NO: 6472
  REGION 1..420: note = Human gut metagenome

SEQ ID NO: 14589 - protein, 457 aa, unidentified
  REGION 1..457: note = Human gut metagenome
LDKRKRPLGHCTTKRARQLIEKGRACVYRYYPFTIIIKDLDVRKIEVHHDYRIKPDPGAGYTGISIIEDDRVIAYFELQHRGSEIVDRLQTRRNSHRNRRSRETGYRRCKFPKNGVYETSREKGWLPPSQMSILNNVLNFVRRLEKLLGPCKISIELVKFDMQLLENLDIKGEDYQHVELYNYELKTYLLEKYQHTCQYCANETGDHRLEKEHMVPKSRGGSDSLKNLILACHTCNQKKADRTPEEWLDALKAKKNAGDMDKKRFECLEKVVEGKKVGQELRYAAWTNSMRWRLYNALRELSADGTVSVGTGGRTAYNRNKLGIPKAHHLDALCCTKDVPENGYRNAVQPCLVVKATGRGGRLLGTINDCGIITTKFYQRNKRVNGIQTGDIVQAVVSNGKYKGTYTGRVKVRRRGDFDLVTMAGKKISTTRKTTFKVLQRMDGYEYSFSEAIPLGS

SEQ ID NO: 14590 - protein, 417 aa, unidentified
  REGION 1..417: note = Human gut metagenome
MSTCVCVLSNSGERLMPTFRLGKVRRLLKDGKAKIVKHHPFTIQLLYDSKTNTQPIEICEDVGYNYIGISVKSESHEYVSAQYDTLQDEKEHHDDCRKMRRARRNRLRYRKPRFDNRKRSEGWLAPSLEHKKQLNISLIERYVSVIPITRATVEVGSFDTILLQAIQKGKSKPEGVDYQKGPRYNLATLREAVFYRDNYTCQVCGRKIADGAILHMHHMFYWKGRHGYQLDELVTACEKCHTPANHQKGGKLFGFGEDKEFANLSGAAFMNAVRWQIVDALHATYGKEFVTITYGAMTKEKRIILGIEKTHNNDAYAMGDYHPVHRCVFRHYQKRRRNNRVLEKFYDATYIDARTGNKAKGKELFNGRINRNHKKDSENFHKYRSKKVSKGRRSIRRQRYAIQPYDTVRLEGKTYIT

SEQ ID NO: 14591 - protein, 413 aa, Blautia sp.; identical to SEQ ID NO: 3476

SEQ ID NO: 14592 - protein, 442 aa, unidentified; identical to SEQ ID NO: 3218
  REGION 1..442: note = Human gut metagenome

SEQ ID NO: 14593 - protein, 466 aa, unidentified; identical to SEQ ID NO: 11103
  REGION 1..466: note = Human gut metagenome

SEQ ID NO: 14594 - protein, 447 aa, unidentified; identical to SEQ ID NO: 10267
  REGION 1..447: note = Human gut metagenome

SEQ ID NO: 14595 - protein, 481 aa, unidentified; identical to SEQ ID NO: 4958
  REGION 1..481: note = Ga0373627_0007249

SEQ ID NO: 14596 - protein, 346 aa, unidentified
  REGION 1..346: note = Human gut metagenome
LRQDITDLLSARRALRQSRRNRKTRYRAPRFNNRLCTKRKGWLVPSVENRINAHLSRIKAVLRLLPVTKITVETASFDLQLLKNPDISGKEYQEGEQLGFWNIREYVLCRDGHVCQHCYGRSKDPVLNVHHLESRRTGGDSPGNLITLCETCHKALHRGEITLKAKRGQSFRAEAFMGIMRSEVLNRLKASHPELEVNNTYGYRTKHARIANDIAKSHCADAFCIAGNLGAERLGEFFFQKQTRRNNRQIHKLSILKGGIRKRNQAPFEVKGFRLFDKVACQGEEGFIFGRRSSGFFDVRKLDGTRISAGISCKKLHLLEKRRTYLTEIRKEEALPPLPEGRGLRA

SEQ ID NO: 14597 - protein, 406 aa, unidentified; identical to SEQ ID NO: 10063
  REGION 1..406: note = Human gut metagenome

SEQ ID NO: 14598 - protein, 443 aa, unidentified
  REGION 1..443: note = Sediment metagenome
MGRNGVADTTSLLNLGEEYPTSERMVNVVFVYVLNCHGQPLMPCQPRTARLLLKKGKAKVVKMVPFMLQLLHGSSGYKQDVSLGIDAGSQHIGVSATTEQMVLFEAEVQLRTDIQQVLATRRQFRRSRRSRKTRYRKARFLNRKKRSGWLAPSVQHKVEAHLKTIRLVHKLLPVIRTTIEVAQFDIQKIRTPEISGKDYQQGPQLGFWNVREYILARDGHVCQWYQGKSKDKFLNVHHIESRKTGGDSPDNLITLCETCHDLIHRTHQEHMIERRSRGFRDATQMGIMRWRIYEQAKELFSNVHLTYGYITKQTRIAHTVEKSHVTDARCISDHPLAVSDGTWYLMKYVRRNNRQLHKATIKKGSKRQRNTAPKYVHGFRLFDCVTYQGKLCFVFGRRSSGYFDLRTLDGVKISASASYKKLTIVQKASALLVERRAAFPLVS

SEQ ID NO: 14599 - protein, 489 aa, Moorena sp.
MYVVYVLNQSGKPLMPTRRFGHVRRLLKSGMAKAVSTKPFIIRLQYISSDTKQPLHGATDPGRTNIGEAVINDKGEVVYAAHVASRNKEIPKLMENRASHRSASRRGERLRRKRRAEKNGTTTEFPNGRKLPGYEDGVLPLKDIINTEAKFNNRRRPAGWLTPTARQCVQTHLSMVRRICKFLPVTDWTLEYNRFAFMQLEDGTVRGWDFQNGRLKGYASKEDYVCALQDGRCALCGEPIEDYHHILPKHKGGSDTPENLVGLCASCHAAVHARKKSLSQIGRAKKYAGTSIVNTAMPFIWDGLVRMFGEDAHICEGQDTADARKALNVPKEHFTDAVCIAGLGSGIMPRYDDAQPFELRQFRNHDRALIKAQTERTYRLDGKIVARNRKPRFEQKGPALSDWFDSVAKEKGEKEAMRLLSKLEVSKSQRRYNNLERHLPGSVFLYKGKRYVMQGQRTNGNYLIPVGHADWNLPRKQCTFVGFQSLAYI

SEQ ID NO: 14600 - protein, 512 aa, unidentified
  REGION 1..512: note = Human gut metagenome
MPTVYVLNKDGKPLMPTTRCMHVRHLLKNGKARVVKSKPFTIQLLYETDDVVQPLYLGIDPGRTNIGVAVVKADGAAVFTAHLETRNKEVPKLMKKRKESRCARRTNGRRCRRQRGAKTNGTISKKCVKQTTAQNGSVSKRAKEIGVIKRHLQGCEKDVLCIGIKNKEAKFTNRARPEGWLTPTANQLLQTHINLVKKIQKFLPISDVVLEVNKFAFMQLDNPNIQKWQYQQGPLYQKGSLENAVSEMQEHHCLFCEKPIEHYHHVVPKSENGSNTIANIVGLCTEHHNLVHKDATWQKKLAKEKVGLVKKYSALSVLNQIIPALTKEMNSLFPKHFFVTNGKSTYDYRTAHGVSKDHWLDAYCIACSVLPNDVCDSNINSHVPYELKQFRRHDRRVLHKANMSRVYTLNGKTVATNRHKAIKQTTDSLEEFRQSHPGDVCKLKVKEHHPAYRNLNRNYPGSVFLVDGQVHVMQGVSGSHNGKADGYYNTNGNAYPYYKCKFVVKNEGIVFA

SEQ ID NO: 14601 - protein, 419 aa, unidentified; identical to SEQ ID NO: 4877
  REGION 1..419: note = Human gut metagenome

SEQ ID NO: 14602 - protein, 429 aa, Parasutterella sp.; identical to SEQ ID NO: 3656

SEQ ID NO: 14603 - protein, 490 aa, Anaerostipes sp.; identical to SEQ ID NO: 6170

SEQ ID NO: 14604 - protein, 430 aa, Moorena sp.; identical to SEQ ID NO: 4002

SEQ ID NO: 14605 - protein, 424 aa, unidentified
  REGION 1..424: note = Human gut metagenome
LVWNKRGKPLMPCSPAKARLLLKEKKAIVVRRTPFTIQLTIATGETKQPVSLGVDAGYEHVGLSASTEKAELYASEVELRQDITDLLSARRALRQSRRNRKTRYRAPRFDNRIRTKRKGWLAPSVENRINAHLSRIETVIRLLPVTKISVETTSFDMQLLKNSDIAGKEYQESEQLGFWNVREYVLFRDGHVCQHCHGRSKDPVLNVHHLESRRTGGDSPGNLITLCETCHKELHRGEITLKAKRGQSFRAETFMGIMRWEVLDRLKASHPKLEVQNTYGYRTKHARIVNGIAKSHCADAFCIAGNLGAERLGEFFFQKQTRRNNRQIHKLSILKGGIRKRNQAPFEVKGFRLFDKVACQGEEGFIFGRRSTGYFDVRKLDGTCISAGISYKKLHLLEKRRTYLTEIRKEEALPPPPEGRGLRA

SEQ ID NO: 14606 - protein, 417 aa, unidentified; identical to SEQ ID NO: 13676
  REGION 1..417: note = Human gut metagenome

SEQ ID NO: 14607 - protein, 518 aa, unidentified; identical to SEQ ID NO: 3878
  REGION 1..518: note = Human gut metagenome

SEQ ID NO: 14608 - protein, 466 aa, unidentified
  REGION 1..466: note = Human gut metagenome
MWLNSSEGKEQCCIHGNLGITLGKDSHSLRRGQFCQSLTVTTTRKETTSMYVYVLNQHGEPLMPCSPRKARTMLRDHKATVVRRTPFTIRLLHRSSEYRQDITLGVDAGSKFIGLSACTENKELFAAEVKPRNDVVDLLSTRRELRRSRRNRKTRYRAARFNNRVHSKHKGWLAPSVEVKIQEHITAINRTCAILPISMVIVETAEFDTQRLKAMLEGKPLPVGTDYQLGEMYDEYNVRQYVLKRDNYTCQCCGIQSTDKAPVKFAVHHKESRHVGGNAPNNLITLCEKCHRRLHAGVITLEEGKRKRGKSFRDAAFMGIMRKTLMRRLRSELSIPVKETYGYITKLLRETHSIQKSHVNDARCIARVPNAQPSDTLYRIRTVRNHNRQLHKANPIRGGIRKRNQAPYEVFGFRLWDKVLFSGRECFITGRRASGYFALKDFDGKKVHASASHKVLTVVESATSYL

SEQ ID NO: 14609 - protein, 487 aa, Lactobacillus sp.; identical to SEQ ID NO: 7743

SEQ ID NO: 14610 - protein, 424 aa, unidentified
  REGION 1..424: note = Fermentation metagenome
MVFVLNKNKEPLSLCHPARARKLLKDGKAVVHKKYPFTIRLKEYKKVNKKNKDEYRLKIDYGSRYTGLAILKNNKDIVWLAQIEHRTDIKKKLDNRRAYRRRRRSNNLRYRQLRFNNRKRKEGWIPPSLQSRVDNIESWVNRITKLCPLTHISYENVKFDTQLMDNPTIKSVEYQQGTLMGYEIREYLLEKFNRKCVYCGKTGIPLEIEHIIPKSRGGSNKIDNLAIACKGCNQVKGNKTAEEFGYPDIQKQVKKSLKDAAILNATRWKVYEILIATDLPVECGTGARTKMNRINLGLPKDHHYDACCIGKSTPDSLHFKTDNVLYIKVMSRGSHCRTNLDKYGFPRSYLPRQKYFFGFMSGDMVKAIVPKGKNKGIWYGSVACRSTGSFNINLKKGRVQGINHKYCQIVQKSDGYKYTLERRK

SEQ ID NO: 14611 - protein, 456 aa, unidentified; identical to SEQ ID NO: 11534
  REGION 1..456: note = Human gut metagenome

SEQ ID NO: 14612 - protein, 419 aa, unidentified; identical to SEQ ID NO: 9782
  REGION 1..419: note = Human gut metagenome

SEQ ID NO: 14613 - protein, 419 aa, unidentified
  REGION 1..419: note = Human gut metagenome
MVYVINKQGQALMPTERFGKVRRLLKNSLAHVVCRIPFTIQLDYDTTDNTQPVSLGIDAGSKHIGISATTSDKELYAADVELRNDIVDKLSTRRELRRTRRSRLRYRKARFNNRVSSKRKGWLAPSVENKIQTHLTVVEKIHKFLPITNIVVETAAFDIQKINNPSISGSEYQQGEQLDFFNVREYVLFRDNHTCQHCKGKSKDKVLNVHHIESRKTGGDSPNNLITLCETCHKAYHRGEFKLNVKRGKSFRDAAFMGIMRWKLYDRLKNIYPNVSMTFGYITKNTRITNNLPKEHYVDARCISGNPVAKPLGYYFYQKKVRCQNRQIHKVNFLKGGRKKLNQAPFLVKGFRLFDLVEYQKDLYYIFGRRNSGFFDIRKLDGTKVNKGSINCKHLRLMATRKSILIEKRMQINYENTGF

SEQ ID NO: 14614 - protein, 416 aa, unidentified
  REGION 1..416: note = Termite gut metagenome
MFVYVLDKTGQPLMPTARCGWVRRALRQGRAVVVNVSPFTIRLTYESGVVTQRCSLGVDAGSKVVGISVTTEQKEVYAAECCLRTDVVDNLSARRMFRNNRRHRKTRYRPVRFNNRKNRKGRLAPSLEQKINSHIQLIRKVCRILPIVSITVETAQFDIQKIKNPTVANEQYQHGEQFGHANVREYVLYRDGHKCQICGKVKDVKLHVHHIESRATGGDSPNNLTTLCTECHASLHAGDVSLKKKRGKSFRDATGMNIMRPTLLKRLRELFPNVQETFGYITKEIRKQYGLEKTHAVDARCISGNADVMPSPNRYQQQCVRTKNRMLHKATVQKGGTCKANQAAKFVCGFQLFDKVQLGDIECFVFGRRTKGSFDVRLLSGDKIHAGISYKKLKLIQKRTTILTTLTRKDGNSSHV

SEQ ID NO: 14615 - protein, 460 aa, unidentified
  REGION 1..460: note = Ga0315284_10034031
LIRELKGNFMQKLQVEFKNVPRNTSLVPCSTNPVLNRDESLSVQDKVLACNNPEVNLARRSGHSFLVFILNKNGKPLMPCSFKKSKQLVREGKALVIKRSPFTIQMNYGSTGYRQKINLGIDSGYENIGFSARTDKEELISGTVKLDGRTKERLDEKRMYRRGRRNKLWYREPRWLNRTKPEGWLPPSIERRYQTHLILIERIKKLIPISKVIIEIAKFDIQKLENPDIKGKEYQQGSLYEYQNVRSYLMSREKGLCEYCKKDFKNSSSHIHHRKPRNKNGNNRLGNLMLLHKDCHKKIHKKPELLKKYEKTSVKSYKQSTFMSIINKRFFNDIKDLEVTYGNITFVNRNKLGLIKTHYNDAFVISGGITQKRIKPFKVTQKHRNNRVLQMNRKGFKPSIKRNRSIIAPLDLFWVNKIKYSCRGMYNKGKYILYGDVKKKEYFKMNSVEKYFNNGSLVWS

SEQ ID NO: 14616 - protein, 415 aa, unidentified; identical to SEQ ID NO: 6883
  REGION 1..415: note = Human gut metagenome

SEQ ID NO: 14617 - protein, 442 aa, unidentified; identical to SEQ ID NO: 2807
  REGION 1..442: note = Human gut metagenome

SEQ ID NO: 14618 - protein, 411 aa, Virgibacillus sp.
MTEFSFVIDGKGKKLSPTKVNKAWFLIRKKRANLISKFPMVIQLTKEVEVEEIDRSAIHFNIDDGSKFAGVAIVQECSTKNKPIFKGTIEIRQDVKDKMNVRRGYRRYRRSHKRYRKKRFDNRLSSKRSRRVAPSILQKKESILRITKQLHKWIRMDTIHLEDVAIDIRALESGYKPYRWQYQKSNRLDENIRKAAILRDEHQCKQCGQKNCRLEVHHIIPKRLNGSNSIHNLITFCSDCHALVTGKELKYVNHFFNLIKGKKLDFTYAMHVMQGKNYLKKELEKVAPVKLTTGGDTANKRIDWGIEKSHSDDAIVISNLPIRSDQCEIKDYTIKPMRWKRKYKIDELAGFKHRDFVRYTKRNGETYEGYITVLNPRRKTFDMKTLDGKTLKKYGIKSAQLLWRFNKIYWF

SEQ ID NO: 14619 - protein, 474 aa, unidentified
  REGION 1..474: note = Human gut metagenome
MWLNSSEGKEQCCIHGNLGKTLGKDSHSLRRGQFCQSLTVTTTRKETTSMYVYVLNQHGEPLMPCSPRKARTMLRDHKATVVRRTPFTIRLLHRRSEYKQDITLGVDAGSKFIGLSACTESKELFAAEVKPRNDVVDLLSTRRELRRSRRNRKTRYRAVRFNNRVHSKHKGWLAPSVEVKIQEHITAIKRTCAILPISMVIVETAEFDTQRLKAMLEGKPLPVGTDYQLGEMYDEYNVRQYVLKRDTYTCQCCGIQSTDKAPVKFAVHHKESRHVGGNAPNNLITLCEKCHRLLHAGVVTLEEGKRKRGKSFRDAAFMGIMRKTLMRRLRNELSIPVKETYGYITKLLRETHFIQKSHVNDARCIARVPDAQPSDTLYRIRAVRHHNRQLHKVNPIKGGIRKRNQAPYEVFGFRLWDKVLFNGQECFITGRRVRGYFALKNFDGKKVHTGAPYTALTIVESSTSYLIERRGETT

SEQ ID NO: 14620 - protein, 415 aa, unidentified; identical to SEQ ID NO: 10543
  REGION 1..415: note = Human gut metagenome

SEQ ID NO: 14621 - protein, 427 aa, Anabaena sp.; identical to SEQ ID NO: 7770

SEQ ID NO: 14622 - protein, 471 aa, unidentified
  REGION 1..471: note = mine drainage metagenome
MDGLQKWTESLTYTPNSSPWRFRQQPLKWEAPCESWERRSQTPSNNPDVDIQSGMTGRDLRVPVLNMRNEPLMPTTPGRARKLLKQNKARVISSNPFTIQLLYATGETKQPVRLGVDSGYKRTGFSVVTQKRELISGEAVIRTDIPKLNQEKSMYRRGRRNKLWYRQPRFMNRGNKKEGWLAPSINHKLQTHVKLIEKLKRILPITETVIEVASFDAQKMQNPEISGIEYRQGELQGYEIREYLLEKFHRTCVYCGKTNVPLEIEHLTPRSRGGPDTVNNLAISCHECNQRKNNLTAEEFGYPEVRKMALVTLRDAAFMNTVRWKLTHLTGSAHTFGYITKKNRISLGLDKSHANDAFVIAGGTDQIRASQYEISQRRRNNRSLQVNRKGFMPSIRRKRYTFQPGDIVVHSHERFSVIGVHSYGKSIVIKGGEMKMDINTKEVKLVKYGKGLRFTAQFLPPLKKVGILGGS

SEQ ID NO: 14623 - protein, 279 aa, unidentified
  REGION 1..279: note = Human gut metagenome
VVVETAEFDLQLLKAIADGKPVPQGEDYQKGEMYGHYNVRQYVLWRDNYTCQCCGTHPSKKKEVRLHVHHLESRKVGGDAPDNQVTLCESCHEKLHKGLIAEKDFKKRKRRSTRDATFMGIMRKTLMQRLCSELPIPVVETRGYITKATREKLLVLPKSHINDALAIAQGQRGFNVGYLPEIAQIDKIYTIRPVRHHNRQLHKATILKGGIRKSNQTEKYVFGYCLFDKVQFNGQDCFIWGRRTTGIFTIKTINGKMIKDGISFKKLKLVEKSTSYLIA

SEQ ID NO: 14624 - protein, 411 aa, unidentified
  REGION 1..411: note = Human gut metagenome
MVYVQDIDGKPMMPTTRHGKVRRLLKDNKAVVVNTCPFTIKLTYKTSDYKQEIVLGVDSGTKHVGLSATTKSKELYASEVILRSDVVDLLSTRRELRRKRRYRLRYRKPRFKNRIKYKKEGWIAPSIRQKIDSHIRIISFVYSILPVSKLIVEVAQFDTQKIKNPEISGKEYQEGDQLGFWNVREYVLARDGHKCQHCKGKSKDPILNIHHIESRKIGGDSPSNLITLCETCHKEFHKGNIKLKVSRGKSLRDAAVMGIMKWKLYEELKSRYDNVSMTFGYITKYNRINHGIEKSHVSDAFVISRNFNSCRLGYYYKRKLVRRHNRQIHKMKILKGGIRKRNQAPFKVFGFRLFDKVMFQGEEHFIYARRLSGQFNIRDINGENKKDVSCKKLKYVSHGLVSVKTNLFLSQ

SEQ ID NO: 14625 - protein, 424 aa, Moorena sp.
MRVFVLDKNLKPLDPCRPARARLLLKQGRAKVFRRYPFTIILPDLEVENCTTHNHQLKIDPGAKTTGLAIRQNNTVIWGAEITHRGFQIRDALTSRRQLRRSRRNRKTRYRKPRFLNRKRPERWLAPSLMSRVHNILTWVKKLIRFCPIAGISQELVRFDTQKMENPEISGTEYQQGTLYGYEIREYLLEKWNRKCAYCGTTDTKLEIEHIKPKSLGGSDRVSNLAIACHDCNQAKGNQDIEQFLSGKPEVLKQVLSQAKRPLADAAAVNATRWKLYNELQLTGLPVETGSGGQTKYNRRRFNLVKTHWLDAACVGNVQSIYVENYQPLSIVAKGHGTRKICRTDKFGFPKRYCSRTKIHKGFQTGDIVKAVVTKGKKIGTYIGRVATRKTGSFNISTANGLIQGISHKYCQPIHKKDGYAYTI

SEQ ID NO: 14626 - protein, 420 aa, unidentified
  REGION 1..420: note = Human gut metagenome
MQYVYVLNKHGEPLMPCSPRKARLLLKQKKACVVKRTPFTIKLLYGSTGYKQPITLGVDAGSKHIGISATTEKHELYREEATPRNDVVDLLSARRAFRRSRRNRKTRYRAPRFDNRVHSKHEGWLAPSVEVKIREHITLIKRVCRILPITLVRVETAEFDTQRLKAMLEGKPLPVGTDYQLGEMYDEYNVRQYVLKRDNYTCQCCGAHPTKTKAVKLHVHHIETRKTGGNAPNNLITLCTVCHKALHAGKVTLDGKKRGKPLKDAAFMGIMRKALLERLRKELKIPVQGTYGYITKYLREKHGISKSHTNDARCISKNPLAIPCDTCYYTKAVRHHNRQLHKATILKGGIRKANQAPYIVKGYRLWDKVSYNGKECFITGRRTSGYFALKKLDGTVISNSISYKKLRLLEVATNYITERK

SEQ ID NO: 14627 - protein, 414 aa, unidentified
  REGION 1..414: note = Human gut metagenome
MPCSPAKARLLLKEKKAIVVRRTPFTIQLTIATGEAKQPVSLGVDAGYKHVGLSASTEKAELYASEVELRQDVSDLLSARRALRQSRRNRKTRYRAPRFNNRLRTKRKGWLAPSVENRINAHLSRIEAVLRLLPVTKITVETASFDMQLLKNPDIAGKEYQEGEQLGFWNVREYVLFRDRHVCQHCYGRSKDPVLNVHHLESRRTGGDSPDNLITLCETCHKALHRGDITLKAKRGKSFRAEAFMGIMRWEVHNRLRALHPGIEVSNTYGYRTKHARIANGIAKSHCADAFCIAGNLGAERLCEFFFQKQTRRNNRQIHKLSILKGGIRKRNQAPFEVKGFRLFDKVACQREESFIFGRRSSGFFDVRKLDGTRISAGISCKKLHLLEKRRTYLTEIRKEEALPPLPEGRGLRA

SEQ ID NO: 14628 - protein, 512 aa, unidentified; identical to SEQ ID NO: 5549
  REGION 1..512: note = Human gut metagenome

SEQ ID NO: 14629 - protein, 493 aa, unidentified
  REGION 1..493: note = Human gut metagenome
MAAVYVISASGKPLMPTTRCGHIRGLLNAGKARVVEREPFTIQLKYETPDVTQPLYLGIDPGRTNVGSAVVREDGECVFTAQLTTRNKNVPKLMKARKQFRMAHRRLKRRCKRQRRAKGAETLSQKGEFQRLLPGYEEPILCKGIRNKEARFNNRQRPAGWLTPTANHLLLTHLNMVKKLQKLLPITDVVLEVNRFAFMAMENPSIRRWQYQQGPLYGKGSVEDAVYAQQDGHCLFCGKPIAHYNHVVPQHKNGSETLENRVGLCNEHHDLVHKDRAWDAKMKETKAGLNKKYHALSVLNQIIPALTEQLTAMFPQHAFVTTGKDTADFREDYGIAKEHHLDAYCIACSVLAEPTKVAAPTGKPHRLMQFRRHDRQVCHKENIKRVYLSEGKAVATNRHKAIEQKDDSLEEFRKTHTQQEVSALTVKDHQPVYKDMRRFMPGGVFLFNGKVHTLQRSHGRYKGMPFYYIDTDGSKNHAKGCIFLQQNCGLRWV

SEQ ID NO: 14630 - protein, 406 aa, unidentified; identical to SEQ ID NO: 4082
  REGION 1..406: note = Human gut metagenome

SEQ ID NO: 14631 - protein, 424 aa, unidentified; identical to SEQ ID NO: 5018
  REGION 1..424: note = Human gut metagenome

SEQ ID NO: 14632 - protein, 512 aa, unidentified
  REGION 1..512: note = Human gut metagenome
MSTVYVLNKDGKPLMPTTRCGHVRHLLKEQKARVVASKPFTIQLLYKTNDVVQPLYLGIDPGRTNIGVAVVKADGTAVFTAHLETRNKEIPKLMKKRKDSRRARRTNGRRCRRQRRAKANGTISKKCVKHDTAQNGSVSKRAKEIGVIKRHLPGCEKDVLCIGIKNKEAKFSNRTRPEGWLTPTANQLLQTHINLVKKIRKFLPISDAVLEINKFAFMQLDNPNIQKWQYQQGPLYQKANLEEAVSEMQEHHCLFCKKPIAHYHHVVPQSENGSDTIGNIVGLCTKHHDLVHKDTAWQKKLAKKKTGLNKKYGALSVLNQIIPALTKELSSLFPKHFFATNGKSTYDYRSAHGVSKDHWLDAYCIACSVLPNDVCDSGINNRVPYELKQFRRHDRRALNNENMSRVYTLNGNVVATNRHKATKQTTDSLEEFRQNHPDDVCKLKVKEHHPTYRNMNRNYPGSVFLIGKQVHVMQGIASSKDGEATKYKDTNANSIAAGKCKFVAKNSGMLFV

SEQ ID NO: 14633 - protein, 270 aa, unidentified
  REGION 1..270: note = Human gut metagenome
LQLLKAIEEGKPVPQGEDYQQGEMYGHYNVRQYVLWRDDYTCQCCGAHATKKKEVRLHVHHLESRKVSGDAPDNQVTLCESCHEKLHKGLIAAKDFKKRKRRSTRDATFMGIMRKTLIQRLHAELTIPVAETRGYITKATREKLLVLPKSHTNDALAIAQGKHGFNVGYLPGIAQIDKIYTIRPVRHHNRQLHKAAILKGGIRKSNQAEKYVFGYRLFDKVQFSGQDCFIWGRRTTGIFTIKTINGKMIKDGISFKKLKLVEKSTGYLIA

SEQ ID NO: 14634 - protein, 408 aa, unidentified
  REGION 1..408: note = Human gut metagenome
MVYVQDINGKPMMPTTRHGKVRRLLKDKKAVVVNLCPFTIKLTYVTSDYKQEIVLGVDAGTKHVGLSATTKSKELYSSEVILRNDIVDLLSTRRELRKTRRNRLRHRKHRFNNRIKSRRPGWVAPSVKYKIDAHIRVIDNVFSILSVSRIVIEVAQFDTQKINNPNISGKEYQEGDQLGFWNVREYVLARDGHKCQHCKGKSKDPVLNVHHIESRKTGGDSPSNLITLCETCHKEYHKGNIDLKIRRGKSLRDAAVMGIMKWRLYEELKSKYDNISMTFGYVTKYNRIKHGIEKSHVFDAFVISKNFDAIRLGYYYKVRLVRRHNRQIHKQKIPKGGIKRLNQSPFEVFGFRLFDRVMFENSYYFIFARRKTGSFNIRDIDGKNQRDITYKKLKLSRCKRFMVQKEMD

SEQ ID NO: 14635 - protein, 400 aa, unidentified
  REGION 1..400: note = Human gut metagenome
KKAIVKRRTPFTIQLTIATGETKQPVGLGVDAGYKHVGLSASTDKAELYASQVELRQDITDLLSARRALRRARRNRKTRYRAPRFNNRIRTKRKGWLAPSVENRINAHLSRIEAVLRLLPVTKITVETASFDMLLLKNPDIAGKEYQEGEQLGFWNVREYVLFRDGHVCQHCYGRSKDPVLNVHHLESRRTGGDSPGNLITLCETCHEALHRGEIALKTKRGHSFRAEAFMGMMRWEVLNRLKASHSELEVNNTYGYRTKHARIVNGIDKSHCADAFCIAGNLGAERLCEFFFQKQTRRNNRQIHKLSILKGGIRKRNQAPFEVKGFRLFDKVACQGEESFIFGRRSSGYFDVRKLDGTRISAGISYKKLRLLEKRRTYLTEIRKEEALPPLPEGRGLRA

SEQ ID NO: 14636 - protein, 411 aa, Clostridium sp.; identical to SEQ ID NO: 7735

SEQ ID NO: 14637 - protein, 465 aa, unidentified
  REGION 1..465: note = Human gut metagenome
MSTCVCVLGSDGERLMPTFRLGKVRRLLKDGKAKIIKHHPFTIQLLYDSKTNTQPIEICEDVGYNYIGISVKSESHEYVSAQYDTLQDEKACHDSCRKLRRTRRNRLRYRKPRFDNRKRGEGWLAPSLRHKKELNVNVVKMYCAVMPITHATVEVGSFDTMLVKAIQEGKAIPEGADYQKGPRYNLATLREAVFYRDNYTCQVCGRKIADGAILHMHHMFYWKGRHGNSLDELLTVCEKCHTPANHQKSGKLYGFGEDVKFSNLSGAAFMNTVRWQIVNELYAAFGKPFVTITYGAMTKEKRIALHLEKSHNNDAYAMGEFHPNCRCAFEHYEKVRRNNRILERFYDSRYIDIRTGEIATGKELFNGRINRNHKKDSENLHKYRGKRTYAGHRALLRKKVNLNPGDLVSLNGEVLIVYGTHTDKKGAVNVEFKTPAKNGRKSASLKKLKIVKATSSIHPAWEKVS

SEQ ID NO: 14638 - protein, 430 aa, Moorena sp.; identical to SEQ ID NO: 4002

SEQ ID NO: 14639 - protein, 375 aa, unidentified; identical to SEQ ID NO: 5583
  REGION 1..375: note = Human gut metagenome

SEQ ID NO: 14640 - protein, 557 aa, unidentified
  REGION 1..557: note = Human gut metagenome
MIYNLVSIRERSFMKQKKQKVMVYILNKKGKPLMPTTRCGHVRKLLDSKKAVVVSSNPFTIRLKYDTPNGVQDVFAGIDSGRENIGSGASNEDGDCLYLGELKTSNKSIKMKITERAGFRKERRRHDRQNKQRKARKDHTEIQNGNADICRTTISCKSVQISYPAAEKSVTHKIIRGKEGKFANRHRDEGWITPSARQLVQMHMNDLKSMCKILPISHVTLERVAFDFQKLENENIKAWEYGKGKLYGYDSPEEYIHDVQGGKCLICGKPHIDYLHHIIPRSKGGSNKVSNLAGLCYDCHYGPMGVHNCQDTQDRLPELKNEANKQYKVSLLNSVMPVLIEEMDKFCKANSIIFSICEGHDTAKVRDIYDLQKDHCVDGFAISLVGRNVKSVDVMPDRIHQKQRYKKKSKNIIKKRNCREYYDGKKLVAVNRHKGTDQKADSLEEYMNTYAETHTADECKKHFESLTVKPARRTYTFHKEGRICPFHIGDKVRYEKKNKIKGNTKVETFICEGIRFPKDENKAKVEHNKTKSKKMKFCRVLEPGCTPYIDYRKLVLI

SEQ ID NO: 14641 - protein, 423 aa, Moorena sp.
MRVFVLNKNRQPLDPCKPARARILLSAGKAKVYRRYPFTIILTEEIKNPVTHEHQLKIDPGAKTTGLAIIQGQRVIWGAELTHRGFQIRDNLTSRRQLRRSRRSRKTRYRKPRFSNRTRPKGWLAPSLTSRVQNILTWVKKLIRFCPVTGISQELVRFDTQKLQNPEISGIEYQQGTLYGYELREYLLEKWNRKCAYCGATGTQLEIEHIKPKSRGGSNRVSNLTIACHSCNQAKSNQDIELFLSKKPSLLKRILRQAKRPLADAASVNITRWKLYHVLKSIGLPVEVGSGGLTKFNRCRQSLPKAHWLDAANVGKVETLIIEVTLPLLITAKGHGTRQLCRTNKYGFPIRHCSRIKFHKGFQTGDIVHAVVTKGKKVGTYVGRVATRKSGSFNISTKLGLVQGISHKYCQFIHRKDGYAYGI

SEQ ID NO: 14642 - protein, 512 aa, unidentified; identical to SEQ ID NO: 5549
  REGION 1..512: note = Human gut metagenome

SEQ ID NO: 14643 - protein, 446 aa, unidentified
  REGION 1..446: note = Human gut metagenome
VAFSLATIQKKEEGIMPNKVYVINKHGRPLMPCSPAKARHLLDAGKAKVKKRTPFTIQLVYGSSGYTQEVILGVDAGSKTIGISASTKKEEVFAADVTPRNDVVDLLSTRREFRRARRNRKTRYRKPRFDNRVRSKHKGWLAPSVEVKIQEHITAIRRVCGILPVSKVVVETAEFDLQLLKAIEEGKPVPQGEDYQQGEMYGHYNVRQYVLWRDNYTCQCCGAHATKKKEVRLHVHHLESRKVGGDAPDNQVTLCDRCHEKLHKGLITEKDLKKRKRRSTRDATFMGIMRKTLMQRLCSELPIPVIETRGYITKATREKLLVLPKSHTNDALAIAQGKHGFNVGYLPGIEQIDKIYTIRPVRHHNRQLHKAAILKGGIRKSNQVEKYVFGYRLFDKVQFNGQDCFIWGRRTSGYFAVKTIDGKVIHNSASFKKLNLVERASNYLIA

SEQ ID NO: 14644 - protein, 448 aa, unidentified; identical to SEQ ID NO: 3877
  REGION 1..448: note = Human gut metagenome

SEQ ID NO: 14645 - protein, 406 aa, unidentified; identical to SEQ ID NO: 5685
  REGION 1..406: note = Human gut metagenome

SEQ ID NO: 14646 - protein, 417 aa, Geobacillus sp.; identical to SEQ ID NO: 5432

SEQ ID NO: 14647 - protein, 438 aa, unidentified
  REGION 1..438: note = metagenome
LITGKHISSTRYWYEEKFSERKVSEMTNYAFVLDADNKQLTPTKEQKAWFLIRKKRATLVSKYPMVIQLKKKIPDKEICKDEVRCGIDDGGLHVGVALVQKCHTRNKVIFKGVIEQRNDVKHLMDVRRGYRRYHRYHKRYRPARFNNRNSSKREGRITPSILQKRQATIRVVNQLNKWINITNYWLEDVAIDIRALTDGYKPYRWQYQKTNRLDENIRKAVILRDGCKCMECEKSNCRLEVHHIKPRRLKGSNTLDNLITLCAKCHQKTESVEELYMDRYFALLKSSDNKNLNYAQHVMIGKKWLREQLSNLGMLHLTNGGDTANKRIDWDITKSHSNDAICITDLKPDTYEIKEWVIKPMRRQSKAKADNVLGIKHRDLVEYTFRNGETHRGYVTALYPEQNAINFQSPTKHCKKVNARKCKVLWKYSKIYWLDNVS

SEQ ID NO: 14648 - protein, 413 aa, unidentified
  REGION 1..413: note = Human gut metagenome
MTSYSFVLDANGKPLAPTKEQKAWFLIRKKRAALVSKYPMVIQLMKEIPENEICQDEIRCGIDDGGLHVGIALVQKCKTKNKVVFKGTMEQRNDVKHLMEVRRGYRRYHRYHKRYRQARFDNRKSSKRKGRIAPSILQKRQATIRVINRLNKWINITNYWLEDVSVDIRALTDGYQSYRWQYQKSNRLDENIRKAAILRDGGKCMECGKSNCRLEVHHIKPRRRNGSNTLDNLITLCESCHQKTEGQEELYMDRYFSLLKSSDNKNLNYAQHVMIGKMWLRKQLSGLGVLYLTSGGDTANKRIDWNIEKSHANDAVCITDLRPDTCDVKEWTMKPMRRQSKAKTDHVLGIHHRDLVEYTFKNGETHRGYVTALYPDQKAINFQSQTKHCKKVNARKCKLLWNYSKIYWFENAS

SEQ ID NO: 14649 - protein, 451 aa, unidentified
  REGION 1..451: note = Human gut metagenome
VTTILKTCFAAFNLAKVVVLMDAWDIIVVLNKRGKPLMPCSPAKARLLLKEKKAIVKRRTPFTIQLTIATGETKQPVGLGVDAGYKHVGLSASTDKAELYASQVELRQDITDLLSARRALRRARRNRKTRYRAPRFNNRIRTKRKGWLAPSVENRINAHLSRIEAVLRLLPVTKITVETASFDMLLLKNPDIAGKEYQEGEQLGFWNVREYVLFRDGHVCQHCYGRSKDPVLNVHHLESRRTGGDSPGNLITLCETCHEALHRGEIALKTKRGHSFRAEAFMGMMRWEVLNRLKASHSELEVNNTYGYRTKHARIVNGIDKSHCADAFCIAGNLGAERLCEFFFQKQTRRNNRQIHKLSILKGGIRKRNQAPFEIKGFRLFDKVACKGEESFIFGRRSSGYFDVRKLDGTRISAGISYKKLRLLEKRRTYLTEIRKEEALPPLPEGRGLRA

SEQ ID NO: 14650 - protein, 418 aa, unidentified; identical to SEQ ID NO: 6784
  REGION 1..418: note = Human gut metagenome

SEQ ID NO: 14651 - protein, 420 aa, unidentified
  REGION 1..420: note = Human gut metagenome
MQYVYVLNMHGEPLMPCSPRKARLLLKEGKARVVKHTPFVIKLLHGSVGYKQPVVLGIDAGSKHVGLSACTKDRELYKEELAPRNDVVELLSARRQYRRSRRNRKTRYRAPRFNNRVHSKHKGWLAPSVEVKIQEHITVIKRVCKILPVTLVRVETAEFDTLRLKAMLEGKPLPVGTDYQLGEMYDEYNVRQYILKRDNYTCQCCGAHPTEQKLVRLHVHHMESRQTGGNAPNNLITLCVACHKALHAGKISLDGKKRGKPLRDAAFMGIMRKTLLSRLETELSVPVQQTYGYITKMLREKNHIEKSHTNDARCITGFPKATPCDAMLCTRALRHHNRQIHKAKILKGGIRKRNQAPYLVKGFRLWDKVRYDDKECFITGRRVSGYFALKKYDGTVISNSASYKKLTLLEAATNYITERS

SEQ ID NO: 14652 - protein, 442 aa, unidentified; identical to SEQ ID NO: 10357
  REGION 1..442: note = Human gut metagenome

SEQ ID NO: 14653 - protein, 512 aa, unidentified; identical to SEQ ID NO: 5811
  REGION 1..512: note = Human gut metagenome

SEQ ID NO: 14654 - protein, 428 aa, unidentified
  REGION 1..428: note = Human gut metagenome
LKVFVLNMRGRPLMPCSPAKARHLLKAGKAVVRRRTPFTIQLRIATGETKQSVTLGVDAGAKHVGLSAATEKEEVFASEVELRQDITELLAARLSLRRERRQRKTRYRAPRFLNRVRSKHKGWLAPSVENRIQAHMSRIDAICGLLPVTKIVIETASFDIQKIKHPDVEGTDYQQGDQLGFWNVREYVLFRDGHVCQHCHGHAKDKILNVHHLESRQTGGDAPNNLITLCETCHKACHAGKIKLKVKRGQSFRAEAFMGIMRWTLLDRVRKAHPGLPVENTYGYLTKNTRITLGLPKTHCVDAYCIARNLKAVRRGVCLHQRQVRKHNRQIHKSTVLSKTLKDGTKIGYRKLNQTPHLVKNFRLFDKVRCLGQTGFIFGRRSSGYFDVRRLDGVKISSCISYRKLTLLEKRGTCLTELRKEDGASSTV

SEQ ID NO: 14655 - protein, 472 aa, unidentified; identical to SEQ ID NO: 4119
  REGION 1..472: note = Human gut metagenome

SEQ ID NO: 14656 - protein, 396 aa, unidentified; identical to SEQ ID NO: 4508
  REGION 1..396: note = Human gut metagenome

SEQ ID NO: 14657 - protein, 397 aa, unidentified
  REGION 1..397: note = metagenome
IVKRRTPFTIQLTIATGESKQPVTLGVDAGYKHVGLSASTEKAELYASEVELRQDVSDLLSARRALRQSRRNRKTRYRAPRFNNRLRTKRKGWLAPSVENRINAHLSRIEAVLRLLPVTKITVETASFDMQLLKNPDIAGKEYQEGEQLGFWNVREYVLFRDRHVCQHCYGRSKDPVLNVHHLESRRTGGDSPGNLITLCETCHKALHRGDITLKAKRGKSFRAEAFMGIMRWEVHNRLRALHPGIEVSNTYGYRTKHARIANGIAKSHCADAFCIAGNLGAERLCEFFFQKQTRRNNRQIHKLSILKGGIRKRNQAPFEVKGFRLFDKVACQGEEGFIFGRRSSGFFDVRKLDGTRISAGISYKKLHLLEKRRTYLTEIRKEEALPPLPEGRGLRA

SEQ ID NO: 14658 - protein, 415 aa, unidentified
  REGION 1..415: note = Human gut metagenome
MVYVLANDGQPLMPTERHGKVCRMLKSGIAKVVKKCPFTIQLQYESERNVQPVALGIDAGSKHVGVSATTKAKVLYESDVELRDDIVKLLATRRQLRRRRRSRKTRYRPARFDNRRRKEGWLAPSIRQKIESHLTVVANVCKILPVSQIIVETASFDIQKIKNPDIQGIEYQQGEQMDFWNIREYVLFRDGHTCQCCKGKSKDKVLNVHHIESRKTGGNAPNNLITLCEPCHKGYHNGTVTLPKNIKRGMKFKDAAFMGIMRWTFYNTLKEQYEPDIPVHYTYGYITKNTRINHNLPKGHCIDARCISGNPDAVSDSTYYYQKKVRCHNRQIHKQTILKGGIRKSNQAEYLVRGFRLFDKVRYQGREYFIFGRRKSGFFDIRTLSGEKVNKGSINVKRLTFVDTRKNYLTERRTV

SEQ ID NO: 14659 - protein, 420 aa, unidentified
  REGION 1..420: note = Human gut metagenome
MQYVYVLNKHGEPLMPCSPGKARLLLKRQKACVVKRTPFTIKLLHGSAGYKQPITLGVDAGSKHVGLSASTETHELYCEEFTPRNDVVELLSTRRQNRCSRRNRKTRYRTPRFNNRVHSKHKGWLAPSVEVKIQEHITVIKRICRILPITLVRVETAEFDTQRLKAMLAGKPLPVGTDYQLGEMYDEYNVRQYVLKRDNYTCQCCGAHTTAKKAIKLHVHHLESRKVGGNAPSNLITLCTACHDNLHKGKVTLDGKKRGKTLRDAAFMGIMRNTLLIRLRNELNIPVQNTYGYITKLLREQNDIKKSHINDARCISKHPLAEPCSVCYRTKAIRHHNRQIHKAKILKGGIRKANQAPYIVKGFRLWDKVLYNGQECFISGRRSSGYFALKKLDGTAITNSISFRKLRLLEPAINYLIERM

SEQ ID NO: 14660 - protein, 453 aa, unidentified
  REGION 1..453: note = Human gut metagenome
MSVAVVSKTGMLLMPTSEYRARKLLKSKKAIIHGYHPFTIQLTERETGYIQPVELCMDTGYIHIGTSVKSEKHEYLGEQIDTLTDERQKHDACRMYRRQRRNRKRYRQPRFNNRERDDGWISPSLEHKKTIHIQALSRICKVIPVTDITLEMGNFDTQVLKAREEGRPLPQGLDYQHGERYSVTTLREAVFLRDGYTCQRCGRTIKDGAILHVHHVVYRSQGGTNRISNLITICDKCHTPANHKPGGKLYGWKPKVASFKGATYMTTIRWKLYNEIKALFPDIDIHITYGAETKERRRAFDITKSHVNDAFVMGQFHPKYRSKPVCYKKKRRNNRCLEKFYDAKYIDSRNGKTRTGQELFNGRISRNHKKDSENLHQYRRQKISTGKRTIRKQHYAIQPHDIVIFNGEKFETSGCHNNGTRVILLPQKKSVAIKKLNIYRYAGGYFKSAFNQK

SEQ ID NO: 14661 - protein, 411 aa, unidentified; identical to SEQ ID NO: 6901
  REGION 1..411: note = Human gut metagenome

SEQ ID NO: 14662 - protein, 419 aa, unidentified; identical to SEQ ID NO: 6355
  REGION 1..419: note = Human gut metagenome

SEQ ID NO: 14663 - protein, 431 aa, unidentified; identical to SEQ ID NO: 4306
  REGION 1..431: note = Human gut metagenome

SEQ ID NO: 14664 - protein, 451 aa, unidentified
  REGION 1..451: note = Human gut metagenome
LSADRNINFYSLLKERRFFLKQKEYAFVVDKTGKQLSPTDINNAWRLIRTKKAKCIKYNPFTIKLNKIVKDEELDQSVFEIGIDDGSSNVGFSILQYCKKDNQITRIKVIQKATMEQRKDVKHLMDVRRGYRRNRRSEKRSRACRFNNRSASKRKERIAPTIKQKRDAVVRVVKYYKKFVNITQIALEDVSIDIRVLTEGQKLKGEEYQKSNRQDDNIRRAVYLRDHGTCQMCEEHKNKMEAHHIHPRRMGGPDSIYNEILLCHDCHLSINGKELQYEEEFYNKINGKLVKTDIAQHVMQGKYYLRNELSSLGELHLTYGGTTANKRNAWNIEKSHSNDAICIGCKDINMKPDTVNVKEYVIKPMRHKRKSNTTSMGFELGDYVELEIRSNKLKKKIKVRGYITAFIKCRNGKEKGKLTYLNLTADDGTIYKRYSLKKCRLLERQKNLRFL

SEQ ID NO: 14665 - protein, 412 aa, unidentified
  REGION 1..412: note = Human gut metagenome
MVYVISSNGQPLMPTENHAKVRILLKNQKAKVIKKCPFTIQLTYNSTNYTQPVSLGVDAGSKHIGLSATTKDKVLFESDVELRNDIVDLLSARRQNRRARRNRKTRYRKPRFSNRRRKDGWLSPSVQSKVDTHLTAVRKVHEILPVSKIIVEVASFDIQKIKNPAISGADYQKGEQMGFWNVREYVLFRDGHECQCCHGRSKDMILNVHHIESRKTGGDAPNNLITLCESCHTGYHKGTVKLPKTIHRGMSFRDACFMGIMRWAFYNKLKELYSNVSLTYGYITKTIRIENDLPKDHCIDARCISGNPLASSDGTVYYQKKVRDHNRQIHKNTILKGGIRKRNQAPYEVMGFRLYDKVRWKGKNCFIFGRRSTGRMDLRLLNGTKVNSSVGYKNLRLLEMRKNMLIELRKVV

SEQ ID NO: 14666 - protein, 419 aa, Aneurinibacillus sp.; identical to SEQ ID NO: 4563

SEQ ID NO: 14667 - protein, 410 aa, unidentified
  REGION 1..410: note = Human gut metagenome
MVYVLNRIGQPLMPCKEAKARKLLKNHKARVDKREPFTIQLLFDCENRIQDITLGIDAGSKHLGLSATTEQKELYAADVELRSDIVELLSTRRQYRRTRRGRLRYRAPRFCNRVRSRNKGWLAPSVEQKIKTHLRVVNDVCRILPVSKIIVETAAFDVQKIENPDISGEGYQQGSQLDFWNVREYVLWRDNHECQCCHGKSMDKILNVHHIESRKTGGDSPKNLITLCKNCHDQYHMGKINPNLKCREPLRDAAFMGIMRWSFYNRYGYITKNTRIQHDLPKEHYTDARCISGNPQAEPLGYYFCQKKVRCHNRQIHKANIQKGGIRKRNQAAYLVKGFRLFDKVRYDNQAGFVFGRRANGYFDLRKLNGEVIHRSASYKKLELLDTRKTLLTERRQAVPLKAKAMSIPA

SEQ ID NO: 14668 - protein, 456 aa, Halomonas sp.; identical to SEQ ID NO: 14271

SEQ ID NO: 14669 - protein, 448 aa, Deinococcus sp.
MQSDKPEHAPLGELYMALTRNKETMSNRVFVLNPDTTPLMPCTAKRARKMLEAGKAAVWRRYPFTIILKSEAGKGSQPLALKLDPGSKTTGMALVLDGKHGKKAIWGAELHHRGHAIRDSLTRRRQLRASRRSRKLRHRPARFLNRTRAEGWLPPSLMHRVLTVISWAKRLDRFTMLDSFSMELVSFDTQKMMNPDIQRQDYQRGTLFGTEVRAYLMHKWEGKCAYCGKKEKGLQVEHLLPRSRGGSNRISNLVMSCQKCNAAKGSKALEEFLRRKPAGLKRIQEQQKQSLADTAAVNATKHRLLDELKCFGYPVETGSGAQTSFNRQQQGYDKAHWIDAACVGDSGEQVQVKPLEPLKIKCMGRGNRQMCGTDKYGFPIRHRTRQKVFFGFQTGDIVRAEVLSGKYVGVHVGRIAVRARPNFKLETFDVHAKYLTALHKADGYSYSF

SEQ ID NO: 14670 - protein, 447 aa, unidentified; identical to SEQ ID NO: 5937
  REGION 1..447: note = Human gut metagenome

SEQ ID NO: 14671 - protein, 429 aa, Arthrospira sp.
MPNYQNYVFVVDTLGQPLSPTHRARARKLLKQGLAAVFRTYPFTIILKKTVENPVNEPLRLKLDPGASVTGIALVNQSRDTVIWGAELTHTGDRIRAKLTAHRVVRRHRRCRKTRYRQARFNNRKRADGWLAPSLKHRVETTLTWVNRLISSCPITDISMELVRFDTQKLQNPEISGVEYQQGVLFGYELREYLLTKWQHQCAYCGGQNIPLEIEHIQPKSQGGSDRVSNLAIACHKCHQKKGSQALEQFLEKKPEILKRLLVQAKAPLKNAAAVNSTRWALFNSLKLTGLPIEIGTGGLTKYNRTVQGLPKTHWLDDADCVGKSTPTRLKIKTHQPLLITCFGRGGRQKAAPNKRLPIRHNPLKPIKGWLTGDIAKHKTHGIGRITLRSRGSFVLTKPDKTQFSVKPIDLKPVFRRDGYLYKFSRVFR

SEQ ID NO: 14672 - protein, 428 aa, Oscillochloris sp.
MVFVLATDRTPLDPTTLHRADQLLNRGRASVFRKYPFTIILHDRTAAESITHPHRVKLDPGSKTTGIAVVAEATGQVVFGAELTHRGQAIRDALRSRRASRRSRRQRTTRYRQPRFLNRRRPAGWLAPSLQHRVDTTLTWITRLRRSIPLTTISMELVRFDTQLMENAEISGVAYQQGTLAGYEVREYLLEKWGRRCVYCGASNTPLQVEHIVPRARGGSDRVANLTLACEPCNTRKGTQTAIEFGHPDVQAQARRPLKDATAVNTTRWAMYQRLVATGLPVEVGTGGRTKYNRTRLGLAKAHWHDAACVGASTPEYLDTRWVRPLLITATGHGSRQMCRMDRYGFPRTGPKGTRVVKGFKTGDMVRAVVTTSTKQGVYRGRVAVRASGWFNITTSTRTIQGIHARFCRHLHRADGYTYPEGVASSHP

SEQ ID NO: 14673 - protein, 440 aa, Clostridium sp.; identical to SEQ ID NO: 8300

SEQ ID NO: 14674 - protein, 408 aa, unidentified
  REGION 1..408: note = Human gut metagenome
MVYVQDINGKPMMPTTRHGKVRRLLKDKKAVVVNLCPFTIKLMYVTSDYKQEIVLGVDAGTKHVGLSATTKSKELYSSEVILRNDIVDLLSTRRELRRSRRNRLRYRKPRFDNRIKSKRPGWVAPSVKYKVDAHIRVIDNVCSILPISRIVIEVAQFDTQKINNPNISGKEYQEGDQLGFWNVREYVLARDGHKCQHCKGKSKDPVLNVHHIESRKTGGDSPSNLITLCETCHKEYHKGNIDLKIKRGSSLRDAAVMGIMKWRLYEELRSKYNRVSMTFGYVTKYNRIKHGIEKSHVFDAFVISKNFDAIRLGYYYKVRLVRRHNRQIHKQKIPKGGIKRPNQSPFEVFGFRLFDRVMFENSYYFIFARRKTGSFNIRDIDGKNQRDITYKKLKLSRCKRFMVQKEMD

SEQ ID NO: 14675 - protein, 465 aa, unidentified; identical to SEQ ID NO: 5709
  REGION 1..465: note = Human gut metagenome

SEQ ID NO: 14676 - protein, 450 aa, Moorena sp.; identical to SEQ ID NO: 4205

SEQ ID NO: 14677 - protein, 462 aa, unidentified
  REGION 1..462: note = Human gut metagenome
PLINIGEGVIYSSICTGLSLQTYQKRKEVPCMVYVLDINGQPLMPTTRHGKVRRLLNSHLAKVVKRCPFTIQLLYQSTKEIQPVSLGVDAGSKHIGMAATTEKKVVYQEELSPRNDVVKLLSARRTLRRTRRNRKTRYRKPRFNNRVHSKHKGWLAPSVEVKIQEHITAIKRICQILPISEIHVEISEFDLQRLKAMEEGRTLPVGTDYQLGEQYDFYNTRQYVLHRDGYTFQCCGTHDNNIKLHVHHIESRQTGGDAPSNLITLCEHCHKALHKGKLELPKGKKRGKTYRDATFMGIMRKTLLERLRKEVDVPASGTYGYITKYWRERAGLEKSHINDAICISKYPYAKPLDTYYLTKAVRNHNRQIHKSNFSKGGIRKRNQAPYLVKGFRLFDKVLYQGKEYFIFGRRATGYFDIRTLDGTKVNKGSISYKKLRIQDTAKAYLKEARAIPHMNKFTCVLA

SEQ ID NO: 14678 - protein, 459 aa, Petrotoga sp.; identical to SEQ ID NO: 6495

SEQ ID NO: 14679 - protein, 466 aa, unidentified; identical to SEQ ID NO: 8215
  REGION 1..466: note = Human gut metagenome

SEQ ID NO: 14680 - protein, 426 aa, Lactobacillus sp.; identical to SEQ ID NO: 3294

SEQ ID NO: 14681 - protein, 436 aa, Lactobacillus sp.
  REGION 49..52: note = misc_feature - Xaa can be any naturally occurring amino acid
MQNRVFVINRQGEPLMPCKQRKCRKLLQFGKAKVVKKEPFTIQLLFGSXXXXGYKQPVSIGVDSGQHHIGLAVTSQDKVLFQGEVSLRQDVKKLLDTRRSYRRGRRDRNTRYRPPRFLNRAKPAGWLPPSVASKVQHNITWIQRIQAVLPKAELHIEVGKFDMAKMVNPGITGLGYQQGDLYGYETAKQYVLDRDNYTCQICHGKTKDPKLKIHHIIYRSNGGTNQVSNLLTVCASCHTQANHQPGGKLYVLQAKQFQSHRSLKGATFMNILRRRLFTAFPAASFQYGAQTTLDRAKLDLPKAHYNDAVTISGIQNIVQQPTAVVMFHQFRKKKRSLHEATARKGRKTPNRVSKRNAKNTKAVSGFHLNDYVQLPNSQRGYISGFSGKTTCYVKAGNHYLTVSPKYKQVSLSKLKVIRHQNNWNVQEISTGNYTMA

SEQ ID NO: 14682 - protein, 301 aa, Moorena sp.
MVYVLSKQGDPLMPTERHGKVRHLLNQGKAKVVRKTPFTIQLLYDTPGHVQPVNLGVDAGTSNVGLLATTEEEVLFEADVQLRTDIVDLLSTRSSLRGSRRNRKTRYRKKRFDNRRRNKGWLPPSVQNKVDTHVKLVNLVTSILPIQNITIEVAQFDTQKLKNPEIEGVEYQQGEQLGFWNVREYVLFRDKHTCQYCNGKTKDKVLNVHHIRSRKTYGDRPGNLITLCKTCHDKLHAENLKDHFSPLDKGFRSEGQMTVMRWFIYNGIKEVYPNTKLTENLTCRKPQGFNPGGKAGLFPRL

SEQ ID NO: 14683 - protein, 408 aa, Bacillus sp.; identical to SEQ ID NO: 6002

SEQ ID NO: 14684 - protein, 450 aa, Moorena sp.; identical to SEQ ID NO: 6257

SEQ ID NO: 14685 - protein, 428 aa, Lactobacillus sp.
MKGKKAMQNRVFVINKHGKALMPCKPRKARILLRDGKAKVLKKEPFTIQLLYGSTGYKQDISVGIDSGQRYIGLAVTSQNKVLFQGEVELRQDVKKLIDTRRTYRRSRRNRKTRYRKSRFLNRIAKKKDNWLPPSVASKVNHNINWIKRLLSVLPKADLHIEVGKFDMQKMKNPEINGEGYQQGDLYGYQTVKQFVLARDNYTCQVCKKKGGKFKIHHIIYRSLGGTNTVDNLITVCSNCHTTKNHQTGILAKWCKDKKKVNKSYKGATFMNILKRRLFLAFPQAKFQYGAWTTLQRADLELTKSHYNDAVAISGIRKVKAKPTSIMMFKQFRKKKRSLHEATARKGRKTPNITSKRNAKNTKYAKGFWLNDYVKIKDSNKKGYISGFMSKGTNVRLRDIFGEYVSNSDKSYTSTKNISLINHSNNWQ

SEQ ID NO: 14686 - protein, 413 aa, unidentified
  REGION 1..413: note = Human gut metagenome
GVQQTRTNGRRCRRQRRAKANGTISKKCVKHDTAQNGSVSKRAKEIGVIKRHLPGCEKDVLCIGIKNKEAKFSNRTRPEGWLTPTANQLLQTHINLVKKIQKFLPISDVVLEINKFAFMRLDNPNVQKWQYQQGPLYQKANLEETVSEMQEHHCLFCKKKIDHYHHVVPQHKNGSNTIDNIIGLCTQHHDLVHKDATWQKRLAKKKTGLNKKYGALSVLNQIIPALTKELSSLFPKHFFVTNGKSTYDYRAAHGVSKDHWLDAYCIACSVLPNDTCDKTINSRVPYELKQFRRHDRRALNNENMSCVYTFNGKMVATNRHKATEQTTDSLEEFRQRQPNDVCNLKVKEHHPTYRNMNRNYPGSVFLVGNQVHVMQGIAGSKDGEATTYKDTNANSIAAGKCKFVAKNSGILFV

SEQ ID NO: 14687 - protein, 442 aa, unidentified; identical to SEQ ID NO: 2834
  REGION 1..442: note = Human gut metagenome

SEQ ID NO: 14688 - protein, 406 aa, unidentified
  REGION 1..406: note = Human gut metagenome
MVYVQDIDGRPLMPTTRHGKVRRLLKSKKATVVNLCPFTIRLLYDTTGYKQEITLGVDTGTKHVGLSATTKSKELYASEVILRSDVVDLLSTRRELRKIRRYRLRYRKPRFMNRIKSKKRGWIAPSIRQKIDSHIRIIGFVYSILPVSKLIIEVAQFDTQKIKNPEISGKEYQEGEQLGFWNVRGYVLARDEHKCQHCKGKSKDPVLNVHHIESRKTGGDSPSNLITLCKTCHKEFHKGNIKLKVNRGESLRDAAVMGIMKWELYDELKSLYPNVKMTFGYITKYNRINQGIEKSHVSDAFVISRNFDSERLGYYYKRKLVRRHNRQIHKMKAPKGGNKRMNQSPFKVFGFRLFDKVMFQGKERFIYARRLRGIFNIRDINGENKKDISYKKLEYVSHGLISIVAG

SEQ ID NO: 14689 - protein, 416 aa, unidentified; identical to SEQ ID NO: 6623
  REGION 1..416: note = Human gut metagenome

SEQ ID NO: 14690 - protein, 415 aa, unidentified; identical to SEQ ID NO: 3582
  REGION 1..415: note = Human gut metagenome

SEQ ID NO: 14691 - protein, 406 aa, unidentified; identical to SEQ ID NO: 6445
  REGION 1..406: note = Human gut metagenome

SEQ ID NO: 14692 - protein, 414 aa, unidentified
  REGION 1..414: note = Human gut metagenome
MPCSPAKARLLLKEKKAIVVRRTPFTIQLTIATGETKQPVSLGVDAGYKHVGLSASTEKAELYASEVELRQDITDLLSARRALRQSRRNRKTRYRAPRFDNRIRTKRKGWLAPSVENRINAHLSRIEAVLRLLPVTKITVETASFDLQLLKNPDISGKEYQEGEQLGFWNIREYVLCRDGHVCQHCYGRSKDPVLNVHHLESRRTGGDSPGNLITLCETCHKALHRGEITLKAKRGQSFRAEAFMGIMRWEVLNRLKASHPELEVNNTYGYRTKHARIANDIAKSHCADAFCIAGNLGAERLGEFFFQKQTRRNNRQIHKLSILKGGIRKRNQAPFEVNGFRLFDKVACQGEEGFIFGRRSSGFFDVRKLDGTRISAGISYKKLHLLEKRRTYLTEIRKEEVLPPLPEGRGLRA

SEQ ID NO: 14693 - protein, 421 aa, Moorena sp.; identical to SEQ ID NO: 2610

SEQ ID NO: 14694 - protein, 474 aa, unidentified
  REGION 1..474: note = Human gut metagenome
RVFRQIPFTIQLTYENKPVLQPVTIAEDPGRSNIGMAVVSLSGELLSAAVVQTRNKEIVKLMEKRKQHRRASRNGERKARQRLAKKCHTMIKTGFLMRKLPMYGKDKRVRCNVIKNTEAKFCNRKREDGWLTPSAEHLVRTHINLIHKMQKFLPITDVAIEINRFAFLSLEDPSISGVDFQNGPLKGYDDLNVAIEDLQDGHCLMCNSPIEHRHHIVPRSMQGSNTIGNIAGLCCKCHERVHKDARFEDRLKKKEAGLNKRYAAVSVLNQAIPFICKRLEQEFGKEHVHYCSGRDTSMVRRSLGYHKTKEEQLHEVDAWCIAVLALQHVPEKAPEFDHVHEILQFRRQDRSRIKAQTSRAYYHEGKKIAKNRKKAEGQKDDSLQGWRKRQVERYGEEQTRKMISQLKVKKSIRRYNRLDRLMPGAVFYYQGVRYVMRGQHSNGQYLQAVGMRDKDFPAKKCKIVVHNQGLVFVS

SEQ ID NO: 14695 - protein, 451 aa, unidentified
  REGION 1..451: note = Human gut metagenome
KRAVLYRVFPTVVILMDVDARTIPDLPSFRIKIDPGSKYTGIAIIRNDTDEFVYAMQIEHRGDAVRAALNKRKNARRNRRSRETGYRRAKWGNRCLSEKDKRSYDSSREDDWLPPSIRSAADNVISWVRRLGRWINLTECSFEAVRFDTQLMEDPDIEGEEYQHGTLFGLEIKEYLMEKFGHTCQYCGGKSGDPVLEWEHMRPKSRGGSDRVKNALLSCSSCNKDKGNRTPEEWLELIKARLPREKEKRKELDEERVELIQKVIDGKPQGGALRYAAWVSSSRRYLEKALFGIFGNVECSSGGRTKYNRTELGYPKEHHYDALCVGTVPEKGYHDRTNGYYLYAKAAGRGTRLRGHLNKCGVIVAKWTDRKKGFFGFQTGDIVVAEVPHKTPKPYKYEGRFVGRVMVRATGSFDIKTTDGKLVTVKEQYCRLLQANSGYQYTMKRAIPLGH

SEQ ID NO: 14696 - protein, 545 aa, Streptomyces sp.; identical to SEQ ID NO: 9474

SEQ ID NO: 14697 - protein, 470 aa, unidentified
  REGION 1..470: note = Human gut metagenome
MSVFVVGLNGCRLMSVSERKARLLLKGGKASVYRKVPFTIKLNYKTGSTVQPGYLGIDTGSQHIGVSVVQKDGTVLHKEEIGLRDSMSKRKLLESRASSRRGRRYRKTRYRHPKWKPKTKRIYNEKADRKGRHWKKQKNTFTSKRQAGWLPPSLQSKTDHHIQWIRKLLDLLPEGYRLSIELGRFDPARMKDPGIHGELYQKGPQYDYENVRAYVLARDGYTCRVCKKKGGKLHVHHILYRSRGASDDPKYMAAVCSNCHTTENHLPGGILYQWMQDQKKFTRGLRDATFMNILKKRLRKAFPDAVFNYGNITKADREKLELPKSHGNDATAIALVKTEVTSVKDEEPVIHIQQVRRKKRSLHEETPRKGRKEPNRTASRIDKNTKSVTVTKGSGEKKASMTACLFDRVELDGKKGWITGFTGTSCYVKDKEDSYICTSPKYKQVSISRLRILHHCGNWAIGAEKPLGKG

SEQ ID NO: 14698 - protein, 457 aa, unidentified
  REGION 1..457: note = Human gut metagenome
LDKRKRPLGHCTTKRARQLIEKGRACVYRYYPFTIIIKDLDVRKIEVHHDYRIKPDPGAGYTGISIIEDDRVIAYFELQHRGSEIVDRLQTRRNSHRNRRSRETGYRRCKFPKNGVYETSREKGWLPPSQMSILNNVLNFVRRLEKLLGPCKISIELVKFDMQLLENLDIKGEDYQHVELYNYELKTYLLEKYQHTCQYCANETGDHRLEKEHMVPKSRRGSDSLKNLILACHTCNQKKADRTPEEWLDALKAKKNAGDMDKKRFECLEKVVEGKKVGQELRYAAWTNSMRWRLYNALRELSADGTVSVGIGGRTAYNRNKLGIPKAHHLDALCCTKEVPENGYRNAVQPCLVVKATGRGGRLLGTINDCGIITTKFYQRNKRVNGIQTGDIVQAVVSNGKYKGTYTGRVKVRRRGDFDLVTMAGKKISTTRKTTFKVLQRMDGYEYSFSEAIPLGS

SEQ ID NO: 14699 - protein, 425 aa, unidentified
  REGION 1..425: note = Human gut metagenome
MVYVISQDGQPLMPTDRHGKIRRLLKSDKAKVVKHCPFTIQLLYGSTDYTQEISLGIDAGSKYIGISATTQNRVLYESDVELRNDIVSLLSARRQNRRTRRNRKTRYRKPRFNNRISCKKKGWLAPSVRQRVNTHLTVVAKVHQILPVTRIIVETASFDIQKIKNPTISGTDYQQGDQLGFWNVREYVLFRDGHVCQCCKGKSKDKILNVHHIESRKTGGDSPDNLITLCKTCHTGYHRGTIKLPKTIHRGMSFRDASFMGIMRWSFYDELKTLYPDVNLTFGYITKNTRIKNNLPKEHYIDARCISGHPLTVSDETYYYQKKVRCHNRQIHKNTILKGGVRKRNQAPYFVKGFRLFDKVMYQGQECFIFGRRSTGRMDLRLLDRTHINASVSYKKLKLIESRKNYITERRTAVPPTGKSVDFPA

SEQ ID NO: 14700 - protein, 450 aa, Moorena sp.; identical to SEQ ID NO: 2935

SEQ ID NO: 14701 - protein, 473 aa, unidentified; identical to SEQ ID NO: 9549
  REGION 1..473: note = Synthetic metagenome

SEQ ID NO: 14702 - protein, 448 aa, Moorena sp.; identical to SEQ ID NO: 9395

SEQ ID NO: 14703 - protein, 420 aa, unidentified
  REGION 1..420: note = Archaeon sp.
VPRKVLANNSSDEDQLSGKSGQDLRVPVLNMRGKPLMPTTPRNARVLLKQEKARVVQRSPFTIQLNYPTGEAKQDITLGIDAGYSAIGFSAVTDKKKLICGELTLRKRISKLLEQRRTYRRTRRAKLWHRKPRFNNRSRPNGWLAPSIQHKFDTHLRLIEKLKKILPVTKITVEVSSFDTQKMQNPEIKGVEYQHGELQGYEVREYLLEKWGHKCAYCGKSNVPLEIEHIIPKIRGGTDRVFNLTIACHKCNQKKGDRTAEEFGYPEIQKKAKQTLKSTAFMNIVRWRLANTLNCAWTYGYITKHNRIKLGLEKSHVNDAFVITGGTTQERAVPYMVTQTRRNNRSIQTNRKGFKPSIRKQRYKLQPNDLVKYRKILCRVKGVFNYGKWVRLSTQKGKIINTNIKKVELVKYGGGLQFQF

SEQ ID NO: 14704 - protein, 470 aa, unidentified; identical to SEQ ID NO: 2925
  REGION 1..470: note = Human gut metagenome

SEQ ID NO: 14705 - protein, 470 aa, unidentified; identical to SEQ ID NO: 2825
  REGION 1..470: note = Human gut metagenome

SEQ ID NO: 14706 - protein, 472 aa, unidentified
  REGION 1..472: note = Human gut metagenome
VVGNRLLSIKPLINIGEGVIYSSICTGLSLQTYQKRKEVPCMVYVLDINGQPLMPTTRHGKVRRLLNSHLAKVVKRCPFTIQLLYQSTKEIQPVSLGVDAGSKHIGMAATTEKKVVYQEELSARNDVVKLLSARRTLRRTRRNRKTRYRKPRFNNRVHSKHKGWLAPSVEVKIQEHITTIKRICQILPISEIQVETAEFDLQRLKAMEEGRTPPVGTDYQLGEQYDFYNTRQYVLHRDGYTCQCCGTHDNNIKLHVHHIESRQTGGDAPNNLIILCEHCHKALHEGKLELPKGKKRGKSYRDATFMGVMRKTLLERLKKEIDVPVEGTYGYITKYWRERAGLEKSHIHDAVCISQYPYAKPLDIYYLTKTVRHHNRQIHKSNFSKGGIRKRNQAPYLVKGFRLFDKVLYQGKEYFIFGRRATGYFDIRTLDGTKVNKGSVSYKKLRIQDTAKAYLKEARAIPHMNKFTCVLA

SEQ ID NO: 14707 - protein, 424 aa, Xenococcus sp.; identical to SEQ ID NO: 12141

SEQ ID NO: 14708 - protein, 471 aa, Streptomyces sp.
VPGEGREAHSVVFVLDKHGTPLQPTSPARARKLLKRGRAVVARHTPFVIRLKDRTATGSSVDGVELGIDPGSKRTGIAVFTTNGGGERRGLFAVELAHRGGQIRDRLTVRAAYRRGRRSRNLRYRAPRFNNRSRLRGWLAPSLRHRVETTMSWTNRLARWAPVTAVHVERVAFDTHLMTAGKPLEGVEYQHGTLHGTEVREYLLAKWGRVCAYCGASGVPLNIDHIHPSSRGGSDRISNLTIACARCNQTKNNSPVEDFLINKPKLLAKILTQAKAPLRDAAAVNATRWALWRALDAAFPHAVRTASGGRTKWNRQRTGLPKTHTLDALCVGALNTVTQHPHTVLTALAGGRGRYRRTDPDRYGFPRKTNPRTKTVHGFQTGDYARAIVLAGKHAGTHTGRIAVRSTGRFNIRTAHGLVQGIHYRHIRLLQRADGYAYTIQDEGPPSPSHPAANPSLLRQELRAGRVVPEG

SEQ ID NO: 14709 - protein, 366 aa, unidentified; identical to SEQ ID NO: 11303
  REGION 1..366: note = Human gut metagenome

SEQ ID NO: 14710 - protein, 453 aa, unidentified
  REGION 1..453: note = Human gut metagenome
MMTAVLSSIGVRLMPTTCFRARKLIKSGKAVIHSYGPFTIRLTQRENGGTQPIEYCCDTGYQHIGISIKSVKHEYVGVQVDALKDEKKHHQDAMTYRRTRRNGKTRYRAARFNNRKATKSKGWLAPSIRHKKDIHLAQVQKYAKVFPITSIVFEMGEFDTQKLKAIEEGRPAPAGIECQQGEQYGFDDVRNAVFTRDGYRCVCCGRGIEDGAILHAHHLKYRSLGGTNRMGNLVTVCDKCHTPVNHQKGGPLWKLMDKYKVKNFKGATFMTSVRWQMYDELKTMFPDTEIHLTYGSRIKEARRLLGVRKSHINDAYCMGDFHPKHRSEHWLYTKKHRNNRVLSKFYDAKYIDSRDGKKKSGQELFSGRAKRNRELNAENLHRYRQRKVSKGRVSVRRQHYSIQPGDTVIYEDRKCITKGVQNLGTYLKIGEKVVPVKKIRIHHYAGGYIRQRM

SEQ ID NO: 14711 - protein, 420 aa, unidentified; identical to SEQ ID NO: 6017
  REGION 1..420: note = Human gut metagenome

SEQ ID NO: 14712 - protein, 419 aa, unidentified
  REGION 1..419: note = Human oral metagenome
MLVYVLKQNGQPFMPTSRFGKVRRLLKEKKAKVVRREPFTIKLLYEPETDVVQECYCGVDTGSKHVGVAVVGNDRVLYQSQTELRDDISRKMERRRDFRQNRRSRKTRYRKCRFLNRRNSIRKDRLPPSVKHKVQAHIDEIEFCKKILPMSDLILEVSQFDTALMRNPSLINEKVRHWGYRQGFDYGYSSRRSAILHRDNYTCQHCGKKNCRLEVHHIIFRSNGGTDDEENLITLCKECHKGVHAGTVVLNKKPKKSKNLKHATHMSIIRSQLLKIYPDAIETFGFVTSENRNHLNLEKDHYIDACIIASGGLEFEPSATVYYKRRMGKGEYQLIRKCCGKEYVCKGKILGFKSFDKVEYFGVKCFIWKRRNNGYATLGDIFNNILDFSYLPRGYKTPKMALLKRISSRKTVNIICYTR

SEQ ID NO: 14713 - protein, 380 aa, unidentified
  REGION 1..380: note = Human gut metagenome
LVSKYPMVIQLKKEIPENEICKDEIRCGIDDGGLHVGIALVQKCKTKNKVVFKGTIEQRNDVKHLMEVRRSYRHYHRYHKRYRPARFDNRKSSKRKKRIAPSILQKRQAIIRVIHWLNKWINITNYWLEDVSIDIRALTDGYKPYRWQYQKSNRLDENIRKAAILRDGGKCMECGKSNCRLEVHHIKPRRRNGSNTLDNLITLCESCHQKTEGQEELYMDRYFSLLKSSDNKNLNYAQHVMIGKMWLRKQLSGLGVLYLTSGGDTANKRIDWNIEKSHANDAVCITDLRPDTCDVKEWTMKPMRRQSKAKTDHVLGIHHRDLVEYTFKNGETHRGYVTALYPEQKAINFQSPTKHCKKVNARKCKLLWKYSKIYWFENAS

SEQ ID NO: 14714 - protein, 512 aa, unidentified
  REGION 1..512: note = Human gut metagenome
MSTVYVLNKDGKPLMPTTRCGHVRRLLKEQKARVVTSKPFTIQLLYETNDVVQPLYLGIDPGRTNIGVAAVKTDGTAVFTAHLETRNKEIPKLMQGRKKARRARRTNGRRCRRQRRAKANGTISKKCVKQTTAQNGSVSKRAKEIGVIKRHLPGCEKELLCIGIKNKEAKFSNRTRPEGWLTPTANQLLQTHINLVKKIQKFLPISDVVLEINKFAFMQLDNPNIQKWQYQQGPLYQKASLEEAVSEMQEHHCLFCKKPIAHYHHVVPQSENGSNTIGNIVGLCTKHHDLVHKDATWQKKLAKKKTGLNKKYGALSVLNQIIPALTKELSSLFPKHFFATNGKSTYDYRAAHGVSKEHWLDAYCIACSVLANDVCDSNINSHVPYELKKFRRHDRRALHKENMSRVYTLNGKSVATNRHKAIKQTTDSLEEFRQRQPNDVYKLKVKEHHPEYRNPKRNFPGCVFLVGKHTHVVQGTSGSHNSKADGYYDTNGNSYSSGKCKFVAKNKGIVFA

SEQ ID NO: 14715 - protein, 460 aa, Fischerella sp.
MRGESKNKAGLNSSCDKSNQRINNTTKPALFSSQYARQNFVFVLDTNKQPVNPIPPKRARELLTKQKAAVYRMYPFTLILKHAVPNPTPKPLTIKLDPGSKFTGIAVLSGDDVIWVAELEHRGWQIKNALESRCSLRRSRRHRKTRYRQPRFDNRKRFEGWLPPSLMHRVLTIETWVKRLCRYAPITQIVMELVKFDTQALQNPEIDGVEYQQGELFGYEVREYLLEKWGRKCAYCDKEGVLLQIEHMHPRAKGGSNRVSNLTLSCERCNTKKGTKSIDEFLKKDASRLEKIKQQAKKPLKDAAAVNATRWALFRTLKDILLTTTGTGGRTKYNRVRFELPKQHWIDAACVGQVERLNLLTQQPLRIKCTGWGTRQMCGTNKYGFPIRHRERKQVHFGFRTGDIAKVVVTEGSKIGQYVARVLCRARGSFDIVTKSGRVGDIHYRFCKTIHKKDGYSYAF

SEQ ID NO: 14716 - protein, 431 aa, unidentified; identical to SEQ ID NO: 5274
  REGION 1..431: note = Human gut metagenome

SEQ ID NO: 14717 - protein, 456 aa, unidentified; identical to SEQ ID NO: 4174
  REGION 1..456: note = Human gut metagenome

SEQ ID NO: 14718 - protein, 456 aa, unidentified; identical to SEQ ID NO: 7423
  REGION 1..456: note = Human gut metagenome

SEQ ID NO: 14719 - protein, 465 aa, unidentified; identical to SEQ ID NO: 5709
  REGION 1..465: note = Human gut metagenome

SEQ ID NO: 14720 - protein, 429 aa, unidentified
  REGION 1..429: note = Human gut metagenome
MSTSVFVLDKRHRPLMPCRPARARRLLRAGRARVVKRFPFVIRLVDRTVEQSEVQPVLIKLDPGSRETGAAVVRDDEKKRHHALAFFVIKHRGGAIRDALKARSAFRRRRRSQNFRCRSPRFLNRVKPKGWLPPSLRHRVETTLSFVRRMCRYLPVSGIATELVKFDSQKLQNPEVSGVKYQQGTLFEYEVREYLLEKFGRKCVYCGAEGVPLNIDHVVPRAKGGSNRVSNLVLACVSCNQKKGARSLEDFLKGKPEVLARVRRELKTPLRDAAAVNATRWVLFNELKATGLPVETGSGALTKLNRHAFGVEKEHWLDALCVGRLNGVVTRKGLNVLEIRCMGRGSRQRTRLTKYGFPRGYLMRQKCVHGFATGDMVEANVPKGKKAGLWRGRVAVRVSGSFNIQTPKGVIQGVGWKHCRLISHNDGYG

SEQ ID NO: 14721 - protein, 380 aa, Arthrospira sp.; identical to SEQ ID NO: 3196

SEQ ID NO: 14722 - protein, 479 aa, unidentified
  REGION 1..479: note = Candidatus Ethanoperedens thermophilum
MQKLDRRNTYTPPNTAPVRCNCDPSLKVPRGKDGVVSLKTLSNNSEEHLLQPAGGHKADTLVFVINKNGNPLMPCKPAKARHLLEAGRAEVVQQTPFTIRLLWDCEENTQDTTLGIDAGYTTVGFSTVTSDRELIAGELTLRSDIKRLIEKRRTYRRTRRARLWHREPRFNNRGIPKGWLAPNIQHKLNNHIKLIEKLKKILPITKIVIEVASFDAQKMQNPEISGIEYQQGELQGYEVREYLLEKWGRKCAYCGKKDVPLEIEHIVPRSRGGSDRVSNLTIACHECNQAKGNQTAGEFGHPEIQSKAEKTLKATAFMNAVRSRIVDLLNCNQTYGYTTKYNRIKLGLEKSHATDAFVIAGGNGQMRSDSIIISKQVRRQNRSLYKANLLKGGRLKRNTVKEVKGFRRYDKVKYNNNECFIHGLRSSGYFGLRTITGDQIGASVNSKKLTLLKRAKGVIQEVCAIPARPCGLGLLAQVR

SEQ ID NO: 14723 - protein, 493 aa, unidentified; identical to SEQ ID NO: 2644
  REGION 1..493: note = Human gut metagenome

SEQ ID NO: 14724 - protein, 430 aa, unidentified
  REGION 1..430: note = Human gut metagenome
MPKVYVLNRHGRPLMPCTPAKARHLLDAGKAKVRHRTPFTIQLLYGSTGYTQEVILGVDAGSKTIGLSAATETEELFSAEVKPRNDVVELMSARRQFRRARRNRTTRYRKPRFDNRVRSKHKGWLAPSVEVKIQEHMTAIRRACAILPVSKVVVETAEFDLQLLKAVAEGKPVPQGEDYQKGEMYGHYNVRQYVLWRDSYTCRICGAHGSVRKGVPLHVHHLESRRVGGDAPDNLVTLCTACHDKLHKGIIMAADIKKRKRRSTRDATFMGIMRMTLLRRLREQLPVPVVETRGYITKATRENLLVLPKSHANDALAIAHGPQGFRAEHLPNIRQADRLYTIRPVRHHNRQLHKATILKGGVRKANQAEKYICGFRLYDKVLYNGIECFVWGRRTSGSFLLRQLNGEKVKDGVSYKHLKLLERSQSYLVA

SEQ ID NO: 14725 - protein, 470 aa, unidentified; identical to SEQ ID NO: 2825
  REGION 1..470: note = Human gut metagenome

SEQ ID NO: 14726 - protein, 419 aa, unidentified
  REGION 1..419: note = Human gut metagenome
MVYVLDINGQPLMPTTRHGKVRRLLNNHLAKAVKRCPFTIQLLYQSTKETQPVSLGVDAGSKHIGLAAATEKKVVYQEELIPRNDVVKLLSARRALRYSRRNRKTRYRKSRFNNRVHSKHKGWLAPSVEAKIQEHITAIKRICQILPVSEIHVETAEFDLQRLKAIEEGKPLPVGTDYQLGEQYDFYNTRQYVLHRDGYTCQCCGTHDNNVKLHVHHIESRQTGGNAPNNLITLCEHCHKALHEGKLKLSKGKKRGKSYRDATFMGITRKTLLERLKKEVDVPVTGTYGYITKYWREKAGLEKSHINDAVCISKHPYVEPLDTYYLTKAVRHHNRQIHKVNFSKGGIRKRNQAPHLVKGFRLFDKVLYQGKECFIFGRRVSGRMDIRLLDGIRINASVGYKNLELLELRKAYLTERRTC

SEQ ID NO: 14727 - protein, 506 aa, unidentified
  REGION 1..506: note = Human gut metagenome
MVAVLSNVGKPMMPTTEYKARKLIEKGRAIPYQYKPMFTIMILDRSGGYTQPIELKEDTGYEHIGISVCSQKHEYERKEVITLLDEHEKHHDALMYRRTRRNRLGYRPPRFDNRKRENDWIPPSLQHKIDIHLYWFNQYAEVLPITDAVFEIGTFDTQRLNAIEKGEKRPYGDDYQKGEQADFYTLRDAVFTRDDYTCIVCGKGIQDGAVLRTHHIGYRYGDRSNRMSNLVTVCDHCHTTKNHQEGGALYNLKSPTKKKANAAFMNVVRQRIIDGPKKSHPEINISGAFCSETKMSRKNLRIEKSHTNDAYAMGAFHPKHRCKEILYQKIRRNNRILSRFYDAKYIDRRDGSTKTGKQLSSGRTNCNHKLDSENFRVYRGKKIQKGRTATRQQSYEFKTKDIVLYQGQRYVVKGTNNKGQNVQLYLNITADLKDLTIKTKNKRKTADLNCIEIGDKVFTEFNGKKKVFTIKNIDPITNQVSLQADLSTKPSELKLVKYNNGYKQIK

SEQ ID NO: 14728 - protein, 406 aa, unidentified; identical to SEQ ID NO: 3980
  REGION 1..406: note = Human gut metagenome

SEQ ID NO: 14729 - protein, 426 aa, unidentified; identical to SEQ ID NO: 3614
  REGION 1..426: note = Human gut metagenome

SEQ ID NO: 14730 - protein, 421 aa, unidentified; identical to SEQ ID NO: 11007
  REGION 1..421: note = Human gut metagenome

SEQ ID NO: 14731 - protein, 407 aa, unidentified
  REGION 1..407: note = Human gut metagenome
LNNHLAKVAKRCPFTIQLLYQSTKETQPVSLGVDAGSRHIGLAATTEQKVVYQEELVPRNDVVKLLSARRALRSSRRSRKARYRKPRFNNRVHSKHKGWLAPSVEVKIQEHITAIKRICQILPISDIHVETAEFDLQRLKAMEEGRPLPIGTDYQLGEQYDFYNTRQYVLHRDEYTCQCCGTHDNNVKLHVHHIESRQTGGDAPNNLITLCEHCHKLLHAGKTILPKGKKRGKSYRDATFMGIMRKTLLERLKKEVDIPVTGTYGYITKYWREKAGLEKSHINDAICISKYPYAKPLDTYYLTKAVRHHNRQIHKSNFSKSGIRKRNQAPYLVKGFRLFDKVLYQGKSYFIFGRRDTGFFDIRTLNGAKVNKGSISYKKLRIQDTANAYLKEIKAIPHMNKFTCVLA

SEQ ID NO: 14732 - protein, 459 aa, unidentified; identical to SEQ ID NO: 11427
  REGION 1..459: note = Cyanobacteria bacterium UBA9226

SEQ ID NO: 14733 - protein, 496 aa, unidentified
  REGION 1..496: note = Sediment metagenome
LVRGSQRCDGCNKPGQPWREELLGHACLSTSLAPYGVPKGRGAMAVFVLDRHRKPLMPCSEKRARLLLACQRAVVHRFEPFCIRLKDRSVQESTLQPVVLKLDPGSTTTGIALARVESTEIGEVHHALHLAHLEHRGEEVKMHLDKRRGFRRRRRSTDLRYRVPRFLNRRRTSGWLAPSLQSRIGNVLTWAKRYQRWIPLCRIEVERVKFDMQLMQNAEVFGVHYQRGELAGWEVRSYLLEKYHRQCAYCGATNRPFEIDHVLPRSRGGSHRVSNLVLSCHSCNQAKGNQTAAEFGHASVELQAKHPFKDAAAVNTTRYALVERIGRLGLPIGTWSGGRTRWNRDRFGIGKDHSLDALCVGDIIGVRRGSMRTVKVKAVGRGRYGRTLVDGSGFPGGYLMQHKRVQGFQSGDLVCAEVPEFARNKPLKTHGIHRGCIAVRETGSFRVASIDGINAKYCRLLQRADGYEYTLVLTATAGSEIPCPHPRKEDLLPLQN

SEQ ID NO: 14734 - protein, 466 aa, unidentified
  REGION 1..466: note = Human gut metagenome
MSTCACVLSKNGERLMPTIRLGKVRHLLKDGKAKIIKHHPFTIQLLYDSKTDTQPIEICEDVGYNYIGISMKSESHEYVSVQYDTLQDEKDCHDSCRKMRRIRRNRLRYRKPRFDNRKRNKDWLAPSLEHKKELNVNVIKMYCEVVPITHVTVEVGSFDTMLVKAIQEGKAIPEGADYQKGPRYNLATLREAVFYRDNYTCKVCGRKAKNDSAILHVHHMFYWKGRHGNSLNELLTVCEKCHTPANHQKGSKLYGFGENIKFANLSGAAFMNTVRWQIVNELYATFGKLFVTFTYGAMTKEKRIALHLEKCHNNDAYAMGNFHPVDRCAFEHYKKVKRNNRILEKFHDSQYIDIRTGKVANGSSLFNGRINRSHKKDSENLHKYRGKRTRKGYRALRRKKVALNPGDLVSLNGEILVVHSTHAGKNGYVGVEFKTPSKSGKKSASLKKLKIVKTSNSMHSAWTKVS

SEQ ID NO: 14735 - protein, 393 aa, Clostridium sp.
MLQSGQAKVIKRCPFTIQLNYDSGHQTQEISLGIDAGSKHIGVSATTKIKVLYEADVELRNDIVDLLSSRRELRRGRRNRKTRYRQAKFNNRRRGNGWLAPSIRQKIGTHLTVVENICKILPISRIMVETASFDIQKIKNPDIQGAEYQQGDQLGFWNVREYVLFRDGHTCQCCKGKSKDKILNVHHIESRKTGGNAPNNLITLCKTCHTGYHKGTVQLPKAIKRSMRFKDAAFMGIMRWAFYEALKQQYEPVGTPVHNTYGYITKHTRIAYNLPKEHYVDARCISGNPEASSNGEYYYQKKVRCHNRQIHKLTVLKGGIRKQNQATYLVKGYRLFDKVSYQGKGYFVFGRRQSGFFDIRTLSGEKVNKGSLSCKKLKFIATRTYYLTERRAV

SEQ ID NO: 14736 - protein, 374 aa, unidentified
  REGION 1..374: note = Human gut metagenome
VTDVSTIYVLNKDGKPLMPTTRCGHVRYLLKEKKARVAASKPFTIQLLYETDDVVQPLYLGIDPGRTNIGVAVVKTDGTAVFTAHLETRNKEIPKLMQGRKKARRARRTNGRRCRRQRRAKANGTISKKCVKQTTAQNGSVSKRAKEIGVIKRHLPGCEKDVLCIGIKNKEAKFSNRTKSEGWLTPTANQLLQTHINLVKKIRKFLPISDVVLEINKFAFMQLDNPNVQKWQYQQGPLYQKANLEEAVSEMQEHHCLFCKKPIAHYHHVVPQSENGSNTIGNIVGLCTKHHDLVHKDTAWQLLKTLLSVEYDDIVAAIMMPVMRDDFQEAIAALPDLNEKEGLDIRPEDIEKLVNLMEGPSLAPRTSGIDAIIR

SEQ ID NO: 14737 - protein, 426 aa, unidentified; identical to SEQ ID NO: 3614
  REGION 1..426: note = Human gut metagenome

SEQ ID NO: 14738 - protein, 414 aa, unidentified; identical to SEQ ID NO: 2588
  REGION 1..414: note = Human gut metagenome

SEQ ID NO: 14739 - protein, 431 aa, Citrobacter sp.
  SITE 431: note = misc_feature - Xaa can be any naturally occurring amino acid
MNRVFVLGKTGQALMPCHPARARQLLQSKKARVKRLYPFTIQLTQRSDGYIQPVELKFDPGSKQTGVGLVLHGKNRLSAIYAAVLTHRGQEIKSNLDSRRMIRRARRNRKTRYRQERFLNRVRSKHKGWLAPSVHSRVDNIVEWSKRFMRLSHVDFITVESVKFDMQKMESAAVEGLEYQRGTLFDYEVKEYLLEKYHYSCVYCGIKNVPFEKEHVVPRSRGGSNRISNLVLSCRSCNEKKDNLPIEEFLKDNPALLKKIKAQLKSSLKDAAAVNITRKQIVKELSDLNVPVLTGIGAETKYNRVSQGYGKEHYIDALCAGTTGTKVYIPSKLKPLLIKKERRNNRQMCLVDKYGFPRGKAKGSKIVHGFKTGDIVKAVVLKGKKKGVYKGKVAVRSSGSFNINVKQGRIEGIGWKNCVMLHRFDGYSYTX

SEQ ID NO: 14740 - protein, 406 aa, unidentified; identical to SEQ ID NO: 3980
  REGION 1..406: note = Human gut metagenome

SEQ ID NO: 14741 - protein, 443 aa, unidentified; identical to SEQ ID NO: 11672
  REGION 1..443: note = Human gut metagenome

SEQ ID NO: 14742 - protein, 430 aa, unidentified; identical to SEQ ID NO: 11913
  REGION 1..430: note = Human gut metagenome

SEQ ID NO: 14743 - protein, 505 aa, unidentified
  REGION 1..505: note = Human oral metagenome
VYDRSSRRTPERFSNSRPCKVSAMQAKGKAPNAGIAPAKSAGGAGRIHRRGERLPFKEKGSDPMAQRVLVLDTNRRPLSPCHPARARQLLKRGKAAVFRRVPFTIILKYVPEGEPTPVRVKLDPGSRTTGIALTMRRRGRDEVVWAAEIEHKGLEVKSKLEKRRALRRGRRNRKTRYRAPRFLNRRRRKSWLPPSLESRVGNVVSWVNRLRRWSFVGGIAMELVKFNTQAIQNPEISRAEYQRGTLFGYEVREYLLEKWERRCAYCGTENVPLEVDHIVPRSRGGSDRVSNLTLACHNCNQKKSNRPVEEFLCRKPEVLKKVLAQAKASLRDAAAVNATRFALLERLRATGLPVECGSGAQTKYNRIAQNYPKKHWIDAACVGKSGNDVRLDPEMNVLLIKAMGRGSRQMCRMDRYGFPRTGPKTARSVHGFRTGDLVRADVPKGRHTGIHTGYAAVRAIGSFRVGNTDGVSWKHCRLLQRGDGYQYNGTHQPKGLVGTSNSAGV

SEQ ID NO: 14744 - protein, 447 aa, unidentified; identical to SEQ ID NO: 3626
  REGION 1..447: note = Human gut metagenome

SEQ ID NO: 14745 - protein, 423 aa, Microcoleus sp.
MSNYVFLIDANKKPMNPVHPSHARKLLDSGKAAVFRRYPFTLLLKRVVENIVVHPLTLKIDPGSKVTGISLVTDRNEAIWGVELEHRGQQIEDALQSRRAVRRGRRNRNTRYRQARYFNRKRPQGWLAPSLMHRVLTTETWIKRLRKFAPIGDIKLELVQFDTQQLENPEISGIEYQQGELQGYEVREYLLEKWERKCAYCDAENIPLQIEHIQPKAKGGSNRIYNLCLACEKCNLKKATQDIRDFLKGKSDLASRILSWAKSPLKDAAAVNSTQWKLFKTLKVTGLLVTTGTGGQTKFNRTRLGLPKEHWIDAACVGVTPSLKILTTRILRVKATGMGGRQRCQTDKFGYPQKHRPLRPIFGFCTGDIVRADVPKGKYKGTFTARVCPMSDGRGEFVIDKKRRSIRLEYCTTAHRKDGYSYA

SEQ ID NO: 14746 - protein, 470 aa, unidentified
  REGION 1..470: note = SAR202 cluster bacterium
MHYTNYQPTPVYSSDYEPLMPCHPARARKLLRNGRAAPHHVRGIFGIRLLDRSRAQCEVQDTSLNVDAGSDISGFAVVQDDDNGQRTVLALVELRHRAKAIKSTMTGRSQHRRSRRGRLRHRAPRFNNRRREPGTLPPSVDSIHLDAMRVVSTMCRIYPVSRFSIERYKFDTQLMNNPDIRGVEYQRGTLFGWQVRAYIFNRDQGRCVYCRRRNVRLELDHIRPRAIGSDRVDNLVTCCRDCNLAKANRPIEEFLADRPELLTRILDRLQRSDLASAAHINTALPAIVRDLWTLGRPISSANAASVSWKRRQLNMPKNHCYDAALQGQDFSAIVSLPSRILVLRPNNGRSKQKANVDRHGTPIGRPFREHQRLPKRLRRRRNPAPGHAGHHQRHGAHLISTGDTVTLEHHAQQYTGRAVIKSGGTRVAIHGTKPEISAQISQCRRIARNPRWTIRHASPAQQSHQASTVK

SEQ ID NO: 14747 - protein, 404 aa, unidentified
  REGION 1..404: note = metagenome
VKTYPFTIRLVDRLLENSAVQPVAVKVDPGSKQSGMAVVRDDGKAHHHALFFINLVHRGKVIRDRLTGRRAFRHRRRSANLRYRAPRFLNRKRRKGWLPPSLQHRVDTTMSWVKKLRKLVPVTALWVENVKFDTQKLQNPEVSGVEYQQGTLFGFEVREYLLEKFGRRCVYCGAENTPLNIDHVVPRAKGGSDRVSNLVLACTDCNQKKGAQPLEAFLKDKPQQFERIRRQLKAPLRDAAAVNATRWALFNALKQTGLPVATGTGAQTKFNRKAFGIPKEHWLDALCVGRINGADHPEGMGVLQVRCTGRGSYQRTRLNKYGFPRGYLMRQKRVHGFATGDIVKAVKKGVTFQGRVAVRESGCFVLQTPDGKVDGIHWRHCRLISHNDGYGYAWLRPALHSSSV

SEQ ID NO: 14748 - protein, 406 aa, unidentified; identical to SEQ ID NO: 3795
  REGION 1..406: note = Human gut metagenome

SEQ ID NO: 14749 - protein, 465 aa, unidentified
  REGION 1..465: note = Human gut metagenome
MSTCACVLSKNGERLMPTIRLGKVRHLLKDGKAKIIKHHPFTIQLLYDSETNIQPIEICEDVGYNYIGISVKSQSHEYVSVQYDTLQDEKDCHDSCRKMRRIRRNRLRYRKPRFDNRKRNKGWLAPSLEHKKELNVNVIKMYCKVVPITHVTVEVGSFDTMLVKAIQEGKAIPEGADYQKGPRYNLATLREAVFYRDNYTCQVCGREASEGAILHVHHMFYWKGRHDNSLSELITVCEKCHTPANHQKGGKLYGFGEDIKFANLSGAAFMNTVRWQIVNELYAAFGKPFVTFTYGAMTKEKRIALHLEKSHNNDAYAMGEFHPNCRCTFEHYEKVRRNNRILEKFYDSRYIDIRTGEIATGKELFNGRINRSHKKDSENLHKYRGKRIRKGYRALRRKKVALNPGDLVSLNGEILTVHGTHTNKKGAVNVEFKTPGKSGQKSASLKKLKIVNTTDSMHSAWEKIS

SEQ ID NO: 14750 - protein, 442 aa, unidentified; identical to SEQ ID NO: 3234
  REGION 1..442: note = Human gut metagenome

SEQ ID NO: 14751 - protein, 424 aa, unidentified; identical to SEQ ID NO: 3351
  REGION 1..424: note = Human gut metagenome

SEQ ID NO: 14752 - protein, 416 aa, unidentified; identical to SEQ ID NO: 8483
  REGION 1..416: note = Human gut metagenome

SEQ ID NO: 14753 - protein, 431 aa, Escherichia sp.; identical to SEQ ID NO: 3801

SEQ ID NO: 14754 - protein, 494 aa, Leptospirillum sp.
MLPQSRALEAADADNREGQDETVGGKGAIPKPVANIPEGRRFARSALRPQGQCNVRFDEGFVQVFVLDKKKKPLMPCHPARARELLREGRAVVHRIAPFTIRLKDRIGGETQTIRVKLDPGSKTTGLAVVREEETDGEKTAHVLFQAEIHHRGSAIKKKLDQRRAFRRRRRSQLRYRTPRFDNRTRPDGWLPPSLRHRVDTTLAWVERLRRLVPVSELSQELVRFDMQKIENPEISGVEYQQGTLAGYEVREYLLEKWGGTCAYCGSENVPLEIDHIHPRSLGGSDRVSNLTLACRSCNLKKGNRPVGEFLAKTPERLSTILARAKAPLKDAAAVNATRWVLFQALKATGLPVETASGGRTKWNRTRLLLPKTHALDAACVGKVDRIEGWNRPCLSVKATGRGSYRRTRLDAFGFPRGSLTRTKAHFGFQTGDRVMAIVTKGKKNRNLCRTGGSEKLRQFQHPNRLRSGAGDFLQGLSASPAGRRVRIFYPSDH

SEQ ID NO: 14755 - protein, 443 aa, Anoxybacillus sp.; identical to SEQ ID NO: 4769

SEQ ID NO: 14756 - protein, 456 aa, unidentified
  REGION 1..456: note = Marine metagenome
MAIFVLDKKKQPLMPCSEKRARLLLARGRAVVHKRYPFTIRLKDRVGGETQPLRLGIDPGSKTTGLALMREPDSQQRHVLCLFELIHRGFQIKKALQQRAAFRRRRRSANLRYRAPRFNNRIKPKGWLAPSLQHRVDTVTAWVKRLSRLAPVTAISQELVRFDTQKLDNPEISGVEYQQGTLLGYEVREYLLEKWGRECAYCGTTDTPLEIEHVVPRSRGGSNRVSNLTLSCHPCNQSKDALSLVDFFATDKGLKKRLKANGHTANARLERVQRQLKQPLRDASAVNATRWALFSALNATGLPVTVASGGRTKYNRQRLNIPKSHALDAACVGAFEKLHDWTVPTLTIKAMGRGSYQRTRLTKHGFPRGYLMRQKQVHGFQTGDMVRAIVPTGKKAGTHTGRVAIRKTGSFNIQAEYGAVQGISHKYCTLIQRGDGYGYHFTLFSNLTGGAGQAVA

SEQ ID NO: 14757 - protein, 431 aa, Moorena sp.
MMNVVYVLSQEGKPLIPTERHGKVRRMLKEGKAKVVKAKPFTIQLMYETTEYTQPATLGLDSGYSNVGFSAVNAAKEWIAGELSLLQCQVERNKERSRYRRQRRSRLRYRKARFNNRKKPEGWLAPSLQNKLDTHIRLVDKISALVPISKVVVEVAAFDIQEIKNPNIEGKGYQQGEQYGFWNLREYIFHRDNHQCQNPDCKNKAKEKVLQVHHIGFWKGDRTDRPGNLITLCTKCHTPANHQSGKFLYGWEPKVKSYKPETFMSVVRWKLVNAIGCEHTYGHITKTLRIESGLEKSHVNDAFCIAGGTSQQRVDPLQIKQIRRNNRSLELFYDARYIDIRTGEKVSGGELFSGRRARNINLNGPNLRIYRGKKMSKGQRRIRKTRYAYQPCDTVLFNNQKYAVKGIQNKGVYIKLKDLAKPVKTELVSPL

SEQ ID NO: 14758 - protein, 278 aa, unidentified
  REGION 1..278: note = Human gut metagenome
LTHQFKKGVPVMVYVLDKNGQPLMPTDRHRKVRLMLQSGQAKVIKRCPFTIQLNYDSGHQTQEISLGIDAGSKHIGVSATTKIKVLYEADVELRNDIVDLLSSRRELRRGRRNRKTRYRQAKFNNRRRGNGWLAPSIRQKIGTHLTVVENICKILPISRIMVETASFDIQKIKNPDIQGAEYQQGDQLEFWNVREYVLFRDGHTCQCCKGKSKDKILNVHHIESRKTGGNAPNNLITLCETCHTGYYKGTVQLPKAIKRGMRFKDAAFMGIMRWAFYE

SEQ ID NO: 14759 - protein, 421 aa, unidentified; identical to SEQ ID NO: 11150
  REGION 1..421: note = Human gut metagenome

SEQ ID NO: 14760 - protein, 457 aa, Anaerostipes sp.; identical to SEQ ID NO: 2712

SEQ ID NO: 14761 - protein, 420 aa, unidentified
  REGION 1..420: note = Human gut metagenome
MQYVYVLNKHGEPLMPCSPRKARLLLKQKKACVIKRTPFTVKLLYGSTGYKQPVTLGVDAGSKHIGISATTEKHELYREEATPRNDVVDLLSARRAFRRSRRNRKTRYRAPRFDNRVHSKHKGWLAPSVEVKIQEHITLVEHVCRILPVTLVRVETAEFDTQRLKAMLEGKPLPVGTDYQLGEMYDEYNVRQYVLKRDNYTCQCCGAHSTKTKGVKLHVHHIETRRTGGNAPNNLITLCTACHKALHAGKVTLDGKKRGKPLKDAAFMGIMRKTLMERLRKELKIPVQGTYGYITKCLREKNGIPKSHTNDARCISKNPLAIPCDTCYYTKAVRHHNRQLHKATILKGGIRKANQAPYIVKGYRLWDKVAYNGTECFITGRRTSGYFALKELDGTVVSNSISYKKLRLLEAATNYITERK

SEQ ID NO: 14762 - protein, 413 aa, unidentified; identical to SEQ ID NO: 8260
  REGION 1..413: note = Human gut metagenome

SEQ ID NO: 14763 - protein, 489 aa, unidentified; identical to SEQ ID NO: 5672
  REGION 1..489: note = Human gut metagenome

SEQ ID NO: 14764 - protein, 512 aa, unidentified
  REGION 1..512: note = Human gut metagenome
MSTVYVLNKDGKPLMPTTRGGHVRHLLKEQKARVVQSNPFTIQLLYETNDAVQPLYLGIDPGRTNIGVAVVKADGTAVFTAHLKSRNKEIPKLMQDRKRTRRARRTNGRRHRRQRRAKANGTISKKCVKQTTTQNGSVSKRAKEIGVIKRHLPGCEKDVLCIGIKNKEAKFNNRTRPESWLTPTANQLLQTHVNLVKKIQKFLPISDVVLEVNKFAFMQLDNPNIQKWQYQQGPLYKKESLESAVSEMQEHHCLFCKKPIDHYHHVVPQHKNGSNTIDNIVGLCTKHHDLVHKETAWQEKLAKKKTGLNKKYGALSVLNQIIPALTKGLSSLFPKHFFVTTGKSTYDYRAAHDVCKDHWLDAYCIACSVLPNDVCDSNINSHVPYELKQFRRHDRRALHKENMNRVYTLNGKKVATNRHKAIEQTTDSLEEFRQNYPNDVCKLKVKEHHSEYRNPKRNFPGCVFLVGKRTHVMQGTSGSHNGKADGYYDTNGNSYPFGKCKFVAKNEGIVYA

SEQ ID NO: 14765 - protein, 585 aa, unidentified
  REGION 1..585: note = Human gut metagenome
MILTPFAPVALAQVAALHQVLVTLQVQVYLIRIYSNAHHKRIISERRFIMKYVYIIDKHGKPLMPTTRFGHIRKLMKSGKAVPISNNPFTIRLKYDTTSYTQDLWEGIDTGRQNIGDAVSDKDGKNVYLADVCTNNKSIKSNMQDRAGFRRERRRHDRQSKQRKAKHDGTEIKNGDDDTIRTKYFCKSVKISYPAADEAVTHKVIRGKEGKFANRKRPDGWMTPSAKQVIQITINEIKQTAKILPITHINLERVSFDFQKLENQDIRKWEYGKGILYGYKTYKDYIWDKQHGKCACCGQPITQYHHIIHRAEGGIDNVKNIIGLCDACHDEIHGSQDAEDKLKELKEGVRQRYYIGLLNSVIPALIEEISAYCKKNGIEFMVTDGKMTADTRKEHGLQKDHCTDAYAISLAGRNITTVSVSDTIYEKRRFKKKSCNIIAARNQRVYKFCGKIIAYNRHKATNQKTDSFEEYMAKYTKTHTEKECRQHVAKIEIIPAKRTYTYHKNGLIAPMHTGDIVRYEKHNKIKRNTKFETFVATSVKMSGEGHIKYGDKCNSKKIKFCRPIGSGCLQVIHALCTEEYLKSLA

SEQ ID NO: 14766 - protein, 555 aa, Moorena sp.; identical to SEQ ID NO: 9226

SEQ ID NO: 14767 - protein, 416 aa, Moorena sp.
MVYVLDKNGHPLMPTNRHGKVRRMLRSGNAKVIRRCPFTIQLLYNGTDYTQPVSLGIDAGSRHIGVSATTETKVLYEADVTLRNDIVDLLSTRREARRTRRNRKTRYRKPRFNNRTRKDGWLAPSVQQKVDTHLATVRKVTEILPVSGITVETASFDIQKIKNPDIAGTGYQQGEQLDFWNVREYVLFRDGHKCQCCKGKSKDPILNVHHIESRKTGGNAPNNLITLCETCHKGYHNGTVSLPKSIRRGMKFKDATFMGIMRWAFYNKVKETYEPLGIRVNMTYGYITKNTRIEHNLPKNHFIDARCISGHPDAISNGIVFYQKKVRCHNRQIHKQKILKGSIRKRNQAPYLVKGFRLFDKVTAKGREWYINGRRLKGAFILKNLDGDTLEITPSKIRFVAQQHSFIIERKMLGEC

SEQ ID NO: 14768 - protein, 454 aa, unidentified; identical to SEQ ID NO: 8101
  REGION 1..454: note = uncultured beta proteobacterium

SEQ ID NO: 14769 - protein, 470 aa, unidentified
  REGION 1..470: note = Human gut metagenome
MSVFVVGLNGCRLMPTSEREARLLLKHGKASVYRKVPFTIKLNYKTGSTTQPGYLGIDTGSQHIGVSVVREDGTVLHKEEIGLRDSMSKRKLMESRSSLRRGRRHRKTRYRHPKWRLKAKRVYYETPDRKGRHWKKQKITFASKRPQGWLPPSLQSKTDHHIQWIKKLQDLLPDGYRLSIELGRFDPARMKDTEIHGDLYQKGPQYDYENVRAYVLDRDRYTCQVCGKKGGKLHIHHILYRSHGATDNPQYMATICSDCHSTENHQPGGILYQWMQEQKKFTRGLRDATFMNILRKRLMKAFPKATFTYGNITKADREKLKIPKSHGNDATAIAIVKTGIMTVKDNEPVIYIQQVRRKKRSLHEETLRKGRKEPNRKASRYNKNTKAVTVTKRKNKKRISITGCLFDRVELNGKKGWISGFTDKSCYIKDENDQYIRISPKYKQVSLSKLKILHHCGNWVIGARRSLGKG

SEQ ID NO: 14770 - protein, 416 aa, unidentified
  REGION 1..416: note = Human gut metagenome
MVYVLNIQGNPLMPCKEAKARRLLKNSLAKIIKRTPFTIQLLFECENKTQDITLGIDAGSKTIGVSASTEKQELYSAEVVLRNDIVDLISTKKQNRRTRRNRLRYRKPRFNNRIKFKKKGRLAPSVSQKIETHLNVIKKIHKILPISKIIVETASFDIQKIKNPNITGVEYQQGEQLGFWNVREYVLHRDGHTCQHCKGKSKDKILNVHHIESRKTGGDSPSNLITLCETCHKKYHNGEIKLKVKRGQSFRDSAFMGIMRWAFYEKLKETYQNVRMTFGYITKNTRISNNLPKEHCIDAYCIAGNLKAKLMDSYFYQIKKRCQNRQIHKANFLKGGRKKLNQAPYIVKGFRLFDKVSYQDKPYYIFGRRSSGAFDVRDLSGNKINKGSINCKYLKLLEARKYYLTEKRERAIPSND

SEQ ID NO: 14771 - protein, 418 aa, unidentified; identical to SEQ ID NO: 8891
  REGION 1..418: note = Human gut metagenome

SEQ ID NO: 14772 - protein, 435 aa, Desulfovibrio sp.; identical to SEQ ID NO: 13095

SEQ ID NO: 14773 - protein, 514 aa, Nocardiopsis sp.; identical to SEQ ID NO: 6856

SEQ ID NO: 14774 - protein, 502 aa, unidentified; identical to SEQ ID NO: 6049
  REGION 1..502: note = Human gut metagenome

SEQ ID NO: 14775 - protein, 423 aa, unidentified; identical to SEQ ID NO: 3951
  REGION 1..423: note = Human gut metagenome

SEQ ID NO: 14776 - protein, 512 aa, unidentified
  REGION 1..512: note = Human gut metagenome
MSTVYVLNKNGKPLMPTTRCGRVRHLLKEQKARVVTSNPFTIQLLYETDDVVQPLYLGIDPGRTNIGVAVVKTDGTAVFTAHLETRNKEIPKLMKKRKESRRARRTNGRRCRRQRRAKANGTISKKCVKHDTAQNGSVSKRAKEIGVIKRHLPGCEKDVLCIGIKNKEAKFSNRTRPEGWLTPTANQLLQTHINLVKKIQKFLPISDVVLEINKFAFMRLDNPNVQKWQYQQGPLYQKANLEETVSEMQEHHCLFCKKKIDHYHHVVPQSENGSDTIGNIVGLCTKHHDLIHKDTAWQKKLAKKKTGLNKKYGALSVLNQIIPALTKELSSLFPKHFFVTNGKSTYDYRAAHGVSKDHWLDAYCIACSVLPNDTCDKTINSRVPYELKQFRRHDRRALNNENMSRVYTFNGKMVATNRHKATEQTTDSLEEFRQRQPNDVCNLKVKEHHPTYRNMNRNYPGSVFLVGNQVHVMQGIAGSKDGEATTYKDTNANSIAAGKCKFVAKNSGILFV

SEQ ID NO: 14777 - protein, 420 aa, unidentified; identical to SEQ ID NO: 3335
  REGION 1..420: note = Human gut metagenome

SEQ ID NO: 14778 - protein, 450 aa, Moorena sp.; identical to SEQ ID NO: 2935

SEQ ID NO: 14779 - protein, 431 aa, unidentified
  REGION 1..431: note = Human gut metagenome
VEQNLRVFVLNKRGKPLMPCSPAKARLLLKEKKAVVVRRTPFTLQLTIATGEAKQAVSLGVDAGYKHVGLSASTKKAELYASEVELRQDITDLLSARRALRRARRNRKTRYRAPRFDNRIRTKRKSWLAPSVENRINAHLSRIEAVLRLLPVTKITVETASFDTQLLKNPDITGKEYQEGEQLGFWNVREYVLFRDGHVCQHCHGRSKDPVLNVHHLESRRTGGDSPGNLITLCETCHKALHRSEITLKAKRGQSFRAESFMGIMRWEVLNRLKTSHSELEVHNTYGYRTKHARIANGIDKSHCADAFCIAGNLGAQRLGEFFFQKQTRRNNRQIHKLSILKHGLRKRNQAPFEIKGFRLFDKVACKGEEGFIFGRRSSGFFDVRKLDGTRISAGISYKKLHLLEKRRTYLTEIRKEEALPPLPEGRGLRA

SEQ ID NO: 14780 - protein, 269 aa, unidentified
  REGION 1..269: note = Human gut metagenome
MVYVLDKNGQTLMPTDRHRKVRLMLQSGQAKIIKRCPFTIQLNYDSGHQTQEISLGIDAGSKHIGVSATTKIKVLYEADVELRNDIVDLLSSRRELRRGRRNRKTRYRQAKFNNRRLGNGWLPPSIRQKIGTHLTVVENICKILPISRIMVETASFDIQKIKNTDIQGAEYQQGDQLGFWNIREYVLFRDNHTCQCCKGKSKDKILNVHHIESRKTGGNAPNNLITLCEICHTVVIIKVPYSYRRPSNAVCDLRMLHLWELCDGLSTKH

SEQ ID NO: 14781 - protein, 524 aa, unidentified
  REGION 1..524: note = Human gut metagenome
MEILRIDWKDICPTGRSGLPQKELFMRPVYVLDMNGKPLMPTCRFGKVRRMLKSGEAKVVDTLPFTIQLDRPTKTHVVQSVTLGCDPGRTNIGLAAVRSDGTDLYRSHCETRNKEIVDLMDARRAARRASRRGERLARKRLAAKHETATTFPDGRKLPGCEKPIMLKDIINTEARFNNRVRPAGWLTPTATQLLWTHLNLIKRISRILPVSDIALEINKFAFMQLDEPDKNKWNIDFQHGPLYGTGGLKAAVRQLQNNTCLLCQENVIEHFHHLIPRSKRGDNTINNIAGLCQKCHEAVHKSADTAEKLSTLKKGQTKRYGGTSVLNQIIPKLVEELGKTYHEHLHLTYGWQTKEFRTKHKLEKTHDTDAYCIAAGTMQTVKPNIRTDVYEIKQFRRHNRANIHHQTERTYKLNGQTVARNRRKRTDQKTDSLAEWFENTVKQYGQQKAEHLRAGLKVRKSTRYYNFKDRVMPGAVFQYEGNRYVVTGQPSGGQYYRAYGKGNQNFPAKKIRIISLNRGLVYVA

SEQ ID NO: 14782 - protein, 432 aa, Moorena sp.; identical to SEQ ID NO: 2042

SEQ ID NO: 14783 - protein, 438 aa, Petrotoga sp.; identical to SEQ ID NO: 8698

SEQ ID NO: 14784 - protein, 335 aa, Butyrivibrio sp.
MIVKDGFAPSIRNKRDRHIDIFLMYHKVVPITKATFEMGQFDTQVLKAIAEGKSLPEGSDYQHGERYGAETLREAVFTRDGYKCICCKRTPFKDGAILHVHHVGFWKGDRTDRLSNLATVCEKCHISKNHKPGGKLYGFEPKLPNMSPATFMTMVRFDMFKRLKELAPDEEFRMTYGAKTKLSRKDLSIKKSHANDAYAMGEFHPRHRTNTVHYEKRRRNNRILSKFYDAKYIDIRDGSIKKGSQLSCGRTKRSIPRNSELNERIYRGKKVSEGRYSIRTQRYSYRPHDIVWVDGVRYTVKGVISNGTRVALNERLPVSIHKIQKIIHIGGWYMS

SEQ ID NO: 14785 - protein, 426 aa, unidentified; identical to SEQ ID NO: 3614
  REGION 1..426: note = Human gut metagenome

SEQ ID NO: 14786 - protein, 376 aa, unidentified
  REGION 1..376: note = Human gut metagenome
LSKVKTMRVFVFNMRGRPLMPCSQRKARLLLRENKAKIYKYHPFTIQLTYTTGETKQDCHIGIDTGSKYIGAAVRSEDKVFWKGEIELRQDIRSNLDTKRIYRRSRRNRKTRYRKPRFLNRKRRDEWLPPSLQSRINHTFHWIDTLSSLVPNPILHIEVGKFDVAKMINPEIHGVDYQHGQTYGFFDERYFVFARDNYTCQCCGKSKNKILNTHHIIYRSNGGTNRVDNLITVCTDCHTSQNHRKGGIFYQWQEQHKKVKQYKEPPFMNTLRKRIFVAYPDAEITYGSETTPKRKAMKLDKTHYNDAIVISGINEIKENPEEWLLIKQFRKKKRSLHEATARKGRKKPNRNQTRNSKNTPYYKGFYLNDKVSVFGK

SEQ ID NO: 14787 - protein, 536 aa, unidentified
  REGION 1..536: note = Human gut metagenome
VLRPRYQCPTRWYPSREQGSGNGCLSGEENTDLEQEVSGTLSKGDHSHPGEQDFCVPAITIQGGPAMSVFVVGLNGCRLMPTSERKARLLLKHGKASVYRKVPFTIKLNYKTGSTTQSGYLGIDTGSQHIGVSVVREDGTVLHKEEIGLRDSMSKRKLMQSRASSRRGRRHRKTRYRHPKWRPKAKRVYCEIPDRKRRHWKKKEITFTSKRPKGWLPPSLQSKTDHHIRWIKKLQDLLPEGYRLSIELGRFDPARLKDPEIHGELYQKGPQYDYENVRAYVLNRDRYTCQVCGKKGGKLHVHHILYRSHGATDDPQYMATVCSDCHNTENHHQGGILYQWMQKQKKFTRGLRDATFMNILRKRLIEAFPGATFTYGNITKADRERLRLPKSHGNDATAIAIVKTGIMTVKDKEPVIYIQQVRRKKRSLHEETPRKGRKEPNRKASRYDKNTKAVTVTKRKNKKKISITGCLFDRVELNGKKGWISGFTDKSCYVKDENDQYIRTSPKYKQVSLSKLKILHHCGNWAIGARRSLGKG

SEQ ID NO: 14788 - protein, 477 aa, unidentified
  REGION 1..477: note = Human gut metagenome
LVSGQLIMAWEAIQTRRIKPHDIGEGTLRRHAAGTVSFPVLCKNRKETLMSVLVIGRNGRALMPTNPRKARLLLKKKTASVVCRHPFTIQLLYKTGCATQEGCIGIDTGSQHIGVGITCGDRVILKDEHALRSSMEKRSLLATRAVMRRGRRYRKVRYRKPKWRHHTKRMYFEKANRRGRHWRKVKTTTQSPRPKGWLPPSLQSKCDHHFRIIDRYLKYLPDPITRNLVIEAGRFDMARMNDPTIHGEMYQRGPMYDAENLRAYIFARDNYQCACCKAKAGTTRKADGTTVKLVAHYILFRSRGATDNPKYIISVCDHCHTTKAHQPGGILYSWMENNKKVARGLRDAVFMNILRKRLFARYPQSAFTYGNITATDRKQLRLPKSHANDAVAISLFGKEASTVKNICQTMHYKQIRKSKRSLHEAIPRKGRKNPNTKAVRNKKNTTQVNGFKLWDSVLADGKKLFICSFTGTSAYLI

SEQ ID NO: 14789 - protein, 443 aa, Anoxybacillus sp.; identical to SEQ ID NO: 7070

SEQ ID NO: 14790 - protein, 407 aa, Succinivibrio sp.
MIYVLNCKGVPIMPTSRHGMVRRLLREHKAKVVRKCPFTIQLSYECANITQPITLGVDTGYENVGISACTEKKVLFEAKAKIRTDIVKLLSTRRETRRTRRSRKTRYCKARFLNRNRAKGWLPPSIRAKVESHLRLVAKVHEILPIGKIIVEIASFDIQKIKNPEIKGAEYQQGDQLGFKNVKAYVLARDGCTCRCCKGKSKDKVLRVHHLESRLIGGDAPNNLVTLCDSCHTKFHKGLISLDDIKRGKSFKAETFMGLMRNFFFKELCNKYPCVECTYGYITKHLREKYHLKKDHHVDARCICGTPQALPSDVYLMKKVRCHNRQIHKFTTLKGGRRKLNQAPYTVKGFRLFDKVKVGDQVGFIFGRMTTGYLDIKNLQGDLLYKAISCKKVKLLDTRKSWLIEKC

SEQ ID NO: 14791 - protein, 411 aa, Virgibacillus sp.; identical to SEQ ID NO: 14618

SEQ ID NO: 14792 - protein, 414 aa, unidentified; identical to SEQ ID NO: 12176
  REGION 1..414: note = Mouse gut metagenome

SEQ ID NO: 14793 - protein, 512 aa, unidentified; identical to SEQ ID NO: 4350
  REGION 1..512: note = Human gut metagenome

SEQ ID NO: 14794 - protein, 416 aa, unidentified; identical to SEQ ID NO: 6623
  REGION 1..416: note = Human gut metagenome

SEQ ID NO: 14795 - protein, 481 aa, unidentified
  REGION 1..481: note = Human gut metagenome
ARVVTSNPFTIQLLYETDDVVQPLYLGIDPGRTNIGVAVVKADGTAVFTAHLETRNKEIPKLMQGRKKARRARRTNGRRCRRQRRAKANGTISKKCVKQTTAQNGSVSKRAKEIGVIKRHLPGCEKDVLCIGIKNKETKFSNRTRPEGWLTPTANQLLQTHINLVKKIRKFLPISDAVLEINKFAFMRLDNPNIQKWQYQQGPLYQKASLEEAVSEMQKHHCLFCKKPIAHYHHVVPQSENGSDTIGNIVGLCTKHHDLVHKDTAWQKKLAKKKTGLNKKYGALSMLNQIIPALTKELSSLFPKHFFATNGKSTYDYRAAHGVRKDHWLDAYCIACSVLPNDVCDKNINSRVPYELKQFRRHDRQALNNENMSRVYTLNGNVVATNRHKATKQTTDSLEEFRQNHPDDVCKLKVKEHHPTYRNMNRNYPGSVFLIGKQVHVMQGIASSKDGEATKYKDTNANSIAAGKCKFVAKNSGMLFV

SEQ ID NO: 14796 - protein, 451 aa, unidentified; identical to SEQ ID NO: 3061
  REGION 1..451: note = Human gut metagenome

SEQ ID NO: 14797 - protein, 424 aa, unidentified
  REGION 1..424: note = Human gut metagenome
MRVFVLNMRGEPLMPCTQRKARLLLKESKAVIYKYNPFTIQLTYATGETKQDCHIGIDTGSKYIGVAITSEDKVLFKGEIELRQDVKSNLDKRRMYRRDRRNRKTRYRQPRFLNRKRIDKWLPPSLQNRINHTFHWIDTFSRLVPSPKLHIEVGKFDTAKLINPEINGVDYQHGQTYGFFDERYFVFARDNYTCQCCGKSKDKILQTHHIIYRSNSGTNRVDNLITVCTDCHTSENHKKGGVFYKWQEQRKKVKQYKEPPFMNTLRKRIFTKYPNAVITYGSETTPKRKGTGLNKTHYNDAIVISGICKINENSEEWLLIKQFRKKKRSLHEATARKGRKIPNRNQVRNSKNTPCYQGFFLNDKVSVLGKSGYITGFTSNGAYIKDNASNYITLPDKTYKQVSISKLRLEHHNNNWQYVVKTAV

SEQ ID NO: 14798 - protein, 590 aa, Streptomyces sp.; identical to SEQ ID NO: 3355

SEQ ID NO: 14799 - protein, 427 aa, unidentified
  REGION 1..427: note = Human gut metagenome
MKGVSVMVYILDINGQPLMPTDRYGKVKHLLRQGKAVVVKRCPFTIRLLYDTTAYTQKLTLGVDTGSGTLGTAVSDEKGNIVYMSEVTVRNDITDKMKQRLRYRRNRRNRKTRYRKARYLNRRNSIKSDRFNPTMTSKFHSHIKEIDYIKSILPVKTLVLETGQFDTHLLKNPCLANPKVRHWGYQKGVNYGFENTKAMVLNRDNYTCQYCRGKHKDSRLEVHHIIFRSNGGSDEQENLITLCHTCHKALHSGRINPNFSGRKKGTLRYATQMNSIRCQLLKHYPDAIETFGCVTKANRLNLNLEKHHYTDACVIATETKPVCLITDILYLKKSVSDGDFQQTKGIRSEQVINTGKIYGFRKFDKVRYLGNEYFIKGRMSTGYAVLMDINGKKADFSKMPKGFKTPKLSICRRISARKSQLIQAMAI

SEQ ID NO: 14800 - protein, 457 aa, Moorena sp.
VDTHHLRKQSIFPKGMCFMNMVYVFSPERAPLMPCSGVMARLLLKQGKAKVVHRTPFTIQLLSQPENTYTQPLTLGVDTGSSLMGSAVADENGNVLYLSEVEIRNDIARTMRERAASRRNRRNRKTRYRPARWLNRKNSIKKERFSPTMTSKIDAHLREMRFVQSLLPITSMVLETGTFDPHALKNPEVLQNKWLYQKGINYGYAHTKAYVLTRDGYTCQHCQGKSKDQRLEVHHLVFRSEHGSDEEANLLTLCKTCHDGLHAGTVTLKQAGKRKGNLLHPTQMNSIRNQLLQRVQAEETWGFVTKEHRHFLGLLKEHLFDATVIATRGAKPIFQTNSALLKKCVPDGDYQQTKGVRSTQRIPTGKIAGFRKFDKVHYLGQEYFIKGRMATGYAILMDIQGHKLTLKPIPKFEQMKRVSARSSWIIHQRTIPSFSSPLTSSSSVNTGKSSGFPMERW

SEQ ID NO: 14801 - protein, 319 aa, unidentified
  REGION 1..319: note = Human gut metagenome
APRFDNRIRTKRKGWLAPSVENRINAHLSRIGAILRLLPVTKITVETASFDTQLLKNPDISGKEYQEGEQLGFWNVREYVLFRDGHACQHCHGRSKDPVLNVHHLESRRTGGDSPGNLLTLCETCHKALHRREIKLKTKRGQSFRAEAFMGIMRWEVLNRLKASHPELEVHNTYGYRTKHTRIVNGIDKSHCADAFCIAGNLGAKRLGEFFFQKQTRRNNRQIHKLSILKHGLRKRNQAPFEVKGFRLFDKVVCQGEEGFIFGRRSSGSFDVRKLDGTRISAGISCKKLRLLEKRRTYLTEIRKEEALPPLPEGRGLRA

SEQ ID NO: 14802 - protein, 557 aa, unidentified; identical to SEQ ID NO: 3108
  REGION 1..557: note = Human gut metagenome

SEQ ID NO: 14803 - protein, 419 aa, unidentified; identical to SEQ ID NO: 9782
  REGION 1..419: note = Human gut metagenome

SEQ ID NO: 14804 - protein, 512 aa, unidentified
  REGION 1..512: note = Human gut metagenome
MSTVYVLNKDGKPLMPTTRCGHVRHLLKEQKARVVTSKPFTIQLLYEADDVVQSLYLGIDPGRTNIGVAVVKADGTAVFTAHLETRNKEIPKLMKKRKESRRARRTNGRRCRRQRRAKANGTISKKCVKQDTAQNGSVSKRAKEIGVIKRHLPGCEKDVLCICIKNKEAKFSNRTRPEGWLTPTANQLLQTHINLVKKIQKFLPISDVVLEINKFAFMRLDNPNVQKWQYQQGPLYQKANLEETVSEMQEHHCLFCKKKIDHYHHVVPQHKNGSNTIDNIIGLCTQHHDLVHKDATWQKRLAKKKTGLNKKYGALSVLNQIIPALTKELSSLFPKHFFVTNGKSTYDYRAAHGVSKDHWLDAYCIACSVLPNDTCDKTINSRVPYELKQFRRHDRRALNNENMSRVYTFNGKMVATNRHKATEQTTDSLEEFRQRQPNDVCNLKVKEHHPTYRNMNRNYPGSVFLVGNQVHVMQGIAGSKDGEATTYKDTNANSIAAGKCKFVAKNSGILFV

SEQ ID NO: 14805 - protein, 411 aa, unidentified; identical to SEQ ID NO: 9890
  REGION 1..411: note = Human gut metagenome

SEQ ID NO: 14806 - protein, 502 aa, unidentified; identical to SEQ ID NO: 6341
  REGION 1..502: note = Human gut metagenome

SEQ ID NO: 14807 - protein, 442 aa, unidentified; identical to SEQ ID NO: 2903
  REGION 1..442: note = Human gut metagenome

SEQ ID NO: 14808 - protein, 449 aa, Moorena sp.; identical to SEQ ID NO: 13052

SEQ ID NO: 14809 - protein, 404 aa, unidentified
  REGION 1..404: note = Human gut metagenome
LMPTERHGKVCRMLKSGIAKVVKKCPFTIQLQYESERNVQPVALGIDAGSKHVGVSATTKAKVLYESDVELRDDIVKLLATRRQLRRRRRSRKTRYRPARFDNRRRKEGWLTPSIRQKIESHLTVVANVCKILPVSQIIVETASFDIQKIKNPDIQGIEYQQGEQMDFWNIREYVLFRDGHTCQCCKGKSKDKVLNVHHIESRKTGGNAPNNLITLCETCHKGYHNGTVTLPKNIKRGMKFKDAAFMGIMRWTFYNTLKEQYEPDIPVHYTYGYITKNTRINHNLPKGHCIDARCISGNPDAVSDGTYYYQKKVRCHNRQIHKQTILKGGIRKSNQAEYLVRGFRLFDKVRYQGREYFIFGRRKSGFFDIRTLSGEKVNKGSINVKRLTFVDTRKNYLTERRTV

SEQ ID NO: 14810 - protein, 440 aa, Moorena sp.; identical to SEQ ID NO: 6406

SEQ ID NO: 14811 - protein, 414 aa, unidentified; identical to SEQ ID NO: 10282
  REGION 1..414: note = gut metagenome

SEQ ID NO: 14812 - protein, 413 aa, unidentified
  REGION 1..413: note = Human gut metagenome
MPDKVYVISRLGHPLMPCSPAKARHLLDDKKAKVVKRMPFTIRLLYGSTKYIQPIILGVDAGSKTIGLSASTAKEEVFAAEVMPRNDVVENLSTRREFRRARRNRTTRYRKPRSDNRVRSNHERWLAPSVKVKIQEHITSIKRVCTILPISKVVIETAEFDLQLLKAIQEGKPIPEGEDYQKGEMYGSYNVCQYVLWRDNYTCICCGVRGTPKNPVRLHVHHFESRKYGGNAPDNHGTLCDDCHKKFHLGIITDVKLKTRRRQSTRDAAFMGIMRKTLMWRLRTELFIPVAETKGYITKATREKLLVLPKSHTRDALAIAQGRHGFGIKEYAYVEPANHIYTVRPVRHHNRQLHKASILKGGIRKRNQASKYVFGFRLYDKVLYQGKACFVWRRRTSGTFLLRTIDGIKVKDG

SEQ ID NO: 14813 - protein, 428 aa, unidentified
  REGION 1..428: note = Human gut metagenome
LKVFVLNMRGQPLMPCSPAKARHLLKAGKAVVKRRTPFTIQLRIATGETKQNVTLGVDAGAKHVGLSATTEKEEVFASEVELRQDITGLLAARLSLRRDRRHRKTRYRAPRFLNRVRSKHKGWLAPSVENRIQAHMSRIDAVCRLLPVTKIVIETASFDIQKIKDPSVEGTDYQQGDQLGFWNVREYVLFRDGHVCQHCHGCSKDKILNVHHLESRQTGGDAPNNLITLCETCHKAYHAGKIKLKVKRGQSFRAEAFMGIMRWTLLDRVRKAHPGLPVENTYGYLTKHTRITHGLPKTHCVDAYCIAGNLKAVRRGVYLHQRQMRKHNRQIHKFTVLSKRLEDGTKIGYRKLNQSPYLVHGFRLFDKVRCLVQIGFIFGRRSSGYFDVRRLDGVKLSPSISWRKLTLLEKRSTYLTELRKQDGASSPV

SEQ ID NO: 14814 - protein, 450 aa, Moorena sp.; identical to SEQ ID NO: 2935

SEQ ID NO: 14815 - protein, 507 aa, unidentified
  REGION 1..507: note = Human gut metagenome
MSEYIYVIGMDGDPQMPIKRKRHVEKMLQTGRARVFRQVPYTIQLTYKNQPVLQPVTIAEDPGRSNIGMAVVSLSGELLSAAVVQTRNKEIVKLMEKRKLHRRASRNGERKARQRLAKRCHTMLKAGFLMRKLPMYRKDKRVKCLVIRNTEARFCNRKREDGWLTPSAEHLVRTHINLIHKMQKFLPITDVAIEINRFAFLSLEDPSISGVDFQNGPLKGYDDLNAAVEDLQDGHCLMCNSLIEHRHHIVPRSMQGSNTIGNIAGLCCKCHERVHKDARFEDRLKKKKAGLDKRYAAVSALNQAIPFICKRLEQEFGKEHVHYCSGRDTAMVRRSFGYHKTKEEQLHVVDAWCIAVLSLRQIPEKAPEFDHVHEILQFRRQDRSRIKAQTSRAYYHEGKKIVRNRKKAEGQGEDSLQEWRKRQVDRYGEEQTRKMISQLKVKKSIRRYNRLDRLMPGAVFYYQDVRYVMRGQHCEGTYLQAVGIGSKDFPAKKCKIVANNEGLVFVS

SEQ ID NO: 14816 - protein, 512 aa, unidentified
  REGION 1..512: note = Human gut metagenome
MSTVYVLNKDGKPLMPTTRCGHVRHLLKEQKARVVTSKPFTIQLLYEADDLVQSLYLGIDPGRTNIGVAVVKADGTAVFTAHLETSNKEIPKLMKKRKESRRARRTNGRRCRRQRRAKANGTISKKCVKHDTAQNGSVSKRAKEIGVIKRHLPGCEKDVLCIGIKNKEAKFSNRTRPEGWLTPTANQLLQTHINLVKKIQKFLPISDVVLEINKFAFMRLDNPNVQKWQYQQGPLYQKANLEETVSEMQEHHCLFCKKKIDHYHHVVPQHKNGSNTIDNIIGLCTQHHDLVHKDATWQKRLAKKKTGLNKKYGALSVLNQIIPALTKELSSLFPKHFFVTNGKSTYDYRAAHGVSKDHWLDAYCIACSVLPNDTCDKTINSRVPYELKQFRRHDRRALNNENMSRVYTFNGKMVATNRHKATEQTTDSLEEFRQRQPNDVCNLKVKEHHPTYRNMNRNYPGSVFLVGNQVHVMQGIAGSKDGEATTYKDTNANSIAAGKCKFVAKNSGILFV

SEQ ID NO: 14817 - protein, 414 aa, unidentified
  REGION 1..414: note = Mouse gut metagenome
MPCSPAKARHLLKEKKAIVVRRTPFTIQLTIATGESKQPVSLGVDAGYKYVGLSASTEKAELYASEVELRQGITDLLSARRALRRARRNRKTRYRAPRFDNRIRTKRKGWLAPSVENRINAHLSRIEAVLRLLPVTKITVETASFDMQLLKNPDISGKEYQEGEQLGFWNVREYVLFRDGHVCQHCHGRSKDPVLNVHHLESRRTGGDSPGNLITLCETCHKALHRGEITLKAKRGQSFRAEAFMGIMRWEVLNRLKASHPELEVNNTYGYRTKHARIANDIAKSHCADAFCIAGNLGAERLGEFFFQKQTRRNNRQIHKLSILKSGIRKRNQAPFEVNGFRLFDKVACQGEEGFIFGRRSSGFFDVRKLDGTRISAGISCKKLHLLEKRRTYLTEIRKEEALLALPEGRSLRT

SEQ ID NO: 14818 - protein, 448 aa, unidentified
  REGION 1..448: note = Human gut metagenome
MSTGLRAVQAEPAGIRKGDALKVFVLNMRGRPLMPCSPARARHLLKAGKAVVRRRTPFTIQLRIATGETKQSVTLGVDAGAKHVGLSAATEKEEVFASEVELRQDITGLLAARLSLRRDRRHRKTRYRAPRFLNRIRSKHKGWLAPSVENRIQAHMSRIDAVCRLLPVTRIVIETASFDVQKIRNPEVEGTGYQQGDQLGFWNVREYVLFRDGHVCQHCHGHAKDKILNVHHLESRQTGGDAPNNLITLCETCHKACHAGKIKLKVKRAQSFRAEAFMGIMRWTLLDRMRKAHSGLPVENTYGYLTKNTRITLGLPKTHCVDAYCIAGNLKAVRRGVCLHQRQVRKHNRQIHKCTVLSKTLKDGTKIGYRKLNQTPHLVKSFRLFDKVRCLGQTGFIFGRRSSGYFDVRRLDGVKISSCISYRKLTLLEKRSTYLTELRKEDGASSPV

SEQ ID NO: 14819 - protein, 494 aa, unidentified
  REGION 1..494: note = Human gut metagenome
MTMVYVQNKDGKPLMPTTRYCYVRLLLKGKKARVVCTTPFTIRLNYDTPNITQDLILGIDPGRTNIGVAVVKEDGSCVFSAHLETRNKEVPLLMKKRAAFRRQHRTQDRRRKRQRRAIAAGTTVESNTIERLLPGYEKPIVCHHIRNKEARFNNRSRPAGWLTPTANHLLQAHINLIAKAAKFLPITKVVVELNRFAFMAMDNPNIRRWEYQQGPLYGLGSVKDAVYAQQDGHCLFCKKPIDHYHHVVPRHKGGSETLANRCGLCEKHHALVHKDKAWAEKLVTRKGGMNKKYHALSVLNQIIPHLMEYLGSETPYDVYATDGKSTKGFRIAKNVPKEHYTDAYCIACSILDADTKVSAPAEPFKLKQFRRHDRQSCIRQMVDRKYLLDGKVVATNRHKSIEQKSDSLEEFREAYGDAAVSQLTVRPHSPQYKDMARIMPGAVMDFDGIVGVFKGSSGRNNGTPNYYNSTKGARVLTKRCALLAKNAGMVFIPA

SEQ ID NO: 14820 - protein, 433 aa, unidentified
  REGION 1..433: note = Human oral metagenome
LSYRVNNSKIRKESKRHVCICNIKRRTTTYADCSFGKVRRLLKDKKAKVIRSCPFTIKLLYEPESLVVQEVVLGQDTGSKHVGTACVANDKVLYQSEVTLRDDIKKKMESRRALRRNRRQRKARYRKPRFLNRANSIKKDRLPPSTKSKVQSHIDEIEFCKKILPISKIVLEVSQFDTALMKNPSLIFEKVKHWGYQEGFNYGYSSRREAVLHRDNYTCQCCGKKHVRLEVHHIIFRCMGGTDDEKNLITLCEKCHKMVHNGLLVLTKKPKKLNLKYATQMSIIRSQLLKIYPDAIETFGFVTKENRNNLNLQKGHYIDACVIASGGKKFEQLNWLFKKKRVAKQNRKLCNGVRGEKKLPTRKILGFKKFDKVKYLGEICFIKGRRTSGGFVLMDIDNNAIDFRDRGGRQNPSYKLLERLNTRKSILCISQKF

SEQ ID NO: 14821 - protein, 521 aa, Streptomyces sp.; identical to SEQ ID NO: 5439

SEQ ID NO: 14822 - protein, 320 aa, unidentified
  REGION 1..320: note = Human gut metagenome
MRASRRSRKTRYRPKRFDNRRRGEGWFAPSIRQKINTHLVTVARVCEILPVSQIIVETASFDIQKIKNPEIQGVEYQRGEQMDFWNVREYVLFRDGHICQCCKGKKKDPVLNVHHIESRKSGGDAPNNLITLCETCHKGYHNGTIKLPTKIKRGMKFKDAAFMGIMRWTFYNTLKENYEPDIPVSMTYGYLTKNTRIQHNLPKGHHIDARCISGNPGAKSDGVYYYQKKVRCHNRQIHKFNTLRKGVRKLNQSEYLVKGYRLFDKVRYQGKEYFVFGRRKTGFFDIRTLSGEKVNNGSLSIKKIAFVDTRKNYITERRTA

SEQ ID NO: 14823 - protein, 462 aa, unidentified; identical to SEQ ID NO: 2823
  REGION 1..462: note = Human gut metagenome

SEQ ID NO: 14824 - protein, 417 aa, unidentified
  REGION 1..417: note = Human gut metagenome
MPCSPAKARLLLKEKKAIVKRRTSFTIQLTIATGEAKQPVTLGVDSGYKHIGLSATTEKAELYASQVELRQDITDLLSARLALRRSRRSRKTRYRAPRFDNRVASKRKGRLAPSVENRIAAHMSRVEAVMRVLPVTAITVETAVFDTQLLKTPDIAGAAYQQGEQLGFWNVREYVLFRDGHVCQHCRGKSKDPILNVHHIESRRTGGDAPNNLITLCETCHKAFHRGEIELKIKRGKSFKAETFMGIMRWTLFERLKKAHPELNVHNTYGYLTKHKRISHGIAKSHCADAYCIADNLSAKRLKGFFFQKQTRKHNRQIHKLSILKGGLRKKNQAPYEVKGFRLFDKVICKGEEAFIFGRRTSGSFDVRRLDGTRISAGISYKKLRRLESRTTYLTEFRKEAALPPLHKCRGFRAEFL

SEQ ID NO: 14825 - protein, 425 aa, Moorena sp.; identical to SEQ ID NO: 2757

SEQ ID NO: 14826 - protein, 442 aa, unidentified; identical to SEQ ID NO: 3791
  REGION 1..442: note = Human gut metagenome

SEQ ID NO: 14827 - protein, 512 aa, unidentified
  REGION 1..512: note = Human gut metagenome
MSTVYVLNKDGKPLMPTTRCGHVRHLLKEQKARVVTSKPFTIQLLYEADDVVQSLCLGIDPGRTNIGVAAVKADGTAVFTAHLETRNKEIPKLMKKRKESRRARRTNGRRCRRQRRAKANGTISKKCVKNDTAQNGSVSKRAKEIGVIKRHLPGCEKDVLCIGIKNKEAKFSNRTRPEGWLTPTANQLLQTHINLVKKIQKFLPISDVVLEINKFAFMRLDNPNVQKWQYQQGPLYQKANLEETVSEMQEHHCLFCKKKIDHYHHVVPQHKNGSNTIDNIIGLCTQHHDLVHKDATWQKRLAKKKTGLNKKYGALSVLNQIIPALTKELSSLFPKHFFVTNGKSTYDYRAAHGVSKDHWLDAYCIACSVLPNDTCDKTINSRVPYELKHFRRHDRRALNNENMSRVYTFNGKMVATNRHKATEQTTDSLEEFRQRQPNDVCNLKVKEHHPTYRNMNRNYPGSVFLVGNQVHVMQGIAGSKDREATTYKDTNANSIAAGKCKFVAKNSGILFV

SEQ ID NO: 14828 - protein, 407 aa, unidentified; identical to SEQ ID NO: 3417
  REGION 1..407: note = Human gut metagenome

SEQ ID NO: 14829 - protein, 428 aa, Mastigocladus sp.; identical to SEQ ID NO: 9878

SEQ ID NO: 14830 - protein, 422 aa, unidentified; identical to SEQ ID NO: 5333
  REGION 1..422: note = Human gut metagenome

SEQ ID NO: 14831 - protein, 421 aa, unidentified
  REGION 1..421: note = Human gut metagenome
MTMVYVQNKDGKPLMPTTRYCYVRLLLKEKKARVVCTTPFTIQLNYDTSDITQDLILGIDPGRTNIGVAVVKENGQCVFSAHLETRNKEVPLLMKKRAAFRRNHRTLDRRRKRQRRAIAAGTTVESNTIERLLPGYEKPVVCHYIRNKEARFNNRSRPVGWLTPTANHLLQTHINLIAKVAKFLPITKVVVELNRFAFMAMDNPNIRRWEYQQGPLYGLGSVDDAVYAQQDGHCLFCKKSIDHYHHVVPRHKGGSETLANRCGLCEKHHDLVHKDKAWAEKLVTRKGGMNKKYHALSVLNQIIPHLMEYLGSETPYDVYATDGKSTKGFRIAKNVPKEHYTDAYCIACSILDADTKVSAPAEPFKLKQFRRHDRQSCIRQMVDRKYLLDGKVVATNRHKSIEQKSDSLEEFREAYGDAAVS

SEQ ID NO: 14832 - protein, 420 aa, unidentified; identical to SEQ ID NO: 13144
  REGION 1..420: note = Human gut metagenome

SEQ ID NO: 14833 - protein, 421 aa, Lactobacillus sp.; identical to SEQ ID NO: 5881

SEQ ID NO: 14834 - protein, 406 aa, unidentified
  REGION 1..406: note = Human gut metagenome
MSTCVCVLSNNGERLMPTIRLGKVRHLLKDGKAKIIKHHPFTIQLLYDSETNIQPIEICEDVGYNYIGISVKSQSHEYVSAQYDTLQDEKSCHDACRRMRRTRRNRLRYRQKRFDNRKRDKGWLAPSLKHKKELNVNVIKMYCEVVPITHATVEVGSFDTMLVKAIEEGKATPEGADYQKGPRYNLATLREAVFYRDNYTCQVCGREASEGAILHVHHMFYWKGRHDNSLSELITVCEKCHTPANHQKGGKLYGFGEDIKFANLSGAAFMNTVRWQIVNELYAAFGKPFVTFTYGAMTKEKRIALHLEKSHNNDAYAMGEFHPNCRCTFEHYEKVRRNNRILEKFYDSRYIDIRTGEIATGKELFNGRINRSHKKDSENLHKYRGKRIRKGYRALRRKKVALNPGD

SEQ ID NO: 14835 - protein, 413 aa, unidentified; identical to SEQ ID NO: 2605
  REGION 1..413: note = Human gut metagenome

SEQ ID NO: 14836 - protein, 427 aa, Nostoc sp.; identical to SEQ ID NO: 2670

SEQ ID NO: 14837 - protein, 491 aa, unidentified
  REGION 1..491: note = Human gut metagenome
MAEDPRLYVLKLLKTGRARIAEDIPFTIRLTYRNAPVLQPVTLAEDPGRTNIGAAVLSPLGDLLFAAVIETRNKEIKKLMADRQKSRQASRRGERKARQRLAKRYGSMVKSGMVMRKLPMYAADRFVTCKFIRNTQARFCNRKRCPDWITPTVQHLVQTHLNIIRKISRYLPVTDIAFEVNRFAFMHMENPEAMGVDFQNGPLKGYGDVKEAIRTQQHGKCLMCKKPISHFHHIVPRSRGGSDTIQNLAGLCPECHTKVHTDTAFRKDFDEKKSGQLKKYGALSALNQAVPFICKKLLEEYGEEHVHFCRGLDTSLIRTALGFEKTKKNQMHEVDAYCIGLAALEVNEVETPAFDHTFQIRQFRRQDRSIIHHQTGRSYYQGKEKVAQNRKPGFEQKTTALSQWYEEQVRIHGEKEAEKLRSQLRVEKSCRHYNDMDRFLPGAVFLYEGKRYVLSGRITNGKYLRACGQGMKNFPAAECTFIRHNAGLVFI

SEQ ID NO: 14838 - protein, 477 aa, unidentified
  REGION 1..477: note = Human gut metagenome
MKSHKSVLVIGMNGIGLMPTTACKARKLLEAKKAKVYSKMPFTIKLLYKTGCAVQNISLGIDTGSQHIGVAVTTDNCVQLKDEHELRSTMEKRKLIETRAEARRSRRYRKTRYRKPKFKPHCKHVYMNSMTKRHGHKTHWHNVKNEYGTNRQPGWVPPSIQQKIDHHIQIINRYLEALPKKTKVNIEVGRFDTQKVKNPDIKGKQYQLGRMYDYENKKAYILAKYDYKCPICGRKFGSVRENGSIVKFRKHHLHFVSNGATDNPDSYMAICDCCHTAEAHGDGGILNKIMKESKKTSRGLRDMPFMNILRRRLWNAFPEACFTYGNITNADRKWISLPKTHANDAVAIAMHEYLQQAKSYDVKDVPYTKIYKEVRKKKRSLHEMNPRKGRRIPNTSATRNSKNTKSVINKHRTFSLYDKVRYAGQIGWITGFSGTNTAYLKNKEGKYITIQGKNYKNIPLSNVQILERNNTWITYTK

SEQ ID NO: 14839 - protein, 457 aa, unidentified
  REGION 1..457: note = Human gut metagenome
VWLYQAVYNLGEGFLPSSEERTAFYWLLIYRKEHGIMQYVYVLNKHGEPLMPCSPGKARLLLKQQKACVVKRTPFTIKLLYGSAGYKQPITLGVDAGSKHVGLSASTEKRELYREEFTPRNDVVDLLSTRRQNRRSRRNRKTRYRAPRFDNRVHSKHKGWLAPSVEVKIQEHITVIKRICRILPVTLVRVETAEFDTQRLKAMLKGKSLPVGTDYQLGEMYDEYNVRQYVLKRDNYTCQCCGAHPTEKKPVRLHVHHLESRHVGGNAPNNLITLCVACHKALHEGKITLDKGKKRGKPLRDAAFMGIMRYTLLARLKDELNIPVKQTYGYITKLLREKNKIPKSHVNDARCIAKAPNAKPCDTMLYTRALRHHNRQIHKAKILNGGIRKKNQAPYLVKGFRLWDKVRYNGEECFITGRRSSGYFALKKYDGTVISNSASYKKLMLLEAATNYITERS

SEQ ID NO: 14840 - protein, 417 aa, unidentified; identical to SEQ ID NO: 2758
  REGION 1..417: note = Human gut metagenome

SEQ ID NO: 14841 - protein, 320 aa, unidentified
  REGION 1..320: note = Human gut metagenome
MEQNLSVLNRIARVVPVSRIVMEMGQFDTQVLKAVASGIPLPQGADYQQGDRYGIATLREAVFTRDNYTCQCCGKKGTDGVILHVHHIRYRSQGGTDAMSNLATVCYKCHTPKNHKPGGILYGWKLKLPSFKGATFMTSVRWMLYHQVKELYPELEIQLTYGAATKEQRRILDVPKSHVNDAYTMGDFHPSHRVRPVIYQKKRRNNRVLEKFYDAKYIDLRDGKKHSGQELFNGRTNRNHNRDTENLHKYRGKKVSKGRRSIRRRRYPFQPHDLVVYRGKSLETAGCHNKGTRLLIGKRSIAVKEVKIRQYCGGYFAVEI

SEQ ID NO: 14842 - protein, 427 aa, Moorena sp.; identical to SEQ ID NO: 2799

SEQ ID NO: 14843 - protein, 420 aa, unidentified
  REGION 1..420: note = Human gut metagenome
MQYVYVLNKHGEPLMPCSPGKARLLLKQQKAHVVKRTPFTIKLLYGGAGYKQPITLGVDAGSKHVGLSASTEKRELYREEFTPRNDVVDLLSTRKQNRRSRRNRKTRYRASRFDNRVHGKHKGWLAPSVEVKIQEHITVIKRTCRILPVALVRVETAEFDTQRLKAMLEGKPLPVGTDYQLGEMCDEYNVRQYVLNRDHYTCQCCGAHTTTKKTVKLHVHHLESRKVGGNAPSNLITLCTTCHDALHKGKVSLDNKKRGKPMRDAVFMGIMRKTLMARLREELPIPVQGTYGYITKMWREQNDIKKSHVNDARCISKHPLAEPCSVCYRTKAIRHHNRQTHKANFSKGGIRKRSQMPYVVGGYRLWDKVLYKGQECFVSGRRTSGSFTLKKLDGTRISKGVTFKKMRLLEPATNYLIERM

SEQ ID NO: 14844 - protein, 236 aa, unidentified
  REGION 1..236: note = Human gut metagenome
LTHQFKKRVPVMVYVLDKNGQPLMPTDRHRKVRLMLQSGQAKVIKRCPFTIQLNYDSGHQTQEISLGIDAGSKHIGVSTTTKIKVLYEVDVELRNDIVDLLSSRRELRRGRRNRKTRYRQAKFNNRRRGNGWLAPSIRQKIGTHLTVVENICKMLPISRIMVETASFDIQKIKNPDIQGAEYQQGDQLEFWNVREYVLFRDGHTCQCCKGKSKDKILNVHHIESRKTGGNAPNNLI

SEQ ID NO: 14845 - protein, 512 aa, unidentified
  REGION 1..512: note = Human gut metagenome
MSTVYVLNKDGKPLMPTTRGGHVRHLLKEQKARVVRAKPFTIQLLYETNDVVQPLYLGIDPGRTNIGVAVVKANGTAVFTAHLETRNKEVPKLMQDRKKARRARRTNGRRCRRQRRAKANGTISKKCVKQDTAQSKNPSKRAKEIGIIKRRLPGYKKDVLCIGIKNKEAKYTNRTRPEGWLTPTANQLLQTHINLVRKMQKFLPISDVVLEVNKFAFMRLDNPDIQKWQYQQGPLYQKGSLENAVSEMQEHHCLFCDKPIDHYHHVVPQSENGSNTIANIVGLCAEHHNLVHKDAAWQKKLAEEKVGLNKKYGALSVLNQIIPALTNKLSVLFPKHFFVTAGKSTHDYRAAHGVSKDHWLDAYCIACSVLPSNVCDSNINNHMPYELKQFRRHDRRVLNNENMNRVYTLDNKAVAINRHKATEQEAASLEEFRKEHPNDVCKLKVKEHHPTYRNMNRNYPGSIFLVGKHVHIMQGIAGSKDGKATTYKDSNANSITASKCKFVAKISGILFV

SEQ ID NO: 14846 - protein, 471 aa, Acidithiobacillus sp.; identical to SEQ ID NO: 3868

SEQ ID NO: 14847 - protein, 418 aa, unidentified
  REGION 1..418: note = Anaerobic digester metagenome
MPCKPVIARLLLKDGKAKCIRRTPFTIKLLYQATDYIQDLTLGIDTGSGKIGSAVVNNENEVFYMSEIEIRNDISDKIDKRAKYRRTRRNRKTRYRKPRFNNRKNSIKKDRFSPTMTSKINSHLKEIEFVKSILPIKNIIIETATFDPHALKNPAVLNNKWLYQKGTNYGFANTKAYVLNRDNYTCQHCKGKSKDSRLEVHHIVFRKNGGSDDAENLITLCKTCHDSLHKGKIKLKKNGKIKGQLKHATQMNSIRQQLLKRLPDAKETFGFITKEHRYLMELPKEHYYDAIAIACLNNIEDIGLIDVSFKTEKVILKKCISKGDYQQTKGVRSHQKIPTGKIEGFRKFDKVRYLGDEYFVKGRMSTGYAVLMNIDGDKIDFSDAPRGMKTPKMSKMQRISARKSWIICEQNRANSSHD

SEQ ID NO: 14848 - protein, 431 aa, unidentified
  REGION 1..431: note = Human gut metagenome
MPNKVYVINKHGRPLMPCSPAKARHLLDAGKAKVKKRTPFTIQLLFGSTGYTQEVILGVDAGSKTIGLSASAETEELLSAEVKPRNDVVDLLSARREFRRARRNRKTRYRKPRFDNRVRSKHKGWLAPSVEVKIQEHITSIKRACRILPVSKVVIETAEFDLQLLKAIEEGKPVPQGEDYQQGEMYGHYNVRQYVLWRDGYTCQCCGAHTTKKKEVRLHVHHLESRKTGGDAPGNLVTLCDSCHEKLHKGLITEDDFKKRKRRSTRDATFMGIMRKTLMQRLCSELPIPVIETRGYITKATREKLLVLPKSHTNDALAIAQGKRGFNVGYLPEIAQIDKIYTIRPVRHHNRQLHKAAILKGGIRKSNQAGKYVFGYRLFDKVQFNEQDCFIWGRRTTGIFTIKTINGKMIKDGISFKKLKPVEKSTSYLIA

SEQ ID NO: 14849 - protein, 430 aa, Oribacterium sp.
MEGVPHMVYVISKDGHPLMPTMRYGKVRRMLKSGLAKVISRCPFTIQLLYETTDITQNISLGVDTGSKDVGLSVTTNKKVLFEAKVTLRNDIVELISTRREQRRTRRNRKTRHRKPRFDNRTRHEGWLSPSVRQKAESHITMVQKVIKILPVSHIKVETASFDIQKIKNPDVSGTDYQNGEQTDFWNVREYVLWRDGHVCQCCKGKSKDKILNVHHIESRKTGGDSPNNLITLCKYCHKQYHLGKIKLPKTIHRGMSFRDATFMGITRWAVYDKLKELYPDVNLTYGYITKKTRIENSLPKDHHIDARCISGNPKAESEGTVYFYKKVRCHNRQIHKCTINKGGIRKRNQAPYEVHGFRLYDKVTVNNVEAFVFGRRLDGRFAIRMLDGTKINEQLSYKKIKLLEMRKNYICERRTPLLIGASPDVPVAV

SEQ ID NO: 14850 - protein, 427 aa, Nostoc sp.; identical to SEQ ID NO: 7770

SEQ ID NO: 14851 - protein, 420 aa, Moorena sp.
MQNYVFVIDTNKQPLNPVHPKKARRLLDRGKAAVFRMYPFTIILKTAIANPTISFCQIKIDPGSKTTGFALVQDDQVVWAMELEHRGGLIKKKLESRSAVRRGRRNRNTRYRKPRFLNRRRPKGWIAPSLEHRVLTTETWVKRLIKFCPVNQIWIERVKFDTQKMQNPEISGIEYQQGELAGYEVREYLLEKWGRECSYCGQENVPLQIEHISPKSKGGSDRIGNLCLACEKCNQRKGNKPVEEFLKKKPSLLQKIKNKAKQPLRDAAAVNATRNKIVKVLKEIKPVVTGTGAQTKYNRNRLGLPKQHWIDAACVGDIKTLVLKTSQPLLVTCKGQGGRQKAALNKYGYPIRYNPLKPIKGWSSGDIAKNLLTGEFGRVNPRSKGNSFNYTVPGKKAINLHLKNLLRVHRKDGYTYGFCR

SEQ ID NO: 14852 - protein, 419 aa, unidentified; identical to SEQ ID NO: 3867
  REGION 1..419: note = Human gut metagenome

SEQ ID NO: 14853 - protein, 427 aa, Moorena sp.
MAVFVLDRRGRPLMPCSEQRARLLLARGRARVHRVVPFVVRLTDRLAEDSAYQSLRVKLDPGSEVTGVALVRVFDEGVAVLNLFDLVHRGRQISEALTARRAFRRRRRSANLRYRAPRFNNRTRREGWLAPSLQHRVDTTMSWVRRLMRWAPVSALSMELVRFDMQAMQKPEISGVEYQQGELLGYEVREYLLEKWGRQCAYCDDEGVPLQIEHIVARARGGSNRVSNLTLACEPCNCRKGSLDVREFVKDEQRLKRILARAKAPLRDAAAVNSTRWALASALKETELAVELASGGRTKWNRTRLHIPKAHALDAVCVGEVESVQAWKRPTLEVKCAGRGSYQRTRLTAQGFPRGYLMRTKRVHGFQTGDRIKAVVPSGKKAGSYVGRVAVRATGSFNIQTSQGVVQGISHRHCKVIQRADGYGYSH

SEQ ID NO: 14854 - protein, 223 aa, unidentified
  REGION 1..223: note = Human gut metagenome
MVYVVANDGQPLMPTERHGKVCRMLRSGMAKVIKKCPFTIQLQYESERNVQPVSLGVDAGSKHIGISATTKAKVLYESDVELRDDIVKLLATRRQLRRSRRSRKTRYRPARFDNRKRKEGWLAPSIRQKIGSHLTVVANVCKILPINQIIVETASFDIQKIKNPEIQGIEYQQGEQMDFWNVREYVFFRDGHTCQCCKGRSKDKILNVHHIESRKTGGNAPNN

SEQ ID NO: 14855 - protein, 415 aa, unidentified; identical to SEQ ID NO: 6534
  REGION 1..415: note = Human gut metagenome

SEQ ID NO: 14856 - protein, 407 aa, unidentified
  REGION 1..407: note = Human gut metagenome
QPLMPTENHAKVRALLKHGKAKVIQRCPFTIQLLYESTTHTQKINLGIDAGSKTIGVSATTDSKVLYESEVVLRNDIVELLSGRRALRNSRRSRKTRYRKPRFDNRKKPDGWLAPSIRQKIETHVTVVGNVMKILPVTKIIVETASFDIQKIKNPEIEGEGYQHGEQLDFWNVREYVLFRDGHTCQCCKGKSKDNILNVHHIESRKTGGNAPNNLITLCETCHKAYHKGIITLPKEIHRGMRFRDAAFMGIMRWAFYDRLKELYNPLGAEVINTYGYITKNTRIEHGLPKEHYVDARCISDNPAAKPLDHYYFQKKVPCHNRQIHKNTILKGGIRKRNQASYEVKGFRLYDQVLWKGQKCFIFGRRSTGRMDLRLLDGTHINASVGHKNLKLLSMRKNYLIEQRKAG

SEQ ID NO: 14857 - protein, 423 aa, Microcoleus sp.
MSNFIFVLDTNRKPLTPCKPSIARKLLAAGKAAVFRRFPYTIILKKAVTATIESISLKLDPGSKTTGIALLQGEKVIFGAELTHRGQAIKASLESRRLLRRVRRNRHTRYRQARFLNRTRRKGWLAPSLQHRVETTLTWVDKLRRLVPLSSIAMELVRFDLQQLENPEISGVEYQQGELLGYEVREYLLNKWNRKCAYCGAENLALQVEHIHPKAKGGSNRISNLCLACEKCNLKKGTRDIKDFLSKKPDLLKQIMAQVKRPLKDAAAVNSTRWALFNRLKLTGLPVTTGSGGQTKYNRTRLKLPKSHWLDAACVGELESLSVLTSKPLLIKATGHGTRQICRTDKVGFPSRYVPRSKFVKGFQTGDIVKAVVTSGKKIGEYVGRVAVRTTGSFNISASELVQGISHKYCKIVHHKDGYSYSF

SEQ ID NO: 14858 - protein, 368 aa, unidentified
  REGION 1..368: note = Human gut metagenome
MIIALDKYKRPLGFLTERRCRILMERKRAVLYRVFPTVVILMDVDARTIPGLPSFRIKIDPGSKYTGIAIIRNDTDEFVYAMQIEHRGDAVRAALNKRKNARRNRRSRETGYRRAKWGNRCLSEKDKRSYDSSREDGWLPPSIRSAADNVISWVRRLGRWINLTECSFEAVRFDTQLMEDPDIEGEEYQHGTLFGLEIKEYLMEKFGHTCQYCGGKSGDPVLEWEHMRPKSRGGSDRVKNALLSCSSCNKDKGNRTPEEWLELIKARLPREKGKRKELDEERVELIQKVIDGKPQGGALRYAAWVSSSRRYLEKALFGIFGNVECSSGGRTKYNLTKKYHNTNESKNLFSFGNIFASHFNPPVFFVYL

SEQ ID NO: 14859 - protein, 343 aa, unidentified
  REGION 1..343: note = Human gut metagenome
DITDLLSARRALRQSRRNPKTRYRAPRFDNRIRTKRKGWLAPSVENRINAHLSRIETVIRLLPVTKISVETTSFDMQLLKNSDIAEKEYQESEQLGFWNVREYVLFRDGHVCQHCHGRSKDPVLNVHHLESRRTGGDSPGNLIALCETCHKELHRGEITLKAKRGQSFRAETFMGIMRWEVLDRLKASHPKLEVQNTYGYRTKHARIVNGIAKSHCADAFCIAGNLGAERLGEFLFQKQTRRNNRQIHKLSILKGGIRKRNQVPFEVKGFRLFDKVACKGEEGFIFGRRSSGYFDVRKLDGTCISAGISYKKLHLLEKRRTYLTEIRKEEALPPLPEGRGLRA

SEQ ID NO: 14860 - protein, 418 aa, Moorena sp.
MLVFVLNKHENPLMPASPAKARHLIDNGQAVVVRRTPFTIQLLHGSSGYKQDVALGIDAGYSTVGFSAVTTDKELIAGELELRNDVKRLLEKRKAYRRTRRSCKWYREPRFDNRGRHDGWLAPSIQHKLDSHIRLIEKLKKILPITRTIAEVASFDTQKMQNPEISGIEYQQGELQGYEVREYLLEKWRRKCAYCGKKDVPLEIEHIVPRSRGGSDRVSNLTIACRECNQTKGNHTAEEFGHPQIQAKAEKSLKATAFMNIVRSKMVDLLNCDQTYGYITKHDRIELNLPKSHATGAFVIAGGNGQVWSTHQVINKQVRRQNRSLYKANFLKGGKLKRNTVKEVKGFKRFDKVKYGDKECFIHGLRSSGYFNLRTITGGRIGASVSSRRLKLLERAKGIMQEVCAIPPHPCGRGLLAR

SEQ ID NO: 14861 - protein, 424 aa, unidentified; identical to SEQ ID NO: 3434
  REGION 1..424: note = Human gut metagenome

SEQ ID NO: 14862 - protein, 429 aa, Moorena sp.; identical to SEQ ID NO: 3068

SEQ ID NO: 14863 - protein, 427 aa, Oscillochloris sp.; identical to SEQ ID NO: 5291

SEQ ID NO: 14864 - protein, 451 aa, unidentified; identical to SEQ ID NO: 5203
  REGION 1..451: note = Human gut metagenome

SEQ ID NO: 14865 - protein, 443 aa, Anoxybacillus sp.; identical to SEQ ID NO: 4812

SEQ ID NO: 14866 - protein, 418 aa, Moorena sp.; identical to SEQ ID NO: 2704

SEQ ID NO: 14867 - protein, 518 aa, Anaerostipes sp.; identical to SEQ ID NO: 4915

SEQ ID NO: 14868 - protein, 453 aa, Nostoc sp.; identical to SEQ ID NO: 3348

SEQ ID NO: 14869 - protein, 440 aa, Moorena sp.; identical to SEQ ID NO: 5150

SEQ ID NO: 14870 - protein, 423 aa, unidentified
  REGION 1..423: note = Human gut metagenome
MVYVLNIDGQPLMPTDRHGKVRHLLKDGRAEVVKRCPFTIRLLYDSTHYTQDIVLGVDAGSKHIGLSGTTETKELYASDVELRNDIVDLISTRRQNRRSRRNRKIRYRKARFQNRVSGKKNWLAPSIRQKVDTHMTVVSRVCMILPVTKIIVETASFDIQKIKDPDISGTGYQQGEQLDFWNVREYVLSRDGHTCQCCKGKSKDPVLNVHHIESRKTGGDAPNNLITLCETCHKSYHSGAVQLPKAIHRGMRFKDAAFMGVMRWNFYNKLKEIYELQGIEIRMTFGYLTKNTRIRHHLPKEHYIDARCISGHPEAIPNNEVFYQKKVRCHNRQIHKNTILKGGIRKRNQAGYLVKGFRLFDKVAYKGREYFIFGRRQSGFFDLRNLSGCKVNKGSLSYRKIGFLEPRQYYLCERRVMDTQGYA

SEQ ID NO: 14871 - protein, 518 aa, unidentified; identical to SEQ ID NO: 6957
  REGION 1..518: note = Human gut metagenome

SEQ ID NO: 14872 - protein, 442 aa, Sutterella sp.; identical to SEQ ID NO: 7529

SEQ ID NO: 14873 - protein, 431 aa, unidentified
  REGION 1..431: note = Human gut metagenome
MPNKVYVINKHGRPLMPCSPAKARHLLDDGKAKVKKRTPFTIQLVYGSSGYTQEVILGVDAGSKTIGMSVSTTKEELLSAEVKPRNDVVDLLSTRREFRRARRNRKTRYRKPRFDNRVRSKHKEWLAPSVEVKIQEHITAIRRVCGILPVSKVVVETAEFDLQLLKAIEEGKPVPQGEDYQKGEMYGHYNVRQYVLWRDDYTCQCCGAHATKKKEVRLHVHHLESRKVGGDAPDNQVTLCESCHEKLHKGLIAEKDFKKRKRRSTRDATFMGIMRKTLMQRLCSELPIPVVKTRGYITKATREKLLVLPKSHTNDALAIAQGKRGFNVGYLPEIAQIDKIYTIRPVRHHNRQLHKATILKGGIRKSNQTEKYVFGYRLFDKVQFNGQDCFIWGRRTTGIFTIKTINGKMIKDGISFKKLKLVEKSTSYLIA

SEQ ID NO: 14874 - protein, 409 aa, unidentified; identical to SEQ ID NO: 7451
  REGION 1..409: note = Human gut metagenome

SEQ ID NO: 14875 - protein, 451 aa, unidentified
  REGION 1..451: note = Human gut metagenome
VTTILKTCFAAFNLAKVVVLMDAWDIIVVLNKRGKPLMPCSPAKARLLLKEKKAIVVRRTPFTIQLTIATGETKQPVSLGVDAGYEHVGLPASTEKAELYASEVELRQDITDLLSARRALRQSRRNRKTRYRAPRFDNRIRTKRKGRLALSLENRINAHLSRIEAVLRLLPVTKITVETASFDLQLLKNPDISGKEYQEGEQLGFWNIREYVLCRDGHVCQHCYGRSKDPVLNVHHLESRRTGGNSPGNLITLCETCHKALHRGEIKLKAKRGHSFRAQAFMGIMRWEVLNRLKASHPELEVNNTYGYRTKHARIANDIAKSHCADAFCIAGNLGAKRLGEFFFQKQTRRNNRQIHKLSILKGGIRKRNQAPFEVKGFRLFDKVACQGEEGFIFGRRSSGFFDVRKLDGTRISAGISYKKLHLLEKRQTYLMEIRKEEEFPPLPEGRGLRA

SEQ ID NO: 14876 - protein, 413 aa, unidentified
  REGION 1..413: note = Human gut metagenome
MTNYAFVLDANGKQLAPTKEQKAWFLIRKKRATLVSKYPMVIQLKKEISDEQICKDEICCGIDDGGIHVGLALVQKCKTKNKVVFKGTIEQRNDVKHLIEVRKGYRNYHRFHKRYRQARFNNRKSSKRKGRIAPSIFQKRQATIRVIKQLNKWINIANYSLEDVAIDIRALTDGYKSYRWQYQQSNRLDENIRKAVILRDGCKCMECGKSNCRLEVHHIKPRRLNGSNTLDNLISLCEKCHQRTEGQEELYMDRYFSILSSIDNKNLDYAQHVMIGKKWLREQLSELGTLILTTGGDTANKRIDWNIEKSHANDAICITGLQPDACNVKEWTIKPMRRQSKAKTDNVLGIKHRDLVEYTFKNGETHRGYVTALYPKQNAINFQSPTKHCKKVNAKKCKLIWKYSKIYWLDNVL

SEQ ID NO: 14877 - protein, 489 aa, unidentified
  REGION 1..489: note = metagenome
LVGNVQAPWDVYPSPTLCGLCLKVLRGRNGDADKKPIPTLTKDENRPSGRTTGLRAEQAEPAGIRKGDTLKVFVLNMRGKPLMPCSPEKARHMLKAGKAFVVRRTPFTIKLTIATGETKQDVTLGVDAGARHVGISATTEKEEVFASEVALRQDITGLLADRLAFRRARRNRKTRYRSPRFNNRVRSKHKGWLAPSVENRIQAHMSRIDAVCRLLPVTRIVIETASFDVQKIRNLEVEGTGYQQGDQLGFWNVREYVLFRDGHVCQHCHGRSRDKILNVHHLESRKTGGDAPNNLITLCETCHKAYHAGKIKLKVKRGQSFRAEAFMGIMRWTLLDRVRKTHPKLPVENTYGYLTKHKRIALGLPKTHCADAFCIAGNLKALRRGDFLFQQQTRKHNRQIHKCSILKGGVRKLNQTPFLVKGFRLFDKVKCKGRIGFIFGRRSFGYFDVRTLDGVRLSAGVSFKKLMLVEKRTTFLTQLRKECGASSPS

SEQ ID NO: 14878 - protein, 447 aa, unidentified; identical to SEQ ID NO: 13151
  REGION 1..447: note = Human gut metagenome

SEQ ID NO: 14879 - protein, 453 aa, unidentified; identical to SEQ ID NO: 10368
  REGION 1..453: note = Human gut metagenome

SEQ ID NO: 14880 - protein, 415 aa, Bacillus sp.; identical to SEQ ID NO: 2431

SEQ ID NO: 14881 - protein, 445 aa, Burkholderia sp.
MAAFVLDKRGSPLMPCSEKRARLLLKRGRARVHRVLPFVIRLTDRLAEESAFQSLRVKVDPGSKVTGVALVREFNSGIAVLNLFSLMHRGRQISEALVTRRNFRHRRRSANLRYRAPRFLNRARRDAWLAPSLQHRVDTTMSWVRRIKRWTPISATSVEFERYDLQAMRSAEVAGYEHRKYERVDYEIREYLLKKWWHRCAYCDKEGVPLHVGHIISRARGGSDHLTNLTICCGPCHFRKGERDIKEFVVDGIRCNRILGRAKVPLKESASVSSTRAALVTELRSARLVVETSTGGRTKWNRARFGIPKTYALDAVCVGDVSVVMDWQRPTVEVKCSGRGSYQRTRLTAEGFPRSYLIRKKRIYGFQTGDRVRADVSKGKMIGIYVGRVAVRASGNFNIKTQNGVVQGINHRYCKVVQRADGYGYSPLLRLAQRVTRSKSVGPAL

SEQ ID NO: 14882 - protein, 342 aa, unidentified
  REGION 1..342: note = Human gut metagenome
MSTCACVLSNSGERLMPTIRLGKVRQLLKDGKAKIVKHHPFTIQLLYDSKTNTQPIEICEDVGYNYIGISVKSQSHEYVSAQYDTLQDEKACHDSCRKLRRTRRNRLRYRKPRFDNRKRGEGWLAPSLRHKKELNVNVVKMYCAVMPITHATVEVGSFDTMLVKAIQEGKAIPEGADYQKGPRYNLATLREAVFYRDNYTCQVCGRKIADGAILHMHHMFYWKGRHGYQLDELVTACEKCHTPANHQKGGKLFGFGEDKEFANLSGAAFMNAVRWQIVNALYATYGKEFVTITYGAMTKEKRIALRLEKSHNNDAYAMGNCHPAHRCEFSSPALGKSSSFRR

SEQ ID NO: 14883 - protein, 430 aa, unidentified
  REGION 1..430: note = Human gut metagenome
MPKVYVLNRHGRPLMPCTPAKARHLLDAGKAKVRHRTPFTIQLLYGSTGYTQEVILGVDAGSKTIGLSAATETEELFSAEVKPRNDVVELMSARRQFRRARRNRTTRYRKPRFDNRVRSKHKGWLAPSVEVKIQEHMTAIRRACAILPVSKVVVETAEFDLQLLKAVAEGKPVPQGEDYQKGEMYGHYNVRQYVLWRDSYTCCICGVHGSVRKGVPLHVHHLESRRVGGDAPDNLVTLCTACHDKLHKGIIMVADIKKRKRRSTRDTTFMGIMRMTLLRRLWEQLPVPVVETRGYITKATREKLLVLPKSHANDALAIAHGPQGFRAEHLPNIRQADRLYTIRPVRHHNRQLHKATILKGGVRKANQAEKYICGFRLYDKVLYNGIECFVWGRRTSGSFLLRQLNGEKVKDGVSYKHLKLLERSQSYLVA

SEQ ID NO: 14884 - protein, 292 aa, unidentified
  REGION 1..292: note = Human gut metagenome
MQSKLHSHVREIEYIQSILPVTEMVFETGQFDMHLMKNPSLANSKVRPWGYQKGANYGFENTKAMVLNRDNYTCQCCKGKHKDSKLEVHHIVFRSQGGSDEESNLLTLCHTCHKDLHSGKISPKLSGKVKGNLKFATQMNSIRKQLFRFYPNAIETFGYVTKANRLHLGVDKEHYYDACTIATQGNAFNVKSNLYKKKCVSDGDFQKTKGIRSEQPIVTDKICGFRKFDKVRYFGNDYFIKGRMSTGYAILMDIDGNKIDFSTMPRGYKTPKLSNCKRITARSTVMTQVKVV

SEQ ID NO: 14885 - protein, 450 aa, Clostridium sp.; identical to SEQ ID NO: 2935

SEQ ID NO: 14886 - protein, 467 aa, Clostridium sp.
LALSWLCKSSEGKERSTTLRRLSNIGEGQINPKGGRNLRVYVKNQRNQPLMPTTQRKARIFLKQKKAKIITYEPFTIQLLYATGETTQETILGVDAGNRTIGLSATTYKCELFSAELKLRTDIVELLATKRQFRRSRRSRKTRYRQPRFENRKKTEGWLAPSIENKIGTHLKVVNKVHSLLPISKIIIEVASFDIQKIKNPDIQGEKYQQGNQLGFWNVREYVIFRDGHKCQGKKNCKGKILNVHHIESRKTGGDSPDNLITLCEDCHKDYHSGKLKLNLKRGQSFRDAAFMGIMRWSFYNKLKELYSNVNLTYGYITKNTRITNNLPKEHRIDALCITGNSTVKRLDNWYLIKQVRKKKRSLHEAIARKGRKEPNITSKRNSKNTKEIISKGKKWCLFDKVKIGSNTGFVSGFTGNMVYVQDIEGNYLQVSPKYKQISTDNVSLISRNNNWIYKEVALGTANHPHL

SEQ ID NO: 14887 - protein, 419 aa, Moorena sp.; identical to SEQ ID NO: 13948

SEQ ID NO: 14888 - protein, 431 aa, unidentified; identical to SEQ ID NO: 8901
  REGION 1..431: note = Human metagenome

SEQ ID NO: 14889 - protein, 428 aa, unidentified
  REGION 1..428: note = Human gut metagenome
LKVFVLNMRGQPLMPCSPAKARHLLKAGKAVVKRRTPFTIQLRIATGETKQNVTLGVDAGAKHVGLSAATEKEEVFASEVELRQDITGLLAARLSLRRERRQRKTRYRAPRFLNRVRSKHKGWLAPSVENRIQAHMSRIDAVCRLLPVTKIVIETASFDIQKIRNPEVEGTGYQQGDQLGFWNVREYVLFRDGHICQHCRGRSKDPILNVHHLESRKTGGDAPNNLITLCETCHKAYHAGKIKLKVKRGQSFRAEAFMGIMRWTLLDRVRKAHPGLPVENTYGYLTKNTRITQGLPKAHCVDAYCIAGNLKAVRRGVHLYQRQVRKHNRQIHKCTVLSKTLKDGTKIGYRKLNQTPHLVKNFRLFDKVRCLGQTGFIFGRRSSGYFDVRRLDGVKLSPSISWRKLTLLEKRSTYLTELRKEDGASSPV

SEQ ID NO: 14890 - protein, 350 aa, unidentified
  REGION 1..350: note = Human gut metagenome
VLQLCYITTEVVVRNDITDKMTQRAKYRRNRRNRKTRYRKARWLNRSNSIKKDRFSPTMQSKLHSHVKEIEYIQSILPITEMVFETGQFDMHLMKDPSLANPKVRPWGYQKGTNYGFENTKAMVLNRDNYTCQCCKGKHKDSKLEVHHIVFRSQGGSDEESNLITLCHTCHKDLHSGKINLKLSGKVKGNLKYATQMNSIRKQLFRLYPNAIETFGYVTKANRLHLGVDKEHYYDACTIATQGNTFNVKSNLYKKKCVSDGDFQKTKGICSEQPIVTDKICGFRKFDKVRYFGKDYFIKGRMSTGYAILMDIDGNKIDFSTMPRGYKTPKLSNCKRITARSTVMTQVKVV

SEQ ID NO: 14891 - protein, 414 aa, Sutterella sp.; identical to SEQ ID NO: 4492

SEQ ID NO: 14892 - protein, 414 aa, unidentified
  REGION 1..414: note = metagenome
MPCSPAKARLLLKEKKAIVKRRTPFTIQLTIATGESKQPVTLGVDAGYKHVGLSASTEKAELYASEVELRQDVSDLLSARRALRQSRCNRKTRYRAPRFNNRLRTKRKGWLAPSVENRINAHLSRIEAVLRLLPVTKITVETASFDMQLLKNPDIAGKEYQEGEQLGFWNVREYVLFRDGHVCQHCYGRSKDPVLNVHHLESRRTGGDSPGSLITLCETCHKALHRGDITLKAKRGKSFRAEAFMGIMRWEVLNRLKVSHPELEVNNTYGYRTKHVRIANGIAKSHCADAFCIAGNLGAKRLGEFFFQKQTRRNNRQIHKLSILKHGLRKRNQAPFEIKGFRLFDKVVCKGEEGFIFGRRSSGYFDVRKLDGTRISAGISYKTLHLLEKRQTYLTEIRKEEALPPLPEGRDLRA

SEQ ID NO: 14893 - protein, 423 aa, unidentified; identical to SEQ ID NO: 3951
  REGION 1..423: note = Human gut metagenome

SEQ ID NO: 14894 - protein, 417 aa, unidentified; identical to SEQ ID NO: 6036
  REGION 1..417: note = Human gut metagenome

SEQ ID NO: 14895 - protein, 429 aa, unidentified
  REGION 1..429: note = Ga0307928_10000789
VLACNNPEVDPLQHAGGQNLRVSDNMHVFVLNKRKEVLMPTSCRKARLLLKSGKAVVIKRFPFIIQLTYATGENKQKITCGVDPGYSDIGFSCITKTRELIGGTVKLDNFTSKHLSEKRMYRRNRRNRLRYRSPRFLNRRRSNKWIPPSIERRYQTHINLINKLKQFLPISNITIEIGNFDIQKLNNPDINGKGYQQGNLYNYSNLKSFVLSREKHICQLCNKNDLKNDKWKLHHIILKSKGGTDKSNNMALLHESCHKKLHKQNLYNKLKKNKQYKESIFMNIIKSRFKNSLNCKLVFGYETYCRRNELKLEKSHSNDSFVVAGGTNQKRSMEYNIKQRRRNNRTLQLNRKGFSPSIRRKRYKLQPYDLVKIDNNIYDVVGTHCLGKRVKVKSEKNKKKEISIKKIDWYFNNNSLIWKKGVSGNSSHY

SEQ ID NO: 14896 - protein, 450 aa, unidentified
  REGION 1..450: note = Cyanobacteria bacterium UBA8553
MTKVLVVNKHGRPLMPTTARKARILLKERKAKIYARNPFTIQLLYGCRGYTQPVTLGIDAGYQTIGFSAVTEKDELVGGEFKLLEGMSERITERRKYRRTRRNRLRHRKPRFNNRKRKEGWLAPSIQHKFDSYIKLVERLKARLPITKVIIETAKFDIQKINNTDIQGEQYQQGEQYGWKNLASYIRHRDGYKCQNKDCKNKSNQKILQVHHIGFWKNDRSNKPANLITLCSKCHTPANHKKGKLLDGWHPKVKSFKAETFMTIVYRKLVQTLQAEETYGYITEVDREALELPKSQMLEDSLTLRYHNDAFVIAGGKTQTRCKPLNLEQNRRNRRSLELFYDAKYIDIRTGDKATGSELFSGRRTRNKNENSENLRKYRGQRVSKGRRSIRKSRYPYQQNDLVKFGDTVYQVRGMQNLGARVALYAENNLTVDVRKVQPYLWRKGICEVI

SEQ ID NO: 14897 - protein, 518 aa, unidentified
  REGION 1..518: note = Human gut metagenome
MTPKKRKEASRMSEYIYVLGIDGNPQMPTKRKRHVEQLLQTGRARIFRQVPFTIQLTYKNEPVLQPVTIAEDPGRSNIGMAVVSLSGELLSAAVVQTRNKEIVKLMEKRKQHRRASRNGERKARQRLAKKCHTMIKTGFLMRKLPMYGKDKRVRCNVIKNTEAKFCNRKREDGWLTPSAEHLVRTHINLIHKMQKFLPITDVAIEINRFAFLSLEDPSISGVDFQNGPLKGYDDLNAAIEDLQDGHCLMCNSPIEHRHHIVPRNMQGSNTIGNIAGLCCKCHERVHKDARFEDRLKKKKAGLNKRYAAVSVLNQAIPFICKRLEQEFGKEHVHYCSGRDTSMVRRSLGYHKTKEKQLHEVDAWCIAVLALQHVPEKAPEFDHVHEILQFRRQDRSRIKAQTSRAYYHEGKKIAKNRKKAERQREDSLQEWRKRQVERYGKEQTRKMISQLEVKESIRRYNRLDRLMPGAVFYYQGVRYVMRGQHSNGQYLQAVGMGDKNFPAKKCKIVVHNQGLVFVS

SEQ ID NO: 14898 - protein, 420 aa, unidentified; identical to SEQ ID NO: 11059
  REGION 1..420: note = Human gut metagenome

SEQ ID NO: 14899 - protein, 411 aa, unidentified; identical to SEQ ID NO: 3917
  REGION 1..411: note = Human gut metagenome

SEQ ID NO: 14900 - protein, 472 aa, Cupriavidus sp.; identical to SEQ ID NO: 4331

SEQ ID NO: 14901 - protein, 417 aa, unidentified; identical to SEQ ID NO: 14176
  REGION 1..417: note = Human gut metagenome

SEQ ID NO: 14902 - protein, 473 aa, unidentified; identical to SEQ ID NO: 3562
  REGION 1..473: note = uncultured beta proteobacterium

SEQ ID NO: 14903 - protein, 447 aa, Moorena sp.
MAVFVLDRHKKPLMPCSEKRARLLLERRRAVVHRCIPFTIRIKDRQVESCALQPLRLSFDPGSEKTGLALVRESQEADRIVGGSHRIRTVCFLLEIWHRAALIRKRLRQRKAFRRHRRARKTRYRAPRFLNRRRPAGWLPPSLEHLVATTITWVRRIRRWAPVSGLAMESNSFDVQKLENPDTTGTMYQRGTLNGYAVRKYLLDKWARRCAYCGTEGVPLEIDHIVPKSRGGSDRMSNLILACRNCNQAKGNLNVRAFMAHDQKRLARILAQARASLRDAAAVNSTCWRLMTTLAKTGLPVETSTGERTKWNRTRLGLPKTHALDAACVGQVDAIVAWRVPILNIRCTGRGSHQRTRLDRYGFPRGYLMRSKRVQGFQTGDLVKAVVLSGKNAAIHVGRVAIRASGKFNIQTSTGVIQGVHARRCSIVQRGDGYAYSFRQIPQMTSV

SEQ ID NO: 14904 - protein, 462 aa, unidentified
  REGION 1..462: note = Human gut metagenome
MSVLVIGRNGRALMPTNPRKARLLLKKKTASVVCRHPFTIQLLYKTGCATQEGSIGIDTGSQHIGVGITCGDKVILKDEHALRSSMEKRSLLATRAAMRRGRRYRKVRYRKPKWRHHTKRMYFEKANRRGQHWRKVKTTTQSPRSKGWLPPSLQSKCDHHFRIIDRYLKYLPDPITRNLVIETGRFDMARMNDPTIHGEMYQRGPMYDAENRRAYIFARDNYQCACCKAKAGTTRKADGTTVKLVAHHILFRSRGATDNPKYMVSVCDHCHTTKAHQPGGILYSWMENNKKVTRGLRDATFMNILRKRLFARYPQAAFTYGNITAADRKQYHLPKSHVNDAVAVSLFGKEVPTVRDTCQTTYYKQVRKSKRSLHEAIPRKGRKNPNTKAVRNKKNTTQVNGFKLWDSVLANGKKLFICSFTGTSAYLIDKNGCYISQPGKTYKQWPLSKLKRLHPNGNWLMA

SEQ ID NO: 14905 - protein, 406 aa, unidentified
  REGION 1..406: note = Human gut metagenome
MVYVQDIDGKPMMPTTRHGKVRRLLKDNKAVVVNTCPFTIKLTYKTSDYKQEIVLGVDAGTKHVGLSATTKSKELYSGEVILRNDVVELLSTRRESRRARRNRLRYRKPRFENRVKSKHHGWVAPSVRHRIDAHIRVIDNVCSILPISRIIIEVAQFDTQKINNPNISGNEYQKGDQLGFWNVREYVLARDGHKCQHCKGKSKDHILNVHHIESRKTGGDSPSNLITLCETCHKEYHKGNIDLKVRRGKSLRDAAVMGIMKWKLYDELKSKYDNVSMTFGYITKYNRIKYGIEKSHTSDAFVISRNFNAKRIERQYLKRLIRRHNRQIHKMKILKGGKKKNNQAPFEVFGFRLFDKVLYNNEINFIYGRRKSGCFDIRDFDGKNSKNVTYKKLKLIRGKRYPIILK

SEQ ID NO: 14906 - protein, 371 aa, unidentified
  REGION 1..371: note = Human gut metagenome
VDAGYKHVGLSASTEKAELYASEVELRQDVSDLLSARRALRQSRRNRKTRHRAPRFDNRIRAKRKGWLAPSVENRINAHLSRIEAVLRLLPVTTITVETASFDMQLLKNPEISGKEYQEGEQLGFWNVREYVLSRDGHVCQHCHGRSKDPVLNVHHLESRRTGGDSPGNLITLCETCHKALHRGEITLKAKRGQSFRAEAFMGIMRWEVLNRLKASHPEQEVQNTYGYRTKHARIENGIAKSHCADAFCIAGNLGAERLGEFFFQKQTRRNNRQIHKLSVLKHGLRKRNQAPFEIKGFRLFDKVACKGEEGFIFGRRSSGYFDVRKLDGTHISAGISYKKLRLLEKRQTYITEIRKEEALPPLSEGRGLRA

SEQ ID NO: 14907 - protein, 431 aa, unidentified
  REGION 1..431: note = Human gut metagenome
MPNKVYVINKHGRPLMPCSPAKARHLLDAGKAKVKKRTPFTIQLVYGSSGYTQEVILGVDAGSKTIGMSASTTKEELLSAEVKPRNDVVDLLSTRREFRRVRRNRKTRYRKPRFDNRVRSKHKEWLAPSVEVKIQEHITSIKRVCRILPVSKVVIETAEFDLQLLKAIADGKSVPQGEDYQKGEMYGHYNVRQYVLWRDNYTCQCCGAHATKKKEVRLHVHHLESRKVGGDAPSNLITLCDSCHEKFHKGIITAANLKKRKRRSMRDATFMGIMRKTLIQRLRAELTIPVAETRGYITKTTRKKLLVLPKSHTNDALAIALGKHGFNVGYLPEIAQIDKIYTIRPVRHHNRQLHKVTILKGGIRKSNQAEKYVFGYRLFDKVQFNGQDCFIWGRRTTGIFTIKTINGKMIKDGISFKKLKLVEKSTSYLIA

SEQ ID NO: 14908 - protein, 420 aa, unidentified; identical to SEQ ID NO: 6017
  REGION 1..420: note = Human gut metagenome

SEQ ID NO: 14909 - protein, 504 aa, Moorena sp.
MPTTRCGKVRRMLKNGQAEVVSRIPFTIRLCYEPASKETQRLVYGCDPGRTNIGSAVVRENGCCVYLDKCATRNREIPPLMAKRRRHRQVSRRGERLARKRLAKRLRTTTKKLLDRLLPGYEKPVRVKDIINTEARFNNRFRPKGWLTPTARQLLRTHLNILKKVRKILPITDVVLEANRFAFMQLDNPHIFRWQFQYGPLHGKGSVENAVKEQQGGTCIFCKHEIEHYHHIIPRSRGGSNTLPNTAGLCNACHDKVHKSEEWFRKLKKKKAGLNKKYGALSVLNQIIPYLVDSYTELFPDHTYVTAGYSTKQFREDHGIEKDYDSDAACIACSILEKVDRIIFPGMTYQMEQFRRHDRAKIKSFRNRYYYLGKEKVAVNRKKAIMADPSGKEKNGKLQTQDSLEEWFAKEAEKNGLREAERKRSRLRAVKSIRIRNNMQRPLPGSIFIFEGKRYLLTGNHGEYYQTKVAGKTVEFLKSKCKIAAGNQGLVYTGQVKSGASSHV

SEQ ID NO: 14910 - protein, 440 aa, unidentified
  REGION 1..440: note = Human gut metagenome
MPTNSYRARRLLKLKRAVIYKYRPVFTIKLVDRTNGYTQPIEYKCDTGYQNIGISICSDTKEFVNEQRELLKDEVKRHSDSRKYRRTRRNRLRYRKKRFDNRKGMISKDGFAPSIRNKRDVHIHLYEEYYKVFPITKAVFEMGQFDTQVLKAVEAGLPIPDGTDYQRGEQYGYATLREAVFARDNYKCICCGKSAVRDGVKLRIHHIGYLSGDRSNRMANLGSVCESCHTSKNHKPGGKLYSLKPELKTFKGATFMTTVRYSMVKKLKVMTPTVDIKVTYGAATKLARRVLSVKKTHSNDAYCMGEFHPKHRSDFKHYKKCRRNSRVLSRFYDAKYRDLRDGSVKTGSQLSCGRTNRKISRHAELDERIYRAHKISKGRVSTRRQHYSLRPGDKVLYDGKVYFVTGMQNSGTHVKLTNGKVCSLKKVHVLQHCNAWTAVI

SEQ ID NO: 14911 - protein, 512 aa, unidentified
  REGION 1..512: note = Human gut metagenome
MPTVYVLNKDGKPLMPTTRCMHVRHLLKNGKARVVKSKPFTIQLLYETDDVVQPLYLGIDPGRTNIGVAVVKADGAAVFTAHLETRNKEVPKLMKKRKESRCARRTNGRRCRRQRRAKTNGTISKKCVKQTTAQNGSVSKRAKEIGVIKRHLQGCEKDVLCIGIKNKEAKFTNRARPEGWLTPTANQLLQTHINLVKKIQKFLPISDVVLEVNKFAFMQLDNPNIQKWQYQQGPLYQKGSLENAVSEMQEHHCLFCEKPIEHYHHVVPKSENGSNTIANIVGLCTEHHNLVHKDATWQKKLAKEKVGLVKKYSALSVLNQIIPALTKEMNSLFPKHFFVTNGKSTYDYRTAHGVSKDHWLDAYCIACSVLPNDVCDSNINSHVPYELKQFRRHDRRVLHKANMSRVYTLNGKTVATNRHKAIKQTTDSLEEFRQSHPGDVCKLKVKEHHPAYRNLNRNYPGSVFLVDGQVHVMQGVSGSHNGKADGYYNTNGNAYPYYKCKFVVKNEGIVFA

SEQ ID NO: 14912 - protein, 518 aa, unidentified
  REGION 1..518: note = Human gut metagenome
MVYVFVLDRDGNPLMPTTRCGKVRRMLKNGQAEVVFRIPFTIRLCYEPASKETQRLVYGCDPGRTNIGSAVVRENGCCVYLDKCATRNREIPQLMAKRRQHRQASRRGERLARKRLAKRLGTTTKKLLDRLLPGYEKPVRVKDIINTEARFNNRFRPKGWLTPTARQLLRTHLNILKKVRKILPITDVVLEANRFAFMQLDNPHIFRWQFQYGPLHGKGSVENAVKEQQGGTCIFCKHEIEHYHHIIPRSRGGSDTLPNMAGLCNACHDKVHKSEEWFRKLKKKKAGLNKKYGALSVLNQIIPYLVDSYTELFPDHTYVTAGYSTKQFREDHGIEKDHDSDAACIACSILEKVDRIIFPGMTYQMEQFRRHDRAKIKSFRNRYYYLGKEKVAVNRKKAIMADPSGKEKNGKLQTQDSLEDWFTKETERNGLQEAERKRSRLRAVKSIRIRNNMQRPLPGSIFIFEGKRYLLTGNHGEYYQTKVAGKTVEFLKSKCRIASGNQGLVYTGQVKSGASSHV

SEQ ID NO: 14913 - protein, 378 aa, Moorena sp.; identical to SEQ ID NO: 2642

SEQ ID NO: 14914 - protein, 430 aa, Moorena sp.
MRIMVYVLNPFGQPLMPTDDHRKVRILLKEKKATVVRRSPFTIRLLHRTKQYVQPVTLGVDAGSKHVGVSACTPEKELFRAELMPRNDVVDLMSTRRELRRSRRNRTTRYRAPRFENRVHSKRKGWLAPSVEVKIHNHNQLIEFACKILPVSLIRIETAEFDLQRLKAMEEGKPLPEGEDYQHGEMYDQYNVRQYVLFRDNYTCQCCGAHPTDKKPVKLHVHHKESRKVGGNAPNNLITLCEDCHDLLHKGIVELPDYKKRRGKSTRDATFMGIMRKTLLQRLRDKMGIPIQNTYGYITKAIRESNGIEKTHTSDARCIARCPKAKLAAEEYLIKPVRRHNRRLHKNAILKGGYRKANQAPTFVFGFKLFDMVDYNGEECFVYGRRSSGSFDVRHLDGKKVSAGVSYKRIRLLEHPNNLLFERGGGSSHD

SEQ ID NO: 14915 - protein, 465 aa, unidentified; identical to SEQ ID NO: 6446
  REGION 1..465: note = Human gut metagenome

SEQ ID NO: 14916 - protein, 470 aa, unidentified; identical to SEQ ID NO: 2825
  REGION 1..470: note = Human gut metagenome

SEQ ID NO: 14917 - protein, 442 aa, unidentified
  REGION 1..442: note = Human metagenome
MFCIDNRETHIPSTTLARRKILRKEGYPEMENIKKEYCFVVDKNNKPLAPTKMNKGWYLIRKGKAILKSMYPMVIQLEKEIKTNKNDKSYIVCGIDDGSIHVGLAIVQKCPTKNKVVFKGTIKQRQDVKHLMDVRRGYRHYHRYHKRYRPMRFNNRSSSKRIGRLAPSIKQKKDSILRVLYQLNKLINIKEYYLEDVCIDIRAMTDDYKPYKWQYQKSNRLDENLRKAAIIRDNYKCQECGKSNCKLEVHHIQARKYSGADTIGNLITLCFKCHQKTEGKEQDFEDKYFKIIGSKPKRFDYAMHVMQGKNYLRSKISELGLLHLTNGGETANKRIEWNIEKSHSNDAICITNSIPDSCSIKEWTIKPMKRKSKAKTDNVLGIKHRDLVSYTYKNGETHTGYVTALYPKQLALNFQSRIKHCKKVNARKCRLLWQFNKIYWLE

SEQ ID NO: 14918 - protein, 490 aa, unidentified
  REGION 1..490: note = Mouse gut metagenome
VDVVYVLAKNGVPLMPTQNYGYVRVLLKSHDAVVVRQKPFTIRLKYTTTTYTQPLVCGIDPGRTNIGVAVVTENGECVFSANADTHNKDVPKRMAERKAHRQASRHGERLRRQRRAKAAGTCFTEGKRQRILPGCKEPITCKGIKNSEARFNNRKRKKGWLTPTANHLLQSHLTLLRLVKKILPISKVVLELNSFDFMAMENPNIQRWQYQKGPLYGKGSVKDAVSMSQGGTCLFCSHSIQHYHHIVPRSKGGSNTLPNIVGLCENHHKLIHTDSVWQSKIKSEKAGRNKKYGALSVLNQIIPALTEALHEIPDIEVCVTDGHSTKAFRDVHQVDKDHHLDAYCIACSVLGDSITVAPPTNHYSLRRFRRHDRAAVSRQEERKYYLDSKLVARNRHKRTEQTADSLTEFRNTNPADIGKLRVIKGTAKYKDPTRILPGAIFLVNGKQMLFQGSTGKYKGKPVYYTFVGHSKRILATKCALLIKSGGWQFM

SEQ ID NO: 14919 - protein, 476 aa, unidentified; identical to SEQ ID NO: 13038
  REGION 1..476: note = Human gut metagenome

SEQ ID NO: 14920 - protein, 462 aa, unidentified; identical to SEQ ID NO: 10791
  REGION 1..462: note = Human gut metagenome

SEQ ID NO: 14921 - protein, 430 aa, unidentified; identical to SEQ ID NO: 4504
  REGION 1..430: note = Human gut metagenome

SEQ ID NO: 14922 - protein, 407 aa, unidentified
  REGION 1..407: note = Human gut metagenome
MADAASRRQRRAKANGTISKKCVKQTTAQNGSVSKRAKDIGVIKRRLPGCEKDVLCIGIKDKETKFTNRTRPEGWLTPTANHLLQTHINLVKKIQKFLPISDVVLEVNKFAFMRLDNPNIQKWQYQQGPLYKKESLESAVSEIQEHHCLFCKKPIDHYHHVVPQHKNGSNTIGNIVGLCAKHHDLVHKDSAWEKKLAKKSTGLYKKYGALGVLNQIIPTLTNELSSLFPKHSFVTNGKSTYDYRAAHGVSKDHWLDAYCIACSVLPSNVCDSNINNHMPYELKQFRRHDRRVLNNENMNRVYTLNNKAVAINRHKAKDQKTVSLEEFRKEHPDDVCKLKVKEHHPTYRNMNRNFPGSVFLVGKQIHVMQGIASSKDGKATKYNDTSATAIAAGKCKFVAKNTGILFV

SEQ ID NO: 14923 - protein, 493 aa, unidentified; identical to SEQ ID NO: 2644
  REGION 1..493: note = Human gut metagenome

SEQ ID NO: 14924 - protein, 413 aa, unidentified; identical to SEQ ID NO: 3587
  REGION 1..413: note = Human gut metagenome

SEQ ID NO: 14925 - protein, 442 aa, unidentified; identical to SEQ ID NO: 3234
  REGION 1..442: note = Human gut metagenome

SEQ ID NO: 14926 - protein, 406 aa, unidentified
  REGION 1..406: note = Human gut metagenome
MPCSPRKAKLLLKNKKAKVKHRMPFTIQLIYGRSGYKQPVSLGVDAGSKVIGLSATTEKKELFASEVVLRDDIVKLLSVRREFRRARRNRKKRYRAPRFNNRVHSKNKGWLAPSVENKIETHLKAVHHVFLILPIAKIIVETAAFDIQMLRAKELGLPLPEGVDYQQGEQLYSYNVREYVLFRDNHTCQHCKGKSKDPVLQVHHIESREVGGDAPNNLITLCKTCHAKYHAGLIKLQIKRGASFRDAAFMGIMRWAFYDRLKQIYPNVSMTFGYITKHTRIKHQLEKKHYIDARCISGHPNALPTENLYLQKAVRKRNRQLHKATINKGGIRKSNQSPKYVYGFQLFDKVFYDNKECFIFGRRATGYFDIRMLDGTKLSAGVSYKKLKLLERRKTILMQRVEDFAV

SEQ ID NO: 14927 - protein, 466 aa, unidentified
  REGION 1..466: note = Human gut metagenome
LSIKPLINIGEGVIYSSICTGLLLQTYQKRKEVPCMVYVLDINGQPLMPTTRHGKVRRLLNSHLAKVVKRCPFTIQLLYQSTKEIQPVSLGVDAGSKHIGMAATTEKKVVYQEELSPRNDVVKLLSLRRASRSSRRSRKTRYRKPKFNNRVHSKHKGWLAPSVEVKIQEHITAIKRICQILPISEIQVETAEFDFQRLKAMKEWKPLPVGTDYQLGEQYDFYNTRQYVLHRDGYICQCCGTHDNNIKLHVHHIESRQTGGDAPSNLITLCEHCHKALHKGKLELPKGKKRGKTYRDATFMGIMRKTLLERLRKEVDVPVSGTYGYITKYLREKTDLEKSHINDAICISKYPYAKPLDTYYLTKVVRNHNRQIHKSNFSKGGIRKRNQAPYLIKGFRLFDKVLYQGKEYFIFGRRATGYFDIRTLDGTKVNKGSISYKKLRIQDTAKAYLKEARAIPHMNKFTCVLA

SEQ ID NO: 14928 - protein, 427 aa, Parasutterella sp.
LRVFVRNKRGKPLMPCSPAKARLLLKEKKAIVVRRTPFTIQLTIATGETKQPVSLGVDAGYKHVGLSASTEKAELYASEVELRQDITDLLSARRALRQSRRNRKTRYRAPRFDNRIRTKRKGWLAPSVENRIDAHLSRIEAVLRLLPVTKITVETASFDLQLLKNPDISGKEYQEGEQLGFWNIREYVLCRDGHVCQHCYGRSKDPVLNVHHLESRRTGGDSPGNLITLCETCHKALHRGEITLKAKRGQSFRAEAFMGIMRSEVLNRLKASHPELEVNNTYGYRTKHARIANDIAKSHCADAFCIAGNLGAERLGEFFFQKQTRRNNRQIHKLSILKGGIRKRNQAPFEVNGFRLFDKVACQGEEGFIFGRRSSGFFDVRKLDGTRISAGISYKKLHLLEKRRTYLTEIRKEEVLPPLPEGRGLRA

SEQ ID NO: 14929 - protein, 417 aa, unidentified
  REGION 1..417: note = Human gut metagenome
MPCSPAKARLLLKEKKAIVKRRTPFTIQLTIATGEAKQPVALGVDSGYKHIGLSATTEKAELYASEVELRQDITDLLSARLALRRSRRSRKTRYRAPRFDNRVASKRKGRLAPSVENRIAAHMSRVEAVMRVLPVTAITVETAAFDTQLLKNPDIAGAVYQQGEQLGFWNVREYVLFRDGHVCQHCRGKSKDPILNVHHIESRRTGGDAPNNLITLCETCHKAFHRGEIKLKVRRGKSFKAETFMGIMRWTLLERLKKAHPELRVRNTYGYLTKHKRISHGIAKSHCADAYCIADNLGAKRLEGFFFQKQTRKHNRQIHKLSILKGGLRKKNQAPYEVKGFRLFDKVICKGEEAFIFGRRTSGSFDVRRLDGTRISAGISYKKLRLLEPRTTYLTEFRKEAALPPLHKCRGSRAEFL

SEQ ID NO: 14930 - protein, 430 aa, unidentified; identical to SEQ ID NO: 4504
  REGION 1..430: note = Human gut metagenome

SEQ ID NO: 14931 - protein, 557 aa, unidentified; identical to SEQ ID NO: 10483
  REGION 1..557: note = Human gut metagenome

SEQ ID NO: 14932 - protein, 412 aa, unidentified
  REGION 1..412: note = Fermentation metagenome
MSKQKEYAFVLDFTNNKLAPTNTNKAWILIRKKKAKLLQKYPMVIQLNYEVKIDKETEIICGIDDGSSHVGISLIQKCKTYNKPIFKGTIELRQDIKGLMDVRRGYRRYKRSHKRYRQARFSNRSMSTRKGRVAPSILQKKQSIIRVINQLLRFINIKKFHLEDVTIDIRALTDGKKLYRWQYQKSNRLDENIRKAIILRDGCKCMECGKSNCVLEVHHIVPKRLKGKNNQDNLITLCSNCHDKTKGQEEKFIKHYQLMINGKNIRLDYAQHVMQGKNWLRNELSKLGKLVLTTGGDTANKRIDWNIDKTHSNDALVASDLIINNELCNIKDYIIKPMRRKSKAKTYECLGFKHRDLIKYTKKNGESYIGYITALYSEKKQCNITTLENKILKRYGIKPCKLLWRFNKIYWF

SEQ ID NO: 14933 - protein, 516 aa, unidentified; identical to SEQ ID NO: 2369
  REGION 1..516: note = Human gut metagenome

SEQ ID NO: 14934 - protein, 462 aa, Moorena sp.; identical to SEQ ID NO: 2842

SEQ ID NO: 14935 - protein, 411 aa, unidentified
  REGION 1..411: note = Human gut metagenome
MVYIQDIDGKPMMPTTRHGKVRRLLKDNKAVVVNTCPFTIKLTYKTSDYKQEIVLGVDSGTKHVGLSATTKSKELYASEVILRSDVVDLLSTRRGLRRTRRSRLRYRKQRFNNKVKSKKDGWIAPSVRHKIDSHIRIISFVYSILPVSKLIVEVAQFDTQKIKNPEISGKEYQEGEQLGFWNVREYVLARDGHKCQHCKGKSKDPILNIHHIESRKIGGDSPSNLITLCETCHKEFHKGNIKLKVSRGKSLRDAAVMGIMKWKLYEELKSRYDNVSMTFGYITKYNRINHGIEKSHVSDAFVISRNFNSCRLGYYYKRKLVRRHNRQIHKMKILKGGIRKMNQAPFKVFGFRLFDKVMFQGEEHFIYARRLSGQFNIRDINGENKKDVSCKKLKYVSHGLVSVKTNLFLSQ

SEQ ID NO: 14936 - protein, 512 aa, unidentified
  REGION 1..512: note = Human gut metagenome
MSTVYVLNKDGKPLMPTTRGGHVRHLLKEQKARVVRAKPFTIQLLYETNDVVQPLYLGIDPGRTNIGVAVVKANGTAVFTAHLETRNKEIPKLMQDRKKARRARRTNGRRCRRQRRAKANGTISKKRVKQTTAQNGSVSKRAKDIGVIKRRLPGCEKDVLCIGIKNKETKFTNRTRPEGWLTPTANQLLQTHINLVKKIQKFLPISDVVLEVNKFAFMRLDNPNIQKWQYQQGPLYKKESLESAVSEIQEHHCLFCKKPIDHYHHVVPQHKNGSNTIGNIVGLCAKHHDLVHKDSAWEKKLAKKSTGLYKKYGALGVLNQIIPTLTNELSSLFPKHSFVTNGKSTYDYRAAHGVSKDHWLDAYCIACSVLPSNVCDSNINNHMPYELKQFRRHDRRVLNNENMNRVYTLDNKAVAINRHKAKDQKTVSLEEFRKEHPDDVCKLKVKEHHPTYRNMNRNYPGSIFLVGKHVHIMQGIAGSKDGKATTYKDSNANSITASKCKFVAKNSGILFV

SEQ ID NO: 14937 - protein, 412 aa, Coprococcus sp.; identical to SEQ ID NO: 9618

SEQ ID NO: 14938 - protein, 428 aa, Moorena sp.; identical to SEQ ID NO: 4440

SEQ ID NO: 14939 - protein, 512 aa, unidentified
  REGION 1..512: note = Human gut metagenome
MSTVYVLNKDGKPLMPTTRCGHVRHLLKEQKARVVASKPFTIQLLYKTNDVVQPLYLGIDPGRTNIGVAVVKADGTAVFTAHLETRNKEIPKLMKKRKDSRRARRTNGRRCRRQRRAKANGTISKKCVKHDTAQNGSVSKRAKEIGVIKRHLPGCEKDVLCIGIKNKEAKFSNRTRPEGWLTPTANQLLQTHINLVKKIRKFLPISDAVLEINKFAFMQLNNPNIQKWQYQQGPLYQKANLEEAVSEMQEHHCLFCKKPIAHYHHVVPQSENGSDTIGNIVGLCTKHHDLVHKDTAWQKKLAKKKTGLNKKYGALSVLNQIIPALTKELSSLFPKHFFATNGKSTYDYRSAHGVSKDHWLDAYCIACSVLPNDVCDSGINNRVPYELKQFRRHDRRALNNENMSRVYTLNDNVVATNRHKATKQTTDSLEEFRQNHPDDVCKLKVKEHHPTYRNMNRNYPGSVFLIGKQVHVMQGIAGSKDGEATTYKDTNANSIAAGKCKFVAKNSGILFV

SEQ ID NO: 14940 - protein, 425 aa, Nodularia sp.; identical to SEQ ID NO: 3165

SEQ ID NO: 14941 - protein, 466 aa, unidentified; identical to SEQ ID NO: 8215
  REGION 1..466: note = Human gut metagenome

SEQ ID NO: 14942 - protein, 506 aa, unidentified
  REGION 1..506: note = Human gut metagenome
MKQKKQKVIVYILNKKGKPLMPTTRCGHVRKLLDSKKAVVVNSNPFTIRLKYDTPNGVQDVFAGIDSGRENIGSGASNEDGDCLYLGELKTSNKSIKIKMTERAGFRRERRRHDRQNKQRKARKDHTEIKNGNADICRTTISCKSVQISYPAAEKSVTHKIIRGKEGKFANRHRNEGWITPSARQLVQMHMNDLKSMCKILPISHVTLERVAFDFQKLENENIKVWEYGKGKLYGYDSPEEYIHDVQNGKCLVCGKPHIDYLHHIIPRSKGGSDKVSNIAGLCYDCHYGPMGVHNCQDTQDRLPELKNEADKQYKVSLLNSVMPVLIEEMDKFCKANSIMFSICEGHDTAKVRDMYDLQKDHCIDGFAISLVDRNVKSVDVMPDRIYQKQRYKKKSKNIIQKRNCREYYDGKKLVAVNRHKGTDQKADSLEEYMNTYAETHTADECKKHFDSLTVKPARRTYTFHKKGCICPFHIGDKVRYEKKNKIKGNTKVETFICESIHFYQG

SEQ ID NO: 14943 - protein, 414 aa, unidentified; identical to SEQ ID NO: 2588
  REGION 1..414: note = Human gut metagenome

SEQ ID NO: 14944 - protein, 406 aa, unidentified; identical to SEQ ID NO: 2703
  REGION 1..406: note = Human gut metagenome

SEQ ID NO: 14945 - protein, 451 aa, unidentified
  REGION 1..451: note = Human gut metagenome
VLHARNLSITLAKVSYGLYDAGLPQKIIQKERSTYMVYVLSQNGQPLMSTIRHGKVRRLLKEGKANVVKKCPFTIRLTYPSGDQTQEISLGIDSGSKYIGISATTQKKVLYEAEVELRNDISKLLAARRQNRRSRRSRKTRYRKPRFDNRKRKEGWLAPSVQQKVDCHLKVVEDVCKLLPVTRIIAEVASFDIQKIKDPKIHGTDYQQGDQLGFWNVREYVLFRDGHTCQCCKGKSKDKILNVHHIESRQTGGNAPNNLITLCETCHKGYHKGQVKLPKKIKRGMTFKDAAFMGIMRWAFYDRLKEIYLPLGIDVSLTYGYLTKNTRIAHQLPKTHYLDARCISGHPDAISDGIYYHQKKIRCHNRQLHKANTLKGGIRKRNQAEYLVHGFRLFDKVRYQGKDYFIFGRRKSGYFDIRDLNGEKVNKGSISYKKLRLVETRRSYLTERRLA

SEQ ID NO: 14946 - protein, 396 aa, unidentified
  REGION 1..396: note = Ga0307928_10042824
MTQKIFVIDADGKQLLPTHPARSRKLLRAGRAQVHQVVPFTIQLSRVVENPVGAFTVGIDDGAKHVGIAVVNRHQKEVVFRGTIRLRQDVSRKMTQRAAYRRTRRSRLRFRAPRFRNRGRRGFLPPTIRQKKESILRVLVDLKKRLNIIEATIEEGQFDTSSLVAGRKLTGAEFQKSEYSKGGFRAKVLWRDKYKCQHCGTSDRLQAHHIQFKSRGGGDSPQNGLTLCGTCHADLHEGLWVLTKKPRPFRYPAHLQAGKNYLRELLHGIGLRIEVCFGWMTAKWRKCLELEKAHDLDAVAMVCRGCKPYLCLRSFLVIPKRTKVWENNPTKKRFEFRGFRHWDLVKARHRTRGVVVGSIRSLKKTTLTLRTNWDSNFPVSYNKSQVLWRFGGLVYV

SEQ ID NO: 14947 - protein, 470 aa, unidentified; identical to SEQ ID NO: 6354
  REGION 1..470: note = Wastewater metagenome

SEQ ID NO: 14948 - protein, 431 aa, unidentified; identical to SEQ ID NO: 9032
  REGION 1..431: note = Human gut metagenome

SEQ ID NO: 14949 - protein, 407 aa, Succinivibrio sp.; identical to SEQ ID NO: 5381

SEQ ID NO: 14950 - protein, 428 aa, Enterococcus sp.; identical to SEQ ID NO: 4335

SEQ ID NO: 14951 - protein, 475 aa, Petrotoga sp.
MAGEVLLLKTLLIIGEVNLPPQGELLSRRMFFMVYVLSVNGKPLMPTNNAKARILLKQKKAKVITVRPFTIQLLYETTTYTQSIILGIDSGYLNIGFSAVTEKKELISGEVKLLQGMKERLYERSMYRKIRRQRLRYRKPRWSNRIKSKKQGWLAPSIQHKLDSHIRFIDSIYKILPVTKTIVEIANFDIQKIKNPDINGAEYQQGDMLGFWNIREYVLYRGGHKCQNPNCKNKDKNPILEVHHLNYRSNGATERPEDLITLCTKCHTSPNHKGFLKDWKPKLKNFKDATFMSIVRWYLVNILKEKYNNVSFTYGYITKNHRINNKIEKSHYNDAFCIAKGINQIRIKPVKIEQVRRNNRSLEKFYDAKYIDKRTSEKVSAGDLNCGRRTRNKNKNGERLKNFRGQKVSDGQRRIRAGKYFYQPNDLVRYEGKIFTVRGTQNGGKYIALKEIKKVPKVELLTPYKFNKGFVYGLC

SEQ ID NO: 14952 - protein, 424 aa, Enterococcus sp.; identical to SEQ ID NO: 4844

SEQ ID NO: 14953 - protein, 420 aa, unidentified
  REGION 1..420: note = Human gut metagenome
MQYVYVLNKHGEPLMPCSPGKARLLLKQQKAHVVKRTPFTIKLLYGGAGYKQPITLGVDAGSKHVGLSASTEKRELYREEFTPRNDVVDLLSTRKQNRRSRRNRKTRYRASRFDNRVHGKHKGWLAPSVEVKIQEHITVIKRTCRILPVALVRVETAEFDTQRLKAMLEGKPLPVGTDYQLGEMCDEYNVRQYVLNRDHYTCQCCGAHTTTKKTVKLHVHHLESRKVGGNAPSNLITLCTTCHDALHKGKVSLDNKKRGKPMRDAVFMGIMRKTLMARLREELPIPVQGTYGYITKMWREQNDIKKSHVNDARCISKHPLAEPCSVCYRTKAIRHHNRQTHKANFSKGGIRKRSQMPYVVGGYRLWDKVLYKGQECFVSGRRTSGSFTLKKLDGTRISKGVTFKKLRLLEPATNYLIERM

SEQ ID NO: 14954 - protein, 506 aa, unidentified
  REGION 1..506: note = Human gut metagenome
MVAVLSNVGKPMMPTTEYKARKLIEKGRAIPYQYKPMFTIMILDRSGGYTQPIELKEDTGYEHIGISVCSQKHEYERKEIITLLDEPEKHHDARMHRRTRRNRLGYRPPRFDNRKRENGWIPPSLQHKIDIHLYWFNQYAEVLPITDAVFEIGTFDTQRLNAIEKGEKLPYGEDYQKGEQADFYTLRDAVFARDDYTCVVCGKGIQDGAVLRTHHVGYRHGDRSNRMSNLVTVCDHCHTTKNHQEGGALYDLKAPTKKKANAAFMNVARQRIIDCAKKSHPEINISCAFGSETKMSRKNLQIEKSHTNDAYAMGEFHPKHRCKEKIFQKVRRNNRILSRFYDAKYIDRRDGLTKTGKQLSSGRTNRNHKLDSENFRVYRGKKIQKGRTATRQQVYEFKTKDIVLYQGKRYVVKGTNNKGQNVQLYLNMTADLKDLTIKTKNKRKTADPNRIEVCDKVFTEFNGKKKVFTVKNIDPATNQVSLQADLSTKPSELKLVKYSNGYKQIK

SEQ ID NO: 14955 - protein, 431 aa, unidentified
  REGION 1..431: note = Human gut metagenome
MPNKVYVINKHGRPLMPCSPAKARHLLDAGKAKVKKRTPFTIQLVYGSSGYTQEVILGVDAGSKTIGVSALTKKEELFAANVIPRNDVVDLLSTRREFRRARRNCKTRYRKPRFDNRVRSKHKGWLAPSVEVKIQGHITAIRRVCGILPVSKVVVETAEFDLQLLKAIEKGKPVPQGEDYQQGEMYGHYNVRQYVLWRDDYTCQCCGAHTTKKKEVRLHVHHLESRKTGGDAPSNLITLCDSCHEKLHKGLIAEKDFKKRKRRSTWDATFMGIMRKTLMQRLCSELPIHVVETRGYITKATREKLLVLPKSHTNDALAIALGKHGFNVGYLPEIAQIDKIYTIRPVRHHNRQLHKVTILKGGIRKSNQAEKYVFGYRLFDKVQFNGQDCFIWGRRTTGIFTIKTINGKMIKDGISFKKLKPVEKSTSYLIA

SEQ ID NO: 14956 - protein, 439 aa, Arcobacter sp.; identical to SEQ ID NO: 3280

SEQ ID NO: 14957 - protein, 431 aa, unidentified
  REGION 1..431: note = Human gut metagenome
MPNKVYVINKHGRPLMPCSPAKARHLLDEGKAKIKKRTPFTIQLLFGSTGYTQEVILGVDAGSKTIGLSASAETEELFSAEVKPRNDVVDLLSTRRESRRARRNRKTRYRKPRFDNRVCSKHKEWLAPSVEVKIQEHITSIKRVCRILPVSKVVVETAEFDLQLLKAIEEGKPVPQGEDYQQGEMYGHYNVRQYVLWRDNYTCQCCGAHATKKKEVRLHVHHLESRKVGGDAPDNQVTLCESCHEKLHKGLIAEKDFKKRKRCSTRDATFMGIMRKTLMQRLCSELPIPVIETRGYITKATREKLLVLPKSHTNDALAIAQGKHGFNVGYLPGIEQIDKIYTIRPVRHHNRQLHKATILKRGIRKSNQAEKYVFGYRLFDKVQFNGQDCFIWKRRTSGYFVVKTIDGKIIHNSASFKKLRIAERASNYLIA

SEQ ID NO: 14958 - protein, 467 aa, unidentified
  REGION 1..467: note = Human gut metagenome
MKVFVIGMTGKRLCLTSPSKAKKLLKAGKAHVYRRVPFTIRLDYKTGGSAPALKLGIDTGEQHIGTAVCNDATVFCKSEIELIKSMEKKKRLEKRKIYRRSRRYRKTRYRHPKFRFRTKRVYVEGGYRKRKGGKMVLRHWKKVPNSVMTNRHEGWLPPSIESKVKHHIDWNNRYMDVLPDGTMLGIEVARFDIARMKDPSIRGELYQFGRMYGRENTKAYVLAKFDYTCPICKKKFDRDRKPRMHHVTMRKNAATDNPDEYAPVCVLCHSGEEHLPGGVLDKLAKECRRREYREPTFMNILRRRLFETYPEAEFTYGNITKADRKMLGLEKTHANDAVSIAMHGAKKVIDCEDTVYYRQVHRKKRSLHEATPRKGKKEPNHTAKRNVKNVPYVGKFHINDKVKGPDGNIGYITGFTGSAAYITDFTGEYIYPEGKDYKQHTLSSLRYVHHCGNWITSSVSGAAVSHD

SEQ ID NO: 14959 - protein, 428 aa, Moorena sp.; identical to SEQ ID NO: 9019

SEQ ID NO: 14960 - protein, 413 aa, unidentified
  REGION 1..413: note = Human gut metagenome
LKVFVLNMRGKPLMPCSPAKARHMLKAGKAFVVRRTPFTIKLTIATGETKQDVTLGVDAGARHVGISATTEKEEVFASEVALRQDITGLLADRLAFRRARRNRKTRYRAPRFNNRVRSKHKGWLASSVENRIQAHMSRIEAVCRLLPVTKIVIETASFDIQKIRNPEVEGTGYQQGDQLGFWNVREYVLFRDGHICQHCRGRSKDPILNVHHLESRKTGGDAPNNLITLCETCHKAYHAGKIKLKVKRGQSFRAEAFMGIMRWTLLNRMRKAHPSLPVENTYGYLTKHKRIALGLPKTHCADAFCIAGNLKALRRGDFLFLQQTRKHNRQIHKCSILKGGVRKLNQAPFLVKGFRLFDKVRIGGQIGFVFGRRVRGTFNIRRLDKTVIGTDINCKKLSLLETRKTFLTELRKE

SEQ ID NO: 14961 - protein, 422 aa, unidentified
  REGION 1..422: note = Human gut metagenome
LNKRGKPLMPCSPAKARLLLKEKKAIVVRRTPFTIQLTIATGESKQPVSLGVDAGYKHVGLSASTEKAELYASEVELRKDITDLLSARRALRQSRRNRKTRYRAPRFDNRIRTKRKGWLAPSVENRLNAHLSRIEAVLRLLPITKITVETASFDMQRLKNPDISGKEYQEGEQLGFWNVREYVLFRDGHVCRHCHGRSKDPVLNVHHLESRRTGSDSPDNLITLCVTCHKALHRGEITLKAKRGQSFRAQAFMGIMRREVLNRLKASYPELKVHETYGYLTKHARIANGIVKSHGADAFCIAGNLGAERLGEFFFQKQTRRNNRQIHKLSILKGGIRKRNQAPFEAKGFRLFDKVACQGEEGFIFGRRSSGSFDVRKLDGTRISAGISCKKLRLLEKRRTYLTEIRKEEALPPLPEGRGLRA

SEQ ID NO: 14962 - protein, 421 aa, unidentified
  REGION 1..421: note = Human gut metagenome
MVYVVANDGQPLMPTNRYGKVYRMLRSGMAVVVKKCPFTIQLQYESERNVQPVALGIDAGSKHVGVSATTKAKVLYESDVELRGDIVKLLATRRQLRRSRRSRKTRYRPARFDNRKRKNGWLAPSIRIMEDIRQKIESHLTVVANVCKILPVSRIIVETASFDIQKIKNPDIQGTEYQQGEQMDFWNVWEYVFFRDGHTCLCCKGRSKDKILNVHHIESRKTGGNAPNNLITLCETCHKGYHNGIVTLPKNIKRGMKFKDAAFMGIMRWTFYNTLKEQYEPDIPVSMTYGYLTKNTRICHDLPKGHCIDARCISGNPDAVSDGTYYYQKKVRCHNRQIHKQTILKGGVRKSNQAEYLVKGYRLFDKVRYQGREYFIFGRRKSGFFDIRTLSGEKVNKGSISVKKLTFVDTRKNYLIERRTV

SEQ ID NO: 14963 - protein, 436 aa, Sutterella wadsworthensis
  SITE 436: note = misc_feature - Xaa can be any naturally occurring amino acid
MSTSVFVLDKKHRPLMPCRPARARRLLRAGRARVVKRFPFVIRLVDRTVEQSEVQPVLIKLDPGSRETGAAVVRDDEKKRHHALAFFVIEHRGGAIRDALKARSAFRRRRRSQNLRCRSPRFLNRVKPKGWLPPSLRHRVETTLSFVRRMCRYLPVSGIATELVKFDSQKLQTPEVSGIEYQQGTLFEYEVREYLLEKFGRKCVYCGAEGVPLNIDHVVPRAKGGSNRVSNLVLACVSCNQKKGARSLEDFLKGKPEVLARVRRELKTPLRDAAAVNATRWVLFNELKATGLPVETGSGALTKLNRHAFGVEKEHWLDALCVGRLNGVVTRKGLNVLEIRCMGRGSRQRTRLTKYGFPRGYLMRQKCVHGFATGDMVEANVPKGKKAGLWRGRVAVRVSGSFNIQTPKGVIQGVGWKHCRLISHNDGYGYAWLGHX

SEQ ID NO: 14964 - protein, 453 aa, unidentified
  REGION 1..453: note = Human oral metagenome
LDTVAVISASGKKLMPTNSYRARGLLKSKRAVIHKYRPVFTIKLVDRTNGYTQPIEYKCDTGYQNIGISICSDTKEFVNEQRDLLKDEAKKHSDSRRYRRTRRNRLRYRKKRFNNRRGMISRDGFAPSIRNKRDVHVRLYEEYYKIFPIAKAVFEMGQFDTQVLKAIEAGLPVPKGADYQRGEQYGYATLREAVFARDDYKCICCGKSAIKDGVKLRIHHIGYLSGDRSNRMANLGSVCENCHTPNNHKPGGKLYNLKPKLKELKGATFMTTVRYSMIKNLKAATPNVDIKVTYGAETKLARKNLNVRKTHSNDAYCMGEFHPKHRSDFKHYKKCRRNNRVLSRFYDAKYRDLRDGSTKTGSQLSCGRTNRKISRHTKLDERIYRAHKISEGRISTRRQHYSLRPGDKVLYDGKVYFAKGVQSNGTSIKLANGKTCPLKKVSILQHCNAWAII

SEQ ID NO: 14965 - protein, 456 aa, Achromobacter sp.; identical to SEQ ID NO: 7899

SEQ ID NO: 14966 - protein, 401 aa, unidentified
  REGION 1..401: note = Human gut metagenome
LNKRGKPLMPCSPAKARLLLKEKKAIVVRRTPFTIQLTIATGESKQPVSLGVDAGYKHVGLSASTEKAELYASEVELRKDITDLLSARRALRQSRRNRKTRYRAPRFDNRIRTKRKGWLAPSVENRINAHLSRIEAVLRLLPITKITVETASFDMQRLKNPDISGKEYQEGEQLGFWNVREYVLFRDGHVCRHCHGRSKDPVLNVHHLESRRTGSDSPDNLITLCETCHKALHRGEITLKAKRGQSFRAQAFMGIMRREVLNRLKASYPELKVHETYGYLTKHARIANGIVKSHGADAFCIAGNLGAESSANSSSRSRLAETTGRFTNFPSSKGAFESAIRHPLRPKASVFLIRLPAREKKASFSAVDHPGLLMYESSTAPAFQPASAARSCVCWRRDGPI

SEQ ID NO: 14967 - protein, 415 aa, unidentified; identical to SEQ ID NO: 4916
  REGION 1..415: note = Human gut metagenome

SEQ ID NO: 14968 - protein, 415 aa, Eubacterium sp.; identical to SEQ ID NO: 6925

SEQ ID NO: 14969 - protein, 419 aa, unidentified; identical to SEQ ID NO: 10192
  REGION 1..419: note = Human gut metagenome

SEQ ID NO: 14970 - protein, 527 aa, Streptomyces sp.; identical to SEQ ID NO: 12129

SEQ ID NO: 14971 - protein, 408 aa, unidentified; identical to SEQ ID NO: 12402
  REGION 1..408: note = Human gut metagenome

SEQ ID NO: 14972 - protein, 496 aa, Oribacterium sp.
VPCGTKRRFLERRHRQILIYIIDASGKPLMPTARTGHIKRLLNRGKARIATKVPFTVQLKYETPGITQPLYGGTDPGRTNLGEAVIDENGTVIYKSHVETRNKDIPKLMSERKQHRQASRRGERLRKKRRAAKCGTTKEFTEGRMISGCEKPVMMKDIINTESRFANRKRPENWITPTTRQLVQTHLNMVRKICQVLPVTDWTLEVNRFAFMKMDDGSIRGLDFQNGRLKGYSSSHEYIYAMQDGKCACCDNDIEHYHHLTPRSKDGSDTPENLIGLCGSCHEKVHTGNLKLESIGLRKKYAALSVLNQAIPFIIEGLVETFGEKYVHFCEGYNTQMIRKSLCIGKDHPEDAVCIALLGSGIQKVTDNTEAFEVMQFRRHNRAIINNQRERTYYLNGKAVCKNRHKRFEQKGDSLEEFSKKHPSDVKRLTVKRSTRFYNANSRMMPGVVFMYKGQRHIMSGQLTGGKYLRAVGDTKTNYPVTQCYILNGNTGLVYI

SEQ ID NO: 14973 - protein, 441 aa, unidentified
  REGION 1..441: note = Human oral metagenome
MTKMATQKVTQVCVLDQNGQPLMPTQRLGKVYRLLKTKKAHIVAYEPFTIKLNYEPKTHIIQPMTLGVDSGAIHSGYSLANEHSEYYSAEVIARDNISKNISDKRMYRRNRRSRKTRYRKPRFNNRKNKGKGWIPPSLEQKVTVQVNEIKHLHQYFPIKDIIIEVAEFDIQKIENPEISGKEYQQGTLQGYNIRNYLLEKYNHKCFYCDKEVSTFEVEHMIPRARRGSNRIDNLTLACHDCNQKKGTLTAEEFIKQTLTPQKAAQKIRQIPKMKQLLKYMAHMNATRWVLYNTIKETYESVSLTYGYITKHNRINACLPKAHHIDAKCITGFSTVPSFDITVVKTKMRRHNRQLHRATFSKGHKRRAATLSKYVHGFQLYDIVLFNNHRYYIKSRRSFGSFKLASLEGLKDEERSYKKLTFLTHTNAYLTNHYVNDKSVNG

SEQ ID NO: 14974 - protein, 257 aa, unidentified; identical to SEQ ID NO: 5154
  REGION 1..257: note = Human gut metagenome

SEQ ID NO: 14975 - protein, 413 aa, unidentified; identical to SEQ ID NO: 2636
  REGION 1..413: note = Human gut metagenome

SEQ ID NO: 14976 - protein, 466 aa, unidentified
  REGION 1..466: note = Human gut metagenome
DSLFTKGVPCMSTCVCVLSNSGERLMPTIRLGKVRRLLKDGKAKIVKHHPFTIQLLYDSKTNTQPIEICEDVGYNYIGISVKSESHEYVSAQYDTLQDEKEHHDDCRKYRRTRRNRLRYRKPRFDNRKRSEGWLAPSLEHKKQLNIRLIERYVSVIPITRATVEVGSFDTMLLQAIQKGESKPEGVDYQKGPRYNLATLREAVFYRDNYTCQVCGRKVADGAILHMHHMFYWKGRHGDSLNELLTVCEKCHTPANHQKSGKLYGFGENVKFADLSGAAFMNTVRWQIVNELYAAFGKPFVTITYGAMTKEKRIALRLEKSHNNDAYAMGEFHPNCRCTFEHYEKVRRNNRILEKFYDSHYIDIRTGEIATGKELFNGRINRNHKKDSENFHKYRSKKVSKGRRSIRRQRYAIQPYDTVRLEGKTYITSGCHNKGTRLLIPANGKSKSVAISKVQVVCHAGAWIQII

SEQ ID NO: 14977 - protein, 447 aa, unidentified; identical to SEQ ID NO: 3915
  REGION 1..447: note = Human gut metagenome

SEQ ID NO: 14978 - protein, 442 aa, unidentified; identical to SEQ ID NO: 2903
  REGION 1..442: note = Human gut metagenome

SEQ ID NO: 14979 - protein, 493 aa, unidentified; identical to SEQ ID NO: 11733
  REGION 1..493: note = Human gut metagenome

SEQ ID NO: 14980 - protein, 431 aa, unidentified; identical to SEQ ID NO: 7992
  REGION 1..431: note = Human gut metagenome

SEQ ID NO: 14981 - protein, 249 aa, unidentified
  REGION 1..249: note = Human gut metagenome
MVYVQDIDSKPMMPTTRHGKVRRLLKDNKAVVVNTCPFTIKLTYKTSDYKQEIVLGVDAGTKHVGLSATTKSKELYSGEVILRNDVVELLSTRRESRRARRNRLRYRKPRFENRVKSKRLGWVAPSVRHRIDAHIRVIDNVCSILPISRIIIEVAQFDTQKINNPNISGNEYQKGDQLGFWNVREYVLARDGHKCQHCKGKSKDSILNIHHVESRKTGGDSPSNLITLCETCHKEYHKGNIDLTRQVTS

SEQ ID NO: 14982 - protein, 423 aa, unidentified; identical to SEQ ID NO: 4024
  REGION 1..423: note = Lachnospiraceae bacterium UBA7730

SEQ ID NO: 14983 - protein, 426 aa, unidentified
  REGION 1..426: note = Human gut metagenome
MVYVQNHLGQPLMPTQDHRKVRLLLKAGAAVVVRRMPFTIRLTTRTKTYVQPVILGVDTGSKTVGMSAATHEEEVFAAELTPRNDVVKNLADRRKFRSSRRGRTTRYRQPRFNNRVHSKHKGWLAPSVEVKIQEHITSIKRACELLPIGKVVVETAEFDLQLLKSIADGMPVPQGENYQKGEMYGFYNVRQYVFFRDGYTCQCCGAHGKGIKFHTHHLESRKTGGNAPDDLVTVCDKCHKAFHAGLITDAKLKKRRRKSTRDAAFMGIMRKTLLQRLRAELPIPVVETRGYITKATRERLLKLPKSHTNDALAIAMGRHGFGIEEVTYMPQSDRIYQIKPVRHHNRQLHKAIPKKGGRRQRSQGPKYVQGFRRFDKVLYRGQECFIWGLRTRGYFQLKLLNGTKVHESAKASELILLEHRSGYLIA

SEQ ID NO: 14984 - protein, 418 aa, unidentified; identical to SEQ ID NO: 2816
  REGION 1..418: note = Human gut metagenome

SEQ ID NO: 14985 - protein, 451 aa, unidentified; identical to SEQ ID NO: 5875
  REGION 1..451: note = Human gut metagenome

SEQ ID NO: 14986 - protein, 424 aa, Moorena sp.
MSTNFVFVLDTNRKPLAPCKPGVARSLLKAGKAKVFRRYPFTIILNKQINDKRKTLQLKIDPGSLQTGFALVTQGKEVIWAMVLTHRGQQTKDAMLRRCGIRRGRRNRGTRYRKPRFLNRRRPKGWLAPSLKHRVLTIETWVNRLRKLTPICSLAMELVKFDTQKMENPEVSGVEYQQGELFGYEVREYLLEKWERKCAYCGAKDTPLEVEHIYPISRGGSNRVSNLTLACQPCNQGKGNQDIRDFLCGKPDLAARILKQAKVPLKDAAAVNSTRWRLFETFKATDLPVTTGSGAHTKFNRRRFDLPKEHWIDAACVGEMKSLTLLTRQPLLVKATGHGCRQVIPMNKYGFPRQGYKPKKPVPGWKTGDIVNVVTGKNAGLKAVRIKTVRAKGSFDIKPGDKILSVSRNHIQPVHRQDGYGYSF

SEQ ID NO: 14987 - protein, 364 aa, unidentified; identical to SEQ ID NO: 13431
  REGION 1..364: note = Human gut metagenome

SEQ ID NO: 14988 - protein, 365 aa, unidentified
  REGION 1..365: note = Human gut metagenome
KKRHHALAFFVIEHRGGAIRDALKARSAFRRRRRSQNLRCRSPRFLNRVKPKGWLPPSLRHRVETTLSFVRRMCRYLPVSGIATELVKFDSQKLQNPEVSGVEYQQGTLFKYEVREYLLEKFGRKCVYCGAEGVLLNIDHVVPRAKGGSNRVSNLVLACMSCNQKKGARSLEDFLKGKPKVLARVRRELKTLLRDAAAVNATRWVLFNELKATGLPVETGSGALTKLNRHAFGVEKEHWLDALCVGRLNGVVTRKGLNVLEIRCMGRGSRQRTRLTKYGFPRGYLMRQKCVHGFATGDMVEANVPKGKKAGLWRGRVAVRVSGSFNIQTPKGVIQGVGWKHCRLISHNDGYGYAWLGHAPHSSPA

SEQ ID NO: 14989 - protein, 453 aa, Moorena sp.; identical to SEQ ID NO: 11367

SEQ ID NO: 14990 - protein, 460 aa, Scytonema sp.
MSNYVFLIDQNKTPLNPVHPAQARKLLDSGKAAVFRRYPFVLILKRVIENPNVYPLTLKIDPGSKVTGIVLVTNQGDVIWAMELQHRGQQIKDALEHRRAVRRGRRNRNTRYRQTRFLNRKRPSGWLAPSLRHRVLTTETWVKRLQRFVPIGSIVQELVKFDTQAIQNPEISGTEYQQGTLHGYECREYLLEKWNRQCAYCGVKDVPLEIEHIQSKSKGGSDRISNLCLACHKCNQRKGNKDIKDFLKGKPDVLNRVQKLGLAPLKDAASVNSTRWSLFNTLKSFGLPIITSTGGQTKFNRTRFNLPKAHWIDAACVGDALSPKNERNPINPTINRAASELTEEGSAHFLRVRPRVVETIKLVITKILKVRATGFGGRQRCQTDKFGYPQKHRPLRPILGFSTGDIVRADVPKGKYAGTFTARVCPMSHGYGEFVIDKKRRSVKLEYLTPVHRKDGYDYA

SEQ ID NO: 14991 - protein, 493 aa, unidentified; identical to SEQ ID NO: 2644
  REGION 1..493: note = Human gut metagenome

SEQ ID NO: 14992 - protein, 420 aa, unidentified
  REGION 1..420: note = Human gut metagenome
MQYAYVLNKRGEPLMPCSPGKARILLKQQKACVVKRTPFTIKLLHGSAGYKQPITLGVDAGSKHVGLSASTEKRELYSEEFTPRNDVVELLSTRRQNRRSRRNRKTRYRAPRFNNRVHSKHKGWLAPSVEVKIQEHITVIKRICRILPITLVRVETAEFDTQRLKAMLAGKPLPVGTDYQLGEMYDEYNVRQYVLKRDNYTCQCCGAHTTAKKTVKLHVHHLESRKVGGNAPSNLITLCTTCHNNLHKGKITLDGKKRGKTLRDAAFMGIMRNTLLTRLRNELNIPVQNTYGYITKLLREQNDIKKSHVNDASCISKHPLAKPCSVCYRTKAIRHHNRQIHKAKILKGGIRKANQAPYIVKGFRLWDKVLYNEQECFISGRRSSGYFALRKFDGTTITNSISFKKLRLLEPATNYLIERK

SEQ ID NO: 14993 - protein, 416 aa, unidentified
  REGION 1..416: note = Human gut metagenome
MVYVLDKNGQPLMPTDRHRKVRLMLQSGQAKVIKRCPFTIQLNYDSGHQTQEISLGIDAGSKHIGVSTTTKIKVLYEVDVELRNDIVDLLSSRRELRRGRRNRKTRYRQAKFNNRRRGNGWLAPSIRQKIGTHLTVVENICKMLPISRIMVETASFDIQKIKNPDIQGAEYQQGDQLEFWNVREYVLFRDGHICQCCKGKSKDKILNVHHIESRKTGGNAPNNLITLCETCHTGYHKGTVQLPKAIKRGMRFKDAAFMGIMRWAFYEALKQQYEPVGTPVHNTYGYITKHTRIAYNLPKEHYVDARCISGNPEASSNGEYYYQKKVRCHNRQIHKLTVLKGGIRKQNQATYLVKGYRLFDKVSYQGKGYFVFGRRQSGFFDIRTLSGEKVNKGSLNCKKLKFIATRTYYLTERRAV

SEQ ID NO: 14994 - protein, 536 aa, unidentified; identical to SEQ ID NO: 2718
  REGION 1..536: note = Human gut metagenome

SEQ ID NO: 14995 - protein, 416 aa, unidentified; identical to SEQ ID NO: 3007
  REGION 1..416: note = Human gut metagenome

SEQ ID NO: 14996 - protein, 385 aa, unidentified
  REGION 1..385: note = Human gut metagenome
RRLLKSKKATVVNLCPFTIRLLYDTTGYKQEITLGVDTGTKHVGLSATTKSKELYASEVILRSDVVDLLSTRRELRKIRRYRLRYRKPRFMNRIKSKKRGWIAPSIRQKIDPHIRIIGFVYSILPVSKLIIEVAQFDTQKIKNPEISGKEYQEGEQLGFWNVREYVLARDEHKCQHCKGKSKDPVLNVHHIESRKTGGDSPSNLITLCKTCHKEFHKGNIKLKVNRGESLRDAAVMSIMKWELYDELKSLYPNVKMTFGYITKYNRINHGIEKSHVSDAFVISRNFDSERLGYYYKRKLVRRHNRQIHKMKAPKGGNKRMNQSPFKVFGFRLFDKVMFQGKERFIYARRLRGIFNIRDINGENKKDISYKKLEYVSHGLISIVAG

SEQ ID NO: 14997 - protein, 464 aa, unidentified; identical to SEQ ID NO: 6330
  REGION 1..464: note = Human gut metagenome

SEQ ID NO: 14998 - protein, 465 aa, unidentified
  REGION 1..465: note = Human gut metagenome
MSTCACVLSKNGERLMPTIRLGKVRHLLKDGKAEIVKHHPFTIQLLYESDTNTQPIEICEDVGYNYIGISVKSESHEYVSAQYDTLQDEKKCHDDCRRMRRTRRNRLRHRQARFDNRKRDKGWLAPSLEHKKELNINVIKMYCEVMPITHATVEAGSFDTMLVKAIQEGKAAPEGAGYQKGPRYNLATLREAVFYRDNYTCQVCGRKANEGAILHVHHMFYWKGRHGNSLSELLTVCEKCHTPANHQKGGKLYRFGENIKFANLSGAAFMNAVRWQIVNELYTAFGKPFVTFTYGAMTKEKRIALHLEKSHNNDAFAMGSFHPADRCAFEHYEKVKRNNRILERFYDSQYIDIRTGEVTTGKSLFNGRINRSHKKDSENLHKYRGKRIRKGYRALRRKKVALNRGDLVSLNGEFLVVYGTHTRKNGSVNVEFKTPSRGGKKSADLKKLKIINASNPMHSAWKKAS

SEQ ID NO: 14999 - protein, 336 aa, unidentified
  REGION 1..336: note = Wastewater metagenome
MIKSLFKILYIFILFFSSIINCFSQKKENYTSLSYEEIEKRIDDPNTSQNEDSYLINLYINKSKSEKNNESLFYAYRYASKFYNPPISFKYADSALITGIKSKNKKLHVHHIIFRSQGGTNLPNNLITLCETCHQDLHKGLIDSKFKKVAIYKEPPFMNTLKLRLQNYYTDATFCYGYNTKEKRQEMQLPKSHINDAIAISFYNCDKITNLKYPEVNEYVIQVRIKKRSLHEQTSRKGIKEKNITQKRNCKNVFQVNQFKIGTKVSFVNQVGFISGFTGKSAYIKDINDNYITEDNKSYKQISLKKLNLICYNNGWVKFNHNSSLHLAKPDVGDFL

SEQ ID NO: 15000 - protein, 263 aa, unidentified; identical to SEQ ID NO: 10317
  REGION 1..263: note = Human gut metagenome

SEQ ID NO: 15001 - protein, 413 aa, unidentified; identical to SEQ ID NO: 3924
  REGION 1..413: note = Human gut metagenome

SEQ ID NO: 15002 - protein, 448 aa, unidentified
  REGION 1..448: note = Human gut metagenome
MNTCVCVLSNNGERLMPTFRLGKVRRLLKDGKAKIVKHHPFTIQLLYDSKTNKQPIEICEDVGYNYIGISVKSESHEYVSAQYDTLQDEKEHHDDCRKMRRARRNRLRYRKPRFDNRKRSEGWLAPSLEHKKQLNISLVERYVSVIPITHATVEVGSFDTMLLQAIQKGETKPEGADYQEGPRYNLATLREAVFYRDNYTCQVCGRKITDGAILHMHHMFYWKGRHGYKLDELVTACEKCHTPANHQKGGKLFGFGEDKEFADLSGAAFMNAVRWQIVNALHTTYSKEFVTITYGAMTKEKRIALQLEKSHNNDAYAMGDFHPVHRCGFRHYQKRRRNNRVLEKFYDATYIDARTGNKAKGKELFNGRISRNHKKDSENLHKYRSEKVSKGRRSIRKRRYAIQPYDTVRLKGKTYITSGCHNKGTRLLIPVNGKSKSVTISKVQVVCH

SEQ ID NO: 15003 - protein, 436 aa, unidentified; identical to SEQ ID NO: 10538
  REGION 1..436: note = Human gut metagenome

SEQ ID NO: 15004 - protein, 465 aa, unidentified; identical to SEQ ID NO: 3070
  REGION 1..465: note = Human gut metagenome

SEQ ID NO: 15005 - protein, 369 aa, unidentified
  REGION 1..369: note = Human gut metagenome
LQFYRKEHGIMQYVYVLNRHGEPLMPCSPGKARLLLKQQKACVVKRTPFTIKLLYGSAGYKQPITLGVDAGSKHVGLSASTEKRELYREEFTPRNDVAELLSTRKQNRRSRRCRKTRYRAPRFDNRVHSKHKGWLAPSVEVKIQEHITVIKHICKILPISLVRVETAEFDTQRLKAMLAGKPLPVGTDYQLGEMYDEYNVRQYVLKRDHYTCQCCGTHNTAKKVVKLHVHHLESRKTGGNAPSNLVTLCTTCHKNLHKGRVTLDGKERGKPLRDAAFMGIMRKTLMARLKEELPIPVQGTYGYITKMRREQNDIKKSHTNDARCISKHPLAEPCSVCYRTKAIRHHNRQTHKANFSKKGIRKRLSLIHI

SEQ ID NO: 15006 - protein, 451 aa, unidentified
  REGION 1..451: note = Human gut metagenome
VTTILKTCFAASNLAKIVVLMDAWDIIVILNKRGKPLMPCSPAKARLLLKEKKAIVKRRTPFTIQLTIATGEAKQPVSLGIDAGYKHVGLPASTEKAELYASEVELRQDITDLLSARRALRQSRRNRKTRYRAPRFDNRISTKRKGWLAPSVENRINAHLSRIEAVLRLLPVTKITVETASFDLQLLKNPDISGKEYQEGEQLGFGNIREYVLCRDGHVCQHCYGGSKDPVLNVHHLESRRTGGDSPDNLLTLCETCHKALHRGEITLKTKRGQSFRAETFMGIMRWEVLNRLKASHSELKVHNTYGYLTKHARIENGIAKSHGADAFCIAGNLGAERLGEFFFQKQTRRNNRQIHKLSILKGALRKRNQAPFEVKGFRLFDKVACQGEEGFIFGRRSSGFFDVRKLDGTRISAGISYKKLHLLEKRQTYLIEIRKEEAFPPLPEGRGLRA

SEQ ID NO: 15007 - protein, 428 aa, unidentified
  REGION 1..428: note = Human gut metagenome
LKVFVLNMRGRPLMPCSPAKARHLLKAGKAVVRRRTPFTIQLRIATGETKQNVTLGVDAGAKHVGLSAATEKEEVFASEVELRQDITGLLAARLSLRRDRRHRKTRYRAPRFLNRVRSKHKGWLAPSVENRIQAHMSRIDAVCRLLPVTKIVIETASFDIQKIKDPSVEGTDYQQGDQLGFWNVREYVLFRDGHVCQHCHGHAKDKILNVHHLESRQTGGDAPNNLITLCERCHKACHAGKIKLKVKRGQSFREEAFMGIMRWTLLDRVRKAHPGLPVENTYGYLTKNTRITQGLPKAHCVDAYCIAGNLKAVRRGVHLYQRQVRKHNRQIHKCTVLSKTLKDGTKIGYRKLNQTPHLVKNFRLFDKVRCLGQTGFIFGRRSSGYFDVRRLDGVKISSCINYRKLTLLEKRGTCLTELRKEDGASSPV

SEQ ID NO: 15008 - protein, 429 aa, Arthrospira sp.; identical to SEQ ID NO: 14671

SEQ ID NO: 15009 - protein, 451 aa, Ruminococcus sp.; identical to SEQ ID NO: 2424

SEQ ID NO: 15010 - protein, 414 aa, unidentified
  REGION 1..414: note = Human gut metagenome
MPCSPAKARLLLKEKKAIVKRRTPFTIQLTIATGETKQPVSLGVDAGYEHVGLSASTEKAELYASEVELRQDITDLLSARRALRQSRRNRKTRYRAPRFDNRIRTKRKGWLALSLENRINAHLSRIEAVLRLLPVTKITVETASFDLQLLKNPDISGKEYQEGEQLGFWNIREYVLCRDGHVCQHCYGRSKDPVLNVHHLESRRTGGDSPGNLITLCETCHKALHRGEITLKAKRGQSFRAEAFMGIMRSEVLNRLKASHPELEVNNTYGYRTKHARIANDIAKSHCADAFCIAGNLGAERLGEFFFQKQTRRNNRQIHKLSILKGGIRKRNQAPFEVNGFRLFDKVACKGEEGFIFGRRSSGFFDVRKLDGTCISAGISYKKLHLLEKRRTYLTEIRKEEALPPLPEGRGLRA

SEQ ID NO: 15011 - protein, 437 aa, unidentified
  REGION 1..437: note = Human gut metagenome
VGGVKAHLKSRNKEIPKLMQDRKRARRARRTNGRRHRRQRRAKANGTISKKCVKQTTAQNGSVSKRAKDIGVIKRRLPGCEKDVLCIGIKNKETKFTNRTRPEGWLTPTANQLLQTHINLVKKIQKFLPISDVVLEVNKFAFMRLDNPNIQKWQYQQGPLYKKESLESAVSEMQEHHCLFCKKPIDHYHHVVPQHKNGSNTIGNIVGLCAKHHDLVHKDSAWEKKLAQKSTGLNKKYGALGVLNQIIPTLTNELSSLFPKHSFVTNGKSTYDYRAAHGVSKDHWLDAYCIACSVLPSNVCDSNINNHMPYELKQFRRHDRRVLNNENMNRVYTLDNKAVAINRHKAKDQKTVSLEEFRKEHPDDVCKLKVKEHHPTYRNMNRNYPGSIFLVGKHVHIMQGIAGSKDGKATTYKDSNANSITASKCKFVAKNSGILFV

SEQ ID NO: 15012 - protein, 458 aa, Scytonema sp.
MMITNSVFVFSKNGKILKPTTPARARLLQCQGKARKLRLFPFTLILEKDVDENVEPYLELRLDPGSRSSGISLVDLNKNEVIWAMELEHRGLAIKMELITRAGVRRSRRSRRLRYRKKRFCRKKPDGWLAPSLRHRLLTTQTWIKRLLKLAPIKSIAIESVKFDLQKIETPDIEGIEYQQGTLWGYTLREALLEHWGRECVYCGRTDVPLQIEHINARSKGGSDRFSNLTLSCEKCNQKKENKPVEQFLKDKPEILQKIKSHQKKSLSDAAAVNSTRKAIFEMAHQFGLPVISGDGASTKMIRIKSGLPKLHWIDSACVGTSEIVKLRICQPLRVTCKGHGTKQVQRVNAKGFPAIASIKKNPITGKKEVKLVSKNQKYTHATAGDYVICNLLKDRKHIKAGIYRARVKTPTPKGVEVLISGHRIAVDRQYIKLIHRSDGYEYSFATIDQDLLRFSAI

SEQ ID NO: 15013 - protein, 515 aa, unidentified
  REGION 1..515: note = Human gut metagenome
MATVYVLNKDSKPLMPTTRCGHVRYLLKEKKARVVRANPFTIKLLYETDDVVQPLYLGIDPGRTNIGVAVAKGDGTAVFTAHLETRNKEIPKLMAKRKEYRQGRRHYRRCKRQRRAAAHGTLSKRCKKQDTAQGSNISERAQKIGVFERNLPGCEKPVLCIGIKNKEARFNNRVRPAGWLTPTANQLLLTHINFVKKICKFLPISDVVLEINKFAFMALDNPNIQKWQYQQGPLYQKGSLENAVSEQQDHHCLFCKKAIEHYHHVVPRSENGSNTIANIVGICIKHHDLVHKDTAWQKKLAKKKTGLNKKYGALSVLNQIIPALTKELSFLFPKHFFATNGKSTYDYRAAHGVSKDHWLDAYCIACSVLPYGCFDNTVNSRIPHELRQFRRHDRQVCHQQNAKRKYYLDRKLVAINRHKATEQKTDSLEEYRNNGGATDKLVVKEHKPTSKRLNRILPGALMTANGKLNVMVASKGLHNGIPDYYVFADNSEAKPTKYTLINKNKGIVFVLNSVS

SEQ ID NO: 15014 - protein, 476 aa, unidentified
  REGION 1..476: note = Human gut metagenome
LEVVGTEGVSHPGLPGKYKHKGGQLMSVAVISKTVERLMPTSEYRARKLLKSGKAIKHSYHPFTIQLTERETGDIQLIELCMDTGYIHIGISVKSKKHEYLAEQIDTLTDERGRHDACRMYRRQRRSRKRYRQARFNNRKRDQGWIAPSLEHKKKIHIQAISRINKVMPITDITMEMGNFDTQVLKAKEEGKPLPQGAEYQHGERYGIATLREAVFARDGYKCQCCGRTIKDGAILHVHHIKYRSQGGTNSMSNLATVCDKCHTPKNHKPGGKLYNWKPKLPSFKGATFMTTIRWQLYSEVKALFSDIDIYIAYGAATKERRRELDIDKSHVNDAFVMGQFHPKHRIKAVLYKKKRRNNRCLEKFYDAKYIDSRDGKKRSGQELFNGRINRNHKKDSENLHQYRLQKVTAGKRTVRKQHYKIQPHDIVIYENRKRETAGCHCNGTRMMLLPDKKSASIKKVKIYRYAGGYFKSAFN

SEQ ID NO: 15015 - protein, 430 aa, unidentified
  REGION 1..430: note = Spirochaetales bacterium UBA7552
MVYVLNIHGQPLMPTTRYGKVRRMLKEKQAKVIKRCPFTIQLLYENPNFVQEVSLGVDAGSKTIGISATTPTSELYAAEVKLRTDVVTNLSSRHECRRSRRNRKTRYRQKRFDNRKVNKQNGWLAPSICNKIVTHLTTVDKITKILPVSEIHVEVASFDIQKIKNPDITGIEYQQGEQLDFWNVREYVLFRDQYTCMCCKGRSKDKILNVHHIESRKTGGDAPNNLITLCETCHNDYHNGTIQLPKTIKRGMSFRDATFMGVMRWAFYNKVKEIYEAKGIPVSLTYGYITKNLRIKNNLPKTHYVDARCISGHSNVEPLGYYFLQKKVRCHNRQIHKLKFMKGHYRKRNKADYEIQGFKLFDKVLFQNIECFIFGRRSTGRMDLRKLDGTHINASANYKNLKLLENSKHILTERRTGRFLPAASNRVYTS

SEQ ID NO: 15016 - protein, 420 aa, unidentified; identical to SEQ ID NO: 11172
  REGION 1..420: note = Human gut metagenome

SEQ ID NO: 15017 - protein, 461 aa, unidentified
  REGION 1..461: note = Human gut metagenome
GKYKHKGGQLMSVAVISKTVERLMPTSEYRARKLLKSGKAIKHSYHPFTIQLTERETGDIQPIELCMDTGYIHIGISVKSEKHEYLAEQIDTLTDEKTKHGACRMYRTLRRGRKRYRQPRFNNRKRDKDWIAPSLEHKKDIHVQAISRINKVMPLTDITMEMGNFDTQVLKAKEEGKPLPQGADYQHGERYGIATLREAVFSRDGYKCQCCGRTISDGAILHVHHIKYRSQGGTNSMTNLATVCDKCHTPKNHKPGGKLYNWKPKLPDFKGATFMTTIRWQLYNEVKSLFPDINVHITYGAATKEQRRELNIDKSHVNDAFAMGKFHPKHRTNAALYKKKRRNNRCLEKFYDAKYIDSRDGSKRTGQELFNGRINRNHKKDSENLHRYRLQKITAGKRTVRKRHYNIQPHDIVMYENRKRETSGCQSNGTRVILLSDKKSVAVKKVKIYKYAGGYFKSAFN

SEQ ID NO: 15018 - protein, 431 aa, unidentified
  REGION 1..431: note = Human gut metagenome
MPNKVYVINKHGRPLMPCSPAKARHLLDAGKAKVKKRTPFTIQLVYGSSGYTQEVILGVDAGSKTIGVSASTKKEELFAANVIPRNDVVDLLSTRREFRRVRRNRKTRYRKPRFDNRVRSKHKGWLAPSVEVKIQEHITAIRRVCGILPVSKVVVETAEFDLQLLKAIADGKPVPQGEDYQKGEMYGHYNVRQYVLWRDNYTCQCCGAHATKKKEVRLHVHHLESRKTGGDASGNLVTLCESCHEKLHKGLITEDDFKKRKRKSTRDATFMGIMRATLLQRLRSELPIPVVETRGYITKATREKLLVLPKSHTNDALAIAQGKHGFNVGYLPGIAQIDKIYTIRPVRHHNRQLHKAAILKGGIRKSNQAEKYVFGYRLFDKVQFNGQDCFIWGRRTTGIFTIKTINGKMIKDGISFKKLKPVEKSTSYLIA

SEQ ID NO: 15019 - protein, 388 aa, Scytonema sp.; identical to SEQ ID NO: 2683

SEQ ID NO: 15020 - protein, 518 aa, unidentified; identical to SEQ ID NO: 7468
  REGION 1..518: note = Human gut metagenome

SEQ ID NO: 15021 - protein, 457 aa, unidentified; identical to SEQ ID NO: 5177
  REGION 1..457: note = Human gut metagenome

SEQ ID NO: 15022 - protein, 458 aa, Halomonas sp.; identical to SEQ ID NO: 5725

SEQ ID NO: 15023 - protein, 417 aa, unidentified
  REGION 1..417: note = Ga0307928_10011624
MQVYVQNKDGEPLMSCKPAKAKHLLRDNKAEVIELTPFTIRLNWDCENNTQEIIVGLDTGAVNVGCSAVSNNKVLYASETKLRTDIKKKMQRRAKYRRNRRIKLRYRQPRFNNRTRPKGWLPPSLRSKLESTIKIVNQLSKILSITKIRVEIAKFDIQKLQNPDIKGAEYQQGNTEGYDNVRAYVFERDNYICKLCRKREGILQTHHIIQRKDGGSDRPDNLATVHKKCHEDFHKGLIKYKFRKSKEYKVETQVTILKDFIVSELRKNFEVEVTFGHITKRNRMRLNLPKSHCFDAIAICNPNKLDRINYHYKIVCRPRGRYRLTQGIRSEQYLPTNRVYGYDIGDKVLCRKNRKQIGYIKSKMATGYFMLGDIDNKTIVKCTSHKFLEMVEYGKTLQSQFIPHRIQDSEREFLAES

SEQ ID NO: 15024 - protein, 416 aa, unidentified; identical to SEQ ID NO: 6549
  REGION 1..416: note = Firmicutes bacterium M10-2

SEQ ID NO: 15025 - protein, 462 aa, unidentified
  REGION 1..462: note = Human gut metagenome
LTKDENRPSGRTTGLRAEQAEPAGIRKGDTLKVFVLNMRGKSLMPCSPAKARHMLKAGKAVVVRRTPFTIKLTIATGETKQDVTLGVDAGARHVGISATTEKEEVFASEVALRQDITGLLADRLAFRRARRNRKTRYRAPRFNNRVRSKHKGWLAPSVENRIQAHMSRIEAVCRLLPVTKIVIETASFDIQKIRNPEVEGTGYQQGDQLGFWNVREYVLFRDGHVCQHCHGRSRDKILNVHHLESRKTGGDAPNNLITLCETCHKAYHAGKIKLKIKLKVKRGQSFRAEAFMGIMRWTLLDRVRKAHPGLPVENTYGYLTKNTRITPGLPKTHCVDAYCIAGNLKAVRRGVYLHQRQVRKHNRQIHKFTVLSKRLEDGTKIGYRKLNQSPYLVHGFRLFDKVRCLGQTGFIFGRRSSGYFDVRRLDGVKLSPSISWRKLTLLEKRSTYLTELRKQDGASSPV

SEQ ID NO: 15026 - protein, 428 aa, Macromonas sp.
MPCSEKRARLLLERGRARVHRVVPMVIRLVDRQVANCKLQPVRVKVDPGSKTTGLALVRDMESTDSVTGEIYRQVAVLNLMELVHRGRQISEALSARSSMRRRRRGNLRYRAPRFLNRSKPQGWLPPSLQHRVDTTMAWVKRLQCWAPVVAISSELVRFDTQALDNPEISGAEYQQGTLQGYEVREYLLEKWGRKCAYCDATEVPLQIEHIHPKARGGTNRVSNLTLACAPCNQRKAAQPLQNFLATEPQRLARITAQAQRPLKDAAAVNATRWALANALKCTGLPLELASGGQTKYNRVRLGLEKTHALDAVCVGHVDAATYGLQPTLAIKCTGRGSYQRTRLDKYGFPRGYLMRTKRVKGFGTGDMVKACVLTGKKVGTYTGRVAVRASGSFNIRTSTELVQGISYKHCQLVQRADGYGYFFHYRA

SEQ ID NO: 15027 - protein, 512 aa, unidentified; identical to SEQ ID NO: 5811
  REGION 1..512: note = Human gut metagenome

SEQ ID NO: 15028 - protein, 457 aa, unidentified; identical to SEQ ID NO: 4299
  REGION 1..457: note = Human gut metagenome

SEQ ID NO: 15029 - protein, 419 aa, unidentified
  REGION 1..419: note = metagenome
MIYIRSKDGKALMPSERGGRIGYFLRHGKAHVVSRVPFTVQLDYESTTYTQEVSLGVDAGSKHIGVSAGSEKKELLAAQVELRNDVVNLLSIRREQRRTRRNRKTRYRKIRFDNRKKKDDWLAPSVEQKVESHLKVIRLAHKLLPITKTTIEVAQFDVQKIKSPDIKGEEYQQGEQMGFWNVREYVFARDGHRCVHCKGKSKDPILNVHHLESRKTGGNSPSNLVTLCETCHKAYHRGEFTLKIKRGSSLRDAAVMNIMRWAVYERARLEFEKVHLTYGYVTKLTRIENGITKTHAADAFCIAKNVHAKRLRTFFQCRCVPRHTRALHVANPKRGGIRRSTIASHKIGKSHFQRFDMVRWKSKECFIFGSTNGRPVLRDIEGIKMHENVSVNIMTIKFLKRLRNNILVEEKDFRKLSII

SEQ ID NO: 15030 - protein, 398 aa, unidentified
  REGION 1..398: note = Human gut metagenome
LKVFVLNMRGQPLMPCSPAKARHLLKAGKAVVKRRTPFTIQLRIATGETKQNVTLGVDAGAKHVGLSATTEKEEVFASEVELRQDITGLLAARLSLRRDRRHRKTRYRAPRFLNRVRSKHKGWLAPSVENRIQAHMSRIDAVCRLLPVTKIVIETASFDIQKIKDPSVEGTDYQQGDQLGFWNVREYVLFRDGHVCQHCHGHAKDKILNVHHLESRQTGGDAPNNLITLCETCHKACHAGKIKLKVKRAQSFRAEAFMGIMRWTLLDRVRKAHPGLPVENTYGYLTKNTRITLGLPKAHCVDAYCIAGNLKAVRRGVYLHQRQVRKHNRQIHKCTVLSKTLKDGTKIGYRKLNQTPHLVKSFRLFDKVRCLGQTGFIFGRRSSGYFDVRRLDGVKISS

SEQ ID NO: 15031 - protein, 442 aa, unidentified; identical to SEQ ID NO: 2903
  REGION 1..442: note = Human gut metagenome

SEQ ID NO: 15032 - protein, 411 aa, unidentified; identical to SEQ ID NO: 8372
  REGION 1..411: note = Human gut metagenome

SEQ ID NO: 15033 - protein, 380 aa, Arthrospira sp.; identical to SEQ ID NO: 3156

SEQ ID NO: 15034 - protein, 406 aa, unidentified
  REGION 1..406: note = metagenome
MVYVQDINGKPMMPTTRHGKVRRLLKDKKAVVVNLCPFTIKLMYVTSDYKQEIVLGVDAGTKHVGLSATTKSKELYSSEVILRNDIVDLLSTRRELRKARRNRLRYRKPRFDNRVKSKRPGWTAPSVKYKIDAHIRVVENVCSILPISRIVIEVAQFDTQKIKNPEISGKEYQEGDQLEFWNTREYVLARDGHKCQYCKGKSKDSILNVHHIESRKTGGDSPSNLITLCETCHKEYHKGNIDLKIRRGKSLRDAAVMGIMKWRLYEELKSRYDRVFMTFGYITKHNRIKYGIEKSHTSDAFVISKNINAKRIERQYLKRLIRRHNRQIHKMKILKGGKKKNNQAPFEVFGFRLFDKVLYNNKIFFVYGRRKSGSFNIRDFNGENSKDVSRKKFKLIRGKRHPIILK

SEQ ID NO: 15035 - protein, 427 aa, Moorena sp.; identical to SEQ ID NO: 5630

SEQ ID NO: 15036 - protein, 542 aa, unidentified
  REGION 1..542: note = Human gut metagenome
MSRLTPDAEVPFFCETALQQKTKEASELTALEELLSKTEYIYVIGTDGRPQMPTKRKRHVLKLLNTGKARIAEKVPFTIQLKYDNIPVLQPVILAADPGRTNIGVAALSPFGDLMFAAVIETRNKEIKKLMADRKAHRQASRRGERKACQRLAKKYGTMIKAGMIMRKLPQYAADKFVTCNVIRNTEARFCNRKRCSDWLTPTVNHLVQTHLNVIKKISRYLPVTDIAIEVNRFAFMQMENPNASGVDFQNGPLRGFDDVKAAIREQQNGKCLMCKNDIEHFHHMVPLSKGGSDTIQNQVGLCPKCHAKVHTDTSFRKKLEDKKSGLLKKYGALSALNQAIPFICKDLLAEYGKEHVHFCTGKETSLIRTSLGYEKTKDNQMHEVDAYCIGLASLELEDIKSQSFVNTYKIKQFRRQDRSIIHHQTERSYYLDEQKIATNRKPRFEQTGNALSDWYKKQVKACDKAKADKMLSTLKVKKSSRSYNSEGRLMSGAVFSYNGQRHVMSGQLTGGRYLRAYGDTKTNYPVSKCNILRSNEGLVFI

SEQ ID NO: 15037 - protein, 470 aa, unidentified; identical to SEQ ID NO: 2949
  REGION 1..470: note = Human gut metagenome

SEQ ID NO: 15038 - protein, 453 aa, Moorena sp.; identical to SEQ ID NO: 4156

SEQ ID NO: 15039 - protein, 427 aa, Nostoc sp.; identical to SEQ ID NO: 2670

SEQ ID NO: 15040 - protein, 470 aa, unidentified; identical to SEQ ID NO: 2825
  REGION 1..470: note = Human gut metagenome

SEQ ID NO: 15041 - protein, 470 aa, unidentified
  REGION 1..470: note = Human gut metagenome
MSVFVVGLNGCRLMPVSERKARLLLKGGKASVYRKVPFTIKLNYKTGSTVQPGYLGIDTGSQHIGVSVVRKDGTVLHKEEIGLRDSMSKRKLLESRASSRRGRRYRKTRYRHPKWKPKTKRIYNEKADRKGRHWKKQKNTFTSKRQAGWLPPSLQSKTDHHIQWIRKLLDLLPEGYRLSIELGRFDPARMRDPEIHRELYQKGPQYDYENVRAYVLARDGYTCRVCKKKGGKLHVHHILYRSRGASDNPKYMAAVCSKCHTTENHLPGGILYQWMQDQKKFTRGLRDATFMNILKKRLRKAFPDAVFTYGNITKADREKLELPKSHGNDATAIALVNTEVKSVKDEEPVIHIQQVRRKKRSLHEETPRKGRKEPNRTASRSDKNTKSVTVAKGSGEKKASMTACLFDRVELDGKKGWITGFTGTSCYVKDKEDNYICTSSKYKQVSISRLRILHHCGNWAIGAEKPLGKG

SEQ ID NO: 15042 - protein, 485 aa, unidentified; identical to SEQ ID NO: 6696
  REGION 1..485: note = Ga0315284_10122845

SEQ ID NO: 15043 - protein, 512 aa, unidentified
  REGION 1..512: note = Human gut metagenome
MSTVYVLNKDGKPLMPTTRGGHVRHLLKEQKARVVRAKPFTIQLLYETNDVVQPLYLGIDPGRTNIGVAVVKANGTAVFTAHLETRNKEIPKLMQDRKKARRARRTNGRRCRRQRRAKANGTISKKCVKQTTAQNGSVSKRAKDIGVIKRRLPGCEKDVLCIGIKNKETKFTNRTRPEGWLTPTANHLLQTHINLVKKIQKFLPISDVVLEVNKFAFMRLDNPNIQKWQYQQGPLYKKESLESAVSEIQEHHCLFCKKPIDHYHHVVPQHKNGSNTIGNIVGLCAKHHDLVHKDSAWEKKLAKKSTGLYKKYGALGVLNQIIPTLTNELSSLFPKHSFVTNGKSTYDYRAAHGVSKDHWLDAYCIACSVLPSNVCDSNINNHMPYELKQFRRHDRRVLNNENMNRVYTLNNKAVAINRHKAKDQKTVSLEEFRKEHPDDVCKLKVKEHHPTYRNMNRNFPGSVFLVGKQIHVMQGIASSKDGKATKYNDTSATAIAAGKCKFVAKNTGILFV

SEQ ID NO: 15044 - protein, 431 aa, Enterobacter sp.; identical to SEQ ID NO: 3801

SEQ ID NO: 15045 - protein, 480 aa, unidentified
  REGION 1..480: note = Human gut metagenome
LYTKPLDNIGEGSLPPSGEINLKGMTFMVYVKSIDGKALMPTSNAKARKLLKQKKAKVVSLRPFVVKLTYKTKTEYTQKLNLGVDSGYSNIGFSVIDAKQEYIAGEVKLLEGMKKRLLEKASYRRIRRSRLRYRKARWNNRVKSKKKGWLAPSLKHKLDTHIKFIDYLKNILPIGKITIEVANFDIQKMKDDLISGIDYQNGDMFGFWNVREFVLHRDGHKCQNPNCKHKDKKEQILKVHHIRYRSEGGSDRPENLITLCSKCHTPANHKKGKFLYDWCVNGKKVRGFKDATFMSMIRWYLVNELKSKHNNVSITYGYITKNHRIQNGIEKSHLNDAFAIAKGTNQARTKDRFLVIQDRLKNRSLEKFYDSKIIDIRTEKKVSGGDLNCGRSTRNKNLNTENLRKYRGVKISKGQRRIRKQKYFYQPNDLVKYDGKVYTVKGTQNEGKYIALKEIKKVPKVELLIPYVFKKGLNWSYGLC

SEQ ID NO: 15046 - protein, 419 aa, unidentified; identical to SEQ ID NO: 6046
  REGION 1..419: note = Human gut metagenome

SEQ ID NO: 15047 - protein, 535 aa, unidentified; identical to SEQ ID NO: 14543
  REGION 1..535: note = Human gut metagenome

SEQ ID NO: 15048 - protein, 458 aa, Moorena sp.; identical to SEQ ID NO: 4474

SEQ ID NO: 15049 - protein, 465 aa, unidentified
  REGION 1..465: note = Human gut metagenome
MSTCVCVLSNSDERLMPTIRLGKVRHLLKDGKAKIVKHHPFTIQLLYDSETNVQPIEICEDVGYNYIGISVKSESHEYVSAQYDTLQDEKEHHDDCRMHRRTRRNRLRYRKRRFDNRKRDKGWLAPSLEHKKQLNISLIEQYVSVIPITHATVEVGSFDTMLLQAIQKGEAKPEGVDYQKGPRYNLATLREAVFYRDDYTCQVCGRKITDGAILHMHHMFYWKDRHGNSLSELITVCEKCHTPANHQKGGKLYGFGEDIKFANLSGAAFMNTVRWQIVNVLYAAFGKSFVTFTYGAMTKEKRIALHLEKSHNNDAYAMGSFHPVNRCAFEHYEKVKRNNRILEKFYDSQYIDTRTGEKASGKALFNGRINRNHKKDSENLHKYRGKRLYKGHRALVRKKVNLNPGDLVSFNGEVLVVHGTHTNKKGAVNVEFKVPAKNGQKSASLKKLKIVKAADSIHPAWEKVS

SEQ ID NO: 15050 - protein, 407 aa, unidentified
  REGION 1..407: note = Human gut metagenome
LMPCSPGEARLLLKQQKACVVKRTPFTIKLLFGSAGYKQPITLGVDADSKHVGLSASTEKRELYSEEFTPRSDVVELLSTRRQNRRSRRNRKTRYRAPRFNNRVHSKHKGWLAPSVEVKIQEHITVIKRICRILPVTLVRVETAEFDTQRLKAMLAGKPLPVGTDYQLGEMYDEYNVRQYVLKRDNYTCQCCGAHTTAKKTVKLHVHHLESRKVGGNAPSNLITLCTTCHNNLHKGKITLDGKKRGKTLRDAAFMGIMRNTLLTRLRNELNIPVQNTYGYITKLLREQNDIKKSHVNDARCISKHPLAKPCSVCYRTKAIRHHNRQIHKAKILKGGIRKANQAPYIVKGFRLWDKVLYNEQECFISGRRSSGYFALRKFDGTTITNSISFKKLRLLEPATNYLIERK

SEQ ID NO: 15051 - protein, 430 aa, unidentified; identical to SEQ ID NO: 14056
  REGION 1..430: note = Human gut metagenome

SEQ ID NO: 15052 - protein, 529 aa, Moorena sp.; identical to SEQ ID NO: 13154

SEQ ID NO: 15053 - protein, 512 aa, unidentified
  REGION 1..512: note = Human gut metagenome
MSTVYVLNKDGKPLMPTTRGGHVRHLLKEQKARVVRAKPFTIQLLYETNDVVQPLYLGIDPGRTNIGVAVVKANGTAVFTAHLETRNKEVPKLMQDRKKARRARRTNGRRCRRQRRAKANGTISKKCVKQDTAQSKNPSKRAKEIGIIKRRLPGYKKDVLCIGIKNKEAKYTNRTRPEGWLTPTANQLLQTHINLVRKMQKFLPISDVVLEVNKFAFMRLDNPDIQKWQYQQGPLYQKGSLENAVSEMQEHHCLFCDKPIDHYHHVVPQSENGSNTIANIVGLCAEHHNLVHKDAAWQKKLAEEKVGLNKKYGALSVLNQIIPALTNKLSVLFPKHFFVTAGKSTHDYRAAHGVSKDHWLDAYCIACSVLPSNVCDSNINNHMPYELKQFRRHDRRVLNNENMNRVYTLDNKAVAINRHKATEQEAASLEEFRKEHPNDVCKLKVKEHHPTYRNMNRNYPGSIFLVGKHVHIMQGIAGSKDGKATTYKDFNANSITASKCKFVAKNSGILFV

SEQ ID NO: 15054 - protein, 431 aa, Escherichia sp.; identical to SEQ ID NO: 3801

SEQ ID NO: 15055 - protein, 431 aa, unidentified
  REGION 1..431: note = Human gut metagenome
MPNKVYVINKHGRPLMPCSPAKARHLLDAGKAKVKKRTPFTIQLLFGSTGYTQEVILGVDAGSKTIGLSASAETEELLSAEVKPRNDVVDLLSTHREFRRARRNRKTRYRKPRFDNRVRSKHKGWLAPSVEVKIQEHITSIKRVCRILPVSKVVIETAEFDLQLLKAIADGKPVPQGEDYQKGEMYGHYNVRQYVLWRDDYTCQCCGAHATKKKEVRLHVHHLESRKVGGDAPDNQVTLCESCHEKLHKGLITAKDFKKRKRRSTRDATFMGIMRKTLMQMLCSELPIPVVKTRGYITKATREKLLVLPKSHTNDALAIAQGKRGFNVGYLPEIAQIDKICTIRPVRHHNRQLHKAAILTGGIRKSNQAEKYVFGYRLFDKVQFNGQDCFIWGRRTSGYFAVKTIDGKVIHNSASFKKLNLVERASNYLIA

SEQ ID NO: 15056 - protein, 414 aa, unidentified
  REGION 1..414: note = Human metagenome
MVYVINKQGQALMPTERFGKVRRLLKNSLAHVVCRIPFTIQLDYDTTDYTQPVSLGVDAGSKHIGISATTSDKELYAADVELRNDIVNKLSTRREQRRTRRSRLRYRKARFNNRVSSKRKGWLAPSVENKIQTHLTVVEKIHKFLPITNIVVETTSFDIQKINNPSISGSEYQQGEQLDFFNVREYVLFRDNHICQHCKGKSKDKVLNVHHIESRKTGGDSPKNLITLCETCHKAYHRGEFELNVKRGKSFRDAAFMGIMRWSLYDRLKNIYPDVSMTFGYITKNTRITNNLPKEHYVDARCISGNPVAKPLGYYFYQKKVRCQNRQIHKANFLKGGRKKLNQAPFLVKGFRLFDLVEYQKDLYYIFGRRSNGSFDIRKLDGTKVNKGSINCKYLRLISTRKSILIEKRTKVNL

SEQ ID NO: 15057 - protein, 462 aa, unidentified
  REGION 1..462: note = Human gut metagenome
MSVLVIGRNGRALMPTNPRKARLLLKKKTASVVCRHPFTIQLLYKTGCATQEGCIGIDTGSQHIGVGITCGDRVILKDEHTLRSSMEKRSLLATRAVMRRGRRYRKVRYRKPKWRHHTKRMYFEKANRRGQHWRKVKTTTQSPRSKGWLPPSLQSKCDHHFRIIDRYLKYLPDPITRNLVIETGRFDMARMNDPTIHGEMYQRGPMYDAENLRAYIFARDNYQCACCKAKAGTTRKADGTTVKLVAHHILFRSRGATDNPKYIISVCDHCHTTKAHQPGGILYSWMENNKKVARGLRDATFMNILRKRLFARYPQAAFTYGNITAADRKQLRLPKSHANDAVAISLFGKEASTVKNICQTMHYKQIRKSKRSLHEAIPRKGRKNPNTKAVRNKKNTTQVNGFKLWDSVLANGKKLFICSFTGTSVYLIDKNGCYISQPGKTYKQWPLSKLKRLHPNGNWLMA

SEQ ID NO: 15058 - protein, 359 aa, unidentified
  REGION 1..359: note = Human gut metagenome
GTIGTAVSKDNGDIVYMSEVVVRNDITDKMTQRAKYRRNRRNRKTRYRKARWLNRASSIKKDRFSPTMQSKLHSHVREIEYIQSILPVTEMVFETGQFDMQLMKNPSLANPKVRPWGYQKGANYGFENTKAMVLNRDNYTCQCCKGKHKDSKLEVHHIVFRSQGGSDEESNLLTLCHTCHKDLHSGKINPKLSGKVKGNLKYATQMNSIRKQLFRFYPNAIETFGYVTKANRLHLGVDKEHYYDACTIATQGNAFNVKSNLYKKKCVSDGDFQKTKGIRSEQPIVTDKICGFRKFDKVRYFGNDYFIKGRMSTGYAILMDIDGNKIDFSTMPRGYKTPKLSNCKRITARSTVMTQVKVV

SEQ ID NO: 15059 - protein, 415 aa, Ruminococcus sp.; identical to SEQ ID NO: 4916

SEQ ID NO: 15060 - protein, 499 aa, unidentified
  REGION 1..499: note = Human gut metagenome
MRYVYVLDMNGKPLMPTCRYGKVRRMLKSGQAKAVDTLPFTIQLLRPTKNRILQPVIAGQDPGRTNIGMAAVRSDGTELYRAHIETRNKEIVSLMNDRRSFRQASRRGERLARKRLAKKLHTTAKHLNGRILPGCKEPLAVKDIINTEARFNNRLRPEGWLTPTATQLLRTHLEAFRKLSGILPVTEVVLEVNRFAFMQLDHPDMEKRDIDFCRGPLHGTGGVKAAVSLQQDGLCLLCREREIEHYHHIVPRSKRGSNTISNIAGLCEKCHERVHKDQAAAEKLQSRKDGLSKKYGGTSVLNQIIPSLTEELGNWYPGHTHVTNGWNTKELREKHELEKDHDIDAYCIAASILKDVQPVMQTKPYEVKQFRRHNRARIHHQTERTYRYDGKIIAKNRKKRMDQKTDSLEDWVADMTKQYGQGTASRMLPKVTVQKSTRHYNTKGRMMPGTVFIYRGKRFVMTGQLTGGAYYRAYGQDKKNFPAKAVQVIQKNKGLVYVA

SEQ ID NO: 15061 - protein, 432 aa, unidentified
  REGION 1..432: note = gut metagenome
MPTFNFRKVRRLLKSGRADIFCHEPFTIRLLYAEKLDTQPVELCIDAGDRHIGISVKSEKHEFVHAQYDPLRDEKEKQTDRRMHRRTSRSRRRHRKSRFDNRKKPEGWLAPTVEHKKDLHISITQMYIRVCPVTSITVETASFDTQALEAIERGLPLPKGKDYQKGPRYRMNTLRDAVFYRDGHRCRLCGNNGVLRVHHIGYWKGDRSNRMGNLAAVCTGCNTPANHRKGGRLYGWEPEIKPLKGAAFINAVRKRLAEELRERTSLPVTETNGSATKTARKRFCIDKTHANDAFVMGKFHPRHRRQEQVWQKRRRNNRILSKFYDARYVDIRDGKVKSGQELSCGRLKRSESRNSEKNMRPFRGRKVRKGRVSTRRRRYAIRPGTIVVYDGQKQSVKGIHCGGTRAVLENGKSVSVKKIRGLRFPGAWMRIS

SEQ ID NO: 15062 - protein, 473 aa, unidentified; identical to SEQ ID NO: 3562
  REGION 1..473: note = uncultured beta proteobacterium

SEQ ID NO: 15063 - protein, 443 aa, Anoxybacillus sp.
MVEENMTCFMQRKGENPMVFVLDTNKCPLAPCHEAVARKLLKQGKAAIYKRYPFTIILKEIVDNFRPKTPYRLKIDHGSKHTGLAILRGQEVVWLGQLDHRTDIKERMDKRRAFRRARRNRKTRYRKPRFLNRRRKDGWLPPSLESRVQNIQTWVNRLKKLCPIGYISYENTKFDTQLMRNPEISGIEYQQGTLQGYEVREYLLEKFGRKCCYCGKENVPLEVEHIIPKSRGGTDRVDNLCLACHDCNQRKGSKTAEEFGYPHIQKQVKESLKDASAVNSTRWKVYEVLKQSGCEVECGTGARTKMNRIRLDLPKTHYFDACCVGESTPNHLYFKTKEVLFIKAKGRGSRSRTNLDRYGFPRGYLARQKFFFGFQTGDMVKAVIPRGKYQGVWFGEVACRKTGSFDIKGKDGKRIAQGINYRYVQVIQRFDGYAYGKGVAELA

SEQ ID NO: 15064 - protein, 442 aa, unidentified; identical to SEQ ID NO: 3161
  REGION 1..442: note = Human gut metagenome

SEQ ID NO: 15065 - protein, 339 aa, unidentified
  REGION 1..339: note = Human gut metagenome
VTTILKTCFAASNLAKIVVLMDAWDIIVILNKRGKPLMPCSPAKARLLLKEKKAIVVRRTPFTIQLTIATGEAKQPVSLGIDAGYKHVGLSASTEKAELYASEVELRQDITDLLSARRALRQSRRNRKTRYRAPRFNNRLCTKRKGWLAPSVENRINAHLSRIEAVLRLLPVTKITVETASFDLQLLKNPDISGKEYQEGEQLGFWNIREYVLCRDGHVCQHCYGRSKDPVLNVHHLESRRTGGDSPGNLITLCETCHKALHRGEITLKAKRGQSFRAEAFMGIMRWEVLNRLKASHPELEVNNTYGYRTKHARIANDIAKSHCADAFCIAGNLGAERL

SEQ ID NO: 15066 - protein, 444 aa, Halanaerobium sp.
MKGWIMLVRVVAKDGKTLQPTNRHGKVRRLLDNNMAEVICKDPFTIRLLYEVDFRKTQQVKIYFDTGGKYQGFAIIVNGKVIHKGTIELRDGVSDLLRQRRQYRRGRRYRNKRYRPPRFNNRKRKKGWLPPSVISKYKHILNWINKLTKYLPDYELTVEIANFDIHKIKNPEIEGEEYQKGDKYGYENVKQYLIFREDARCQLCSKFKGDDTWNVHHIVPKKNGGTDTPDNLALLHSKCHKKIHNNDLDNKLHQNVDKLLENRNSSTFKYTTFMNIIKNKLYSDLSKKYGDKVNFTYGHITNVNRRELGLSKTHYNDAIAMHQESVEDYITPIYIKQVRKKKRSLHEAIPRAGRGDKINHNQKRRPKNTKEIIKNGKKWALWDKVYISKIGKTGFISGFTGKWVYIQDIDGKYLQLTTKTYKQINPDNLKLKCRNNNWVKKQLA

SEQ ID NO: 15067 - protein, 465 aa, unidentified
  REGION 1..465: note = gut metagenome
MSTCACVLSKNGERLMPTIRLGKVRHLLKDGKAKIIKHHPFTIQLLYDSETNIQPIEICEDVGYNYIGISVKSQSHEYVSAQYDTLQDEKSCHDACRRMRRTRRNRLRYRQKRFDNHKRDKGWLAPSLKHKKELNVNVIKMYCEVVPITHATVEVGSFDTMLVKAIEEGKATPEGADYQKGPRYNLATLREAVFYRDNYTCQVCGREASEGAILHVHHMFYWKGRHDNSLSELITVCEKCHTPANHQKGGKLYGFGEDIKFANLSGAAFMNTVRWQIVNELYAAFGKPFVTFTYGAMTKEKRIALHLEKSHNNDAFAMGSFHPNCRCTFEHYEKVRRNNRILEKFYDSRYIDIRTGEIATGKELFNGRINRSHKKDSENLHKYRGKRIRKGYRALRRKKVALNPGDLVSLNGEILTVHGTHTKKNGSVNVEFKTPSKSGKKSTSLKKLKIIKTISPMRSAWDKVS

SEQ ID NO: 15068 - protein, 415 aa, unidentified; identical to SEQ ID NO: 6534
  REGION 1..415: note = Human gut metagenome

SEQ ID NO: 15069 - protein, 419 aa, Moorena sp.; identical to SEQ ID NO: 2828

SEQ ID NO: 15070 - protein, 416 aa, unidentified
  REGION 1..416: note = Human gut metagenome
MVYVLDKNGQPLMPTDRHRKVRLMLQSGQAKVIKRCPFTIQLNYDSGHQTQEISLGIDAGSKHIGVSTTTKIKVLYEVDVELRNDIVDLLSSRRELRRGRRNRKTRYRQAKFNNRRRGNGWLAPSIRQKIGTHLTVVENICKMLPISRIMVETASFDIQKIKNPDIQGAEYQQGDQLEFWNVREYVLFRDGHTCQCCKGKSKDKILNVHHIESRKTGGNAPNNLITLCETCHTGYHKGTVQLPKAIKRGMRFKDAAFMGIMRWAFYEALKQQYEPVGTPVHNTYGYITKHTRIAYNLPKEHYVDARCISGNPDAFPSGEYYYQKKVRCHNRQIHKLTILKGGIRKQNQATYLVKGYRLFDKVSYQGKGYFVFGRRQSGFFDIRTLSGEKVNKGSLSCKKLKFIATRTYYLTERRAV

SEQ ID NO: 15071 - protein, 413 aa, unidentified; identical to SEQ ID NO: 6118
  REGION 1..413: note = Ga0315284_10047810

SEQ ID NO: 15072 - protein, 417 aa, unidentified
  REGION 1..417: note = metagenome
MPCSPAKARLLLKEKKAIVKRRTPFTIQLTIATGEARQPVTLGVDSGYKHIGLSATTEKAELYASEVELRQDITDLLSARLALRCSRRSRKTRYRAPRFDNRVASKREGWLAPSVENRIAAHMSRVEAVMRVLPVTAITVETAAFDTQLLKNPDIAEAAYQQGEQLGFWNVREYVLFRDGHVCQHCRGKSKDPILNVHHIESRRTGGDAPNNLITLCETCHKAFHRGEIKLKVKRGKSFKAETFMGIMRWTLFERLKKAHPELRVRNTYGYLTKHKRISHGIAKSHCADAYCIADNLGAKRLEGFFFQKQTRKHNRQIHKLSILKGGLRKKNQAPYEVKGFRLFDKVICKGEEAFIFGRRTSGSFDVRRLDGTRISAGINYKKLRLLEPRTTYLTEFRKEAALPHLHECRGFRAEFL

SEQ ID NO: 15073 - protein, 442 aa, unidentified; identical to SEQ ID NO: 3218
  REGION 1..442: note = Human gut metagenome

SEQ ID NO: 15074 - protein, 458 aa, unidentified
  REGION 1..458: note = Human gut metagenome
MLTYVLAKDDTRLMPTYSIRKVRRLLKSGRAVIVGHRPGLTIQLVYDLPDQQAAHVQPVEICEDTGYAHIGVSVKSEKHEFAHEQYDLLANEKQRRDDRRKYRHERRSRKRHRAPRFDNRTASKKPGWLAPSVMNKMFRHADLIDMYAKVLPLTSVALEMGSFDTQELEAIQTGAKLPEGTDYQRGKRYQISTLREAVFYRDGYTCQVCGKSIKDHTVLRVHHAGYWHGDHTDRMGNLVTVCTKCHTAANHKPGGRLYEWRPKVKPMTGAAFMNSVRWKLYEEVEHRFPGVGIHVTYGSHTKVERRALCLPKTHANDAYVMGKFHPTHRAHEVKYQKRRRGTRVLQKFYDAKYIDSRDGTKKSGSQLSCGRTNRSESRHSGRDLRQYRQGKVFKGRVSVRRKRYPWQPGDTAYLDGQRYTVVGTISCGKSVLLDPHRTSVPKRLGLIRKAESWCISSG

SEQ ID NO: 15075 - protein, 343 aa, unidentified
  REGION 1..343: note = Cyanobacteria bacterium UBA12227
  SITE 343: note = misc_feature - Xaa can be any naturally occurring amino acid
MSKPNYVFVVDTNRKPLTPCKPSIARKLLTVGKAKVFRLYPFTIILNKEVVDTPEPLTLKIDPGSKVTGLAILLDSNLIWVESKSNRGQSIKASLESRRALRRGRRNRHTRYRQARFLNRTRSKGWLAPSLQHRVKTTITWVNRLLRCSPIKVVFQELVRFDLQQIENPEISGVEYQQGELAGYEVREYLLNKWDRKCAYCGAKNVPLQIEHIYPKAKGGSNRISNLCLACEPCNIRKGTKDIKVFLAKKPDVLKRVLAQAKHPLKDAAAVNSTRWTLFNQLKETGREISTGSGGLTKFNRTRLELPKTHFFDAACVGDTPELLVLANQPLNIKATGHGSRQX

SEQ ID NO: 15076 - protein, 470 aa, unidentified; identical to SEQ ID NO: 2825
  REGION 1..470: note = Human gut metagenome

SEQ ID NO: 15077 - protein, 512 aa, unidentified; identical to SEQ ID NO: 9909
  REGION 1..512: note = Human gut metagenome

SEQ ID NO: 15078 - protein, 456 aa, unidentified
  REGION 1..456: note = Human gut metagenome
MSTCVCVLSNSGERLMPTFRLGKVRHLLKDGKAKIVKHHPFTIQLLYDSKTNTQPIEICEDVGYNYIGISVKSQSHEYVSAQYDTLQDEKACHDSCRKLRRSRRNRLRYRKPRFDNRKRSEGWLAPSLRHKKELNVNVVKMYCAVMPITHATVEVGSFDTMLVKAIQEGKAIPEGADYQKGPRYNLATLREAVFYRDNYVCKVCGRKATEGAILHVHHMFYWKGRHGNSLSELITVCEKCHTPANHQKGGKLYGFGENVKFADLSGAAFMNTVRWQIVNELYAAFGKDFVTVTYGAMTKEKRIALHLEKSHNNDAYAMGNCHPAHRCEFGHYQKRCRNNRVLEKFYDATYIDTRTGDKAKGKELFNGRISRNHKKDSEDLHKYRSKKVSKGRRSIRRQRYAIQPYDTVRLESKSYITSGCHNKGTRLLIPANGKSKSVAISKVQVVCHAGAWIQII

SEQ ID NO: 15079 - protein, 413 aa, unidentified; identical to SEQ ID NO: 3616
  REGION 1..413: note = Human gut metagenome

SEQ ID NO: 15080 - protein, 430 aa, unidentified
  REGION 1..430: note = Human gut metagenome
MPNKVYVINKHGRPLMPCSPAKARHLLDAGKAKVKKRTPFTIQLVYGSSGYTQEVILGVDAGSKTIGMSASTTKEELLSAEVKPRNDVVDLLSTRREFRRARRNRKTRYRKPRIDNRVRSEHKGWLAPSVEVKIQEHITSIKRVCRILPVSKVVIETAEFDLQLLKAIADGKPVPQGEDYQKGEMYGHYNVRQYVLWRDNYTCQCCGAHATKKKEVRLHVHHLESRKVGGDAPDNQVTLCESCHEKLHKGLIAEKDFKKRKRKSTRDATFMGIMRKTLMQRLCSELPIPVIETRGYITKATREKLLVLPKSHTNDALAIAQGKQGFNVGYLPGIVQINKIYTIRPVRHHNRQLHKATILKGGIRKSNQAGKYVFGYCLFDKVQFNGQDCFIWGRTTGIFTIKTINGKMIKDGISFKKLKPVEKSTSYLIA

SEQ ID NO: 15081 - protein, 462 aa, unidentified
  REGION 1..462: note = Human gut metagenome
MSVLVIGRNGRALMPTNPRKARLLLKKKTASVVCRHPFTIQLLYKTGCATQEGCIGIDTGSQHIGVGITCGDRVILKDEHALRSSMEKRSLLATRTVMRRGRRYRKVRYRKPKWRHHTKRMYFEKANRRGQHWRKVKTTTQSPRLKGWLPPSLQSKCDHHFRIIDRYLKYLPDPITRNLVIEAGRFDMARMNDPTIHGEMYKRGPMYDAENLRAYIFARDNYQCACCKAKAGTTRKADGTTVKLVAHHILFRSRGATDNPKYIISVCDHCHTTKAHQPGGILYSWMENNKKVARGLRDATFMNILRKRLFARYPQAAFTYGNITAADRKQLRLPKSHANDAVAISLFGKEASTVKNICQTMHYKQIRKSKRSLHEAIPRKGRKNPNTKAVRNKKNTTQANGFKLWDSVLADGKKLFICSFTGTSAYLIDKNGCYISQPGKTYKQWPLSKLKRLHPNGNWLMA

SEQ ID NO: 15082 - protein, 416 aa, unidentified
  REGION 1..416: note = Human gut metagenome
MVYVLSQNGQPLMPTVNHAKVRVLLNQRKAKVIKRCPFTIQLQYESTTHTQKINLGIDAGSKTIGVSATTETKVLYESEVALRNDIVELISGRRALRSSRRNRKTRYRKPRFDNRKRPDGWLAPSVRQKIETHITVVENVMKILPVTKIIVETASFDIQKIKNPEIEGVGYQHGEQLDFWNVREYVLFRDGHTCQCCKGKSKDNILNVHHIESRKTGGNAPNNLITLCETCHKAYHKGIITLPKEIHRGVRFRDAAFMGIMRWAFYDRLKELYTPFGVTVVNTYGYITKNTRIEYGLPKEHYVDARCISGNPAAKPLDHYYFQKKVRCHNRQIHKNTILKGGYRKRNQVEYEVKGFRLYDQVLWKGQKCFIFGRRSTGRMDLRLLDGTHVNASVGYKNLKLLSMRKNYLIEQRKAG

SEQ ID NO: 15083 - protein, 543 aa, unidentified
  REGION 1..543: note = Human gut metagenome
PACNHAKASSSQGKHNLLLRQERFIVKEVANMSTVYVLNKDGKPLMPTTRGGHVRHLLKEQKARVVRAKPFTIQLLYETNDVVQPLYLGIDPGRTNIGVAVVKANGTAVFTAHLETRNKEIPKLMQDRKKARRARRTNGRRCRRQRRAKANGTISKKCVKQTTAQNGSVSKRAKDIGVIKRRLPGCEKDVLCIGIKNKETKFTNRTRPEGWLTPTANQLLQTHINLVKKIQKFLPISDVVLEVNKFAFMRLDNPNIQKWQYQQGPLYKKESLESAVSEIQEHHCLFCKKPIDHYHHVVPQHKNGSNTIGNIVGLCAKHHDLVHKDSAWEKKLAQKGTGLYKKYGALGVLNQIIPTLTNELSSLFPKHSFVTNGKSTYDYRAAHGVSKDHWLDAYCIACSVLPSNVCDSNINNHMPYELKQFRRHDRRVLNNENMNRVYTLNNKAVAINRHKAKDQKTVSLEEFRKEHPDDVCKLKVKEHHPTYRNMNRNFPGSVFLVGKQIHVMQGIASSKDGKATKYNDTSATAIAAGKCKFVAKNTGILFV

SEQ ID NO: 15084 - protein, 439 aa, unidentified; identical to SEQ ID NO: 3280
  REGION 1..439: note = Wastewater metagenome

SEQ ID NO: 15085 - protein, 428 aa, unidentified
  REGION 1..428: note = Human metagenome
MLVYVVDKNGQPLMPTHNGAKVRVLLKQKRAKVISKCPFTIKLLYESTNFTQPLTLGIDTGSKYVGSAVINDTTSEILYESQTELRDDIKKKMERRKAFRRSRRNKLRYRPSRFDNRKASKRKNRYTPTLISKFQGHTREIEFIKSILPVTDVVLEVGEFDPQLLQDPTLAFHKWDYAKGELYQQENFKQAAKARDGYKCQRCGKKNCRLEVHHLLPRSRGGSDKLANLITLCSDCHHLAHSSEEQLLAFQKRFGKKSKGALRYATQMNILRSMLQKDYLDAEITYGFITKDVRRIFCLEKSHMVDACCIAGMGSKFHNENSNKYKKKCVPKGNYARTSVKGGRFVFLPSGKISGFKRYDKVLYNNKEYFVTGRMSNGYITLTDIDGNKSQVESVKRSTGEKYLSLAKIKVSLVKKISSAKTCICTSV

SEQ ID NO: 15086 - protein, 512 aa, unidentified
  REGION 1..512: note = Clostridia bacterium
MSTVYVFNKDGKPLMPTTRCGHIRYLLKEKKAQVVASKPFTIQLLYETSDVVQPLYLGIDPGRTNIGVAVVKTDGTAVFTAHLETRNKEIPKLMKKRKDSRRARRTNGRRCRRQRRAKANDTISKKCVKQATAQNGSVSKRAKEIGVIKRHLPGCEKEILCIGIKNKEAKFNNRTRPEGWLTPTANQLLQTHINLVKKIRKFLPISDVVLEINKFAFMQLDNPNIQKWQYQQGPLYQKASLEETVSEMQEHHCLFCKKPIAHYHHVVPQSENGSNTIGNIVGLCTQHHDLVHKDATWQEKLAKKKTGLNKKYGALSVLNQIIPALTKELSSLFPKHFFATNGKSTYDYRAAHGISKDHWLDAYCIACSVLPNDVCDSGINNRMPYELKQFRRHNRRALHKENMSRVYTLNDKAVATNRHKAIKQTTNSLEEFRKNHPDDVCKLKVKEHHPEYRNPKRNFPGCVFLVGKHTHVMQGTSGSHNGKADGYYNTNGNSYSSGKCKFVAKNEGIVFT

SEQ ID NO: 15087 - protein, 379 aa, unidentified
  REGION 1..379: note = Human gut metagenome
MRVFVFNMRGRPLMPCSQRKARLLLRENKAMIYKYHPFTIQLTYTTGETKQDCHIGIDTGSKYIGAAVRSEDKVFWKGEIELRQDIRSNLDTKRIYRRSRRNRKTRYRKPRFLNRKRRDEWLPPSLQSRINHTFHWIDTLSSLVPNPILHIEVGKFDVAKMINPEIHGVDYQHGQTYGFFDERYFVFARDNYTCQCCGKSKNKILNTHHIIYRSNGGTNRVDNLITVCTDCHTSQNHRKGGIFYQWQEQHKKVKQYKEPPFMNTLRKRIFVAYPDAEITYGSETTPKRKAMKLDKTHYNDAIVISGINEIKENPEEWLLIKQFRKKKRSLHEATARKGRKKPNRNQTRNSKNTPYYKGFYLNDKVSVDILQDLRAMRHI

SEQ ID NO: 15088 - protein, 438 aa, unidentified; identical to SEQ ID NO: 4848
  REGION 1..438: note = Human gut metagenome

SEQ ID NO: 15089 - protein, 447 aa, unidentified; identical to SEQ ID NO: 3915
  REGION 1..447: note = Human gut metagenome

SEQ ID NO: 15090 - protein, 462 aa, unidentified; identical to SEQ ID NO: 7335
  REGION 1..462: note = Human gut metagenome

SEQ ID NO: 15091 - protein, 429 aa, Petrotoga sp.; identical to SEQ ID NO: 5336

SEQ ID NO: 15092 - protein, 411 aa, Desulfosporosinus sp.; identical to SEQ ID NO: 8287

SEQ ID NO: 15093 - protein, 428 aa, unidentified
  REGION 1..428: note = Human gut metagenome
LKVFVLNMRGRPLMPCSPAKARHLLKAGKAVVRRRTPFTIQLRIATGETKQSVTLSVDAGAKHVGLSAATEKEEVFASEVELRQDITGLLAARLSLRRERRQRKTRYRAPRFLNRVRSKHKGWLAPSVENRIQAHMSRIDAICELLPVTKIVIETASFDIQKIKHPDVEGTDYQQGDQLGFWNVREYVLFRDGHVCQHCHGHAKDKILNVHHLESRQTGGDAPNNLITLCETCHKAYHAGKIKLKVKRGQSFRAEAFMGIMRWTLLDRVRKAHPDLPVENTYGYLTKNTRITLGLPKTHCVDAYCIARNLKAVRRGVCLHQRQVRKHNRQIHKSTVLSKTLKDGTKIGYRKLNQTPHLVKNFRLFDKVRCLGQTGFIFGRRSSGYFDVRRLDGVKISSCISYRKLTLLEKRGTCLTELRKEDGASSTV

SEQ ID NO: 15094 - protein, 412 aa, unidentified; identical to SEQ ID NO: 4364
  REGION 1..412: note = Lachnospiraceae bacterium

SEQ ID NO: 15095 - protein, 418 aa, unidentified
  REGION 1..418: note = Human oral metagenome
MLNNQKEYSFVLDAEGKKLDPTIVQNAWRLVRQKKATLIAKRPMTIQLKKVIDSPNDDEIRMGIDDGAKHVGLALVQKCKTKNKVIFVATMEHRNDVHKKMEQRKNYRRYRRYWKRYRKARFSNRTSARRKGRVAPSILQKRQAVVRITDSLSKYIRIDSIYLEDVAIDVRVLTDEKRLYSWQYQQSNRLDENLRKATILRDNCKCQLCGKRNCRLEVHHITPRRMNGANTIGNLITLCSECHSNVTGREIEFAEQLYSKIGKKKNNVSLQYASHVMVGKTWLREELSKLVPVFLTTGGDTANKRIDWNLEKSHEIDAVCITNLEPESVGVKSWNVKPLRHQRKTMKVKEILGFRHRDIVCYTFKNGEYHEGYVTALYPSEGKQKEGLNFLSPTKHCKRVNPKKCQRLDRPDKFLWLV

SEQ ID NO: 15096 - protein, 438 aa, Streptomyces sp.
VGHGRGETGAVRTRTRRRHARRLDPGSKATGIAVTDERDEVGAKGRTALVRRGLVSIELRHRGRQIHSGMVRRAGHRRRRRSANLRYRAPRRDNRTRPDGWLPPSLRHRIDSTMSLVARLCRYAPVLEIHVEQVAFDTALIAAAVSSREQDFSERTHAGSEIREFLLAKWERSCAYCGATGVLLNIEHVRPRSRGGSDRVANLVIACVPCNQAKGAARIDGFLADRPARLERVIAQLRRPLHDVAAMNTTRLLLVKTLATHGVAVHTWSGGRTSWNRLAMGLPKSHTLDALATGVIDLERGDAVVRIPAQILVVRSTGRGSYARTTPDRYGFPRLQRPRRKVHHGFSTGDLVAAVVPKGKWAGRWVGRVSVRAGGQHRITTLTSRFDVSHRNLRLLQRADGYTYGFADEIRLSEEHGPAYSGRTLKGGDPGNVRTPDA

SEQ ID NO: 15097 - protein, 544 aa, unidentified
  REGION 1..544: note = Human gut metagenome
MKQKKQKVMVYILNKKGKPLMPTTRCGHVRKLLNSKKAVVVNSNPFTIRLKYDTPNGVQDVFAGIDSGRENIGSGASNEDGDCLYLGELKTSNKSIKLKMTERAGFRKERRRHDRQNKQRKARKDHTEIQNGKDDICRATISCKSVQISYPTAEESVTHKIIRGKEGKFANRHRDGDWITPSARQLVQMHMNDLKSICKILPISHVTLERVAFDFQKLENENIKAWEYGKGKLYGYDSPEEYIHDVQDGKCLVCGKPHIDYLHHIIPRSKGGSDKVSNIAGLCYDCHYGPIGVHNCQDTQDRLPELKNEVNKQYKVSLLNSVMPVLIEEIDKFCKANSIMFSICEGHDTAKVRDMYDLQKDHCIDGFAISLVDRNVKSVDVMPDRIYQKQRYKKKSKNIIQKRNCREYYDGKKLVAVNRHKGTDQKADSLEEYMNTYAETHTADECKMHFESLTVKPARRTYTFHKEGRICPLHIGDKVRYEKKNKIKGNTKVDTFICEGIYFSKDENKAEVEHNKTKSKKMKFCRTIESGCIPYIDYRKLALI

SEQ ID NO: 15098 - protein, 406 aa, unidentified; identical to SEQ ID NO: 11207
  REGION 1..406: note = Human gut metagenome

SEQ ID NO: 15099 - protein, 407 aa, unidentified
  REGION 1..407: note = Human gut metagenome
TNGRRCRRQRRAKANGTISKKCVKQATAQNGSVSKRANEIGVIKRHLPGCEKNVLCIGIKNKEAKFSNRTRPEGWLTPTANQLLQTHVNLVKKIQKFLPISDVVLEVNKFAFMRLDNPNVQKWQYQQGPLYQKASLEEAVSEMQEHHCLFCKNTIDHYHHVVPQHKNGSNTIGNIVGLCAKHHDLVHKDTSWQEKLAKKKTGLNKRYGALSVLNQIIPALTKELSSLFPKHFFATNGKSTYDYRAAHGVSKDHWLDAYCIAGSVLPNDACDNNINNRVPYELKQFRRHDRRALHKENMSRVYTLNGKSVATNRHKAIKQTTDSLEEFRQRQPNDVCKLKVKEHHPEYRNPKRNFPGCVFLVGKHTHVMQGTSGSHNGKADGYYDTNGNSYSSGKCKFVVKNEGIVFT

SEQ ID NO: 15100 - protein, 462 aa, unidentified
  REGION 1..462: note = Human gut metagenome
MSVLVIGLNGIPLMPTTERKARILLKDSKAFVVSRHPFAIRLLYKTGCAVQVGQLGVDTGSQNIGIGVVCGNRVILKEEHQLRASMEKRSLIESCASFRRNRRYRKTRYRHPKWKHHTKRVFSEQPDKKGRHWHKADASYQSSRKEGWLPPSLQSKCDHHIRIINRYIRFLPKCISDNLIIEAGRFDMARMQDPTVRGELYQKGPMYEAENLKAYIFTRDNYTCQCCGAKAGTARKDGTVVKLIAHHVLFRSRGATDNPKYMASVCTACHTAKAHEPGGILYEWMVKQKKFTRGLRDAAFMNILRKRLFAAFPDAIFTYGNITSADRKCLRMEKTHVNDAVAVACYGKEISRLRDNSRKVTCYKQVRRTKRSLHEAAPRKGRKTPNRIAARNNKNVVSVKGFRLWDTVLADGRKLYLTGFSGSSAYLVDKDGQYISPPGKMYRQWTLSKLTRLHPNGGWLMR

SEQ ID NO: 15101 - protein, 427 aa, Enterococcus sp.; identical to SEQ ID NO: 2410

SEQ ID NO: 15102 - protein, 518 aa, Anaerostipes sp.; identical to SEQ ID NO: 3878

SEQ ID NO: 15103 - protein, 475 aa, unidentified; identical to SEQ ID NO: 5744
  REGION 1..475: note = Human gut metagenome

SEQ ID NO: 15104 - protein, 415 aa, unidentified; identical to SEQ ID NO: 6534
  REGION 1..415: note = Human gut metagenome

SEQ ID NO: 15105 - protein, 413 aa, unidentified
  REGION 1..413: note = Human gut metagenome
MPNKVYVINKHGRPLMPCSPAKARHLLDAGKAKVKKRTPFTIQLLFGSTGYTQEVILGVDAGSKTIGLSASAETEELLSAEVKPRNDVVDLLSTHREFRRARRNRKTRYRKPRFDNRVRSKHKGWLAPSVEVKIQEHITSIKRVCRILPVSKVVIETAEFDLQLLKAIADGKPVPQGEDYQKGEMYGHYNVRQYVLWRDDYTCQCCGAHATKKKEVRLHVHHLESRKVGGDAPDNQVTLCESCHEKLHKGLITAKDFKKRKRRSTRDATFMGIMRKTLMQMLCSELPIPVVKTRGYITKATREKLLVLPKSHTNDALAIAQGKRGFNVGYLPEIAQIDKICTIRPVRHHNRQLHKAAILTGGIRKSNQAEKYVFGYRLFDKVQFNGQDCFIWGRRTSGIGNDGRYNKKRRKAE

SEQ ID NO: 15106 - protein, 431 aa, unidentified
  REGION 1..431: note = Human gut metagenome
MPNKVYVINKHGRPLMPCSPAKARHLLDEGKAKVKKRTPFTIQLVYGSSGYTQEVILGVDAGSKTIGMSVSTTKEELLSAEVKPRNDVVDLLSTRREFRRARRNRKTRYRKPRFDNRVRSKHKGWLAPSVEVKIQEHITSIKRVCRILPVSKVVIETAEFDLQLLKAIADGKPVPQGEDYQQGEMYGHYNVRQYVLWRDNYTCQCCGAHATKKKEVRLHVHHLESRKVGGDAPDNQVTLCESCHEKLHKGLIAEKDFKKRKRRSTRDATFMGIMRKTLMQMLCSELPIPVVKTRGYITKATREKLLVLPKSHTNDALAIAQGKQGFNVGYLPGIIQTDKIYTIRPVRHHNRQLYKAAILKGGIRKSNQAEKYVFGYCLFDKVQFNGQDCFIWGRRTTGIFTIKTINGKMIKDGISFKKLKPVEKSTGYLIA

SEQ ID NO: 15107 - protein, 457 aa, unidentified
  REGION 1..457: note = Human gut metagenome
VWLYQAVYNLGEGFLPSSEERTAFYWLLIYRKEHGIMQYVYVLNKHGEPLMPCSPGKARLLLKQQKACVVKRTPFTIKLLYGSAGYKQPITLGVDAGSKHVGLSASTEKRELYREEFTPRNDVVDLLSTRRQNRRSRRNRKTRYRAPRFDNRVHSKHKGWLAPSVEVKIQEHITVIKRICRILPITLVRVETAEFDTQRLKAMLKGKPLPVGTDYQLGEMYDEYNVRQYVLKRDNYTCQCCGAHPTEKKPVRLHVHHLESRHVGGNAPNNLITLCVACHKALHEGKITLDKGKKRGKPLRDAAFMGIMRNTLLARLKDELSIPVKQTYGYITKLLREKNKIPKSHVNDARCIAKAPNAKPCDTMLYTRALRHHNRQIHKAKILNGGIRKKNQAPYLVKGFRLWDKVRYNGEECFITGRRSSGYFDHKKYDGTVISNSASYKKLMLLEAATNYITERS

SEQ ID NO: 15108 - protein, 428 aa, unidentified; identical to SEQ ID NO: 5036
  REGION 1..428: note = Human gut metagenome

SEQ ID NO: 15109 - protein, 427 aa, unidentified; identical to SEQ ID NO: 4946
  REGION 1..427: note = Sutterellaceae bacterium

SEQ ID NO: 15110 - protein, 396 aa, unidentified
  REGION 1..396: note = Human gut metagenome
LRVLVWNKRGKPLMPCSPAKARLLLKEKKAIVVRRTPFTIQLTIATGESKQPVSLGVDAGYKHVGLSASTEKAELYASEVELRQDITDLLSARRALRQSRRNRKTRYRAPRFDNRIRTKRKGWLAPSVENRINAHLSRIETVIRLLPVTKISVETTSFDMQLLKNSDIAGKEYQESEQLGFWNVREYVLFRDGHVCQHCHGRSKDPVLNVHHLESRRTGGDSPGNLITLCETCHKELHRGEITLKAKRGQSFRAETFMGIMRWEVLDRLKASHPKLEVQNTYGYRTKHARIVNGIAKSHCADAFCIAGNLGAERLGEFLFQKQTRRNNRQIHKLSILKGGIRKRNQVPFEVKGFRLFDKVACKGEEGFIFGRRSSGYFDVRKLDGTRISAGIGYKK

SEQ ID NO: 15111 - protein, 472 aa, unidentified; identical to SEQ ID NO: 14259
  REGION 1..472: note = Human gut metagenome

SEQ ID NO: 15112 - protein, 418 aa, unidentified
  REGION 1..418: note = Human gut metagenome
MPCSPAKARLLLKEKKAIVKRRTPFTIQLTIATGEAKQPVSLGIDAGYKHVGLPASTEKAELYASEVELRQDITDLLSARRALRQSRRNRKTRYRAPRFDNRIRTKRKGWLAPSVENRINAHLSRIEAVLRLLPVTKITVETASFDLQLLKNPDISGKEYQEGEQLGFWNIREYVLCRDGHVCQHCYGRSKDPVLNVHHLESRRTGGDSPGNLITLCETCHKALHRGEITLKAKRGQSFRAEAFMGIMRWEVHNRLRALHPGIEVSNTYGYRTKHARIANGIAKSHCADAFCIAGNLGAERLCEFFFQKQTRRNNRQIHKLSILKGGIRKRNQAPFEVKGFRLFDKVACQGEEGFIFGRRSSGFFDVRKLDGTRISAGISCKKLHLLEKRRTYLTEIRKEEALPPLPEGRGSAPKCDE

SEQ ID NO: 15113 - protein, 434 aa, unidentified
  REGION 1..434: note = Lachnospiraceae bacterium
MKVFVLNKHGNPLMPCNPRKARLLLKQQKAVVVKQMPFTIRLLYGSSGYKQPVSLGMDAGSKHVGIAAATEKEVLFAEELVPRNDVVNLISMRRQNRSSRRSRKTRYRKVRFDNRVHSKHKGWLAPSVEVKIQEHITAIKHVQQILPVTEIHVETAEFDTQRMKAMEEGKPLPVGIDYQLGEMYDSYNVRQYVLKRDNYTCQCYGKHGDGVKLHVHHLETRKTGGNAPGNLITLCEDCHKAIHAGTKALPARKAKRSTKSLRDAAFMGNMRKTLLESLRAQLGVPVTGTYGYITKLYRDLYHIEKSHINDAIVISKYFTAVPDDVWYFAKAVRRHNRQIHKSKILKGGIRKRNQAPHVVKGCRLFDSVKYAGNTYFVFARRASGGMGIRTLDGAKVNNGWLSYRKFNVQYCNAGALLERRKAIPPMDKFMGFLA

SEQ ID NO: 15114 - protein, 461 aa, unidentified; identical to SEQ ID NO: 6342
  REGION 1..461: note = Human metagenome

SEQ ID NO: 15115 - protein, 443 aa, Anoxybacillus sp.
MVEENMTCFMQRKGENPMVFVLDTNKRPLAPCHEAVARKLLKQGKAAIYRRFPFTIILKKSVDESEIKATYRLKIDYGSRHTGLAILRGQEVVWLGQLDHRTDIKERIDKRRAFRRARRNRKTRYRKPRFLNRKRKEGWLPSSLESRVQNIQTWVNRLKKLCPIGYISYENAKFDTQLMRNPEINGVEYQQGTLQGYEVREYLLEKFGRKCCYCGKENVPLEVEHIIPKSRGGTDRVDNLCLACHDCNQRKGSKTAEEFGYPHIQKQVKESLKDASAINSTRWKAYEVLKQTGLDVECGTGARTKMNRIRLDLPKTHYFDACCVGESTTNHLYFKTKEVLFIKAKGRGSRSRTNLDRYGFPRGYLARQKFFFGFQTGDMVKAVIPRGKYQGVWFGEVACRKTGSFDIKGKDGKRIAQGINYRYVQVIQRFDGYAYGKGVAELA

SEQ ID NO: 15116 - protein, 427 aa, Parasutterella sp.; identical to SEQ ID NO: 6030

SEQ ID NO: 15117 - protein, 379 aa, Arthrospira sp.; identical to SEQ ID NO: 2727

SEQ ID NO: 15118 - protein, 456 aa, unidentified; identical to SEQ ID NO: 8380
  REGION 1..456: note = Terrestrial metagenome

SEQ ID NO: 15119 - protein, 512 aa, unidentified
  REGION 1..512: note = Human gut metagenome
MSTVYVLNKDGKPLMPTTRGGHVRHLLKEQKARVVRAKPFTIQLLYETNDVVQPLYLGIDPGRTNIGVAVVKANGTAVFTAHLETRNKEIPKLMKKRKESRRARRTNGRRCRRQRRAKANGTISKKCVKNDTAQNGSVSKRAKEIGVIKRHLPGCEKDVLCIGIKNKEAKFSNRTRPEGWLTPTANQLLQTHINLVKKIQKFLPISDVVLEINKFAFMRLDNPNVQKWQYQQGPLYQKANLEETVSEMQEHHCLFCKKKIDHYHHVVPQHKNGSNTIGNIVGLCAKHHDLVHKDSAWEKKLAKKSTGLYKKYGALGVLNQIIPTLTNELSSLFPKHSFVTNGKSTYDYRAAHGVSKDHWLDAYCIACSVLPSNVCDSNINNHMPYVLKQFRRHDRRVLNNENMNRVYTLNNKAVAINRHKAKDQKTVSLEEFRKEHPDDVCKLKVKEHHPTYRNMNRNFPGSVFLVGKQIHVMQGIASSKDGKATKYNDTSATAIAAGKCKFVAKNTGILFV

SEQ ID NO: 15120 - protein, 434 aa, Moorena sp.
MVYVINFEGKPLMPTTNAKARKLLNQKKATVKKVNPFIIQLLYKTDTEYIQTITLGIDSGYLNIGFSAITDSKELIVGEVKLLQGMKDRLLEKSQYRRIRRQRLRYRKPRWNNRKIRQGWLAPSLQHKLDTHVKFIDYLNTILPIRNIVLEVANFDIQKIKNPDISGVEYQQGEQMDFWNVREYVLHRDGHKCQNPNCKNKSKEQILEIHHIKYKSEGGSDAPSNLITLCNKCHTSPNHKKGKFLYDWCEKGKKVRGFRDATFMSMIRWYLLEQLKEKYTNIKATYGYLTKNHRIEHGIEKSHFNDAFAIAKGVNQVRNLEIFKVEQSRLNNRSLEKFYDAKYIDNRTGEKVSASELNCGRRTRNKNLNSENLRMFRGQKISKGQRRIRKQKSLYQPNDLIKYNGNVYTVKGSQNEGKYIALKRNQKSTKCKTN

SEQ ID NO: 15121 - protein, 281 aa, Moorena sp.; identical to SEQ ID NO: 2941

SEQ ID NO: 15122 - protein, 452 aa, unidentified; identical to SEQ ID NO: 3042
  REGION 1..452: note = uncultured beta proteobacterium

SEQ ID NO: 15123 - protein, 397 aa, unidentified
  REGION 1..397: note = Human gut metagenome
IVKRRTPFTIQLTIATGESKQPVTLGVDAGYKHVGLSASTEKAELYASEVELRQDVSDLLSARRALRQSRRNRKTRYRAPRFNNRLRTKRKGWLAPSVENRINAHLSRIEAVLRLLPVTKISVETASFDMQLLKNPDIAGKEYPEGEQLGFWNVREYVLFRDRHVCQHCYGRSKDPVLNVHHLESRRTGGDSPGNLITLCETCHKALHRGDITLKAKRGKSFRAEAFMGIMRWEVHNRLRALHPGIEVSNTYGYRTKHARIANGIAKSHCADAFCIAGNLGAERLCEFFFQKQTRRNNRQIHKLSILKGGIRKRNQAPFEVKGFRLFDKVACQGEEGFIFGRRSSGFFDVRKLDGTRISAGISCKKLHLLEKRRTYLTEIRKEEALPPLPEGRGLRA

SEQ ID NO: 15124 - protein, 443 aa, Anoxybacillus sp.
MVEENMTCFMQRKGENPMVFVLDTNKRPLAPCHEAVARKLLKQGKAAIYRRFPFTIILKKSVDESEIKATYRLKIDYGSRHTGLAILRGQEVVWLGQLDHRTDIKERIDKRRAFRRARRNRKTRYRKPRFLNRKRKEGWLPPSLESRMQNIKTWVERLRKICPIEHISYENAKFDTQLMRNPEINGVEYQQGTLQGYEVREYLLEKFGRKCCYCGKENVPLEVEHIIPKSRGGTDRIDNLCLACRDCNQRKGSQTAEEFGYPHIQEMVKKTLKDASVVNATRWKVYEVLKQSGCEVECGTGARTKMNRIRLGLPKIHYFDACCVGKSTPLQLHFKTKEVLFIKAKGRGSRSRTNLDRYGFPRGYLARQKYFFGFQTGDMVKANVPKGKYQGVWFGEVACRKTGSFDIKGKDGKRIAQGINYRYVQVIQRFDGYAYGKGVAELA

SEQ ID NO: 15125 - protein, 439 aa, unidentified
  REGION 1..439: note = Human metagenome
MVFVLDKSKKPLNMISHAKARILLKNRLAVVHKIYPFTIRLKDNSCVSQDRAYTVKVDPGSKHTGIAIVDDKASVVMLAKIEHRGHVIKKSLDSRRMVRRSRRNRKTRYREARFLNRTKPQGWIAPSVKSRTDNVINFIKKYKKLLNINKVMIENVSFDTAQMTSDVNLVGTAYQQGPLYQQKLRSFIFSRSDGKCVYCGAVATEIDHVIPRAKGGTNSVYNLAASCKACNEKKSNQTLKDFGKLVGKDFSKLTPKKLPRDAAIVQSAKNYMVREISKLVSDTTLHDAWLTKYNRDELGLPKEHYYDALSVGNVQDYKFFVDKVLQISAKGRGSRQMCRVNKYGFPRTSAKVSKSVRGFQTGDMVKAIVPSGLKQGVYLGKVAVRSTGQFDIQTKTKTIEGIWHKHFHIIQRGDGYLYSYKSNDLTLQAKLSKKAKNPS

SEQ ID NO: 15126 - protein, 420 aa, unidentified
  REGION 1..420: note = Human gut metagenome
MQYAYVLNKRGEPLMPCSPGEARLLLKQQKACVVKRTPFTIKLLFGSAGYKQPITLGVDADSKHVGLSASTEKRELYSEEFTPRSDVVELLSTRRQNRRSRRNRKTRYRAPRFNNRVHSKHKGWLAPSVEVKIQEHITVIKRICRILPVTLVRVETAEFDTQRLKAMLAGKPLPVGTDYQLGEMYDEYNVRQYVLKRDNYTCQCCGAHTTAKKAVKLHVHHLESRKVGGNAPSNLITLCTTCHNNLHKGKITLDGKKRGKTLRDAAFMGIMRNTLLTRLRNELNIPVQNTYGYITKLLREQNDIKKSHVNDARCISKHPLAKPCSVCYRTKAIRHHNRQIHKAKILKGGIRKANQAPYIVKGFRLWDKVLYNEQECFISGRRSSGYFALRKFDGTTITNSISFKKLRLLEPATNYLIERK

SEQ ID NO: 15127 - protein, 391 aa, unidentified
  REGION 1..391: note = Human gut metagenome
MVRLGDCLKTKKAVVVNLCPFTIKLMYVTSDYKQEIVLGVDAGTKHVGLSATTKSKELYSSEVILRNDIVDLLSTRRELRRSRRNRLRYRKPRFDNRIKSKRPGWVAPSVKYKVDAHIRVIDNVCSILPISRIVIEVAQFDTQKINNPNISGKEYQEGDQLGFWNVREYVLARDGHKCQHCKGKSKDPVLNVHHIESRKTGGDSPSNLITLCETCHKEYHKGNIDLKIKRGSSLRDAAVMGIMKWRLYEELKSKYDNISMTFGYVTKYNRIKHGIEKSHVFDAFVISKNFDAIRLGYYYKVRLVRRHNRQIHKQKIPKGGIKRPNQSPFEVFGFRLFDRVMFENSYYFIFVRRKTGSFNIRDIDGKNQRDITYKKLKLSRCKRFMVQKEMD

SEQ ID NO: 15128 - protein, 518 aa, unidentified
  REGION 1..518: note = Human gut metagenome
MTPKKRKEASRMSEYIYVIGVDGDPQMPTKRKRHVEQLLQTGRARIFRQVPFTIQLTYENEPVLQPVTIAEDPGRSNIGMAVVSLSGELLSAAVVQTRNKEIAKLMEKRKQHRRASRNGERRARQRLAKKYHTMITAGFLMRKLPMYGKDKRVRCNVIKNTESRFCNRKRENGWLTPSAEHLVRTHINLIHKMQKFLPITDVAIEINRFAFLSLEDTSISGVDFQNGPLKGYDDLNAAVEDLQDGHCLMCNSPIEHRHHIVPRSMQGSNTIGNIAGLCCKCHERVHKDTRFEDRLKKKKAGLDKRYAAVSVLNQAIPFICKRLEQEFEKEHVHYCSGRDTGMVRRPFGYHKTKEEQLHEVDAWCIAVLALQHVPEKAPEFDHVHEILQFRRQDRSRIKAQTSRAYYHEGKKIAKNRKKAEGQRDDSLQEWRKRQVERYGKEQTRKMISQLEVKESIRRYNRLDRLMPGAVFYYQGVRYVMRGQHSNGQYLQAVGMGSKDFPAKKCKIVANNEGLVFVS

SEQ ID NO: 15129 - protein, 406 aa, unidentified; identical to SEQ ID NO: 2752
  REGION 1..406: note = Human gut metagenome

SEQ ID NO: 15130 - protein, 410 aa, Bacillus sp.; identical to SEQ ID NO: 12386

SEQ ID NO: 15131 - protein, 480 aa, unidentified; identical to SEQ ID NO: 2726
  REGION 1..480: note = Human gut metagenome

SEQ ID NO: 15132 - protein, 425 aa, unidentified; identical to SEQ ID NO: 5427
  REGION 1..425: note = Human gut metagenome

SEQ ID NO: 15133 - protein, 413 aa, Blautia sp.; identical to SEQ ID NO: 10403

SEQ ID NO: 15134 - protein, 428 aa, Moorena sp.
MVYVSDKDGQPLMPTKRYGKVRHLLKEGKAKVVRCMPFTIQLLYDSGEHTQPVDLGVDAGSKYIGLSACSDKAELFAAEVEPRDDISKNLTSRKESRRTRRSRKTRYREPRFDNRTHHKKEGWLAPSVKCRCETHLTAIRKVMSLLPVSGITIEMAPFDTQKLKADIFDMKAPSGTDYQHGESEGYDNIKAYVRWRDGYKCAVCGREHIPLQVHHKKQRKDGGSNMPANLITVCVDCHKAYHAGLLPDGQAAVMQPDTDVKPMRDAAFMNIMRWAVWDRLKELGLPLHMSFGYITARQREKYGIEKSHHADARCISGHGDLPPAGEWFFCKKVRCHNRQIHKKNPGAGGYRKLAQQGHVIKGFKLNDTVLFGGKEWFIHGRREKGAFVLEDLDGNRIERAPSKLKFMHPNGTLLIERRKLIQGGSSHD

SEQ ID NO: 15135 - protein, 456 aa, unidentified; identical to SEQ ID NO: 3956
  REGION 1..456: note = Human gut metagenome

SEQ ID NO: 15136 - protein, 460 aa, Moorena sp.
MPPENLVEATITLETGGSQEQTKERLVMSKVFVLDTDRRPLDPVHPGKARILLTQGKAAVFKRYPFTIILKVAIEKPGIHPFRLKIDPGSQTSGLALVNDTTGEIVFAAELAHRGDAIKKALAQRRAVRRGRRQRKTRYRKPRFANRRQKGGWIAPSLESRVANVLTWTKRLLRLCPISAISLELVKFDLQQMDHPEISGMEYQQGTLFGYELRQYLLEKWNRACSYCGAQHIALQVEHIQAKSNGGTDRVSNLCLACDSCNKAKGTQDIRVFLAEKPDLLAHILAQAKAPLKDAAAVNTTRWVLYEQLKALELPVECGSGGLTKFNRTVRNLPKEHWLDAACVGKSTPLQLKAAGVIPLLITATGHASRQKCNINEIGFPCSKPKAAKKVKGFQTGDIVRAVVTTGTKQGVYVGRVLVRASGSFDLRTRQGLVQGIGHRFCTLVHRCDGYSYQKGVPYA

SEQ ID NO: 15137 - protein, 419 aa, Anoxybacillus sp.
LFVYVINKHGNPLMPCSPRKARILLKNKKAKVVKRTPFTIQLLYGCSGYKQPISLGVDAGTKHVGLSATTKNQVLLEAEVQLRTDIQELLATRRQFRRSRRNRKTRYRKARFLNRKKPNGWLAPSIQHKMDSHIKLVKWVHSMLPITHITVEVAQFDTQKIKNPDIQGAAYQQGEQLGFWNVREYVLYRDGHTCQWCKGKSKDPVLNVHHMESRKTGGDSPSNLITLCKTCHDRIHREGLEHEIQRRFSSLKDASHMTAMRWFIWNGLKKVYPHVKHTYGYITKHTRIVHGLAKTHMVDARCISENPLATPSDTVFLLKFVRKNNRQLHKATISKGGKRKANKAERFIKGFQLFDKVLYNSQECFVFGRRSSGYFDLRLLDGTRIHASASYKKLKKVEHASTLLIERRKGDSSPTFALA

SEQ ID NO: 15138 - protein, 423 aa, Nostoc sp.
MSNFVFVLDTDRRPLNLTHPGAARHLLNTGKAAVFRRYPFTIILKEACPDVPVQDLELKLDPGSKVTGIAIKQGNKVIFGAELQHRGQQIKNALLSRRQLRRSRRNRKTRYRQARFLNRTRPDGWLAPSLQHRVDTILTWVNRLHRLAPISSITQELVRFDPQLMQNSEISGVQYQQGELQGYEVREYLLEKWNRRCAYCSIENVPFEIEHIQPKSRGGSDRVSNLTIACHACNQSKGNQDIRDFLSDKPDLLNRILKQAKSPLKDAAAVNSTRWALFHALKETGLLVTTGTGGQTKFNRTRLYLPKSHWLDAACVGQVESLEVLTSNPLLITTKGHGTRQMCGTDKFGFPNRHRTNQKSWFGFQTGDLVRAVVASGKFAGRWVGRISVRSRPSFKLASSKIFDVHPRYLQVIHRADGYSYTA

SEQ ID NO: 15139 - protein, 269 aa, unidentified
  REGION 1..269: note = Human gut metagenome
MVYVLDKNGQPLMPTDRHRKVRLMLQSGQAKVIKRCPFTIQLNYDSGHQTQEISLGIDAGSKHIGVSTTTKIKVLYEVDVELRNDIVDLLSSRRELRRGRRNRKTRYRQAKFNNRRLGNGWLPPSIRQKIGTHLTVVENICKMLPISRIMVETASFDIQKIKNTDIQGAEYQQGDQLGFWNIREYVLFRDNHTCQCCKGKSKDKILNVHHIESRKTGGNAPNNLITLCEICHTVVIIKVPYSYRRPSNAVCDLRMLHLWELCDGLSTKH

SEQ ID NO: 15140 - protein, 442 aa, unidentified; identical to SEQ ID NO: 2903
  REGION 1..442: note = Human gut metagenome

SEQ ID NO: 15141 - protein, 406 aa, unidentified
  REGION 1..406: note = Human gut metagenome
MVYVQDIDGKPMMPTTRHGKVRRLLKAKKATVVNLCPFTIQLTYKSTDHKQPVTLGIDAGAKHIGFSATTEKEELFACETTLRTDIVDLLSMRLQNRRTRRSRLRYRKSRFNNRGSSKKKGWVAPSVKQRIDSHLNEVNEIHKILPITKIVIEVAQFDTQKMKNHDISGADYQNGEQLGFWNVREYVLFRDGHKCSHCKGKSKDPVLNVHHLESRKTGGDSPSNLITLCESCHKAFHKGEIELKKKRGKSLRDAAVMGIMKWKLYEELKSRYDNVSMTFGYITKYNRIKYGIEKSHTSDAFVISRNFNAKRIERQYLKRLIRRHNRQIHKMKILKGGKKKNNQAPFEVFGFRLFDKVLYNNEIFFVYGRRKSGNFNIRDFNGENPKDVSHKKFKLIRGKRHPIILK

SEQ ID NO: 15142 - protein, 431 aa, unidentified
  REGION 1..431: note = Human gut metagenome
MDAWDIIVVLNKRGKPLMPCSPAKARLLLKEKKAIVKRRTPFTIQLTIATGESKQPVTLGVDAGYKHVGLSASTEKAELYASEVELRQDVSDLLSARRALRQSRRNRKTRYRAPRFNNRLRTKRKGWLAPSVENRINAHLSRIEAVLRLLPVTKITVETASFDMQLLKNPDIAGKEYQEGEQLGFWNVREYVLFRDRHVCQHCYGRSKDPVLNVHHLESRRTGGDSPDNLITLCETCHKALHRGDITLKAKRGKSFRAEAFMGIMRWEVHNRLRALHPGIEVSNTYGYRTKHARIANGIAKSHCADAFCIAGNLGAERLCEFFFQKQTRRNNRQIHKLSILKGGIRKRNQAPFEVKGFRLFDKVACQGEEGFIFGRRSSGYFDVRKLDGTCISAGISYKKLHLLEKRRTYLTEIRKEEALPPLPEGRGLRA

SEQ ID NO: 15143 - protein, 417 aa, unidentified
  REGION 1..417: note = Human gut metagenome
MPCSPAKARLLLKERKAIVKRRTPFTIQLTIATGEAKQPVTLGVDSGYKHIGLSATTEKAELYASEVELRQDITDLLSARLALRRSRRSRKTRYRVPRFDNRVASKRKGRLAPSVENRITAHMSRVEAVMRVLPVTAITVETAAFDTQLLKNPDITGAAYQQGEQLRFWNVREYVLFRDGHVCQHCRGKSKDPILNVHHIESRRTGGDAPNNLITLCETCHKAFHRGEIKLKVRRGKSFKAETFMGIMRRTLFERLKKAHPELNVRNTYGYLTKHKRISYGIAKSHCADAYCIADNLGAKRLEGFFFQKQTRKHNRQIHKLLILKGGLKKKNQAPYEVKGLRLFDKVICKGEEAFIFGRRTSGSFDVRRLDGTRISAGINYKKLRLLEPRTTYLTEFRKEAALPPLHKCRGVCAEFL

SEQ ID NO: 15144 - protein, 392 aa, Moorena sp.
  SITE 85: note = misc_feature - Xaa can be any naturally occurring amino acid
LRSSWAKFTTSRASNKNWTPAVRSVIAVAAATPATASSGSTTGTPKSAPLAARTPNMAAVTAGPAAKPKTSPTTATEIPGCRHRXVLAKLRKLLPITSVSSEHVKFDTQLLQNPDIQGVEYQQGTLFGYEVREYLLERDGHTCRYCSNLSNDPVLEVEHKIPKSRGGSNSIKNLVMACHTCNEKKDDLTPEEWLTALKGKDGPSAVNQKRIANLDEIVKNKVVPLKDAAMMNATRWKLYRKLQETGLPVECGTGTRTKKQRIDHGLPKEHYYDACCVGESTPERLEIATHYVEVWSAKGRGTRKMCNTDKFGFPISHRTRQKQFFGFQTGDLVKATVPKGKYTGIWTGRVMVRAKGNFDIKDASGNRMTISHRYIQLLQRNDGWQYEKTKIS

SEQ ID NO: 15145 - protein, 427 aa, unidentified; identical to SEQ ID NO: 6307
  REGION 1..427: note = Human gut metagenome

SEQ ID NO: 15146 - protein, 415 aa, Bacillus sp.
MRVFVKNLRGEPLMSCSPRKARLLLKQGKAKIVGYTPFTIQLQYATGETVQPVTIGIDSGAKYVGIAITTQERVLAKGTIALRQDVKENLILRATLRRGRRQRKTRYRKARFLNRKKKEGWLPPSIQSRIDNVIHWIEKFKSLVPSPKVIVEVGKFDAQKLKNPDIQGTKYQQGDTFGFWNTRYYVFARDQYTCQICKKKGGILHTHHIIERCNGGSDMADNLVTVHEECHQKFHQGKIKHNFKKPKQYKETAFMNILRLQIMNRLDCEITYGSCTTPKRKELGLAKTHANDAISITNPIQLQEYDQSGEFFIKQFRKKKRSLHEATARKGRKTKNTSAKRNNKNTPHVDQIYLGDKVKVFGQVGFVTGFTGKMVYVQDIHGHYVQNPDKSYKQVKISDIERIHHTNNWQFLEIS

SEQ ID NO: 15147 - protein, 423 aa, unidentified
  REGION 1..423: note = Microcoleaceae bacterium UBA11344
MSNLVFVLDTKKKPLTPCKPSRDHKLLTAGKAAVFRRYPFTIILKKAVTATPKLITLKLDPGSQTTGIALVQDDQVIFGAELSHRGQTIKASLESRSELRRSRRNRHTRYRQARFLNRTRTKGWLAPSLQHRVETTLTWVNKLIRFAPIGSIVQELVRFDLQQLENPEISGIEYQQGELAGYEVREYLLNKWDRKCAYCSVENVPLQIEHIHPKAKGGSDRISNLCLACEKCNLKKGTQDVEQFLAKKPDVLKCILAQAKRPLKDAAAVNSTRWALFNRLKETGLSVSTGSGGLTKFNRTRLKLPKTHWIDAACVGQIESLSVLTNKPLLIKTTGYGTRQMCRTDKFGFPSRYVPRLKFVKGFQTGDIVRATVTSGKKIGTYVGRVAVRSSGSFNISADTLVQGINFKYCKTIHQKDGYNYAF

SEQ ID NO: 15148 - protein, 476 aa, unidentified
  REGION 1..476: note = Human gut metagenome
LAASGTEGVSHPGLPGKYKHKGGQLMSVAVISKTGERLMPTSEYRARKLLKSGKAIKHSYHPFTIQLTERETGDIQPIELCMDTGYIHIGISVKSEKHEYLAEQIDTLTDERGRHDACRMYRRQRRSRKRYRQARFNNRKRDQGWIAPSLEHKKKIHIQAISRINNVMPITDITLEMGNFDTQVLKAKEEGKPLPHGADYQHGGRYGIATLREAVFSRDGYKCQCCGRTIKDGVILHIHHIKYRSQGGTNSMSNLATVCDKCHTPKNHKPGGKLYNWKPKLSSFKGATFMTAIRWQLYNEVKALFPDIDIHITYGAATKERRRKLDIDKSHVNDAFVMGQFHPKHRIKAILCKKKRRNNRCLEKFYDAKYIDSRDGKKRSGQELFNGRINRNHKKNSENLHQYRLQKVTAGKRTVSKQHYGIQPHDIIVYENRKRETAGCHCNGTRMMLLPDKKSASIKKVKIYKYAGGYFKSAFN

SEQ ID NO: 15149 - protein, 431 aa, unidentified
  REGION 1..431: note = Human gut metagenome
MPNKVYVINKHGRPLMPCSPAKARHLLDEGKAKVKKRTPFTIQLVYGSSGYTQEVILGVDAGSKTIGMSASTTKEELLSAEVKPRNDVVDLLSTRREFRRARRNRKTRYRKPRFDNRVRSKHKGWLAPSVEVKIQEHITSIKRVCRILPVSKVVIETAEFDLQMLKTIADGKPVPQGEDYQKGEMYGHYNVRQYVLWRDNYTCQCCGAHATKKKEVRLHVHHLESRKVGGDAPDNQVTLCESCHEKLHKGLIAEKDFKKRKRRSTRDATFMGIMRKTLMQRLCSELPIPVVETRGYITKATREKLLVLPKSHTNDALAIAQGKQGFNVGYLPEILQIDKIYTIRPVRHHNRQLHKATILKGGIRKSNQAEKYVFGYRLFDKVQFNEQDCFIWGRRTTGIFTIKTINGKMIKDGISFKKLKLVEKSTSYLIA

SEQ ID NO: 15150 - protein, 416 aa, unidentified
  REGION 1..416: note = Human gut metagenome
LRVFVLNKRGQPLMPCLPAKARLLLKERKAIVKRRTPFTIQLTIATGEAKQPVTLGVDSGYKHIGLSATTEKVELYASEVELRQDITDLLSARLALRRSRRSRKTRYRAPRFDNRVANKREGRLAPSVENRIAAHMSRVEAVMRVLPVTAITVETAAFDTQLLKNPDIAGAAYQQGEQLGFWNVREYVLFRDGHVCQHCRGKSKDPILNVHHIESRRTGGDAPNNLITLCETCHKAFHRGEIKLKVRRGKSFKAETFMGIMRWTLLERLKKAHPELRVRNTYGYLTKHKRISHGIAKSHCADAYCIADNLGAKRLEGFFFQKQTRKHNRQIHKLLILKGGLKKKNQAPYEVKGFRLFDKVICKGEEAFIFGRRTSGSFDVRRLDGTRISAGISYKKLRLLEPRTTYLTEFRKEAAL

SEQ ID NO: 15151 - protein, 413 aa, unidentified
  REGION 1..413: note = Human gut metagenome
MTSYAFVLDANGKQLAPTKEQKAWFFIRKKRASLVSKYPIVIQLMKEIPEKEICQDEIRCGIDDGGLHVGIALVQKCKTKNKVVFKGTMEQRNDVKHLMEVRRGYRRYHRYHKRYRQARFDNRKSSKREGRIAPSILQKRQATIRVIHWLNKWINITNYWLEDVSVDIRALTDGYQSYRWQYQKSNRLDENIRKAAILRDGGKCMECGKSNCRLEVHHIKPKRRNGSNTLDNLITLCESCHQKTEGQEELYMDRYFSLLKSSDNKNLNYAQHVMIGKMWLRKQLSGLGVLYLTSGGDTANKRIDWNIEKSHANDAVCITDLRPDTCDVKEWTMKPMRRQSKAKTDHVLGIHHRDLVEYTFKNGETHRGYVTALYPEQKAINFQSPTKHCKKVNARKCKLLWNYSKIYWFENAS

SEQ ID NO: 15152 - protein, 381 aa, Moorena sp.
MQNYVFVIDTNKQPLNPISPKKARRLLDKGKAAVFRMYPFTIILKTAIRQSRRCANANPTISPCQIKIDPGSKVTGFALVQDDQVIWGMELEHRGGLIKKKLESRSAVRRGRRNRNTRYRKPRFLNRKRPEGWIAPSLEHRVLTIETWVKRLIKFCPINEIWVERVKFDTQKMQNPEINGIEYQQGDLAGYEVREYLLEKWGRECAYCGKQNIPLQIEHIHPKSKGGSDSAKPTLRERVNNLCLACEKCNQRKGNRPIEEFLKKKPGLLQKIKNKAKQPLSDAAAVNTTRNRIVKVLKEVKPVVTGTGAQTKYNRTKLGLSKQHWIDAACVGDIKTLVLRTSQPLLVTCKGQGGRQKAALNKYGYPIRHNPLKPIKGWKAW

SEQ ID NO: 15153 - protein, 418 aa, unidentified
  REGION 1..418: note = Human gut metagenome
MVYVLSQNGQPLMPTENHAKVRVFLKQGKAKVVQRCPFTIQLLYESTTHTQKINLGIDAGSKTIGISATTDSKVLYEAEVVLRNDIVELLSGRRALRRSRRNRKTRYRKPRLDNRRRPDGWLAPSIRQKIKTHVTVVENVMKILPVTKIIVETASFDIQKIKNPEIEGAEYQYGEQLDFWNVREYVLFRDGHTCQCCKGKSKDNILNVHHIESRKTGGNAPNNLITLCETCHQAYHKGIITLPKEIHRGMRFRDASFMGIMRWAFYDRLKELYTPLDVEVVNTYGYITKNTRIEHGLPKEHYVDARCISGNPAAKPLGHYYFQKKVRCHNRQIHKNTILKGGIRKRNQAAYLVNGYRLFDKVKYQNQEYFIFGRRSSGFFDIRTLDGTKVNKGSISCKKLQLVEKSKHYLTEQRKVAA

SEQ ID NO: 15154 - protein, 505 aa, unidentified; identical to SEQ ID NO: 4960
  REGION 1..505: note = Human gut metagenome

SEQ ID NO: 15155 - protein, 412 aa, unidentified
  REGION 1..412: note = Human metagenome
MENNIEYCFVVDKDNKPLAPTKVDRGWYLIRKGRAKLKSKYPMVIQLNKKVKPDENDKSYIVCGIDDGSAHVGLAVVQKCPTKNKVVFKGTIEQRQDVKHLIDVRRGYRRYHRYHKRYRPERFNNRSSSKRIGRLAPSIKQKKDAILRILYQLNKWVGIQEYYLEDVCIDIRAMTDGYKPYKWQYQKSNRLDENLRKATLIRDNYRCQECGKTDCRLEAHHIQARKCSGADTIGNLITLCSKCHQKTEGKEQDFEDKYFKIINSKPKRFDYAMHVMQGKNYLRNKISELGLLHLTNGGETANKRIEWDIEKSHSNDAICITDSIPDSCNIKEWIIRPMRRKSKAKTDNVLGIKHRDLVSYTYKNGETYKGYVTSLCPKRLALSFQSRDKRCDKVNARKCRLLWKFSKIYWLE

SEQ ID NO: 15156 - protein, 457 aa, unidentified; identical to SEQ ID NO: 14039
  REGION 1..457: note = Human gut metagenome

SEQ ID NO: 15157 - protein, 413 aa, unidentified
  REGION 1..413: note = gut metagenome
MTNYAFVLDANNKQLAPTKEQKAWFLIRKKRATLVSKYPMVIQLKKKIPDKKICKDEVRCGIDDGGLHAGIALVQKCQTRNKVVFKGTIEQRNDVKHLMDVRRGYRRYHRYHKRYRPARFNNRSSSKREGRIAPSILQKRQATIRVINQLNKWINITNYWLEDVAIDIRALTDGYKPYRWQYQKSNRLDENIRKAVILRDGCKCMECGESNCRLEVHHIKPKRLKGSSTLDNLITLCTKCHQKTEGVEELYMDRYFALLNSSDNKNLNYAQHVMIGKKWLREQLSNLGMLHLTNGGDTANKRIDWDIAKSHSNDAICITDLRPDTCEIKEWVIKPMRRQSKAKTDNVLGIKHRDLVEYTFRNGETYRGYVTALYPEQNAINFQSPIKHCKKVNARKCKVLWKYSKIYWLDNVS

SEQ ID NO: 15158 - protein, 405 aa, unidentified
  REGION 1..405: note = Human gut metagenome
DANGKQLAPTKEQKAWFLIRKKRAALVSKYPMVIQLKKEIQENEICKDEIRCGIDDGGLHVGIALVQKCKTKNKVVFKGTIEQRNDVKHLMEVRRGYRRYHRYHKRYRQARFNNRKSSKREGRIAPSILQKRQATIRVINQLNKWINITNYWLEDVSIDIRVLTDGYKSYRWQYQKSNRLDENIRKATILRDGGKCMECGKSNCRLEVHHIKPKRRNGSNTLDNLITLCESCHQKTEGQEELYMDRYFSLLKSSDNKNLNYAQHVMIGKMWLRKQLSGLGVLYLTSGGDTANKRIDWNIEKSHANDAVCITDLQPDTYDMKEWTMKPMRRQSKAKTDHVLGIKHRDLVEYTFKNGETHRGYVTALYPEQKAINFQSPTKHCKKVNARKCKLLWKYSKIYWFENAS

SEQ ID NO: 15159 - protein, 516 aa, unidentified
  REGION 1..516: note = metagenome
LMPTTRGGHVRHLLKEQKARVVQSNPFTIQLLYETDDAVQPLYLGIDPGRTNIGVAVVKADGTAVFTAHLKSRNKEIPKLMQDRKRARRARRTNGRRHRRQRRAKANGTISKKCVKQTTTQNGSVSKRAKEIGIIKRHLPGCEKDVLCIGIKNKEAKYTNRERPEGWLTPTANQLLQTHVNLVKKVQKLLPISDVVLEVNKFAFMRLDNPDIQKWQYQQGPLYKKESLESAVSETQEHHCLFCKKPIDHYHHVVPKSENGSNTIANIVGLCAEHHNLVHKDVAWQEKLAEEKTGLNKKYGALSVLNQIIPALTNKLSVLFPKHFFVTAGKSTHDYRAAHSVSKDHWLDAYCIACSVLPSNVCDSNINNHVPYELKQFRRHDRRVLHKANMSRVYTLNGKAVATNRHKAIKQTTDSLEEFRQNYPDDVYKLKVKEHHPAYRNLNRNYPGSVFLVGEQAHVMQGIASSKDGKTTKYNDTNATTIIAGKCKFVAKNSGILFVQCKFRKALSDGTTKKLQ

SEQ ID NO: 15160 - protein, 406 aa, unidentified
  REGION 1..406: note = Human gut metagenome
MVYVQDINGKPMMPTTRHGKVRRLLKDKKAVVVNLCPFTIKLMYVTSDYKQEIVLGVDAGTKHVGLSATTKSKELYSSEVILRNDIVDLLSTRRELRRTRRNRLRYRKPRFDNRIKSRRPGWVAPSVKYKVDAHIRVVENVCSILPISRIVIEVAQFDTQKIKNPNISGKEYQEGDQLGFWNVREYVLARDGHKCQYCKGKSKDHVLNVHHIESRKTGGNSPSNLITLCETCHKEYHKGNIDLKIKRGSSLRDAAVMGIMKWRLYEELRSKYDRVSMTFGYVTKYNRINHDIEKSHVSDAFVISKNFDAIRLGYYYKVRLVRRHNRQIHKQKIPKGGIKRLNQSPFEVFGFRLFDRVMFENNCYFIFARRKTGSFNIRDINGKNKRDITYKKLKLSRCKRFMIEKS

SEQ ID NO: 15161 - protein, 463 aa, unidentified
  REGION 1..463: note = Ga0315285_10094504
MQKLDVKPKNVPTDTPQVCSSTTCLLNREDTLSVGKKLLASNNPDVDNSSVQEVLKTYVYVLSKDGSPLMPCSNAKARKLLKSQRATIVRHRPFTIQLAFECENKTQEVVLGVDPGYKNIGLSARTESRELFSANVQLRNNVSKLLTERAMYRRNRRNRLWYRKPRFLNRKKKVGLLTPSVQHRLDSHIRLVNKVKEFLPISEIIVEVANFDIQKISNPDIEGAEYQQGNLYGYENMKAYLISREQGKCQLCSKKSIKSNPFKLHHIIQNKDGGTDKSDNLALLHLLCHEKLHREHLKHLIVKCRQFKAETFMSTIRWRIVERLKHICNNVVVTFGYITRIKLQRLNLGKEHHNDAFAISKGDNQPRTTAFTIIQKRGNNRCLQLNRKGYKPAIRRQRYLYQPKDEVKISGKWYEVKAITTYGRYIVVKDKTNKILVFPTRNIECHHYNNSWLFQNKESKTRR

SEQ ID NO: 15162 - protein, 325 aa, unidentified
  REGION 1..325: note = Human gut metagenome
LLRQGRLIVKEVAYMSTVYVLNKDGKPLMPTTRCGHVRRLLKEQKAQVVTSKPFTIQLLYETDDVVQPLYLGIDPGRTNIGVAVVKTDGTAVFTAHLETRNKEIPKLMQGRKKARRARRTNGRRCRRQRRAKANGTISKKCVKQATAQNGSVSKRAKKIGVIKRHLPGCEKEVLCIGIKNKEAKFSNRTRPEGWLTPTANQLLQTHINLVKKIQRFLPISDVVLEIIKFAFMRLDNPNVQKWQYQQGPLYQKASLEEAVSEMQEHHCLFCKKPIAHYHHVVPQSENGSDTIGNIVGLCTKHHDLVHKDTAWQKQLAKKKTGLNKK

SEQ ID NO: 15163 - protein, 422 aa, unidentified; identical to SEQ ID NO: 5457
  REGION 1..422: note = Human gut metagenome

SEQ ID NO: 15164 - protein, 428 aa, unidentified
  REGION 1..428: note = Human gut metagenome
LKVFVLNMRGQPLMPCSPAKARHLLKAGKAVVRRRTPFTIQLRIATGETKQSVTLGVDAGAKHVGLSATTEKEEVFASEVELRQDITGLLAARLSLRRDRRHRKTRYRAPRFLNRVRSKHKGWLAPSVENRIQAHMSRIDAVCRLLPVTKIVIEAASFDVQKIRNPEVEGTGYQQGDQLGFWNVREYVLFRDGHVCQHCHGHSKDKILNVHHLESRQTGGDAPNNLITLCETCHKACHAGKIKLKVKRAQSFRAEAFMGIMRWTLLDRVRKAHPGLPVENTYGYLTKHTRITHGLPKTHCVDAYCIAGNLKAVRRGVYLHQRQMRKHNRQIHKFTVLSKRLEDGTKIGYRKLNQSPYLVHGFRLFDKVRCLGQIGFIFGRRSSGYFDVRRLDGVKLSPSISWRKLTLLEKRSTYLTELRKQDGASSPV

SEQ ID NO: 15165 - protein, 429 aa, Moorena sp.; identical to SEQ ID NO: 3068

SEQ ID NO: 15166 - protein, 406 aa, unidentified
  REGION 1..406: note = Human gut metagenome
MVYVQDINGKPMMPTTRHGKVRRLLKSNKAVVVNLCPFTIKLMYVTSDYKQEIVLGVDAGTKHVGLSATTKSKELYSSEVILRNDIVDLLSTRRELRKARRNRLRYRKPRFDNRVKSKRLGWIAPSVKYKVDAHIRVVENVCSILPISRIVIEVAQFDTQKIKNPEISGKEYQEGDQLEFWNTREYVLARDGHKCQYCKGKSKDSILNVHHIESRKTGGDSPSNLITLCETCHKEYHKGNIDLKIRRGKSLRDAAVMGIMKWRLYEELKSRYDRVFMTFGYITKHNRIKYGIEKSHTSDAFVISKNINAKRIERQYLKRLIRRHNRQIHKMKILKGGKKKNNQAPFEVFGFRLFDKVLYNNKIFFVYGRRKSGSFNIRDFNGENSKDVSRKKFKLIRGKRHPIILK

SEQ ID NO: 15167 - protein, 354 aa, unidentified
  REGION 1..354: note = Fermentation metagenome
MSEIEIRNDISDKMDKRAKYRRTRRNRKTRYRKPRFDNRKNSIKKDRFSPTMTSKINSHLKEIEFVKSIMPIKNIIIETATFDPHALKNPAVLNNKWLYQKGTNYGFANTKAYVLSRDKYICQYCKGKSKDSRLEVHHIVFRKNGGSDDAENLITLCKTCHNSLHKGGIKLKKNGKIKGQLKHTTQMNSIRQQLLRQLPNAKETFGFITKEYRQLMGLPKEHYYDAVAIACLNNIEDIGLIDVSFKTEKVVLKKCIPKGDYQQTKGVRSHQKIPTGKIEGFRKFDKVRYIGNEYFIKGRMSTGYAILMGIDGEKIDFSNAPRGMKTPKISNMQRINARKSWIICEQNRANSSHD

SEQ ID NO: 15168 - protein, 415 aa, Bacillus sp.; identical to SEQ ID NO: 6255

SEQ ID NO: 15169 - protein, 502 aa, unidentified; identical to SEQ ID NO: 6049
  REGION 1..502: note = Human gut metagenome

SEQ ID NO: 15170 - protein, 429 aa, Leptolyngbya sp.; identical to SEQ ID NO: 8055

SEQ ID NO: 15171 - protein, 430 aa, unidentified
  REGION 1..430: note = Human gut metagenome
MPKVYVLNRHGRPLMPCTPAKARHLLDAGKAKVRHRTPFTIQLLYGSTGYTQEVILGVDAGSKTIGLSAATETEELFSAEVKPRNDVVELMSARRQFRRARRNRTTRYRKPRFDNRVRSKHKGWLAPSVEVKIQEHMTAIRRACAILPVSKVVVETAEFDLQLLKAVAEGKPVPQGEDYQKGEMYGHYNVRQYVLWRDSYTCRICGMHGSVRKGVPLHVHHLESRRVGGDAPDNLVTLCTACHDKLHKGIIMAADIKKRKRRSTRDATFMGIMRMTLLRRLREQLPVPVVETRGYITKATRENLLVLPKSHTNDALAIAHGPQGFRAEYLPNIRQADRLYTIRPVRHHNRQLHKATILKGGVRKTNQAEKYICGFRLYDKVLYNGIECFVWGRRTSGSFLLRQLNGEKVKDGVSYKHLKLLERSQSYLVA

SEQ ID NO: 15172 - protein, 412 aa, unidentified
  REGION 1..412: note = Freshwater metagenome
MLNFKEYAFVLDANGQQLDPTRVNNAWRLVRQKKAKLVSKFPMVIQLNKVVDNPNKDKIFLGIDDGSSHVGIALVQKCLTRNKVLFKGVIEQRKDVHKLMEQRKAYRRYHRYHKWFRPQRFDNRASSKRTGRLAPSIKQKKQAILRVVDKLSQWIRVDQICLEDVKIDIRALVDGCKPYKWQYQKSNKLDENLRIATILRDGCCMECGKTKTKFEVHHITPRKNGGSDTLSNLITLCSHCHQKTFDRELSLAERYYSMIKGKNLKELKSAQHVMQGKTWLHEELSKRSKLILTTGCDTANKRFDWNIEKSHSNDAICITGLKPEEIEVFEYIIKPMRRQSKAKTDNALGIKHHDLVEYTFKNGETHRGYVTALYPELNALNFQSKTKHCKKVNAKKCKLLWKFNKIYWLKCA

SEQ ID NO: 15173 - protein, 493 aa, unidentified; identical to SEQ ID NO: 2644
  REGION 1..493: note = Human gut metagenome

SEQ ID NO: 15174 - protein, 436 aa, unidentified
  REGION 1..436: note = Human gut metagenome
MPCHPARARKLLKKGRARVHKIFPFTIRLTDRELENSSAQPMLIKIDPGSKETGIALVREEKNKGHHALYFINLQHRGQQIRNALCKRRCLRRSRRSRNLRYRSPRFLNRRRAEGWLAPSLQHRADSILSWVTRLRRIAPVERISQELVKFDTQLIQNSKIEGIEYQQGELVGYEIREYLLEKFGRKCIYCGADNVPLNIDHVIPKSKGGSNRVSNLVLACVQCNQKKGSRSIEGFLKDKPEVLQQIKNQLKQPLKDAASVNATRWKLFNKLKSTSFPFEVGSGALTKFNRKKFGIPKAHWLDALCVGNVPSVTNWRNLNVLNIKCCGRGAYQRTRTDKYGFSRGICMRQKKVYGFSTGDMVKAIIPKGKKKGVYVGKVAVRKTGSFNLQTSGQTIQGISYRYCRLITHSDGYSCSWKSCPIPPRVETRGILGEVR

SEQ ID NO: 15175 - protein, 400 aa, unidentified; identical to SEQ ID NO: 13068
  REGION 1..400: note = gut metagenome

SEQ ID NO: 15176 - protein, 428 aa, unidentified
  REGION 1..428: note = metagenome
LKVFVLNMRGQPLMPCSPAKARHLLKAGKAVVKRRTPFTIQLRIATGETKQNVTLGVDAGAKHVGLSATTEKEEVFASEVELRQDITGLLAARLSLRRDRRHRKTRYRAPRFLNRVRSKHKGWLAPSVENRIQAHMSRIDAVCRLLPVTKIVIETASFDVQKIRNPEVEGTGYQQGDQLGFWNVREYVLFRDGHVCQHCHGHAKDKILNVHHLESRQTGGDAPNNLITLCETCHKACHAGKIKLKVKRGQSFRAEAFMGIMRWTLLDRVRKAHPGLPVENTYGYLTKNTRITLGLPKAHCVDAYCIAGNLKAVRRGVYLHQRQMRKHNRQIHKFTVLSKRLEDGTKIGYRKLNQSPYLVHGFRLFDKVRCLGQTGFIFGRRSSGYFDVRRLDGVKISSCISYRKLTLLEKRSTYLTELRKEDGASSPV

SEQ ID NO: 15177 - protein, 493 aa, unidentified
  REGION 1..493: note = Human gut metagenome
MAVVYVISASGKPLMPTTRCGHVRGLLNAGKARVVERRPFTIQLNYETKEITQPLYLGIDPGRTNVGAAVVCEDGECVFTMQLTTRNKDVPKLMKARKQFRMAHRRLKRRCKRQRRAKGAGTLSQKGEFQRLLPGYEKPILCKGIRNKEARFNNRQHPVGWLTPTANHLLLTHLNMVKKLQKLLPITDVVLEVNRFAFMAMENSNIRRWQYQRGPLYGKGSVEDAVYAQQDGHCLFCGKPIAHYHHVVPQHKNGSDTLENRVGLCNEHHDLVHKDRAWEAKMKETKAGLNKKYHALSVLNQIIPALTEQLAELFPQHAFVTTGEDTADFREDHGIAKEHHLDAYCIACSVLAEPSTVAAPTAKPHRLMQFRRHDRQVCHKENIKRVYLLDGKAVATNRHKAIEQKDDSLEEFCKTHTQQEVSALTVKGHKPIYKEIQRFMPGGVFLFNGKVHTLQGSQGRYKGMPKYYIGTDGEKNHAKRCIFLQQNCGLRWA

SEQ ID NO: 15178 - protein, 428 aa, unidentified
  REGION 1..428: note = Human gut metagenome
LKVFVLNMRGQPLMPCSPAKARHLLKAGKAVVKRRTPFTIQLRIATGETKQNVTLGVDAGAKHVGLSATTEKEEVFASEVELRQDITGLLAARLSLRRDRRHRKTRYRAPRFLNRVRSKHKGWLAPSVENRIQAHMSRIDAVCRLLPVTKIVIETASFDIQKIKDPSVEGTDYQQGDQLGFWNVREYVLFRDGHVCQHCHGHSKDKILNVHHLESRQTGGDAPNNLITLCETCHKAYHAGKIKLKVKRGQSFRAEAFMGIMRWTLLDRVRKAHPGLPVENTYGYLTKHTRITHGLPKTHCVDAYCIAGNLKAVRRGVYLHQRQMRKHNRQIHKFTVLSKRLEDGTKIGYRKLNQSPYLVHGFRLFDKVRCLVQIGFIFGRRSSGYFDVRRLDGVKLSPSISWRKLTLLEKRSTYLTELRKEDGASSPV

SEQ ID NO: 15179 - protein, 406 aa, unidentified; identical to SEQ ID NO: 10294
  REGION 1..406: note = Human gut metagenome

SEQ ID NO: 15180 - protein, 515 aa, unidentified
  REGION 1..515: note = Human gut metagenome
MTALEEKLSKTEYIYVLGFDGKPQMPTRRKRHVLKLLKTGRARIAEDIPFTIRLTYRNSPVLQPVTLAEDPGRTNIGAAVLSPLGGLLFAAVIETRNKEIKKLMADRQKSRQASRRGERKARQRLAKRYGSMVKSGMVMRKLPMYAADKFVTCKFIRNTQARFCNRKRCPDWITPTVQHLVQTHLNIIRKISRYLPVTDIAFEVNRFAFMHMENPKAMGVDFQNGPLKGYDDVKEAICTQQHGKCLMCKKPISHFHHIVPRSRGGSDTIQNLAGLCPECHTKVHTDTTFRKDFDRKKSGQLKKYGALSALNQAVPFICKKLLEEYGEEHVHFCGGLDTSLIRTALGFEKTKKDQMHEVDAYCVGLAALEVNEVETPAFDHTFQIRQFRRQDRSIIHHQTGRSYYQGKEKVAQNRKPGFEQKTTALSQWYEEQVRIHGEKEAEKLRSQLRVEKSCRHYNDMDRFLPGAVFLYEGKRYVLSGRITNGKYLRACGQGMKNFPAAECTFIRHNAGLVFI

SEQ ID NO: 15181 - protein, 431 aa, unidentified; identical to SEQ ID NO: 6055
  REGION 1..431: note = Human gut metagenome

SEQ ID NO: 15182 - protein, 431 aa, unidentified; identical to SEQ ID NO: 6055
  REGION 1..431: note = Human gut metagenome

SEQ ID NO: 15183 - protein, 396 aa, unidentified; identical to SEQ ID NO: 3291
  REGION 1..396: note = Human gut metagenome

SEQ ID NO: 15184 - protein, 437 aa, Clostridium sp.; identical to SEQ ID NO: 14047

SEQ ID NO: 15185 - protein, 414 aa, unidentified
  REGION 1..414: note = Human gut metagenome
MVYVINKQGQALMPTERFGKVRRLLKNSLAHVVCRIPFTIQLDYDTTDYTQPVSLGVDAGSKHIGISATTSEKELYAADVELRNGIVDKLSTRRELRRTRRSRLRYCKARFNNRVSSKRKGWLAPSVENKIQTHLTVVEKINKFLPITNIVVEIASFDIQKINNPIISGSEYQQGEQLDFFNVREYVLFRDNHICQHCKGKSKDKVLNVHHIEGRKAGGDSPNNLITLCETCHKAYHRGEFELNVKRGKSFRDSAFMGIMRWSFYDRLKNIYPNVSMTFGYITKNTRITNNLPKDHYVDARCISGNPTAKPLGYYFYQKKVRCQNRQIHKANFLKGGRKKLNQAPFLVKGFRLFDLVEYQKELYYIFGRRSSGSFDIRKLDGTKVNKGSINCKYLRLIATRKSILTEKRMQVNL

SEQ ID NO: 15186 - protein, 420 aa, unidentified
  REGION 1..420: note = Human gut metagenome
MQYVYVLNKHGEPLMPCSPRKARLLLKQKKACVIKRTPFTVKLLHGSAGYKQPVTLGVDAGSKHIGISATTEKHELYREEATPRNDVVDLLSARRAFRRSRRNRKTRYRAPCFNNRVHSKHKGWLAPSVEVKIQEHITLIKHVFRILPVTLVRVETAEFDTQRLKAMLEGKPLPVGTDYQLGEMYDEYNVRQYVLKRDNYTCQCCGAHSTKTKGVKLHVHHIETRRTGGNAPNNLITLCKACHKALHAEKVTLDGKKRGKPLKDAAFMGIMRKTLMERLRKELKIPVQGTYGYITKYLREKNGIPKSHTNDARCISKNPLAIPCDTCYYTKAVRHHNRQLHKATILKGGIRKANQAPYIVKGYRLWDKVAYNGTECFITGRRTSGYFALKELDGTVVSNSISYKKLRLLEAATNYIIERK

SEQ ID NO: 15187 - protein, 504 aa, unidentified; identical to SEQ ID NO: 4686
  REGION 1..504: note = Human gut metagenome

SEQ ID NO: 15188 - protein, 430 aa, unidentified; identical to SEQ ID NO: 6536
  REGION 1..430: note = Human gut metagenome

SEQ ID NO: 15189 - protein, 427 aa, unidentified
  REGION 1..427: note = Cyanobacteria bacterium UBA11372
MQNHVFFVNQDGSPLNMLHPARARQLQSRGKAATLRTYPYVAMQGQQIENPVLKPYILKIDPGSQWTGFAIQCGDEVVFRMELTHRGAAISESLTKRRGFIRSRRSRNLRYRKKRFNRRKPEGWLAPSLMHRVLTVETWIKRFMRWCPIVTIEIEQVRFDTQKLQNPEISGVEYQQGTLFGFEVRQYLLEKWKHQCAYCGAENVRLEVEHIVPKSKGGSDRVSNLCIACRNCNQKKSDRDLADFLKKKPDVLKRVLTQTKVPLKDAAAVNSTRFAIVRVAKKLCSSINCWTGGRTKFNRCQQGLKKSHSIDAACVGESGASIQLKTHQPLIVVCKGHGTRQARRVNAAGFPAVQKAKTVYTHVKAGDVVRFALPADRKNVKAGIYTARVKTPTSKGFEVLLNGFRVKISSMKGVQFIQRQDGYSYGF

SEQ ID NO: 15190 - protein, 451 aa, Ruminococcus sp.; identical to SEQ ID NO: 2424

SEQ ID NO: 15191 - protein, 432 aa, Lactobacillus sp.; identical to SEQ ID NO: 6011

SEQ ID NO: 15192 - protein, 420 aa, unidentified
  REGION 1..420: note = Human oral metagenome
MFVYVLDKNGQPLMPTSRFGKVRRLLRDKKAKVVRSCPFTIKLLYEPKTKIVQEIVLGVDTGSKHVGVACVGNDKVLYQSQVELRDDIKKKIDSRRMYRRNRRSRKTRYRKCRFLNRRNSIKKDRLPPSVKHKVQAHIDEIEFCKKILPISDENIILEVSQFDTALMKNQSLTNEKIRHWGYQKGFNYGHSSRRKAVLHRDNYTCQCCGKKNCRLETHHIIYRSHGGSDDEGNMITLCEECHKGIHNGTIVLAKKPNKMNLKHATHMSIIRSRLLKKYPNAIETFGFVTTENRNHLKLEKDHYIDACVIASGGLRFEQSDTLYRKRRVSVQDRILTKGVRDEIKLPTGKVNGFKRYDKVQYFGEVCFIKGRRTKGDVVLMDIKNTVLDFRGVGGCKNPSYKKLQRVNARKSVLCVLGWGI

SEQ ID NO: 15193 - protein, 393 aa, unidentified
  REGION 1..393: note = Ga0307928_10035134
MSVFVIDVTGQPLLPTTERRARALLDNKRAIVYSVVPFTVQLTRCVDKPVGTFKVGIDDGAKTVGIAVSNPNSQIVFAANVELRQDVSRKMTQRAMYRRTRRTRKLRHRPARFLNRGKKGCLPPSVKYRKDVTLRVLADLGKRLNITSAIIEQGQFDTSSMAAGYKLTGKEYQQFEYEGNTFRQKVLWRDRYTCQKCESQEQLKAHHIIFKSKGGTDRVENGLTLCEDCHDALHRGEWFVEKKPKQFKYPTHLQQGKWYIFNKLKELFADVRVCFGWMTAGARRELGLEKDHHSDAAAMIGCGDYRTRVYSIKPRRTKVWENNPAKTCVEKNGFRHYDLIKATHRTKGVVVGSVRSLKKSVMTLRTTFNDNFAVSYKKSKVIQRSQGLIYGYR

SEQ ID NO: 15194 - protein, 424 aa, unidentified; identical to SEQ ID NO: 12629
  REGION 1..424: note = Human gut metagenome

SEQ ID NO: 15195 - protein, 456 aa, unidentified; identical to SEQ ID NO: 15078
  REGION 1..456: note = Human gut metagenome

SEQ ID NO: 15196 - protein, 429 aa, Parasutterella sp.; identical to SEQ ID NO: 3656

SEQ ID NO: 15197 - protein, 544 aa, Blautia sp.; identical to SEQ ID NO: 4004

SEQ ID NO: 15198 - protein, 460 aa, unidentified
  REGION 1..460: note = Human gut metagenome
VQLRQSDAGQSYVLCCLSDNQKGRHNHMYVYVINKHGQPVMPCRPRMARVLPQEGKAAVVKQVPFTIRLLYGSSGYKQPVSLGMDAGSRHIGIAATTGKKVLYAEELKPRNDVVKLLSVRRQNRRAGRSRKTRYRQARFDNRVSSKQKGWIAPSVEVKIQEHISAVLRIQKMLPVSEIHVETAEFDTQRLKAMEEGRPVPVGTDYQKGEMYDQYNVRQYVLFRDGYKCKCCGKHGDGVKLHVHHIESRQTGGNAPNNLITLCEDCLKALHAGTIQLPDGRAKRGRSHRDAAFMGIMRKAMVSQLRDIVDIPVTETYGYITKYYRELHHVEKSHISDAIMISRNFKAEPDDTYYASKAVRHHNRQLHKNTILKGGVRKRNQAPHVVKGFRLFDLVRYENSVYYVFGRRKSGFMDIRTLDGRKINKGSISSKKLKFVSTSKGTLVERRKAIPLADKSASFLA

SEQ ID NO: 15199 - protein, 513 aa, unidentified; identical to SEQ ID NO: 5221
  REGION 1..513: note = Human gut metagenome

SEQ ID NO: 15200 - protein, 470 aa, Anaerostipes sp.; identical to SEQ ID NO: 2825

SEQ ID NO: 15201 - protein, 419 aa, unidentified; identical to SEQ ID NO: 3670
  REGION 1..419: note = Human gut metagenome

SEQ ID NO: 15202 - protein, 420 aa, unidentified
  REGION 1..420: note = Human gut metagenome
MQYVYVLNKHGEPLMPCSPCKARLLLKQKKACVVKRTPFTIKLLYGSTGYKQPITLGVDAGSKHIGISATTEKCELYREEATPRNDAVDLLSARRAFRRNRRNRKIRYRAPRFNNRVHSKHKGWLAPSVEVKIQEHITLIKRVCRILPVTLVRVETAEFDTQRLKAMLEGKPLPVGTDYQLGEMYDEYNVRQYVLKRDKYTCQCCGAHPTKTKAVKLHVHHIETRRTGGNAPNNLITLCTACHKALHAGKVTLNGKKRGKPLKDAAFMGIMRKTLMERLLKELKIPVQETYGYITKYLREKHSIPKSHTNDARCISKNPLAIPCDTCYYTKAIRHHNRQLHKATILKGGIRKANQAPYTVKGYRLWDKVFYHGSECFITGRRTSGYFALKKMDGTVVSNSASYKKLRLLEVATNYIAERR

SEQ ID NO: 15203 - protein, 454 aa, Anoxybacillus sp.
ASVLHITSIYNMVEENMTCFMQRKGEYPMVFVLDTNKCPLAPCHEAVARKLLKQGKAAIYKRYPFTIILKEIVDNFRPKTPYRLKIDHGSKHTGLAILRGQEVVWLGQLDHRTDIKERMDKRRAFRRARRNRKTRYRKPRFLNRRRKDGWLPPSLESRVQNIQTWVNRLKKLCPIGYISYENTKFDTQLMRNPEINGVEYQQGTLQGYEVREYLLEKFGRKCCYCGKENVPLEVEHIIPKSRGGTDRVDNLCLACHDCNQRKGSKTAEEFGYPHIQKQVKESLKDASAVNSTRWKVYEVLKQSGCEVECGTGARTKMNRIRLDLPKTHYFDACCVGESTPNHLYFKTKEVLFIRAKGRGSRSRTNLDRYGFPRGYLARQKFFFGFQTGDMVKAVIPRGKYQGVWFGEVSCRKTGSFDIKGKDGKRIAQGINYRYVQVIQRFDGYTYRREGMNIA

SEQ ID NO: 15204 - protein, 431 aa, unidentified; identical to SEQ ID NO: 3801
  REGION 1..431: note = Human gut metagenome

SEQ ID NO: 15205 - protein, 445 aa, Burkholderia sp.; identical to SEQ ID NO: 14881

SEQ ID NO: 15206 - protein, 289 aa, Parasutterella sp.
IKAVLRLLPVTKITVETASFDLQLLKNPDISGKEYQEGEQLGFWNIREYVLCRDGHVCQHCYGRSKDPVLNVHHLESRRTGGDSPGNLITLCETCHKALHRGEITLKAKRGQSFRAEAFVGIMRWEVHNRLRALHPGIEVSNTYGYRTKHARIANGIAKSHCADAFCIAGNLGAERLCEFFFQKQTRRNNRQIHKLSILKGGIRKRNQAPFEVKGFRLFDKVACQGEEGFIFGRRSSGFFDVRKLDGTRISAGISCKKLHLLEKRRTYLTEIRKEEALPPLPEGRGLRA

SEQ ID NO: 15207 - protein, 447 aa, unidentified
  REGION 1..447: note = Human gut metagenome
VPAYRIKHITKKEVPYMVYVLDIDGQPLMPTSRHRKVRKLLNSHLAKVAKRCPFTIQLLYQSTKETQPVSLGVDAGSRHIGLAATTEQKVVYQEELVPRNDVVKLLSARRALRSSRRSRKTRYRKPRFNNRVHSKHKGWLAPSVEVKIQEHITAIKRICQILPISDIHVETAEFDLQRLKAMEEGRPLPVGTDYQLGEQYDFYNTRQYVLHRDEYTCQCCGTHDNNVKLHVHHVESRQTGGEAPNNLITLCEHCHKSIHAGKMMLPKGKKRGKSYRDAAFMGIMRNTLLERLRKEVNVPVTMTYGYITKYWREKAGLEKSHINDAICISKHPYARPLETYYLTKAVRHHNRQIHKTKFSKGGIRKRNQAPYLVKGFRLFDKVLYQGESYFIFGRRITGYFDIRTLDGTKVNKGSTSYKKLRIQDTAEAYLTEVRAIPHMNEFTCVLA

SEQ ID NO: 15208 - protein, 432 aa, Moorena sp.
MSRVFVVSPERIPLAPCTPARARWLLTTKQAAVLRRYPLTLILLREPSGTVVPSFRLKIDPGSKTTGLAIVNDTTGQAVWAGELTHRGYDVTQALSKRRACRSSRRQRHTRYRPKRFLNRRRKPGWLPPSLESRLANVLTWVLRLQRWCPIRALSLELVTFDTQLLQDPEINGAAYQQGELAGYEIRQYLLEKFSRQCAYCGTSGVPLEVEHIVPTARGGSDRVANLTIACHACNQRKGHQTAEEFGHSEVQAQAKAPLRDAAAINATRWALYHRLEVLEVALETGSGGLTQYNRLQRGLPKAHWVDAACVGASTPPQLRLRGVVPWTIRAAGRHSRQMCRTNECGFPDKAPKATSVVGGFRTGDLVRAQVPASSKKAGTYVGRIAIRASGSCNIQRATGPIQGIHYRYCRPLQRADGYTYAKGARAVLPTP

SEQ ID NO: 15209 - protein, 442 aa, unidentified; identical to SEQ ID NO: 2807
  REGION 1..442: note = Human gut metagenome

SEQ ID NO: 15210 - protein, 431 aa, unidentified
  REGION 1..431: note = Human gut metagenome
MPNKVYVINKHGRPLMPCSPAKARHLLDEGKAKVKKRTPFTIQLVYGSSGYTQEVILGVDAGSKTIGMSVSTTKEELLSAEVKPRNDVVDLLSTRREFRRARRNRKTRYRKPRFDNRVRSKHKGWLAPSVEVKIQEHITAIRRVCGILPVSKVVVETAEFDLQLLKAIADGKPVPQGEDYQQGEMYGHYNVRQYVLWRDGYTCQCCGAHATKKKEVRLHVHHLESRKVGGDAPDNQVTLCESCHEKLHKGLIAEKDFKKRKRRSTRDATFMGIMRKTLMQRLCSELPIPVIETRGYITKATREKLLVLPKSHTNDALAIAQGKQGFNVGYLPGILQIDKIYTIRPVRHHNRQLHKATILKGGIRKSNQTEKYVFGYRLFDKVQFNGQDCFIWGRRTTGIFTIKTINGKMIKDGISFKKLKLAEKSTSYLIA

SEQ ID NO: 15211 - protein, 456 aa, unidentified
  REGION 1..456: note = Human gut metagenome
MSTCVCVLSNNGERLMPTFRLGKVRRLLKDGKAKIVKHHPFTIQLLYDSKANTQPIEICEDVGYNYIGISAKSKSHEYVSAQYDTLQDEKEHHDDCRKTRRTRRNRLRYRKPRFDNRKCDKGWLAPSLEHKKQLNISLIERYVSVIPITHATVEIGSFDTMLLQAIQKGKAKPESADYQKGPHYNLATLREAVFYRDNYTCQVCKRKIADGAILHMHHMFYWKGRHGYQLDELATVCEKCHTPANHQKGGKLFGFGEGKEFADLSGAAFMNAVRWQIVDALYTTYDKEFVTITYGAMTKEKRIALQLEKTHNNDAYAMGDYHPACRCKFRHYQKRRRNNRVLEKFYDATYIDARTGNKAKGKELFNGRINRNHKKDSENLHKYRSKKVSKGHRSIRRRRYAIQSYDTVRLEGKTYITSGCHNKGTRLLIPVNGKSKSVAISKVQVVCHAGAWIQIS

SEQ ID NO: 15212 - protein, 413 aa, Sutterella sp.; identical to SEQ ID NO: 7714

SEQ ID NO: 15213 - protein, 424 aa, unidentified
  REGION 1..424: note = Human gut metagenome
MASMQYVYVLNKHGEPLMPCSPGKARLLLKQQKACVVKRTPFTIKLLYGSAGYKQPVTLGVDAGSKHIGISATTEKRELYREEFTPRNDVVELLSTRRQNRRSRRNRKTRYRAPRFDNRVHSKHKGWLAPSVEVKIQEHITVIKRICRILPITLVRVETAEFDTQRLKAMLKGKPLPVGTDYQLGEMYDEYNVRQYVLKRDNYTCQCCGAHPTEKKPIRLHVHHIESRHVGGNAPNNLITLCVACHKALHEGKITLDKGKKRGKPLRDAAFMGIMRNTLLARLKDELNIPVKQTYGYITKLLREKNKIPKSHVNDARCIAKAPNAKPCDTMLYTRALRHHNRQIHKAKILKGGIRKKNQAPYLVKGFRLWDKVRYNGEECFITGRRSSGYFALKKYDGTVISNSASYKKLMLLEAATNYITERS

SEQ ID NO: 15214 - protein, 423 aa, unidentified; identical to SEQ ID NO: 4062
  REGION 1..423: note = Human gut metagenome

SEQ ID NO: 15215 - protein, 420 aa, unidentified; identical to SEQ ID NO: 13487
  REGION 1..420: note = Human gut metagenome

SEQ ID NO: 15216 - protein, 417 aa, unidentified; identical to SEQ ID NO: 14176
  REGION 1..417: note = Human gut metagenome

SEQ ID NO: 15217 - protein, 456 aa, unidentified
  REGION 1..456: note = Marine metagenome
MNHYVFVLDHTGNPLMPTKRHGWVRRALRDGKATVVKRSPFTIKLTYESGKELQDISLHLDAGYANIGFSAQTKSRELLGGVLELLKGMSERIKERAMYRNNRRSNLRYRRPKFKKGGDFISNRPDGWLAPSIQHKMDSHLNLIRKIKQILPITSIQIETASFDIQKINNPDIEGAGYQQGEQLGFWNLREYILHRDNHTCQNPNCKNKSKEKILQVHHIGFWKQDRSDRPANLITLCTKCHTTKNHQKNGFLYGWEPRLKSFKPETFMTMVRRRLVSQARENFNLPVSETFGYLTKASRIAKELPKSHHYDAFAMGNAITLSRSYTINQTRRNNRSLENFNDAKYLHKETKEKVSGQKLSSGRRTRNKESHLNEPNVRHLRGHKISKGYRAIRRRRYPLQPNDTIRYEGKICKVTGTHSLGKTVRFKLPCGTTADKSVNKVTQIASCKGLAFKLD

SEQ ID NO: 15218 - protein, 438 aa, unidentified; identical to SEQ ID NO: 4848
  REGION 1..438: note = Human gut metagenome

SEQ ID NO: 15219 - protein, 420 aa, unidentified; identical to SEQ ID NO: 11172
  REGION 1..420: note = Human gut metagenome

SEQ ID NO: 15220 - protein, 431 aa, unidentified; identical to SEQ ID NO: 5220
  REGION 1..431: note = Human gut metagenome

SEQ ID NO: 15221 - protein, 465 aa, unidentified; identical to SEQ ID NO: 3856
  REGION 1..465: note = Human gut metagenome

SEQ ID NO: 15222 - protein, 456 aa, unidentified
  REGION 1..456: note = Marine metagenome
MNHYVFVLDHTGTPLMPTKRHGWVRRALRDGKATVVKRSPFTIKLTYESGKELQDISLHLDAGYANIGFSAQTKSRELLGGVLELLKGMSERIKKRAMYRNDRRSRLRYRKPKFKKGGDFVSNRPDGWLAPSIQHKLDSHLNLIRKIQQILPITSIQIETASFDIQKINNPDIEGAGYQQGEQLGFWNLREYILHRDNHTCQNPNCKNKSKEKILQVHHLGYWKQDRSDRPANLITLCTKCHTTKNHQKNGFLYGWEPRLKSFKPETFMTTVRRRLVSQAREIFDLPVTETFGYLTKSSRIAKELPKSHHYDAFAMGNATKLSRSYTINQTRRNNRSLENFNDAKYLHKETKKKVLGRELTSGRRTRNKGSQLNSLNLRHLRGHKIRKGYRAIRRRRYPLQPNDTIRYEGKICKVTGTHSLGKTVRFKLPCGTTADKSVNKVTQIASCKGLAFKLD

SEQ ID NO: 15223 - protein, 411 aa, Clostridium sp.
MVEYSFVLDLAGNRLSPCNKNKAYYLIRNKKAKMLNKFPMVIQLFKIVKENNNNKTKTYLGIDDGSKHVGLGIIQDCNNKVKPIFKGTIELRDDVSKKMAIRKGYRTYHRYHKRYREKRFDNRQSSKRKGRLAPTIMQKKQSILRVVNKITKWIKIDSIYLENVLIDIRVLTEGRSLYKWQYQKSNRLDNNIRIAALMRDNFTCVDCGSKENLQEHHIKPRRAKGADSIHNVVTLCKSCHTKTFGREIELIDQYLAIIKGRKLNLSDALHVMQGKKNLQTELKKIAPLYLTTGGDTANHRNDWDIEKTHSNDALVICNVDIKKNNIDIKDWQISPLRKKSKGDAELIVKGFKHRDYVKYTKKNGTEYIGYITALYPSKNQFNMTRTNGEILKRYGLKSLKLLSRPKCIRWI

SEQ ID NO: 15224 - protein, 414 aa, unidentified
  REGION 1..414: note = Human gut metagenome
MVYVINKQGQALMPTERFGKVRRLLKNSLAHVVCRIPFAIQLDYDTTDYTQPVSLGVDAGSKHIGISATTSEKELYAADVELRNDIVDKLSTRREQRRTRRSRLRYRKARFNNRVSSKRKGWLAPSVENKIQTHLTVVEKIHKFLPITNIVVETASFDIQKINNPSISGSEYQQGEQLDFFNVREYVLFRDNHICQHCKGKSKDKVLNVHHIESRKTGGDSPNNLITLCETCHKAYHRGEFELNVKRGKSFRDAAFMGIMRWSFYDRIKNIYPDVSMTFGYITKNTRITNNLPKDHYVDARCISGNPVAKPLGYYFYQKKVRCQNRQIHKANFLKGGRKKLNQAPFLVKGFRLFDLVEYQKDLYYIFGRRDRGFFDIRKLDGIKVNKGSINYKHLRLIDKRKSILTEKRTQVNL

SEQ ID NO: 15225 - protein, 368 aa, unidentified
  REGION 1..368: note = Human gut metagenome
MKKRLLEKASYRRIRRSRLRYRKARWNNRVKSKKKGWLAPSLKHKLDTHIKFIDYLKNILPIGKITIEVANFDIQKMKDDLISGIDYQNWDMFGFWNVREFVLHRDGHKCQNPNCKHKDKKEQILKVHHIRYRSEGGSDRPENLITLCSKCHTPVNHRKGKFLYDWCVNGKKVRGFKDATFMSIIRWYLVNELKSKHNNVSITYGYITKNHRIQNGIEKSHLNDAFAIAKGTNQARTKDRFLVIQDRLKNRSLEKFYDSKIIDIRTEKKVSGGDLNCGRSTRNKNLNTENLRKYRGVKISKGQRRIRKQKYFYQPNDLVKYDGKVYTVKGTQNEGKYIALKEIKKVPKVELLIPYVFKKGLNWSYRLC

SEQ ID NO: 15226 - protein, 489 aa, unidentified
  REGION 1..489: note = uncultured beta proteobacterium
VRGPRSSDSRQAIGDVRNGSDSNAGLQHGRGEMFSKHVTAARRVERSNPMSRVFVIAKHGDPLMPCEPARARQLLRKGMAVVHRTFPFVIRLKQRETGDVQPIKLKLDPGSKTTGIALTREAPGKSVALKLIELEHRGRQISDALTSRSSLRRRRRGQLRYRAPRFLNRGNKKNGWLAPSLMHRVHSTMSWVERLRRWVPVSDIASELVRFDMQALENPEVTGVEYQQGTLAGYEVREYLLEKWARKCAYCDATGVPLQIEHIVARARGGTDRISNLTLACGCCNQRKGASSIQEYLAKDQSRLKKILASAKAPLKDAAAVNATRWRLANELKTTGLRIELASGGRTKFNRTQFGVPKSHALDAMCVGNVVGVERWNQPTLLARSTGRGGYQRAITDAYGFPKAHKTRTKMQFGFQTGDMVRALIPRGKYTGVHTGRVSVRATGKFDLKSDSRPRFGVGHKHCTIVQRADGYSYSWKPTPTADQKGTTA

SEQ ID NO: 15227 - protein, 414 aa, unidentified
  REGION 1..414: note = Human gut metagenome
MPCSPAKARLLLKEKKAIVKRRTPFTIQLTIATGETKQPVGLGVDAGYKHVGLSASTDKAELYASQVELRQDITDLLSARRALRRARRNRKTRYRAPRFNNRIRTKRKGWLAPSVENRINAHLSRIEAVLRLLPVTKITVETASFDMLLLKNPDIAGKEYQEGEQLGFWNVREYVLFRDGHVCQHCYGRSKDPVLNVHHLESRRTGSDSPDNLITLCETCHKALHRGEITLKAKRGQSFRAQAFMGIMRREVLNRLKASYPELKVHETYGYLTKHARIANGIVKSHGADAFCIAGNLGAERLGEFFFQKQTRRNNRQIHKLSILKGGIRKRNQAPFEAKGFRLFDKVACQGEEGFIFGRRSSGSFDVRKLDGTRISAGISCKKLRLLEKRRTYLTEIRKEEALPPLPEGRGLRA

SEQ ID NO: 15228 - protein, 431 aa, unidentified
  REGION 1..431: note = Human gut metagenome
MPDKVYVISRLGHPLMPCSPAKARHLLDDKKAKVVKRMPFTIRLLYGSTKYIQPIILGVDAGSKTIGLSASTAKEEVFAAEVMPRNDVVENLSTRREFRRARRNRTTRYRKPRSDNRVRSNHERWLAPSVKVKIQEHITSIKRVCTILPISKVVIETAEFDLQLLKAIQEGKPIPEGEDYQKGEMYGSYNVCQYVLWRDNYTCICCGVRGTPKNPVRLHVHHFESRKYGGNAPDNHGTLCDDCHKKFHLGIITDVKLKTRRQQSTRGAAFMGIMRKTLMWRLRTELFIPVAETKGYITKATREKLLVLPKSHTRDALAIAQGRHGFGIKEYAYVEPANHIYTVRPVRHHNRQLHKASILKGGIRKRNQASKYVFGFRLYDKVLYQGKACFVWGRRTSGTFLLRTIDGIKVKDGVSYRNLTLLERSSNYLIA

SEQ ID NO: 15229 - protein, 415 aa, unidentified
  REGION 1..415: note = Human gut metagenome
MENRIEYCFVVDKNNKLLAPTKVNKGWYLIRKGRAKLKSKYPMVIRLEKEVESDESDKSYMVCGIDDGSVHVGLAIVQKCLTKNKVVFKGIVEQRQDVKHLMDVRRGYRRYRRYHKRYRQARFNNRSSSKRICRLAPSIKQKKDAVLRVLYQLNKWINIQEYHLEDVCIDIRAMTDDYKPYRWQYQKSNRLDENLRKATILRDGCRCQECGKSNCMLEVHHIRARRYGGADTIGNLITLCEKCHDKTKGREKDFEERYFNMIKSKPKRFDYAMHVMQGKNYLREKISELGILHLTNGGETANKRIEWNIVKTHSNDAICIANGIPDTCNIKEWIIKPMRRKSKAKTDNVLGIKHRDLVSYTYKNGETYTGYVTALYPEQLALNFQSKTKHCKKVNIRKCRLLWKFNKIYWLDKCV

SEQ ID NO: 15230 - protein, 359 aa, Scytonema sp.
MSNYVFLIDQNKTPLNPVHPAQARKLLDSGKAAVFRRYPFVLILKRVIENPNVYPLTLKIDPGSKVTGIVLVTNQGDVIWAMELQHRGQQIKDALEHRRAVRRGRRNRNTRYRQTRFLNRKRPSGWLAPSLRHRVLTTETWVKRLQRFVPIGSIVQELVKFDTQAIQNPEISGTEYQQGTLHGYECREYLLEKWNRQCAYCGVKDVPLEIEHIQSKSKGGSDRISNLCLACHKCNQRKGNKDIKDFLKGKPDVLNRVQKLGLAPLKDAASVNSTRWSLFNTLKSFGLPIITSTGGQTKFNRTRFNLPKAHWIDAACVGDALSPKNERNPINPTINRAASELTEEGSAHFYVLDPVWLKP

SEQ ID NO: 15231 - protein, 396 aa, unidentified
  REGION 1..396: note = Human gut metagenome
MVYVQDIDGKPMMPTTRHGKVRQLLKDKKAVVINTCPFTIKLMYKTSDYKQEIVLGVDAGTKHVGLSATTKSKELYSSEVILRSDIVDLLSTRRELRRTRRNRLRYRKPRFDNRIKSKRTGWVAPSVRHRIDAHIRVIDNVCSILSISRIIVEVAQFDTQKIKNPNISGNEYQEGNQLGFWNVREYVLTRDGHKCQHCKGKSKDPILNVHHIESRKTGGDSPSNLITLCETCHKEYHKGKIDLRVKRGKSLRDAAVMGIMKWKLYEELRSRYDNVSMTFGYITKYNRIKYGIEKSHISDAFVISKNFNALMLEYHYKVRLIRRHNRQIHKQKVLKGGVKKPNQSSFEVFGFRLFDRVMFEGNCYFIFGRRKSGSFNIRDIDGGNPVSYTHLTLPTI

SEQ ID NO: 15232 - protein, 490 aa, unidentified; identical to SEQ ID NO: 3566
  REGION 1..490: note = Human gut metagenome

SEQ ID NO: 15233 - protein, 357 aa, unidentified
  REGION 1..357: note = gut metagenome
EKAELYASEVELRKDITDLLSARRALRQSRRNRKTRYRAPRFDNRISTKRKGWLAPSVENRINAHLSRIEAVLRLLPVTKITVETASFDLQLLKNPDISGKEYQEGEQLGFWNIREYVLCRDGHVCQHCYGRSKDPVLNVHHLESRRTGGDSPGNLITLCETCHKALHRGEITLKPKRGQSFRAEAFMGIMRWEVLGRLKASHPELEVNNTYGYRTKHARIANDIAKSHCADAFCIAGNLGAERLGEFFFQKQTRRNNRQIHKLSILKGGIRKRNQAPYEIKGFRLFDKVACQGEEGFIFGRRSSGFFDVRKVDGTRISAGISYKKLHLLEKRRTYLTEIRKEEVLPPLPEGRGLRA

SEQ ID NO: 15234 - protein, 431 aa, unidentified
  REGION 1..431: note = Human gut metagenome
MPNKVYVINKHGRPLMPCSPAKARHLLDAGKAKVKKRTPFTIQLVYGSSGYTQEVILGVDAGSKTIGLSASAETEELLSAEVKPRNDVVDLLSTRREFRRARRNRKTRYRKPRFDNRVRSKHKGWLAPSVEVKIQEHITSIKRVCRILPVSKVVIETAEFDLQLLKAIADGKPVPQGEDYQKGEMYGHYNVRQYVLWRDDYTCQCCGAHATKKKEVRLHVHHLESRKVGGDAPDNQVTLCESCHEKLHKGLITAKDFKKRKRRSTRDATFMGIMRKTLMQMLCSELPIPVVKTRGYITKATREKLLVLPKSHTNDALAIAQGKRGFNVGYLPEIAQIDKICTIRPVRHHNRQLHKATILKGGIRKSNQTEKYVFGYRLFDKVQFNGQDCFIWGRRTSGYFVVKTIDGKVIHNSASFKKLNLVERASNYLIA

SEQ ID NO: 15235 - protein, 426 aa, unidentified; identical to SEQ ID NO: 3604
  REGION 1..426: note = Cyanobacteria bacterium UBA9226

SEQ ID NO: 15236 - protein, 416 aa, unidentified
  REGION 1..416: note = Human gut metagenome
VLQAPNPVQHWRRMSTGLRAVQAEPAGIRKGDALKVFVLNMRGRPLMPCSPARARHLLKAGKAVVRRRTPFTIQLRIATGETKQSVTLGVDAGAKHVGLSAATEKEEVFASEVELRQDITGLLAARLSLRRDRRHRKTRYRAPRFLNRVRSKHKGWLAPSVENRIQAHMSRIDAVCRLLPVTKIVIETASFDIQKIKDPSVEGTDYQQGDQLGFWNVREYVLFRDGHVCQHCHGRSKDKILNVHHLESRQTGGDAPNNLITLCETCHKAYHAGKIKLKVKRGQSFRAEAFMGIMRWTLLDRVRKAHPGLPVENTYGYLTKHTRITHGLPKTHCVDAYCIAGNLKAVRRGVCLHQRQMRKHNRQIHKFTVLSKRLEDGTKIGYRKLNQSPYLVHGFRLFDKVRCLGQTGFIFGRRSS

SEQ ID NO: 15237 - protein, 490 aa, unidentified; identical to SEQ ID NO: 6170
  REGION 1..490: note = Human gut metagenome

SEQ ID NO: 15238 - protein, 545 aa, unidentified
  REGION 1..545: note = Human gut metagenome
VQFAWWLCHPKPSDNIEDVNHETALMLLRIKAGTETFGTAPCGSGPKAEGVSHERKSMNIVSVVTNTNKPLMPTSPYRARKLLSSGKAKIVKHRPFTILLVNRSDGNVQEIEYKSDTGYLHVGISVCSEKREFVREQRDLLPDEREKHNDRRKYRRTRRNRKRYRKARFDNRIGKIRKAEKNKHVWLPPSLDHKVDAQVQLFLRLYQVMPIKRAVFEMGQFDPALMKALEKGEAAPQGIDYQMGERYQIATRRAAAFTRDRYACVFCGRSIKDHAILHVHHIGFWKQDRSNRLDNLATCCEQCHTSENHRPGGILYGVEPKLESLASATYMNVVRFELLQRLKEAAPDVEFHISYGAKTSVIRKQRSISKSHTNDAYCLGQYFPKLRAEEIGFQKIRRNDRILQKFYDAEYLDSRDGTTKKGKELTNGRISRNHMKDHKNLHQYRGKKLSKGRVTIRRGRSSLKTGSLVRFDGEVLTVHGTHRSRRKNKAGHIKVSVNVEFERPSKTGRKSAALSKCQIISQSYNTGWKKIQLRKEEQGKIAAVV

SEQ ID NO: 15239 - protein, 423 aa, Arthrospira sp.; identical to SEQ ID NO: 2785

SEQ ID NO: 15240 - protein, 413 aa, unidentified
  REGION 1..413: note = metagenome
MTSYAFVLDANGKQLAPTKEQKAWFLIRKKRAALVSKYPMVIQLKKEIQENEICKDEIRCGIDDGGLHVGIALVQKCKTKNKVVFKGTIEQRNDVKHLMEVRRSYRHYHRYHKRYRPARFDNRKSSKRKKRIAPSILQKRQAIIRVIHWLNKWINITNYWLEDVSIDIRALTDGYKPYRWQYQKSNRLDENIRKAAILRDGGKCMECGKLNCRLEVHHIKPRRRNGSDTLDNLITLCKSCHQKTEGQEELYMDRYFSLLKSSDNKNLNYAQHVMIGKMWLRKQLSGLGVLYLTSGGDTANKRIDWNIEKSHANDAVCITDLQPDTYDMKEWTMKPMRRQSKAKTDHVLGIKHRDLVEYTFKNGETHRGYVTALYPEQKAINFQSPTKHCKKVNARKCKLLWKYSKIYWFENAS

SEQ ID NO: 15241 - protein, 418 aa, unidentified; identical to SEQ ID NO: 5724
  REGION 1..418: note = Human gut metagenome

SEQ ID NO: 15242 - protein, 457 aa, Moorena sp.
MPTERYGKVRRMLKDGRAIVVTTMPFTIKLTYETTGYTQSVTLGIDSGYQTIGFSGVTAKKELIVGECRLITGQVERNTKRVMYRRQRRNQLRYRAPRFDNRKKPEGWLAPSIRHKLDSHIRLIEKIKTILPVTEIEVQVAGFDIQAIKNPGIQGKEYQQGEQAGYWNLREYILHRDGHQCQNPDCKNKSKEKVLEVHHIGYWKRDRTDRPGNLTTLCDKCHRSENHKEGRFLYGWEPCVKSFKPETFMTTVRWRLVNTLGCRHTYGYITKSRRIALRLEKSHINDAFCIAGGTNQARTIQFEVRQMRRNNRSLEYFYASKHIDIRTGERAGGQELNSGRRTRNRKLDGENLRQYRGEKLSRGRRSIRKQRYPIQPGDVVKYTGEKYISKGIQNLGAYIRLGGLSKPVRIDQIQPYRYAKGLFFGAWNQEKPGPPFIPALRSRFANKEGSGRGLPGG

SEQ ID NO: 15243 - protein, 375 aa, unidentified
  REGION 1..375: note = Human gut metagenome
VSEMTSYSFVLDANGKQLAPTKEPKAWFLIRKKRAALVSKYPMVIQLKKKIQENEICKDEIRCGIDDGGLHVGIALVQKCKSKNKVVFKGTIEQRNDVKHLMEVRRNYRRYHRYHKRYRQARFDNRKSSKRKGRIAPSILQKRQATIRVINRLNKWINITNYWLEDVSIDIRVLTDGYKSYSWQYQKSNRLDENIRKATILRDGGKCMECGKSNCRLEVHHIKPRRRNGSNTLDNLITLCESCHQKTEGQEELYMDRYFSLLKSSDNKNLNYAQHVMIGKMWLRKQLSGLGVLYLTSGGDTANKRIDWNIEKSHTNDAVCITDLQPDTCDIKEWAIKPMRRQSKAKTDHVLGIHHRDLVEYTFKNGETHRGYVTA

SEQ ID NO: 15244 - protein, 346 aa, unidentified
  REGION 1..346: note = Human gut metagenome
LRQDITDLLSARRALRQSRRNRKTRYRAPRFDNRIRTKRKGWLAPSVENRINAHLSRIETVIRLLPVTKISVETTSFDMQLLKNSDIAGKEYQESEQLGFWNVREYVLFRDGHVCQHCHGRSKDPVLNVHHLESRRTGGDSPGNLITLCETCHKELHRGEITLKAKRGQSFRAETFMGIMRWEVLDRLKASHPKLEVQNTYGYRTKHARIVNGIAKSHCADAFCIAGNLGAERLGEFLFQKQTRRNNRQIHKLSILKGGIRKRNQVPFEVKGFRLFDKVACKGEEGFVFGRRSSGYFDVRKLDGTRISAGISYKKLRLLQKRQTYLTEIRKEEALPPLPEGRDLRA

SEQ ID NO: 15245 - protein, 427 aa, Nostoc sp.
MSKIFVLDADKRPLDRIYPAQARQLLRNGKAAVFRRFPFTIILKESRPDSSVTPLRLKLDPGAKLTGIALVNDGTGEVVFAAELKHRGFAIRESLTSRRQLRRSRRNRQTRYRKPRFLNRTRPEGWLAPSLQSRVDNIKTWVERLRKLAQIAAISQELVRFDMQLMRNPEIRGKEYQQGTLAGYETREYLLEKWGRQCAYCGVKDVPLQIEHIHPRAKGGSNSITNLTLSCEKCNTKKGTKDIKEFLKQDPNKLQKILAQAKKPLADAAAVNTTRYVLLEVLKATGLTVECGSGGLTKLNRNNQNLEKTHWLDAACVGESTPILNIKGIKPLLITANGHGTRQMAGTDKFGFPTRHRSNKQIHYGFSTGDTVKAVVTNGKKVGEYLGRVLCRATGSFDIATSSGRVSGISYKYCSAIHRKDGYSYAF

SEQ ID NO: 15246 - protein, 456 aa, unidentified
  REGION 1..456: note = Human gut metagenome
MSTCVCVLSNSGERLMPTFRLGKVRHLLKDGKAKIVKHHPFTIQLLYDSKTNTQPIEICEDVGYNYIGISAKSKSHEYVSAQYDTLQDEKEHHDDCRKMRRTRRNRLRYRKPRFDNRKRGEGWLAPSLRHKKELNVNVVKMYCAVMPITYATVEVGSFDTMLVKAIQEGKVIPEGADYQKGPRYNLATLREAVFYRDNYVCKVCGRKATEGAILHMHHMFYWKGRHGNSLDELLTVCEKCHTPANHQKGGKLYGFGEDVKFTDLSGAAFMNTVRWQIVNELYAAFGKPFVTITYGAVTKEKRIALRLEKSHNNDAYAMGDYHPACRCKFIHYQKRRRNNRVLEKFYDATYIDTRTGNKAKGKELFNGRISRNHKKDSENLHKYRSKKVSKGRRSIRRRRYAIQPYDTVRLEGKTYITSGCHNKGTRLLIPVNGKSKSVAISKVQVVCHAGAWIQII

SEQ ID NO: 15247 - protein, 544 aa, unidentified
  REGION 1..544: note = Human gut metagenome
MKQKKQKVMVYILNKKGKPLMPTTRCGHVRKLLDSKKAVVVSSNPFTIRLKYDTPNGVQDVFAGIDSGRENIGSGASNEDGDCLYLGELKTSNKSIKMKMTERAGFRKERRSHDRQNKQRKARKDHTEIQNGNADICRTTISCKSVQISYPAAEKSVTHKIIRGKEGKFANRHRDEGWITPSARQLVQMHMNDLKSMCRILPISHVTLERVAFDFQKLENENIKAWEYGKGKLYGYDSPEEYIHDVQGGKCLICGKPHIDYLHHIIPRSKGGSNKVSNLAGLCYDCHYGPMGVHNCQDTQDRLPELKNEANKQYKVSLLNSVMPVLIEEMDKFCKANSIIFSICGGHDTAKVRDMYDLQKDHCIDGFAISLAGRNVKSVDVMPDRIHQKQRYKKKSKNIIQKRNCREYYDGKKLAAVNRHKGTDQKADSLEEYMNTYAETHTADECKKHFESLTVKPARRTYTFHKEGRICPFHIGDKVRYEKKNKIKGNTKVETFICEGIRFPKDENKAKVEHNKTKSKKMKFCRVLEPGCTPYIDYRKLVLI

SEQ ID NO: 15248 - protein, 346 aa, Arthrospira sp.; identical to SEQ ID NO: 6643

SEQ ID NO: 15249 - protein, 500 aa, Eubacterium sp.; identical to SEQ ID NO: 10437

SEQ ID NO: 15250 - protein, 465 aa, unidentified; identical to SEQ ID NO: 3603
  REGION 1..465: note = gut metagenome

SEQ ID NO: 15251 - protein, 441 aa, unidentified; identical to SEQ ID NO: 6900
  REGION 1..441: note = Human gut metagenome

SEQ ID NO: 15252 - protein, 431 aa, unidentified
  REGION 1..431: note = Human gut metagenome
MPNKVYVINKHGRPLMPCSPAKARHLLDDGKAKVKKRTPFTIQLIYGCSGYTEKVVLGVDAGSKTIGLSASTKKEELFAANVTPRNDVVDLLSTRREFRRTRRSRKTRHRKARFNNRVHSKHKGWLAPSVEVKIQEHITCIKRVCNILPISKVVVETAEFDLQLLKAVEEGKPVPQGEDYQKGEMYGHYNVRQYVLWRDGFTCQCCGAHSTKKKDVKLHVHHLETRKTGGDAPSNQITLCEDCHQKLHKGLIPAADFKKRKRKSTRDAAFMGIMRNTLMQRLRSELPIPVAETRGYITKATREKLLVLSKSHTNDALAIAQGRHGFNVGYLQSIPQNNRIYTIRPVRHHNRQLHKATVLKGGIRRVNQAGKYVYGFRLYDKVRYNGVECFVWARRVMGYFRLRHLGGKNVKCGANYKNLELLERSQNYLIA

SEQ ID NO: 15253 - protein, 512 aa, unidentified
  REGION 1..512: note = Human gut metagenome
MSTVYVLNKDGKPLMPTTRGGHVRHLLKEQKARVVQSNPFTIQLLYETNDAVQPLYLGIDPGRTNIGVAVVKADGTAVFTAHLKSRNKEIPKLMQDRKRARRARRTNGRRCRRQRRAKANGTISKKCVKQDTAQSKNPSKRAKEIGVIKRHLPGCKKDVLCVGIKNKEAKYTNRARLEGWLTPTANQLLQTHINLVKKIQKFLPISDAVLEVNKFAFMRLDNPNIQKWQYQQGPLYQKGSLENAVSEMQEHHCLFCEKPIEHYHHVVPKSENGSNTIANIVGLCAEHHNLVHKDVAWQEKLVEEKTGLNKKYGALSVLNQIIPALTKELSFLFPKHSFMTNGKSTHDYRAAHGISKDHWLDAYCIACSGLPIDVCDSTINNCVPYELKQFRRHDRRALNNENMNRVYTLNDKVVATNRHKATEQEAASLEEFRKEHPNDVCKLKVKEHHPTYRNMNRNYPGSVFLVGKQIHVMQGIASSKDGKATKYNDTRATTIAAGKCKFVAKNSGILFV

SEQ ID NO: 15254 - protein, 447 aa, unidentified; identical to SEQ ID NO: 3915
  REGION 1..447: note = Human gut metagenome

SEQ ID NO: 15255 - protein, 465 aa, unidentified; identical to SEQ ID NO: 4783
  REGION 1..465: note = Human gut metagenome

SEQ ID NO: 15256 - protein, 442 aa, unidentified; identical to SEQ ID NO: 2903
  REGION 1..442: note = Human gut metagenome

SEQ ID NO: 15257 - protein, 456 aa, Idiomarina sp.
MAIFVLDKKKQPLMPCSEKRARLLLQRGRAVVHKRYPFTIRLKDRVGGKTQPLRLGIDPGSKTTGLALMRETEGEQRHVLCLFELIHRGFQIKKALQQRAAFRRRRRSANLRYRAPRFNNRTKPKGWLAPSLQHRVDTVMAWANRLSRLAPVTAISQELVRFDTQKLENPEISGVEYQQGTLLGYEVREYLLEKWGRECAYCGTGDTPLEIEHVVPRSRGGSNRVSNLTLSCHPCNQSKDALPLAGFFAHDEGLRKRLKANGLSADAQLERVQRQLKQPMRDASAVNATRWALFSALKTTDLPVAVSSGGRTKYNRQRLNIPKTHALDAACVGAFEKLHDWTVPTLTIKAMGRGSYQRTRLTKHGFPRGYLMRQKQVHGFQTGDMVRAIVPTGKKAGTYTGRVAIRKTGSFNVQAEHGAVQGISHKYCTLIQRSDGYGYYITPFTNLTGGAGQAVA

SEQ ID NO: 15258 - protein, 431 aa, unidentified; identical to SEQ ID NO: 4463
  REGION 1..431: note = Human gut metagenome

SEQ ID NO: 15259 - protein, 373 aa, unidentified
  REGION 1..373: note = Human metagenome
LGVDAGYKHVGLSASTENAELYASEVELRQDVSDLLSARRALRQSRRNRKTRYRAPRFNNRLRTKRKGWLAPSVENRINAHLSRIEAVLRLLPVTKISVETASFDMQLLKNPDIAGKEYPEGEQLGFWNVREYVLCRDRHVCQHCYGRSKDPVLNVHHLESRRTGGDSPGNLITLCETCHKALHRGDITLKAKRGQSFRAEAFMGIMRWEVHNRLRALHPGIEVSNTYGYRTKHARIANGIAKSHCADAFCIAGNLGAERLCEFFFQKQTRRNNRQIHKLSILKGGIRKRNQAPFEVKGFRLFDKVACQGEEGFIFGRRSSGFFDVRKLDGTRISAGISYKKLHLLEKRRTYLTEIRKEEALPPLPEGRGLRA

SEQ ID NO: 15260 - protein, 408 aa, unidentified; identical to SEQ ID NO: 7570
  REGION 1..408: note = Human gut metagenome

SEQ ID NO: 15261 - protein, 442 aa, unidentified
  REGION 1..442: note = Human gut metagenome
MSTTVFVLDKKHRPLMPCRPARARRLLRAGRARVVKRFPFVIRLVDRTVEQSEVQPVLIKLDPGSRETGAAVVRDDGKKRHHALAFFVIEHRGGAIRDALKARSAFRRRRRSQNLRCRSPRFLNRVKPKGWLPPSLRHRVETTLSFVRRMCRYLPVSGIATELVKFDSQKLQNPEVSGVDYQQGTLFEYEVREYLLEKFGRKCVYCGAEGVPLNIDHVVPRAKGGSNRVSNLVLACMSCNQKKGARSLEDFLKGKPKVLARVRRELKTPLRDAAAVNATRWVLFNELKATGLPVETGSGALTKLNRHAFGVEKEHWLDALCVGRLNGVVTRKGLNVLEIRCMGRGSRQRTRLTKYGFPRGYLMRQKCVHGFATGDMVEANVPKGKKAGLWRGRVAVRVSGSFNIQTPKGVIQGVGWKHCRLISHNDGYGYAWLGHAPHSSPA

SEQ ID NO: 15262 - protein, 404 aa, unidentified
  REGION 1..404: note = Human gut metagenome
LLKEKKAIVKRRTPFTIQLTIATGETKQPGSLGVDAGYEHVGLSASTEKAELYASEVELRQDITDLLSARRALRQSRRNCKTRYRAPRFDNRIRTKRKGWLAPSVENRINAHLSRIKAVLRLLPVTKITVETASFDLQLLKNPDISGKEYQEGEQLGFWNIREYVLCRDGHVCQHCYGRSKDPVLNVHHLESRRTGGDSPGNLITLCETCHKALHRGEITLKAKRGQSFRAEAFVGIMRWEVHNRLRALHPGIEVSNTYGYRTKHARIANGIAKSHCADAFCIAGNLGAERLCEFFFQKQTRRNNRQIHKLSILKGGIRKRNQAPFEVKGFRLFDKVACQGEEGFIFGRRSSGFFDVRKLDGTRISAGISCKKLHLLEKRRTYLTEIRKEEALPPLPEGRGLRA

SEQ ID NO: 15263 - protein, 516 aa, unidentified
  REGION 1..516: note = Human gut metagenome
MTVLEELLSKTEYVYVLGTDGKPQMPSKRKRHILKLLNTGKARIVEKMPFTVQLKYKSTPILQPITLAEDPGRTNIGTTALSQLGDLIFSAVVETRNKEIKKLMSDRKAHRQASRRGERKARQRLAKKYNTMIKAGMIMRKLPQYAADKFVTCKFIRNTEARFCNRKRCQDWLTPTVNHLVQTHLNVVKKINKYLPITDIAIEVNRFAFIQMKNPDASGVDFQNGPLKGFDDVKAAIREQQHGKCLMCKNDIEHFHHIIQRSKGGSDTIKNLAGLCKKCHAKVHTDAEFQAKLKDKKEGLIKKYGALSALNQAVPLICKELLKIYGAEHVYFCTGKDTSLIRSSLGYEKTKENQMHEIDAYCIGLAALGVNHVKELPESINTYKIKQFRRQDRSAIHHQTERSYYLGKQKIATNRKPRFEQSGDALSDWYEKQVQRYGKREADKMLSAVTVKKSTRFYNVSNRLMPGTVFDYNGQRYVMSGQLTGGKYLRAYGDTKTNYPVLKCRVLRKNEGLVFI

SEQ ID NO: 15264 - protein, 431 aa, unidentified; identical to SEQ ID NO: 6055
  REGION 1..431: note = Human gut metagenome

SEQ ID NO: 15265 - protein, 396 aa, unidentified; identical to SEQ ID NO: 4508
  REGION 1..396: note = Human gut metagenome

SEQ ID NO: 15266 - protein, 420 aa, unidentified
  REGION 1..420: note = Human gut metagenome
MQYVYVLNKHGEPLMPCSPRKARLLLKQKKACVIKRTPFTIKLLYGSTGYKQPVTLGVDAGSKHIGISATTEKHELYREEATPRNDVVDLLSARRAFRRSRRNRKTRYRAPRFDNRVHSKHKGWLAPSVEVKIQEHITLIEHVCRILPVTLVRVETAEFDTQRLKAMLEGKPLPVGTDYQLGEMYDEYNVRQYVLKRDNYTCQCCGAHPTKTKAVKLHVHHIETRRTGGNAPNNLITLCTVCHKALHAEKVTLDGKKRGKPLKDAAFMGIMRKILMERLRKELKIPVQGTYGYITKYLREKYGIPKSHTNDARCISKNPLAIPCDTCYYTKAVRHHNRQLHKATILKGGIRKANQAPYIVKGYRLWDKVAYNGTECFITGRRTSGYFALKELDGTVVSNSISYKKLRLLEAATNYIIERK

SEQ ID NO: 15267 - protein, 420 aa, unidentified; identical to SEQ ID NO: 5136
  REGION 1..420: note = Human gut metagenome

SEQ ID NO: 15268 - protein, 447 aa, unidentified; identical to SEQ ID NO: 5316
  REGION 1..447: note = Human gut metagenome

SEQ ID NO: 15269 - protein, 518 aa, unidentified; identical to SEQ ID NO: 7282
  REGION 1..518: note = Human gut metagenome

SEQ ID NO: 15270 - protein, 466 aa, Cupriavidus sp.; identical to SEQ ID NO: 4436

SEQ ID NO: 15271 - protein, 447 aa, unidentified
  REGION 1..447: note = Human gut metagenome
LVSGQLIMVWEAIQTRRIKPHDIGEGTLRRHAAGTVSFPVLCKNRKETLMSVLVIGRNGRALMPTNPRKARLLLKKKTASVVCRHPFTIQLLYKTGCATQEGCIGIDTGSQHIGVGITCGDRVILKDEHALRSSMEKRSLLATRAVMRRGRRYRKVRYRKPKWRHHTKRMYFEKANRRGQHWRKVKTTTQSPRSKGWLPPSLQSKCDHHFRIIDRYLKYLPDPITRNLVIETGRFDMARMNDPTIHGEMYQRGPMYDAENLRAYIFARDNYQCACCKAKAGTTRKADGTTVKLVAHHILFRSRGATDNPKYMVSVCDHCHTTKAHQPGGILYSWMENNKKVARGLRDATFMNILRKRLFARYPQAAFTYGNITATDRKQLRLPKSHANDAVAISLFGKEASTVKNICQTMHYKQIRKSKRSLHEAIPRKGRKNPNTKAVRNKKNTTQ

SEQ ID NO: 15272 - protein, 413 aa, unidentified; identical to SEQ ID NO: 3119
  REGION 1..413: note = Human gut metagenome

SEQ ID NO: 15273 - protein, 529 aa, unidentified; identical to SEQ ID NO: 5528
  REGION 1..529: note = Human gut metagenome

SEQ ID NO: 15274 - protein, 244 aa, unidentified
  REGION 1..244: note = metagenome
LKVFVLNMRGQPLMPCSPAKARHLLRDKKAVVKRRTPFTIQLTIATGETKQDVTLGVDAGAKHIGLSASTEKEEVFASEVELRQDITELLSARRAFRRARRHRKTRYRAPRFSNRVHSKHTGWLAPSVENRIQAHMSRIDAVCGLLPVTKFVIETASFDIQKIKNPDIEGTDYQQGDQLGFWNVREYVLFRDGHVCQHCRGRSKDKILNVHHIESRQTGGDAPNNLITLCETCHKAYHAGKIKL

SEQ ID NO: 15275 - protein, 477 aa, Lactobacillus sp.
MASMDNIVEGQQRNFALGLPMRIAAGSMIAGKGGKMEYENANRVFLLNKDGKPLMPCRPRKARLLLKSGKAFVVKKYPFTIQLKYGSYGYKQKVSLGVDTGQRHIGFAVTSQDKVLYQSEVELRQDVHKNLSTRRVYRRSRRNRKTRYRQARFLNRVHGKRDGLWLPPSVKGKASHNIAWIKRYLAVLPNPDLHIEVGKFDMAKMVNPAISGKQYQEGSLHGWKNYEYYVLARDEYTCQLCHKHGEGVKLVVHHIVYRSQGGTDRVDNLITLCTNCHTTKNHQPGGKLYKWMKAKKKVTRQLKGATFMNILRKRIMTAFPEASYQYGYQTFFDRKKFNLPKGHFTDAIAISGIKSVGQMPETVAMISQFRKKKRSLHEATARKGRKEANRTSKRNAKNTKYARGLWLNDYVHVIGTNLRGYVQSYLSKGAYVRLSDGLGNYVIKDGKNYISTKLCKLITHNGNWQKAEQKLLLYEFK

SEQ ID NO: 15276 - protein, 473 aa, unidentified; identical to SEQ ID NO: 3562
  REGION 1..473: note = uncultured beta proteobacterium

SEQ ID NO: 15277 - protein, 424 aa, Caldicoprobacter sp.; identical to SEQ ID NO: 2397

SEQ ID NO: 15278 - protein, 496 aa, unidentified; identical to SEQ ID NO: 2063
  REGION 1..496: note = Human gut metagenome

SEQ ID NO: 15279 - protein, 421 aa, unidentified
  REGION 1..421: note = Human gut metagenome
MQYVYVLNKHGESLMPCSPGKARLLLKQQKAHVIKRTPFTIKLLYGSTGYKQPITLGVDAGSKHVGLSASTEKRELYCEEFTPRNDVVDLLSTRKQNRRSRRNRKTRYRAPRFDNRVHGKHKGWLAPSVEVKIQEHITVIKRICRILPVTLVRVETAEFDTQRLKAMLEGKPLPVGADYQLGEMYDEYNVRQYVLKRDNYTCQCCGAHPTEKKPVRLHVHHLESRHVGGNAPNNLITLCVACHKALHEGKITLDKGKKRGKPLRNAAFMGIMRNTLLARLKDELNIPVKQTYGYITKLLREKNKIPKSHVNDARCIAKAPNAKPCDTMLYTRALRHHNRQIHKAKILNGGIRKKNQAPYLVKGFRLWDKVRYNGEECFITGRRSSGYFALKKYDGTVISNSASFKKLMLLEAATNYITERS

SEQ ID NO: 15280 - protein, 415 aa, unidentified; identical to SEQ ID NO: 11963
  REGION 1..415: note = Human gut metagenome

SEQ ID NO: 15281 - protein, 531 aa, unidentified
  REGION 1..531: note = Human gut metagenome
LYIKMTSCTCTVFPACNHAKASSSQGKHNLLFRQERLIVKKVTYMSTVYVLNKDGKPLMPTTRGGHVRHLLKEQKARVVRTKPFTIQLLYETNDVVQPLYLGIDPGRTNIGVAVVKTDGTAVFTAHLETRNKEIPKLMKKRKESRRARRTNGRRCRRQRRAKANDTISKKCVKQPTAQNGSISKRAKEIGIIKRRLPGCEKDVLCIGIKNKEARFNNRTRPEGWLTPTANQLLQTHINLVKKIQKFLPISDVVLEVNKFAFMQLDNPNIQKWQYQQGPLYKKESLERAVSEMQEHHCLFCDKPIDHYHHVVPQSENGSNTIANIVGLCAEHHNLVHKDAAWQKKLAEEKVGLNKKYGALSVLNQIIPALTKELSFLFPEHSFVTNGKSTYDYRATHGVSKDHWLDAYCIACSVLPSDVCDSNINNHMPYELKQFRRHDRRVLHKANTSRVYTLNGKKVATNRHKAAKQTADSLEEFRQSHPDDVCKLKVKEHHPAYRNLNRNYPGSVFFVGKQVHVMQGIASSKDGKATKY

SEQ ID NO: 15282 - protein, 488 aa, unidentified; identical to SEQ ID NO: 9276
  REGION 1..488: note = Human gut metagenome

SEQ ID NO: 15283 - protein, 408 aa, unidentified; identical to SEQ ID NO: 8232
  REGION 1..408: note = Human gut metagenome

SEQ ID NO: 15284 - protein, 473 aa, unidentified
  REGION 1..473: note = Human gut metagenome
MPLNSLDGVRTVGNPYKPWDNIGEGHITDLPVWAACSSIAAIQKEIQMVYVQNRSGQPLMPTEDHRKVRLLLKNGLAVVVKRTPFTIRLATGSKNYVQPVILGVDAGSRTAGLSASTKQRELFAAEVTLRNDVVNNLSARREFRKARRHRKTRYRQPRFHNRVHSKQKGWLAPSVEVKIQEHITVIKRVCRILPVSRVVVETAEFDLQLLKAIADGRPVPQGEDYQKGEQAGFYNVRQYVLWRDDYRCQCCRKHGKGIKLHTHHKESRKTGGDAPENLVTLCEVCHRKLHQGLIAEQSLKKRSRMSTRDAVFMGIMRRTLTERLCRELKVPVAGTKGYITKYTRVELLHLPKSHAGDALAIAQGRHGFGIGQATFIKPVERIYQIKPVRHHNRQLHKATILRGGIRKSNQAPKYVKGSRLYDKVLYQGRECFIWGRRTTGSFLLKLLDGTKVKDGVSCKHLKLLERSSQYLAA

SEQ ID NO: 15285 - protein, 416 aa, unidentified
  REGION 1..416: note = Bioreactor metagenome
MLVYVLNKHGKPLMPCKPSKARKLLKQGKAKITQREPFTIQLIYGSSGYKQPITLGIDAGSKFIGVSATTEKQELFSAEVELRNDIVQLLSERRQYRRSRRYRKTRYRKPRFSNRVRSKNKCWLAPSIENKIQTHLKIVEKVHKILPITKIITEVASFDIQKIKNPNIEGVEYQQGEQLGFWNVREYVLWRDNHTCQICKGKSKDNRLNVHHIESRQTGGNAPNNLITLCETCHNKYHKGELNVKLKRGQSFRDTAFMGIMRWTFYNRLKNIYPNVELTYGYITKNTRITHKLPKSHRIDALCISGNPKAKQLDYWYYIKQVRKHNRQIHKAKILKGGIRKLNQAPYLVKGFRLFDKVKYKGQECFIFGRRSSGYFDLRKLDGTVIHRSASYKDLQLLSKRKTLLWERREGVSSQT

SEQ ID NO: 15286 - protein, 427 aa, Nostoc sp.; identical to SEQ ID NO: 2670

SEQ ID NO: 15287 - protein, 291 aa, unidentified
  REGION 1..291: note = Human oral metagenome
VRRKGRIAPSILQKRQAVVRITDSLSKYIRIDSIYLEDVAIDVRVLTDEKKLYSWQYQQSNRLDENLRKATILRDNCKCQLCGNKNCRLEVHHITPRRMSGANTIGNLITLCSECHSNVTGREMEFAEQLYSKIGKKKNNVSLQYASHVMVGKTWLREELSKRVPVFLTTGGDTANKRIDWNLEKSHEIDAVCITNLEPESVGVKPWNVKPLRHQRKTMKVKEILGFRHRDIVCYTFKNGEYHEGYVTALYPSEGKQKEGLNFLSPTKHCKRVNPKKCQRLDRPDKFLWLV

SEQ ID NO: 15288 - protein, 406 aa, unidentified; identical to SEQ ID NO: 9803
  REGION 1..406: note = Human gut metagenome

SEQ ID NO: 15289 - protein, 470 aa, unidentified; identical to SEQ ID NO: 5320
  REGION 1..470: note = Human gut metagenome

SEQ ID NO: 15290 - protein, 544 aa, unidentified
  REGION 1..544: note = Human gut metagenome
MKQKKQKVMIYILNKKGKPLMPTTRCGHVRKLLDSKKAVVVNSNPFTIRLKYDTPNCVQDMFAGIDSGRENIGSGASNEDGDCLYLGELRTSNKLIKIKMTERAGFRRERRRHDRQNKQRKARKDHTEIQNGNIDICRTTISCKSVQISYPAAEESVTHKIIRGKEGKFANRHRDEGWITPSARQLVQMHMNDLKSMCKILPISHVTLERVAFDFQKLENENIKAWEYGKGKLYGYDSPKKYIHDVQDGKCLVCGKPHIDYLHHIIPRSKGGSDKVSNIAGLCYDCHYGPMGVHNCQDTQDRLPELKNEANKQYKVSLLNSVMPVLIEEMDKFCKANSIMFSICEGHDTAKVRDMYDLQKDHCIDGFAISLVDRNVKSVDVMPDRIYQKQRYKKKSKNIIQKRNCREYYDGKKLVAVNRHKGTDQKADSLEEYMNTYAETHTADECKKHFDSLTVKPARRTYTFHKKGCICPFHIGDKVRYEKKNKIKGNTKVETFICESIHFYKDENKAKVEHNKTKSKRMKFCRVLEAGCTPYIDYRKLALM

SEQ ID NO: 15291 - protein, 448 aa, Clostridium sp.; identical to SEQ ID NO: 4254

SEQ ID NO: 15292 - protein, 431 aa, unidentified
  REGION 1..431: note = Human gut metagenome
MPDKVYVISRLGHPLMPCSPAKACHLLDDKKAKVVKRMPFTIRLLYGSTKYIQPIILGVDAGSKTIGLSASTAKEEVFAAEVMPRNDVVENLSTRREFRRARRNRTTRYRKPRSDNRVRSNHERWLAPSVKVKIQEHITSIKRVCNILPISKVVIETAEFDLQLLKAIQEGKPIPEGEDYQKGEMYGSYNVCQYVLWRDNYTCICCGVRGTPKNPVRLHVHHFESRKYGGNAPDNHGTLCDDCHKKFHLGIITDVKLKTRRRQSTRDAAFMGIMRKTLMWRLRTELFIPVAETMGYITKATREKLLVLPKSHTRDALAIAQGRHGFGIKEYAYVEPANHIYTVRPVRHHNRQLHKASILKGGIRKRNQASKYVFGFRLYDKVLYQGKACFVWGRRTSGTFLLRTIDGIKVKDGVSYRNLTLLERSSNYLIA

SEQ ID NO: 15293 - protein, 443 aa, Anoxybacillus sp.; identical to SEQ ID NO: 4041

SEQ ID NO: 15294 - protein, 414 aa, unidentified; identical to SEQ ID NO: 14215
  REGION 1..414: note = Human gut metagenome

SEQ ID NO: 15295 - protein, 427 aa, unidentified; identical to SEQ ID NO: 5062
  REGION 1..427: note = Human gut metagenome

SEQ ID NO: 15296 - protein, 382 aa, unidentified
  REGION 1..382: note = Human oral metagenome
MVYVINKDGQALMPTERFGKVRRLLKNGLAHVVCRIPFTIQLDYETTHFVQPISLGVDAGSKHIGISATTSEKELYAADVELRNDIVEKLSTRRERRRTRRSRLRYRKARFNNRVSSKHKGWLAPSVENKIQTHLTVVEKIHKFLPITKIIVETASFDTQKIKNPSISSKEYQQGEQLGFFNVREYVLFRDNHTCQHCKGKSKDHILNVHHIESRKTGGNSPSNLITLCESCHKAYHNGKIDIKVKRGASFRDAAFMGIARWTTYERLKNIYPNVSMTFGYITKNTRITNGLPKEHHVDARCISGNPKSKPLGYYFYQKKVRCQNRQIHKANFLKGGRKKLNQSPFLVKGYRLFDLVEYQKELYYIFGRRDRGFFDIRKLDG

SEQ ID NO: 15297 - protein, 456 aa, unidentified; identical to SEQ ID NO: 13864
  REGION 1..456: note = Human gut metagenome

SEQ ID NO: 15298 - protein, 416 aa, unidentified
  REGION 1..416: note = Human gut metagenome
MVYVLSQNGQPLMPTENHAKVRALLKHGKAKVIQRCPFTIQLLYESTTHTQKINLGIDAGSKTIGISATTDSKVLYESEVVLRNDIVELLSGRRALRRSRRNRKTRYRKPRLDNRRRPDGWLAPSIRQKIKTHVTVVENVMKILPVTKIIVETASFDIQKIKNPEIEGAEYQYGEQLDFWNVREYVLFRDGHTCQCCKGKSKDNILNVHHIESRKTGGNAPNNLITLCETCHKAYHKGVITLPKEIHRGMRFRDAAFMGVMRWAFYDRLKELYNPLGVEVINTYGYITKNTRIEHGLPKEHYVDARCISDNPAAKPLDHYYFQKKVRCHNRQIHKNTILKGGIRKRNQASYEVKGFRLYDQVLWKGQKCFIFGRRSTGRMDLRLLDGTHVNASVGYKNLKLLSMRKNYLIEQRKAG

SEQ ID NO: 15299 - protein, 420 aa, unidentified; identical to SEQ ID NO: 10196
  REGION 1..420: note = Human gut metagenome

SEQ ID NO: 15300 - protein, 543 aa, Moorena sp.; identical to SEQ ID NO: 2371

SEQ ID NO: 15301 - protein, 465 aa, unidentified; identical to SEQ ID NO: 6840
  REGION 1..465: note = Human gut metagenome

SEQ ID NO: 15302 - protein, 418 aa, unidentified
  REGION 1..418: note = Human gut metagenome
MVYVLGQDGHPLMPTCRHGKVKRMLKSRMAKVVKKCPFTIQLQYESTTHTQKINLGIDAGSKTIGVSATTESKVLYESEVVLRNDIVELLSGRRALRRSRRNRKTRYRKPRLDNRRRPDGWLAPSIRQKIKTHVTVVENVMKILPVTKIIVETASFDIQKIKNPEIEGAEYQYGEQLDFWNVREYVLFRDGHTCQCCKGKSKDNILNVHHIESRKTGGNAPNNLITLCETCHKAYHKGVITLPKEIHRGMRFRDAAFMGIMRWAFYDRLKELYTPFGVEVINTYGYITKNTRIEHGLPKEHYVDARCISGNPAAKPLGHYYFQKKVRCHNRQIHKNTILKGGIRKRNQAAYLVNGYRLFDKVKYQNQEYFIFGRRSSGFFDIRTLDGTKVNKGSISCKKLQLVEKSKHYLTEQRKVTA

SEQ ID NO: 15303 - protein, 432 aa, Moorena sp.; identical to SEQ ID NO: 13730

SEQ ID NO: 15304 - protein, 418 aa, unidentified; identical to SEQ ID NO: 6784
  REGION 1..418: note = Human gut metagenome

SEQ ID NO: 15305 - protein, 355 aa, Arthrospira sp.; identical to SEQ ID NO: 11186
  SITE 169: note = misc_feature - Xaa can be any naturally occurring amino acid
  SITE 350: note = misc_feature - Xaa can be any naturally occurring amino acid

SEQ ID NO: 15306 - protein, 557 aa, unidentified; identical to SEQ ID NO: 5269
  REGION 1..557: note = Human gut metagenome

SEQ ID NO: 15307 - protein, 414 aa, unidentified
  REGION 1..414: note = Human gut metagenome
MPCSPAKARLLLKEKKAIVKRRTPFTIQLTIATGEAKQPVSLGIDAGYKHVGLPASTEKAELYASEVELRQDITDLLSARRALRQSRRNRKTRYRAPRFDNRIRTKRKGWLAPSVENRINAHLSRIEAVLRLLPVTKITVETASFDLQLLKNPDISGKEYQEGEQLGFGNIREYVLCRDGHVCQHCYGGSKDPVLNVHHLESRRTGGDSPDNLLTLCETCHKALHRGEITLKTKRGQSFRAETFMGIMRWEVLNRLKASHSELKVHNTYGYLTKHARIENGIAKSHGADAFCIAGNLGAERLGEFFFQKQTRRNNRQIHKLSILKGALRKRNQAPFEVKGFRLFDKVACQGEEGFIFGRRSSGFFDVRKLDGTRISAGISYKKLHLLEKRQTYLIEIRKEEAFPPLPEGRGLRA

SEQ ID NO: 15308 - protein, 415 aa, Eubacterium sp.; identical to SEQ ID NO: 6925

SEQ ID NO: 15309 - protein, 378 aa, unidentified
  REGION 1..378: note = Human gut metagenome
VIRLTFACEDQTQPITLGVDAGSKHVGLSATTEKEELYAAEVELRTDIVDLLSTRRQNRRTRRNRLRYRPARFDNRVHSKNKGWLAPSIEQKIQSHLKAVEDVHKLLPISKIIVETASFDIQKIKNPDISGKEYQEGEQLGFWNVREYVLWRDGHVCQNCKGKSKDKILNVHHIESRKTGGNAPNNLITLCDTCHDKCHKGEIELRIKRGQSFRDAAFMGVMRWAFYARLKEQYSDVHKTYGYITKHVRISNHLEKDHCVDARCISGNLQAKPLGYYYYQKKVRCHNRQFYKVNFLKGGKKKRNQAPYLVHGFRLFDKVLFAGRECFIFGRRATGYFDLRLLTGEKVHVSASCKKLQLLEPKRPFLTERRTRQFLSSL

SEQ ID NO: 15310 - protein, 444 aa, unidentified
  REGION 1..444: note = Human gut metagenome
MSTTVFVLDKKHRPLMPCRPARARRLLRAGRARVVKRFPFVIRLVDRTVEQSEVQPVLIKLDPGSRETGAAVVRDDEKKRHHALAFFVIKHRGGAIRDALKARSAFRRRRRSQNFRCRSPRFLNRVKPKGWLPPSLRHRVETTLSFVRRMCRYLPVSGIATELVKFDSQKLQNPEVSGVDYQQGTLFEYEVREYLLEKFGRKCVYCGAEGVPLNIDHVVPRAKGGSNRVSNLVLACMSCNQKKGARSLEDFLKGKPKVLARVRRELKTPLRDAAAVNATRWVLFNELKATGLPVETGSGALTKLNRHAFGVEKEHWLDALCVGRLNGVVTRKGLNVLEIRGEPSTHAPHEVRLPARVPDAAEVRPRLRDRGHGGGERPQGKEGRTVARPRCGPRLGLIQHSDAEGRHSRRRLEALPTDFTQRRIWVRVARPRTSFLPCLKAGVS

SEQ ID NO: 15311 - protein, 460 aa, Fischerella sp.; identical to SEQ ID NO: 14715

SEQ ID NO: 15312 - protein, 416 aa, unidentified
  REGION 1..416: note = Ga0307928_10003494
MQRVYIQSKDGEPLMPTIRCGAVRRWLRDGKAVVVKLCPFTIRLNWDCETNTQKIIVGVDTGAVNVGCSAVSENKVLYASETKLRTDIHKKMQRRANYRKTRRSKLRHRQPRFNNRTKPKGWLSPSLKSKAESTIKIVKQLSKILPITKVRVEIAKFDTQKLQNPNIKGKEYQQGKLEGYDNIRSYVFERDNYTCQICKKQLGILQTHHIIQKKDGGSDKPDNMVTVHKKCHEDYHKGLIQHKFRKPKEYKIESHITTLKDYIVKGLKKDFEVETTFGYTTKRIRLRLNLPKTHYFDAVAICNPNKIERINYYYKILCRPHGRYKLTQGIRSEQYNPTKKVCGYDTGDKVLCTKNEKQVGYIQGKMATGYFMLSDINNKTILKCTSHRFLNLLEYKKTLQSQLIPIISNGNFLMKS

SEQ ID NO: 15313 - protein, 403 aa, unidentified
  REGION 1..403: note = Anaerobic digester metagenome
MPTTPCKARKLLKQGKAKVVKREPFTIQLLYATGETKQDITLGVDAGSKIIGLSATTDKQELFSAEVELRNDIVDLLSTRREFRRTRRNRLRYRKPRFLNRVYSKNKGWLAPSVGNKIQTHLNVISKIHRILPISKIIVEVASFDIQKIKNPDIQGEQYQQGEQLGFWNVREYVLFRDGYKCQGKKGCKNKILNVHHIESRKTGGNTPNNLITLCEDCHKEYHAGKLKLNIKRGQSFRDAAFMGIMRWTFYNRLKEIYSNVKITYGYITKNTRIQNNLPKEHRIDALCISGNPNVKKLDYWYYIKQVRRHNRQIHKANILKGGKKKLNQAPYLVKGFRLFDKVKYKGEECFIFGRRSSGYFDLRKLDGTVIHRSANCKDLKLISKAKTLLWERRIDVAVSSRD

SEQ ID NO: 15314 - protein, 465 aa, unidentified; identical to SEQ ID NO: 8033
  REGION 1..465: note = Human gut metagenome

SEQ ID NO: 15315 - protein, 427 aa, Eubacterium sp.; identical to SEQ ID NO: 3021

SEQ ID NO: 15316 - protein, 413 aa, unidentified; identical to SEQ ID NO: 2605
  REGION 1..413: note = Human gut metagenome

SEQ ID NO: 15317 - protein, 428 aa, Lactobacillus sp.; identical to SEQ ID NO: 11642

SEQ ID NO: 15318 - protein, 465 aa, unidentified
  REGION 1..465: note = Human gut metagenome
MSTCACVLSKNGERLMPTIRLGKVRHLLKDGKAKIIKHHPFTIQLLYDSETNIQPIEICEDVGYNYIGISVKSQSHEYVSAQYDTLQDEKDCHDSCRKMRRTRRNRLRYRKPRFDNRKHDKGWLAPSLEHKKELNVNVIKMYCEVMPITHATVEVGSFDTMLVRAIEEGKATPESTDYQKGPRYNLATLREAVFYRDNYTCQVCGRKANEGAILHVHHMFYWKGRHGNSLNELVTVCEKCHTPANHQKGGKLYGFGENIKFANLSGAAFMNTVRWQIVNELYAAFGKPFVTFTYGAMTKEKQIALHLDKSHSNDAYAMGSFHPADRCAFEHYEKVKRNNRILEKFHDSRYIDIRTGKEAKGKELFNGRISRSHKKDSENLHKYRGKRIRKGYRALRRKKVALNSGDLVSLNGETLIVHGTHTNKKGNVRVEFKTPSKSGKKSANLKKLKVVKTSNPMHSAWTKVP

SEQ ID NO: 15319 - protein, 442 aa, unidentified
  REGION 1..442: note = Human gut metagenome
MVTVQQSTHHLPFGRVFIRRNLFMVYVISQDGKPLMPCSDPIARLLLKQGKAKVKKREPFTIKLTYETTNHTQGLTLGVDTGSGTIGTAVSKDNGDIVYMSEVVVRNDITDKMTQRAKYRRNRRNRKTRYRKARWLNRASSIKKDRFSPTMQSKLHSHVREIEYIQSILPVTEMVFETGQFDMQLMKNPSLANPKVRPWGYQKGANYGFENTKAMVLNRDNYTCQCCKGKHKDSKLEVHHIVFCSQGGSDEESNLLTLCHTCHKDLHSGKINPKLSGKVKGNLKYATQMNSIRKQLFRFYPNAIETFGYVTKANRLHLGVDKEHYYDACTIATQGNAFNVKSNLYKKKCVSDGDFQKTKGIRSEQPIVTDKICGFRKFDKVRYFGNDYFIKGRMSTGYAILMDIDGNKIDFSTMPRGYKTPKLSNCKRITARSTVMTQVKVV

SEQ ID NO: 15320 - protein, 500 aa, unidentified
  REGION 1..500: note = Human gut metagenome
MATVYVLNKDGKPLMPTTRCGHIRHLLKEKKARVVRTNPFTIKLVYETDDVVQPLYLGIDPGRTNIGVAVVKVDGTAVFTAHLETRNKEIPKLMVKRKEHRQGRRHYRRCKRQRRAAAHGTLSKKCKKQDTAQGGNISKRAQTIGVFERNLPGCENSVLCIGIKNKEARFNNRVRPARWLTPTANQLLLTHVNFVKKICKFLPISDVVLEINKFAFMALDNPNIQKWQYQQGPLYQKGSLENAVSEQQDHHCLFCEKTIEHYHHVILRSENGSDTIANIVGLCAEHHDLIHKDDKLKEELAKKKQGLNKKYGALSVLNQIIPALTYELGSRFQGHFYVTTGKSTYDYRAAHSVSKDHWLDAYCIACSVLPDGCFDNTINSRVPYELKQFRRHDRQVCQQQNVKRKYYLDKKLVATNRHKAIKQETDSLEEYRNNGGTTDKLVVKEHKPTNKRLNRILPGALMAANGKLNVMVASRGLHNGIPDNYVFDNNSKAKPSKCTL

SEQ ID NO: 15321 - protein, 426 aa, Moorena sp.
MSNYVFLIDANKTPMNPIHPAQARKLMEAGKAAVFRRYPFTLIMNRVVENIITYPLTLKIDPGSKTSGIALVNNRDEVVWGMELEHRGQQIKDALLTRRAVRQGRRGRNTRYRQARFLNCKRSKGWLAPSLMHRVLTIETWVKRLCQFAPIAEIRQELVRFDMQQMENPEISGVQYQQGTLFGFEVREYLLEKWGRKCTYCSKKGVPLQVEHIISRAKGGSDRVSNLCLACEKCNQKKGTSYLKDFLKGKPELENRILKQAKTPLKDAAAVNVTRSKLFETLKAMELPVTTGTGGQTKYNRTRLGLDKAHWLDAACVGVTEMLTVLTNKILQVKATGQGGRQRCQTDRLGYPHKYRPLRPIHGFCTGDIVKTIIPKGVNTGTYVARLCPYSNGRGEIYPTTGKKRIGIKLEYVEKPIHRKDGYSYG

SEQ ID NO: 15322 - protein, 426 aa, Lactobacillus sp.; identical to SEQ ID NO: 3294

SEQ ID NO: 15323 - protein, 416 aa, unidentified; identical to SEQ ID NO: 4565
  REGION 1..416: note = Human gut metagenome

SEQ ID NO: 15324 - protein, 411 aa, unidentified; identical to SEQ ID NO: 3762
  REGION 1..411: note = Human gut metagenome

SEQ ID NO: 15325 - protein, 443 aa, unidentified
  REGION 1..443: note = Human gut metagenome
NIGEGSQPVERPRRQNLRVFVLNKRGKPLMPCSPAKARLLLKEKKAIVKRRTPFTIQLTIATGETKQPVGLGVDAGYKHVGLSASTDKAELYASQVELRQDITDLLSARRALRRARRNRKTRYRAPRFNNRIRTKRKGWLAPSVENRINAHLSRIEAVLRLLPVTKITVETASFDMLLLKNPDIAGKEYQEGEQLGFWNVREYVLFRDGHVCQHCYGRSKDPVLNVHHLESRRTGGDSPGNLITLCETCHEALHRGEIALKTKRGHSFRAEAFMGMMRWEVLNRLKASHSELEVNNTYGYRTKHARIVNGIDKSHCADAFCIAGNLGAERLCEFFFQKQTRRNNRQIHKLSILKGGIRKRNQAPFEIKGFRLFDKVACKGEESFIFGRRSSGYFDVRKLDGTRISAGISYKKLRLLEKRRTYLTEIRKEEALPPLPEGRGLRA

SEQ ID NO: 15326 - protein, 431 aa, unidentified; identical to SEQ ID NO: 6055
  REGION 1..431: note = Human gut metagenome

SEQ ID NO: 15327 - protein, 229 aa, Anabaena sp.; identical to SEQ ID NO: 3266

SEQ ID NO: 15328 - protein, 224 aa, unidentified
  REGION 1..224: note = Human gut metagenome
VRGTPKNPVRLHVHHFESRKYGGNAPVNHGTLCDDCHKKFHLGIITDVKLKTRRRQSTRDAAFMGIMRKTLMWRLRTELFIPVAETKGYITKATREKLLVLPKSHTRDALAIAQGRHGFGIKEYAYVEPANHIYTVRPVRHHNRQLHKASILKGGIRKRNQASKYVFGFRLYDKVLYQGKACFVWGRRTSGTFLLRTIDGIKVKDGVSYRNLTLLERSSNYLIA

SEQ ID NO: 15329 - protein, 415 aa, Bacillus sp.; identical to SEQ ID NO: 2431

SEQ ID NO: 15330 - protein, 420 aa, unidentified; identical to SEQ ID NO: 11791
  REGION 1..420: note = Human gut metagenome

SEQ ID NO: 15331 - protein, 523 aa, Ammonifex sp.; identical to SEQ ID NO: 3090

SEQ ID NO: 15332 - protein, 490 aa, unidentified; identical to SEQ ID NO: 3566
  REGION 1..490: note = Human gut metagenome

SEQ ID NO: 15333 - protein, 396 aa, unidentified; identical to SEQ ID NO: 3291
  REGION 1..396: note = Human gut metagenome

SEQ ID NO: 15334 - protein, 442 aa, unidentified; identical to SEQ ID NO: 3234
  REGION 1..442: note = Human gut metagenome

SEQ ID NO: 15335 - protein, 431 aa, unidentified
  REGION 1..431: note = Human gut metagenome
MPNKVYIINKHGRPLMPCSPAKARHLLDAGKAKVKKRTPFTIQLVYGSSGYTQEVILGVDAGSKTIGLSASAETEELLSAEVKPRNDVVDLLSTRREFRRARRNRKTRYRKPRFDNRVRSKHKGWLAPSVEVKIQEHITSIKRVCRILPVSKVVIETAEFDLQLLKAIADGKPVPQGEDYQKGEMYGHYNVRQYVLWRDDYTCQCCGAHATKKKEVRLHVHHLESRKVGGDAPDNQVTLCESCHEKLHKGLITAKDFKKRKRRSTRDATFMGIMRKTLMQMLCSELPIPVVKTRGYITKATREKLLVLPKSHTNDALAIAQGKHGFNVGYLPGILQIDKIYTIRPVRHHNRQLHKATILKGGIRKSNQTEKYVFGYRLFDKVQFNGQDCFIWGRRTSGYFVVKTIDGKVIHNSASFKKLNLVERASNYLIA

SEQ ID NO: 15336 - protein, 448 aa, unidentified
  REGION 1..448: note = Human metagenome
MSTGLRAVQAEPAGIRKGDALKVFVLNMRGRPLMPCSPARARHLLKAGKAVVRRRTPFTIQLRIATGETKQSVTLGVDAGAKHVGLSAATEKEEVFASEVELRQDITGLLAARLSLRRDRRHRKTRYRAPRFLNRVRSKHKGWLAPSVENRIQAHMSCIDAVCRLLPVTRIVIETASFDVQKIRNLEVEGTGYQQGDQLGFWNVREYVLFRDGHVCQHCHGYSKDKILNVHHLESRQTGGDAPNNLITLCETCHKACHAGKIKLKVKRAQSFRAEAFMGIMRWTLLDRMRKAHSGLPVENTYGYLTKNTRITLGLPKTHCVDAYCIAGNLKAVRRGVCLHQRQVRKHNRQIHKCTVLSKTLKDGTKIGYRKLNQTPHLVKNFRLFDKVRCLGQTGFIFGRRSSGYFDVRRLDGVKLSSGISYRKLTLLEKRSTYLTELRKEDGASSPV

SEQ ID NO: 15337 - protein, 419 aa, unidentified; identical to SEQ ID NO: 4877
  REGION 1..419: note = Human gut metagenome

SEQ ID NO: 15338 - protein, 442 aa, unidentified; identical to SEQ ID NO: 3218
  REGION 1..442: note = Human gut metagenome

SEQ ID NO: 15339 - protein, 514 aa, unidentified
  REGION 1..514: note = uncultured delta proteobacterium
MLQRAHKTDGTILPQLCPLEDRGADKPRVPARNGSCQTAALQPSRGETVGQASPAASPAQAESGVSRVFVLAKDGHPLMPCAPGRARVLLKKLRARVVKVYPFTIRIVDRIEGEAQPVRLKLDPGSKTTGLALVREIPGGQDQAVLHLSEVAHRGATVKKHMAQRSAYRRGRRTRNLRYREPRFNNRTRPKGWLSPSLVSRLDNCLSWTRKYMRLCPVQAISVERVRFDMQLMENPEISGVEYQQGTLAGYEVREYLLEKWGRRCSYCDTPNVPLEVEHIHPKGRGGSNRVSNLTLACRECNEKKDDRYIQDFLADDQSRLARILSQLKKPLHDAAAVNATRNAIFFGLRNFGLPVEASTGGRTKFNRCRQDIPKSHCLDAACVGAVGNLLGWNQPFLHIKAMGRGSYQRTRLTADGFPRGYLTRQKAVHGFQTGDMVVAVVLKGKKAGTHKGRVAVRKSGSFNIQTKVGVVQGISWKWCSLLQRQDGYGYRPEKAAALFPNLREGVSTEGESQ

SEQ ID NO: 15340 - protein, 241 aa, unidentified
  REGION 1..241: note = Human gut metagenome
QLGEMYDEYNVRQYVLKRDNYTCQCCGAHTTAKKLVKLHVHHLESRKTGGNAPSNLVTLCTTCHKNLHKGKVTLDGKERGKPLRDAAFMGIMRKTLMARLKEELPIPVQGTYGYITKMRREQNDIKKSHTNDARCISKHPLAEPCSVCYRTKAIRHHNRQTHKANFSKKGIRKRSQMPYLVEGYRLWDKVLYKEQECFVSGRRSSGSFTLKKLDGTSVSKGVTFKKLRLLEPATNYLIERM

SEQ ID NO: 15341 - protein, 442 aa, unidentified; identical to SEQ ID NO: 6360
  REGION 1..442: note = Human gut metagenome

SEQ ID NO: 15342 - protein, 417 aa, unidentified
  REGION 1..417: note = Human gut metagenome
MPCSPAKARLLLKEKKAIVKRRTPFTIQLTIATGEAKQPVTLGVDSGYKHIGLSATTEKAELYASQVELRQDITDLLSARLALRRSRRSRKTRYRAPRFDNRVASKHKGWLAPSVENRIAAHLSRVEAVMRVLPVTAITVETAAFDTQLLKNPDVAGAAYQQGEQLGFWNVREYVLFRDGHVCQHCRGKSKDPILNVHHIESRRTGGDAPNNLITLCETCHKAFHRGEIKLKVRRGKSFKAETFMGIMRRTLFERLKKAHPELNVRNTYGYLTKHKRISHGIAKSHCADAYCIADNLGAKRLEGFFFQKQTRKHNRQIHKLLILKGGLKKKNQAPYEVKGFRLFDKVICKGEEAFIFGRRTSGSFDLRRLDGTRISAGINYKKLRLLEPRTTYLTEFRKEAALPPPHECRGFRAEFL

SEQ ID NO: 15343 - protein, 420 aa, unidentified; identical to SEQ ID NO: 6507
  REGION 1..420: note = Human gut metagenome

SEQ ID NO: 15344 - protein, 424 aa, unidentified; identical to SEQ ID NO: 3434
  REGION 1..424: note = Human gut metagenome

SEQ ID NO: 15345 - protein, 554 aa, Acidithiobacillus sp.; identical to SEQ ID NO: 7890

SEQ ID NO: 15346 - protein, 309 aa, Oscillatoria sp.; identical to SEQ ID NO: 13770

SEQ ID NO: 15347 - protein, 406 aa, unidentified; identical to SEQ ID NO: 2703
  REGION 1..406: note = Human gut metagenome

SEQ ID NO: 15348 - protein, 426 aa, unidentified
  REGION 1..426: note = Bioreactor metagenome
MVYVISKDGKPLMPTKRHGKVRRLLKQGLAKVVRREPFTIQLLYDTTTYTQPVTVGVDIGSKTVGISAITNKQELLSMEVELRQDIKKLLLKRREHRRFRRYRKRRYRKPRFLNRRRPEGWLAPSVKWKADAHIRLVNFVAKILPVTKVVVEVAPFDIHKIVNPEVSGKEYQEGPQKDFWDVREYCLWRAGYKSELSGKKGVLEVHHIVPRSQGGTDNPSNLIVLTAEEHKAIHEGKIKIPRSKLKKVKILKDASHVSTIGWYIVNTLKGRYDINITYGSITKAKRVEMGLEKTHRNDAFVIAGGNKNVNRAPEWYFGKFFRRQNRSLHKANPIKGGKRPVNTVKEVRGFRRFDKVRYKNQIGIIYGLRISGYFDMRSLSGEKIHSSVKWSNLKLLEKAKTLILERGEQRIPLHLKEDGVSCAGLR

SEQ ID NO: 15349 - protein, 465 aa, unidentified
  REGION 1..465: note = Human gut metagenome
MSTCVCVLSNNGERLMPTIRLGRVRHHLKDGKAKIIKHHPFTIQLLYDSKTNTQPIEICEDVGYNYIGISVKSQSHEYVFAQYDTLQDEKACHDSCRKLRRTRRNRLRYRKPRFDNRKRGEGWLAPSLKHKKELNVNVVKMYCTVMPITHATVEVGSFDTMLVKAIQEGKVIPEGADYQKGPRYNLATLREAVFYRDNYVCKICGRKATEGAILHMHHMFYWKGRHGNSLNELLTVCEKCHTPANHQKSGKLYGFGEKIKFADLSGAAFMNTVRWQIVNELYVAFGKPFVTITYGAMTKEKRIALQLEKSHNNDAYVMGEFHPNLRCMFEHYEKARRNNRILEKFYDSRYIDIRTGEIATGKELFNGRINRNHKKDSENLHKYRGKRTYAGHRALLRKKVNLNPGDLVSLNGENLIVHSTHTKKNGAVNVEFETPAKSGQKSASLKKLKIVKAANSIHPAWEKIS

SEQ ID NO: 15350 - protein, 409 aa, Geobacillus sp.
LFVYIINKHGKPLMPCSPRKARLLLKQKKAKVVRRTPFTIQLLYGSSGYKQPVSLGVDMGTRHVGISATTKKDVLFEAEAQLRTDIVELLAIRRQFRRSRRNRKTRYREARFLNRRKPEGWLPPSIQHKINSHIKLIDLVHNILPVTSVTIEVAAFDTQKLKNLNIRGVEYQQGEQMGFWNVREYVLYRDNHTCQYCKGKKKDPVLQVHHIESRKTGGDSPDNLITLCKTCHHEIHEKGLEHIFQRKRPPMRDASQMTAMRWAMFSRIREKYSHANITYGYITKCIRIANGLSKSHMVDARCISGDPLAKPSGTVYLLKFVRKNNRQLHKATILKGGKRKSNKAPRFVKGFQLFDKVVYERKECFIFGRRSSGYFDLRLLDGTKVHASASWKKLKRVEHASTLLIERSI

SEQ ID NO: 15351 - protein, 512 aa, unidentified; identical to SEQ ID NO: 9077
  REGION 1..512: note = Human gut metagenome

SEQ ID NO: 15352 - protein, 456 aa, unidentified
  REGION 1..456: note = Marine metagenome
MQRVFVLGKNKERLSPCTPARARKLLSKNKAAVFRQFPFTIILKERETGNTQPLYFKIDQGSKTTGISLVSINKNSNKVIYACNLVHRGHAISESLTKRRAIRSSRRSRKTRYRKPKWTNTMSKKQFEHINKRPKGWLAPSIKSRLDNTVNLFNKLNKLTPITNVSIENVRFDMQKINNPTISEIGYQQGDLFGFEVKEYLLYQHKHTCAYCHGLSKDPILEIEHILCKSKGGTNRLSNLSLACRKCNQDKGSLLPEEWLQKLSKSKSALNKKRFTLFSKVLKGVKPSLKDAAAVNSIRNALVNSFNLPIELGSGGLTKYNRKQNNYPKEHWIDAACIGLSGEEIHIPTSLIPVEIKANGRGSRQMCRVDKNGFPRTSAKKASNKFNFKTGDIVIAKVKKGKKQGTYLGRVAVRESGYFNITKKSGVVQGISYQYCRLLHKNDGYSYSNLVNLITT

SEQ ID NO: 15353 - protein, 470 aa, unidentified
  REGION 1..470: note = Human gut metagenome
MSVFVVGLNGCRLMPVSERKARLLLKGGKASVYRKVPFTIKLNYKTGSTVQPGYLGIDTGSQHIGVSVVRKDGTVLHKEEIGLRDSMSKRKLLESRASSRRGRRYRKTRYRHPKWKPKTKRTYNEKADRKGRHWKKQKNTFTSKRQAGWLPPSLQSKTNHHIQWIRKLLDLLPEGYRLSIELGRFDPARMKDPEIHGELYQKGPQYDYENVRAYVLARDGYTCRVCKKKGGKLHVHHILYRSRGASDNPKYMATVCSKCHTTENHLPGGILYQWMQDQKKFTRGLRDATFMNILKKRLRKAFPDAVFTYGNITKADREKLELPKSHGNDATAIALVKTEVKSVKDEEPVIHIQQVRRKKRSLHEETPRKGRKEPNRTASRSDKNTKSVTVTKGSGEKKASMTACLFDRVELDGKKGWITGFTGTSCYVKDKEDSYICTSPKYKQVSISRLRILHHCGNWAIGAEKPLGKG

SEQ ID NO: 15354 - protein, 415 aa, Bacillus sp.; identical to SEQ ID NO: 2431

SEQ ID NO: 15355 - protein, 465 aa, unidentified; identical to SEQ ID NO: 5741
  REGION 1..465: note = Human gut metagenome

SEQ ID NO: 15356 - protein, 492 aa, unidentified
  REGION 1..492: note = Human gut metagenome
MTPVWEGRTFAYLPLSKKGEPAMSVFVVGLNGCRLMPVSERKARLILNDGKASVYRKVPFTIKLNYKTGSTTQPGYLGIDTGSPHIGVSVVREGGTVLHKEEIGLRDSMTKRKLLEAKASLRRGRRCRKTRYRHPKWRPKTKRVYCEVPDKKGRHWQKQKNTFTSGRPEGWLPPSLQSKTDHHIRWIKKLQGLLPEWYRLSIELGRFDPARMKDPEIHGNLYQKGPQYDYENVRAYVLDRDRYTCQVCRRKGGKLHVHHVLYRSQGASDNPQYMATVCSSCHTTENHLPGGILYQWMQEQKKFTRGLRDATFMNILRKRLRKAFTDAVFTYGNITKVDREKLKLPKNHGNDATAIALVRTGILSVKDKEPVLYIQQVRRKKRSLHEETPRKGRKKPNRTATRNSKNTKAVTVTKRRDGKKVSVTACLFDRVELNGKKGWITGFTGKACRIVDTEGNYVAATDKYTQVNISSIRILHHTGNWVTGLKRNVGKR

SEQ ID NO: 15357 - protein, 476 aa, unidentified
  REGION 1..476: note = Human gut metagenome
LEVVDTEGVSHPGLPGKYKHKGGQLMSVAVISKTGERLMPTSEYRARKLLKSGKAIKHSYHPFTIQLTEKGTGDIQPIELCMDTGYIHIGISVKSEKHEYLAEQIDTLTDERNRHDACRMYRRQRRGRRRYRQDRFNNRKRDQGWITPSLEHKKEIHIQAISRINKVMPITDITMEMGNFDTQVLKAKEEGKPLPQGAEYQHGERYGIATLREAVFARDGYKCQCCGRTIKDGAILHVHHIKYRSQGGTNSMSNLATVCDKCHTPKNHKPGGKLYNWKPKLPSFKGATFMTTIRWQLYNEVKALFSDIDIYITYGAATKERRRELDVDKSHVNDAFVMGQFHPKHRSKPLCYKKKRRNNRCLEKFYDAKYIDIRDGKKRSGQELFNGRISRNRKKDSENLHQYRQQKVSTGRRTIRKNHYVIQPHDIVIFNGEQFETSGCHNNGTRAILLPQKKSVSIKKLNIHRYAGGYFKSAFN

SEQ ID NO: 15358 - protein, 438 aa, Moorena sp.
MNQVFVLDTTKQPLNPVHPGYARLLLKQGKAAVYRRYPFTIRLSCRVEQPILSPLRIKVDPGSKTSGLALVNDASGDVVWAAELTHRGEQIKRDLDRRRAIRRKRRQRKTRYRKPRFTNRRKRRGTLPPSLESRVCNVLTWVCRLMKVCPVTNISQELVRFDTQALETPDIEGAQYQRGQLSGYEVREYVLLKWKHQCAYCDARDVPLELDHIDPRSRHGSNRVSNLTLACTPCNQRKSNQDVRQFLRDEPERLARILAQMKAPLRDAEAVNATRWMLNARLKTLGLPVECGSGGRTKCNRITRELPKTHWLDAVCVGRSTPESLIIKNIVPLQIRATGHGSRQMCRMDKYGFPRTGSKQHKRVQGFQTGDLVRAVVTSGTKQGTYVGKVAVRSRGTFNISTAHGVVTDIPHRFCVLVARSDGYSYQQGKEAAFPPFA

SEQ ID NO: 15359 - protein, 423 aa, unidentified
  REGION 1..423: note = Human oral metagenome
MLVYVLKQNGQPFMPTERFGKVRRLLKERKAKVVRREPFTIRLLYESETDVVQECYCGVDTGSKHIGVAVVGNDKVLYQSQTELRSDIKKKMNRKRASRRNRRNRKTRYRKPRFLNRRNSIREDKLPPSVKHKIQAHIDEIEFCKKILPISDLILEVSQFDTTLMKSPSLINEKIKHWGYQQGFNYGYSSRRSAILHRDNYTCQCCGKKNCRLEVHHIKFKSNGGTDDEENLITLCEECHKGVHAGIVVLNKKPKRSKGLKHATHMSTIRSRLLREYPDAIETFGFVTSENRNHLKLKKDHYIDACVIAGGGLEFKELDVIFYKRRVSKGDYRLTRGIRGEQKLPTGKLCGFRKFDKVKYFGEKYFIKGRVSCGSVLLMDIFGNKVDFSSMPRGYKTPKMSNCERISARRSILCITRELENEE

SEQ ID NO: 15360 - protein, 470 aa, unidentified; identical to SEQ ID NO: 8916
  REGION 1..470: note = Human gut metagenome

SEQ ID NO: 15361 - protein, 525 aa, unidentified
  REGION 1..525: note = Human gut metagenome
VSLPVKQVNRDKTSTGNSFKAPQRARRRTCRSAGAEQGRNCHLERNIIMIIALDKNKRPLGFLTERRCRILMERKRAVLYRVFPTVVILMDMDVRKLRDLPSYRIKIDPGSKYTGIAIVRNDTDELVYAMQIEHRGDAVRAGLQKRKMARRNRRSRETGYRRAKWGNRCLSDGDKKSYNSSRKDGWLPPSILSVADNVLTWVQRLSRWVNITDCSLEAVRFDTQLLENPNIKGEEYQHGTLFGYEIREYLLEKFGHTCQYCGGESGDPVLEWEHIHPKSRGGSNRVKNALLSCSSCNRDKDNQTPEEWIGQVSFRLSHEKGKKRELDSKRIELIQKVIDGKPEGQPMRYAAWVSSSRRYLENHLFQIFRDVECSSGGRTKYNRTKLGYPKEHHYDALCIGTVPEKGYHDRTNGYYLYAKATGRGTRLRGTLNKCGIIVTKWTSRKKNFFGFQTGDIVVAEVPHKIPRPYKYEGRFVGRVMVRASGSFDIRTTGGRLATVKAGFCRLLQANSGCAYSMERTIPLDH

SEQ ID NO: 15362 - protein, 474 aa, unidentified; identical to SEQ ID NO: 9173
  REGION 1..474: note = Mouse gut metagenome

SEQ ID NO: 15363 - protein, 463 aa, unidentified; identical to SEQ ID NO: 3502
  REGION 1..463: note = Human gut metagenome

SEQ ID NO: 15364 - protein, 424 aa, Succinivibrio sp.
LQDLAYSKKLQLFKGLNMVYVLNCKGVPIMPTTRHGMVRRLLKEHKAKVVKRCPFTIQLSYECANITQPITLGVDTGYENVGISACTEKKVLFEAKAKIRTDIVKLLSARKEARRTRRNKKTRYRKARFLNRGIEKGWLPPSIRAKVESHLGLVAKAHEILPIGKIVVEIASFDIQKNKNPDIKGAEYQQGDQLGFKNVKAYVLARDGCTCRCCKGRSKDKILRVHHLESRLIGGDAPNNLVTLCNSCHTKFHKGLISLDDIKRGKSFKAETFMGLMRNFFFKEFCNKYPCVKSTYGYITKHLREKYHLKKDHHVDARCICGVPQALPSNVYLIKKVRCHNRQIHKCTTLKGARRRLNQAPYTVKGFRLFDKVKVGEQVGFIYGRRQSGSFDVRTVYGERINGSISYKKLQLIETRKSWLIERC

SEQ ID NO: 15365 - protein, 416 aa, unidentified; identical to SEQ ID NO: 6135
  REGION 1..416: note = Lachnospiraceae bacterium

SEQ ID NO: 15366 - protein, 413 aa, unidentified; identical to SEQ ID NO: 3220
  REGION 1..413: note = Human gut metagenome

SEQ ID NO: 15367 - protein, 430 aa, unidentified; identical to SEQ ID NO: 4817
  REGION 1..430: note = Human gut metagenome

SEQ ID NO: 15368 - protein, 465 aa, unidentified
  REGION 1..465: note = Human gut metagenome
MSTCVCVLSNSGERLMPTFRLGKVRRLLKDGKAKIVKHHPFTIQLLYDSKTNTQPIEICEDVGYNYIGISVKSQSHEYVSAQYDTLQDEKDCHDDCRRMRHTRRNRLRYRQARFDNRKRDDGWLAPSLEHKKELNVNVIKMYCEVMPIAHATVEVGSFDTMLVKAIEEGKVTPEGADYQKGPRYNLATLREAVFYRDNYTCQVCGRKANEGAILHVHHMFYWMSRHGNSLSELVTACEKCHTPANHQKGGKLYGFGENIKLANLSGAAFMNTVRWQIVNELYAAFGKPFVTFTYGAMTKEKRIALHLEKSHNNDAYAMGSFHPADRCAFEHYEKVKRNNRILERFYASQYIDIRTGEVTTGKSLFNGRINRSHKKDSENLHKYRGKRIRKGYRALRRKKVALNPGDLVSLNGETLIVHGTHTNKKGTVRVEFKTPSKGGKKSASLKNVEIVKTANSMHSAWKKVS

SEQ ID NO: 15369 - protein, 468 aa, Moorena sp.; identical to SEQ ID NO: 2405

SEQ ID NO: 15370 - protein, 442 aa, unidentified; identical to SEQ ID NO: 7529
  REGION 1..442: note = Human gut metagenome

SEQ ID NO: 15371 - protein, 414 aa, unidentified
  REGION 1..414: note = Human gut metagenome
MPCSPAKARLLLKEKKAIVKRRTPFTIQLTIATGETKQPVTLGVDAGYKHVGLSASTEKAELYASEVELRQDVSDLLSARRALRQSRRNRKTRHRAPRFNNRLRTKRKGWLAPSVENRINAHLSRIEAVLRLLPVTKITVETASFDLQLLKNPDISGKEYQEGEQLGFWNIREYVLCRDGHVCQHCYGRSKDPVLNVHHLESRRTGGDSPGNLITLCETCHKALHRGEIKLKAKRGRSFRAETFMGIMRWGVLNRLKASHPKLEVHNTYGYRTKHARIANGIAKSHCADAFCIAGNFGAKRLGEFFFQKQTRRNNRQIHKLSILKGGIRKRNQAPFEVNGFRLFDKVACQGEEGFIFGRRSSGFFDVRKLDGTRISAGISCKKLHLLEKRRTYLTEIRKEEALPPLPEGRGLRA

SEQ ID NO: 15372 - protein, 420 aa, unidentified; identical to SEQ ID NO: 5809
  REGION 1..420: note = Human gut metagenome

SEQ ID NO: 15373 - protein, 461 aa, unidentified
  REGION 1..461: note = Human gut metagenome
VQPLYLGIDPGRTNIGVAVVKANGTAVFTAHLETRNKEVPKLMQDRKKARRARRTNGRRCRRQRRAKANGTISKKCVKQDTAQNGSVSKRAKEIGIIKRRLPGCEKDVLCIGIKNKEAKYTNRARLEGWLTPTANQLLQTHINLVKKIQKFLPISDAVLEVNKFAFMRLDNPDIQKWQYQQGPLYQKGSLENAVSEMQEHHCLFCDKPIDHYHHVVPQSENGSNTIANIVGLCAEHHNLVHKDAAWQKKLAEEKVGLNKKYGALSVLNQIIPALTNKLSVLFPKHFFVTAGKSTHDYRATHGVSKDHWLDAYCIACSVLPSDVCDSNINNHMPYELKQFRRHARRALNNENMNRVYTLNDKAVAINRHKATEQEAASLEEFRKEHPNDVCKLKVKEHHPTYRNMNRNYPGSVFLVGKQIHVMQGIASSKDGKATKYNDTRATTIAAGKCKFVAKNSGILFV

SEQ ID NO: 15374 - protein, 380 aa, Arthrospira sp.; identical to SEQ ID NO: 3196

SEQ ID NO: 15375 - protein, 442 aa, unidentified; identical to SEQ ID NO: 4467
  REGION 1..442: note = metagenome

SEQ ID NO: 15376 - protein, 414 aa, unidentified
  REGION 1..414: note = Human gut metagenome
MPCSPAKARLLLKEKKAIVKRRTPFTIQLTIATGETKQPVSLGVDAGYKHVGLSASTEKAELYASEVELRQDVSDLLSARRALRQSRCNRKTRYRAPRFDNRIRTKRKGWLAPSVENRINAHLSRIKAVLRLLPVTKITVETASFDMQLLKNPDISGKEYQEGEQLGFWNVREYVLFRDGHVCQHCHGRSKDPVLNVHHLESRRTGGDSPGNLITLCETCHKALHRGEIKLRAKRGQSFRAETFMGIMRWEVLNRLKASHSKLEVNNTYGYLTKHARIKSGITKSHCSDAFCIAGNLGAKRLGEFLFQKQTRRNNRQIHKLSILKGGIRKRNQAPFEIKGFRLFDKVVCKGEEGFIFGRRSSGYFDVRKLDGTRISAGISYKTLHLLEKRQTYLTEIRKEEALPPLPEGRDLRA

SEQ ID NO: 15377 - protein, 414 aa, unidentified; identical to SEQ ID NO: 2588
  REGION 1..414: note = Human gut metagenome

SEQ ID NO: 15378 - protein, 513 aa, unidentified
  REGION 1..513: note = Human gut metagenome
LKKEAAGHRQGKDCRPVRYGPPYRAGMPDGRRKPERKHMVAVVTSTGKPLMPTSAYRARKLLKKGRAVIFKYRPYFTIQLVDRADGEVQEVEYKSDTGSVHVGISVCTEKKELLSEQRDLLENEPEHHNDRKKNRRTRRNRKRYRKPRFDNRKKKPQEGHEKWLPPTLLHKMEVQVRLFREFCRVVPVTSACFEMGKFDTQALKAVSKGEPVPEGEGYQKGERYGTDTLRAAIFLRDGHTCRFCGRSVKDGAILHVHHVGYWKGDRTNRPANLASACEQCHTPANHGKNGLLYGKEPEFKTLKDASYMTSVRWIMLDEIKKAAPGVQVSVTYGVTTKRKRQELHLPKSHVNDAFSMASFHPKKRSDTEYWKKIPRHDRVLQKFYDAVYLDTRDGSEKKGSELSNGRISRNHKKDSENLHQYRGHKVSKGHNSIRRGASSLKPGSIVMYKGEKMTVHGTHTRYVKGKDGKTAKKVNVQFTCPASDGKKSASLEKCTPVSRVYNTGWKRYWPDKK

SEQ ID NO: 15379 - protein, 416 aa, unidentified; identical to SEQ ID NO: 11239
  REGION 1..416: note = Human gut metagenome

SEQ ID NO: 15380 - protein, 431 aa, unidentified; identical to SEQ ID NO: 4463
  REGION 1..431: note = Human gut metagenome

SEQ ID NO: 15381 - protein, 430 aa, unidentified; identical to SEQ ID NO: 13519
  REGION 1..430: note = Human gut metagenome

SEQ ID NO: 15382 - protein, 280 aa, Lamprocystis sp.
MAVFVLDRRGKPLMPCSEKRARLLLTRGRARVHRVVPLQNPQISGVAYQQGTLAGYEVREYLLEQWGRRCAYCTGDGVPLEIDHITPRSRGGSDRVTNLTLACHPCNQAKGNRSAAEFGHPEIEAKAKQSLGDAAAVNSTRWSLLNALTATGLAVETGTGGRTKWNRTRLGVPKTHALDAACVGVVEGVTGWVAPVLSIRCTGRGAYQRTRVTQDGFPRGYLMRHKQVRGFQAGDLVRATVPSGKKAGVHMGRVAVRATGSFNIQTPQGVVQGIGYRHCC

SEQ ID NO: 15383 - protein, 414 aa, unidentified; identical to SEQ ID NO: 4492
  REGION 1..414: note = Human gut metagenome

SEQ ID NO: 15384 - protein, 406 aa, unidentified; identical to SEQ ID NO: 6897
  REGION 1..406: note = Human gut metagenome

SEQ ID NO: 15385 - protein, 431 aa, unidentified
  REGION 1..431: note = Human gut metagenome
MPNKVYVINKHGRPLMPCSPAKARHLLDAGKAKVKKRTPFTIQLVYGSSGYTQEVILGVDAGSKTIGVSASTKKEELFAANVIPRNDVVDLLSTRREFRRARRNRKTRYRKPRFDNRVRSKHKGWLAPSVEVKIQEHITTIRRVYGILPVSKVVVETAEFDLQLLKAIADGKPVPQGEDYQKGEMYGHYNVRQYVLWRDDYTCQCCGAHATKKKEVRLHVHHLESRKVGGDAPDNQVTLCESCHEKLHKGLIAEKDFKKRKRRSTRDATFMGIMRKTLMQRLCSELPIPVVKTRGYITKATREKLLVLPKSHTNDALAIAQGKRGFNVGYLPEIAQIDKIYTIRPVRHHNRQLHKAAILKGGIRKSNQAGKYVFGYRLFDKVQFNGQDCFIWGRRTSGYFAVKTIDGKVIHNSASFKKLNLVERASNYLIA

SEQ ID NO: 15386 - protein, 512 aa, unidentified; identical to SEQ ID NO: 14331
  REGION 1..512: note = Human gut metagenome

SEQ ID NO: 15387 - protein, 630 aa, Nocardiopsis sp.; identical to SEQ ID NO: 11878

SEQ ID NO: 15388 - protein, 396 aa, unidentified
  REGION 1..396: note = Human gut metagenome
MPNKVYVINKHGRPLMPCSPAKARHLLDAGKAKVKKRTPFTIQLVYGSSGYTQEVILGVDAGSKTIGMSASTTKEELLSAEVKPRNDVVDLLSTRREFRRARRNRKTRYRKPRIDNRVRSEHKGWLAPSVEVKIQEHITSIKRVCRILPVSKVVIETAEFDLQLLKAIADGKPVPQGEDYQKGEMYGHYNVRQYVLWRDDYTCQCCGAHATKKKEVRLHVHHLESRKVGGDAPDNQVTLCESCHEKLHSELPIPVVETRGYITKATREKLLVLPKSHTNDALAIAQGKRGFNVGYLPEIAQIDKICTIRPVRHHNRQLHKATILKGGIRKSNQTEKYVFGYRLFDKVQFNGQDCFIWGRRTTGIFTIKTINGKMIKDGISFKKLKPVEKSTSYLIA

SEQ ID NO: 15389 - protein, 528 aa, unidentified
  REGION 1..528: note = Ga0373628_0055400
MFTRESQLSLGKVLETGYVGEKAKVAPVDASSVHGNVSARSRQAGSSTKRARTDGLSLTVPRGDAAPAQSGASPAKAEKASGNARVFVLSKHKAPLMPTTSARARELQKKGRAVVVRLFPYTIRLKDRDGGKLQPIVLKFDPGSKYTGIALIREADGTVHPLWLSELQHRGRQISEALTGRKGCRKGRRSRNLRYREPRFDHRTKPIGWLAPSLRHRVESTMSWVNRLHQFVPLIRIDCELVRFDMQLLENSEISGIEYQRGELAGYEVKEYLLEKWGRACVYCGKEDVPLQREHIQAKARSGSNRSSNLTLSCGPCNQKKGAQPIEIFLKKKPTLLAKILATAKKPLRDAAAVNATRWALVAALQETGIPVCTYSGGRTKWNRSRLGIPKTHALDAVCVGVVTKIGRWELSTLCIKSMGRGAYQRTRVTSEGFPRGYLTRQKRIFGFQTGDMVRADVVKGKKIGRYTGRVAVRSTGSFNIQTSASVVEGISHKACRLLARGDGYFYALRTEFLHAVNDGVSTPLEKT

SEQ ID NO: 15390 - protein, 406 aa, unidentified
  REGION 1..406: note = Human gut metagenome
MVYVQDINGKPMMPTTRHGKVRRLLKDKKAVVVNLCPFTIKLMYVTSDYKQEIVLGVDAGTKHVGLSATTKSKELYSSEVILRNDIVDLLSTRRELRRARRNRLRYRKPRFDNRIKSRRPGWVAPSVKYKVDAHIRVIDNVCSILPVSRIVIEVAQFDTQKIKNPNISGKEYQEGDQLGFWNVREYVLARDGHKCQYCKGKSKDHVLNVHHIESRKTGGNSPSNLITLCETCHKEYHKGNIDLKIKRGSSLRDAAVMGIMKWRLYEELRSKYDRVSMTFGYVTKYNRINHDIEKSHVSDAFVISKNFNAIRLGYYYKVRLVRRHNRQIHKQKIPKGGIKRLNQSPFEVFGFRLFDRVMFENNCYFIFARRKTGSFNIRDINGKNKRDITYKKLKLSRCKRFMIEKS

SEQ ID NO: 15391 - protein, 460 aa, Moorena sp.
MSKVFVLDAKKRPLVPTHPARARQLLNKGKAAVYRRYPFSIILNREVKQVDFQPFRLKIDPGSKTTGLAILSACVANVRCVDTTPSPSNFPNDNTGEVIWAAELQHRGQQVKASLGSRRAVRRSRRNRKTRYRKPRFNNRKRPNGWLPPSLMSRIFNIETWVTRLRKLCSITAISLELVKFDTQVMQNPEISGVSYQQGELFGYEVREYLLEKFGRKCAYCGRENIPGLEVEHIIPKTRGGSDRVSNLTIACKKCNDKKGTQTAEEFGYPQVQAQANKPLRDAAAINATRWEIYRRLVATNLPIEVGTGGRTKFNRIKRGLDKTHWLDAVCVGKSTPQTIKIEAIQPLGIVATGHGSRQMCRISKFGFPRTTAKRFKRVHRFQTGDMVKAVVLTGKKVGTYVGRVAVRASGSFNIKTKNGTIQGISYRYCQLLQRADGYSYEEGGTALPPTPLNGAGFRA

SEQ ID NO: 15392 - protein, 238 aa, unidentified
  REGION 1..238: note = Human gut metagenome
MVYVQDIDGKPMMPTTRYGKVRQLLKDKKAVVINTCPFTIKLMYKTSDYKQEIVLGVDAGTKHVGLSATTKSKELYSSEVILRSDIVDLLSTRRELRRTRRNRLRYRKPRFDNRIKSKRTGWVAPSVRHRIDAHIRVIDNVCSILPISRIIVEVAQFDTQKIKNPNISGNEYQEGNQLGFWNVREYVLTRDGHKCQHCKGKSKDPILNVHHIESRKTGGDSPSNLITLCETCHKEYHK

SEQ ID NO: 15393 - protein, 462 aa, unidentified
  REGION 1..462: note = Human gut metagenome
MSVLVIGRNGRALMPTNPRKARLLLKKKTASVICRHPFTIQLLYKTGCATQEGSIGIDTGSQHIGVGITCGDRVILKDEHALRSSMEKRSLLATRAVMRRGRRYRKVRYRKPKWRHHTKRMYFEKANRRGQHWRKVKTTTQSPRPKGWLPPSLQSKCDHHFRIIDRYLKYLPDPITRNLVIETGRFDMARMNDPTIHGEMYQRGPMYDAENLRAYIFARDNYQCACCKAKAGTTRKADGTTVKLVAHHILFRSRGATDNPKYIISVCDHCHTTKAHQPGGILYSWMENNKKVARGLRDATFMNILRKRLFARYPQAAFTYGNITAADRKKLCLPKSHANDAVAISLFGKETSTVKNICQTMHYKQIRKSKRSLHEAIPRKGRKNPNTKAVRNKKNTTQVNGFKLWDSVLADGKKLFICSFTGTSAYLIDKNGCYISQPGKTYKQWPLSKLKRLHPNGNWLMA

SEQ ID NO: 15394 - protein, 428 aa, unidentified
  REGION 1..428: note = Human gut metagenome
LKVFVLNMRGQPLMPCSPAKARHLLMDKKAVVKRRTPFTLQLTIATGETKQDVTLGVDAGAKHIGLSASTEKEEVFASEVELRQDITGLLAARLAFRRARRHRKTRYRAPRFLNRVHSKHRGWLAPSVENRIQAHMSRIDAICGLLPVTKIVIETASFDIQKIKNPDVEGTDYQQGDQLGFWNVREYVLFRDGHVCQHCRGRSKDKVLNVHHLESRQTGGDAPNNLITLCETCHKAYHAGKIKLKVKRGQSFREEAFMGIMRWTMLDRVRKAHPDLPVENTYGYLTKNTRITLGLPKTHCIDAYCIAGNLNARRRGVYLYQRQMRKHNRQIHKCKVLSKTLKDGTKVGYRKLNQTPYLVKNFRLFDKVRCFGQTGFIFGRRTSGHFDVRALNRTRLSDCVNSKKLTLLEKRRTFLTELRKEDGASSPV

SEQ ID NO: 15395 - protein, 460 aa, unidentified
  REGION 1..460: note = Human gut metagenome
VQLRQSDAGQSFVLCYLSDNQKGRHNHMYVYVINKHGQPVMPCRPRMARVLLQDGKATVVKQVPFTIRLLYGSSGYKQPVSLGMDAGSRHIGIAVTTEKKVLYAEELKPRNDVVKLLSVRRQNRRARRSRKTRCRQARFDNRVSSKPKGWIAPSVEVKIQEHISAVMRIQKMLPVSEIHVETAEFDTQRLKAMEEGRPVPVGTDYQKGEMYDQYNVRQYVLFRDDYRCQCCGKHGDGVKLHVHHKESRQTGGNAPNNLITLCEDCHKALHAGTVQLPDGRAKRGRSHRDVAFMGIMRKAMVSQLRNIVDIPVTETYGYITKYYRELYHVEKSHISDAIMISRNFKAEPDDTYYVSKAVRHHNRQLHKNTILKGGVRKRNQAPHIVRGFRLFDLVRYENGVYYVFGRRKSGFMDIRTLDGKKINKGSISNKRLKFVSTSKGMLVERRMAIPLADKSASFLA

SEQ ID NO: 15396 - protein, 451 aa, unidentified
  REGION 1..451: note = Human gut metagenome
MSVAVISKTGERLMPTSEYRARKLLKSGKAVKHSYHPFTIQLTERKTGDVQPIELCMDTGYIHIGISVKSEKHEYLAEQIDTLTDERIRHDACRMYRRQRRGRKRYRKPRFNNRKRDKGWIAPSLKHKKDIHVQAISRINKVMPLTDITMEMGNFDTQVLKAKEEGKPLPQGACYQHGERYGTATLREAVFSRDGYKCQCCGRTIRDGAMLHVHHVKYRSQGGTNSMANLATVCDKCHTPKNHKPGGKLYNWKPKLPDFKGATFMTTIRWQLYNEVKSLFPDINVHITYGAATKEQRRELNIDKSHVNDAFAMGKFHPKHRANAVLYKKKRRNNRCLEKFYDAKYIDSRDGSKKTGQELFNGRINRNHKKDSENLHQYRLQKIKAGKRTIRKQHYSIQPHDIIMYKNRKRETSGCHCNGTRVVLLPDKKQQLIQKVKIYKYAGGYFKSAFN

SEQ ID NO: 15397 - protein, 436 aa, Acrocarpospora sp.
VHPVVFVLDAQGRPLDPCHPARARKLLASGRAVVARHTPFIIRLKDRTVDQSTVGGAHVGIDPGSRHTGIAVFTSHDGRRSGLYAIQLDHRGAAIRDKLARRAAYRRGRRSRNLRYRARRFNNRTRPQGWLAPSLRHRLDTTLSWIDRLTRWVPLRAVHVERVAFDTHQLSAGKPLSGVEYQQGTLAGYEIRQYLLAKGGRRCAYCGAGGVPLNIDHIRPRSRGGSDRVSNLTLACVPCNQAKDNLPVQEFLAGKPDALARVEAQAKAPLRDAAAVNATRWALWHALTATALPVHTGSGGRTKWNRSRTGAPKSHSLDALHVGHLDQVTGWPGTVLIVTATGRGSYARTRTDKYGFPRLRLPRLKQVHGFRTGDLVRARVPSGTNAGVHTGRVAVRTSGRFNLTTAHGTRQGIGYRHVHLLQRADGYAYTVRGEES

SEQ ID NO: 15398 - protein, 465 aa, unidentified; identical to SEQ ID NO: 12101
  REGION 1..465: note = Human gut metagenome

SEQ ID NO: 15399 - protein, 435 aa, Moorena sp.
MFVLVLDTNKKPLSPCHPAIARKLLKQGRAAIFRRFPFMIILKEAKSDARPIGLRLKIDPGAKTTGFALLLENGNTGTVLWAAELNHRGFAIKKLLAKRRGLRRGCRNRKTRYRACRFLNRRRPKGWLPPSLQSRVENITTWVNRLCRLAPIGAISMELVRFDTQKLQNPEISGIEYQQGELFGYEIREYLLEKWGRKCAYCGKVDVPLEVEHIVPKSRGGTNRVSNLTLACHACNWKKDNRTAEEFGFPDIQKQAKKPLRDAAGVNVTRWQLYERLKATGLPVETGTGGQTKYNRAQRNLPKTHWLDATCVGKSTPGRIVIPARPILVIAAAGHGKRQRCITDKYGFPIKHAPKAKFFIGFQTGDIAKAMIPKGKYAGTHTGRIAIRFRPSFKLNGFDVHPKYLKIIQRADAYEYQLGAQVSSPRMNPGAPTCA

SEQ ID NO: 15400 - protein, 423 aa, unidentified
  REGION 1..423: note = Human gut metagenome
MVYVLNIDGQPLMPTDRHGKVRHLLKDGRAEVVKRCPFTIRLLYDSTHYTQDIVLGVDAGSKHIGLSGTTETKELYASDVELRNDIVDLISTRRQNRRFRRNRKTRYRKARFLNRLSDKKDWLAPSIRQKVDTHMTVVSRVCKILPVTKIIVETASFDIQKIKDPDISGTGYQHGEQLDFWNVREYVLFRDGHTCQCCKGKSKDPVLNVHHIESRKTGGDAPNNLITLCETCHKGYHSGAVQLPKAIHRGMRFKDAAFMGIMRWAFYNKLKEVYEPQDIEVSMTFGYLTKNTRIRHYLPKEHYIDARCISGHPEAIPSNEVFYQKKVRCHNRQIHKNTILKGGIRKRNQAGYLVKGFRLFDKVAYEGREYFIFGRRQSGFFDLRNLSRCKVNKGSLSYRKIRFLEPRQYYLCERRVMDTQGCA

SEQ ID NO: 15401 - protein, 415 aa, unidentified; identical to SEQ ID NO: 3582
  REGION 1..415: note = Human gut metagenome

SEQ ID NO: 15402 - protein, 278 aa, unidentified
  REGION 1..278: note = Human gut metagenome
MVYVVANDGQPLMPTERHGKVCRMLKSGMAKVVKKCPFTIQLQYESERNVQPVSLGVDAGSKHIGISATTKTKVLYESDVELRDDIVKLLATRRQLRLSRRSRKTRYRPVRFDNRKRKEGWLVPSIRQKIGSHLTVVANVCKILPINQIIVETASFDIQKIKDPEIQGIEYQQGEQMDFWNIREYVLFRDGHTCQCCKGRSKDKILNVHHIESRKTGGNAPNNLITLCETCHKGYHNGTVILPKNIKHGMQFKDAAFMGIMRWTFYNTLKEQYEPDIP

SEQ ID NO: 15403 - protein, 408 aa, unidentified; identical to SEQ ID NO: 6548
  REGION 1..408: note = Human gut metagenome

SEQ ID NO: 15404 - protein, 523 aa, unidentified
  REGION 1..523: note = Human gut metagenome
VEETYRKGGGYMSTIYVLNKDGKPLMPTTRGGHVRHLLKEQKARVIRTKPFTIQLLYATDDVVQPLYLGIDPGRTNIGVAVVKADGAAVFTAHLGTRNKEVPKLMKKRKESRRARRTNGRRHRRQRRAKANGTLSTKCVKQDTAQNGSVSKRAKEIGVIKRHLPGCEKEILCIGIKNKEAKFNNRTRPEGWLTPTANQLLQTHVNLIKKIQKFLPISDVVLEVNKFAFMQLDNPNIRKWQYQKGFLYQKENLENGVSEMQEHHCLFCKKPIDHYHHVVPQHKNGSNTIGNIVGLCTKHHDLVHKDTAWQEKLAKKKTGLNKKYGALSVLNQIIPALTKELGSLFSKHFFVTTGKSTYDYRAAHNVSKDHWLDAYCIACSVLPNDVCDSNINNHVPYELKQFRRHDRRALHKENMSRVYTLNGKKVATNRHKAIEQTTDSLEEFRQSHSDDVCRLKVQEHHQTYRNTNRNYPGSVFLVGKRVHVMQGTSGSHNGKADGYYDTKGNSYPSSKCKFVAKNEGIVFA

SEQ ID NO: 15405 - protein, 469 aa, Nitrospira sp.
MCRMAHVTAERREQRSNPIQSQVFVLNREGQTLMPCHPARARQLLKEGRAVVHRAVPLVIRLKNRTEAIVQPVRLKVDPGSKATGMALVRHQPPASITVLSLFELQHRGRQISESLTARRHMRRRRRGNLRYRAPRILNRVRSAGWLPPSLQHRIDTTLAWVKRLQRFAPIKDISCELVRFDMQAMQNPEISGTEYQQGTLAGYEVREYLLEKFGRQCVYCEAKDTPLQIEHLQPKALGGSNRISNLVLACQCCNQKKAAQPIEIFLAHQPETLRRIQDQAKRPLKDAAAVNTTRWALAQALHSTGLPVELASGGLTKYNRQRLNVPKTHALDAACVGEFSVLKGWQRNTLELRCTGRGRYQRTRLSKNGFPRCHLMRHKLVNGFQTGDLVKANVPSGKKSGTYQGRVAVRVSGSFNIWTGKEFIQGISYRYCKLVQRGDGYGYFMQTLITHPKEARARSTHIVLSPTL

SEQ ID NO: 15406 - protein, 512 aa, unidentified
  REGION 1..512: note = Human gut metagenome
MSTIYVLNKDGKPLMPTTRGGHVRHLLKEQKARVARTKPFTIQLLYETDDAVQPLYLGIDPGRTNIGIAVVKADGTAVFTAHLETRNKEVPKLMQDRKKARRARRTNGRRCRRQRRAKANGTISKKCVKQDTAQSKNPSKRAKEIGIIKRRLPGYKKDVLCIGIKNKEAKYTNRTRPEGWLTPTANQLLQTHINLVKKVQKLLPISDVVLEVNKFAFMRLDNPDIQKWQYQQGPLYKKESLESAVSEIQEHHCLFCKKPIDHYHHVVPQHKNGSNTIGNIVGLCSEHHNLVHKDAAWQKKLAEEKVGLNKKYGALSVLNQIIPALTNKLSVLFPKHFFVTTGKSTHDYRESHSVSKDHWLDAYCIACSVLPSNVCDSNINNHVPYELKQFRRHDRRALHKENMSRVYTLNGKAVATNRHKAIKQTTDSLEEFRQSHPGDVCKLKVKEHHPAYRNLNRNHPGSAFFVGEQAHVMQSIVASKDGKATRYKDTNVNKIAAGQCRFVAKNEGIVFT

SEQ ID NO: 15407 - protein, 448 aa, unidentified
  REGION 1..448: note = Human gut metagenome
MSTGLRAVQAEPAGIRKGDALKVFVLNMRGRPLMPCSPARARHLLKAGKAVVRRRTPFTIQLRIATGETKQSVTLGVDAGAKHVGLSAATEKEEVFASEVELRQDITGLLAARLLLRRERRQRKTRYRAPRFLNRVRSKHKGWLAPSVENRIQAHMSRIDAICGLLPVTKIVIETASFDIQKIKHPDVEGTDYQQGDQLGFWNVREYVLFRDGHVCQHCHGHAKDKILNVHHLESRQTGGDAPNNLITLCETCHKACHAGKIKLKVKRGQSFRAEAFMGIMRWTLLDRVRKAHPGLPVENTYGYLTKNTRITPGLPKTHCVDAYCIAGNLKAVRRGVCLHQRQVRKHNRQIHKCTVLSKTLKDGTKIGYRKLNQTPHLVKSFRLFDKVRCLEQTGFIFGRRSSGYFDVRRLDGVKLSSGISYRKLTLLEKRSTYLTELRKEDGASSPV

SEQ ID NO: 15408 - protein, 422 aa, unidentified; identical to SEQ ID NO: 9550
  REGION 1..422: note = Human gut metagenome

SEQ ID NO: 15409 - protein, 420 aa, unidentified; identical to SEQ ID NO: 6693
  REGION 1..420: note = metagenome

SEQ ID NO: 15410 - protein, 466 aa, unidentified
  REGION 1..466: note = Human gut metagenome
MPVCSTLARGIAPPARAEHVTGISPKNRKVHFFMSTTVFVLDKKHRPLMPCRPARARRLLRAGRARVVKRFPFVIRLVDRTVEQSEVQPVLIKLDPGSRETGAAVVRDDGKKRHHALAFFVIEHRGGAIRDALKARSAFRRRRRSQNLRCRSPRFLNRVKPKGWLPPSLRHRVETTLSFVRRMCRYLPVSGIATELVKFDSQKLQNPEVSGVEYQQGTLFEYEVREYLLEKFGRKCVYCGAEGVPLNIDHVVPRAKGGSNRVSNLVLACMSCNQKKGARSLEDFLKGKPKVLARVRRELKTPLRDAAAVNATRWVLFNELKATGLPVETGSGALTKLNRHAFGVEKEHWLDALCVGRLNGVVTRKGLNVLEIRCMGRGSRQRTRLTKYGFPRGYLMRQKCVHGFATGDMVEANVPKGKKAGLWRGRVAVRVSGSFNIQTPKGVIQGVGWKHCRLISHNDGYGYAWL

SEQ ID NO: 15411 - protein, 504 aa, unidentified; identical to SEQ ID NO: 3854
  REGION 1..504: note = Human gut metagenome

SEQ ID NO: 15412 - protein, 425 aa, unidentified; identical to SEQ ID NO: 3148
  REGION 1..425: note = Human gut metagenome

SEQ ID NO: 15413 - protein, 512 aa, unidentified
  REGION 1..512: note = Human gut metagenome
MSTIYVLNKDGKPLMPTTRGGHVRHLLKEQKARVVRTKPFTIQLLYETDDVVQHLYLGIDPGRTNIGVAVVKTDGTAVFTAHLETRNKEIPKLMKKRKDSRRARRTNGRRCRRQRRAKANGTISKKCVKQTTAQNGSVSKRAKEIGVIKRHLPGCEKEVLCIGIKNKEAKFSNRVKPEGWLTPTANQLLQTHINLVKKIQKFLPISDVVLEVNKFAFMQLDNPNIQKWQYQQGPLYQKASLEEAVSEMQEHHCLFCKKPIDHYHHVVPQHKNGSNTIGNIVGLCAKHHDLVHKDTTWQKKLAKKKTGLNKKYGALSVLNQIIPTLTKELSSLFLKHFFVTNGKSTYDYRAAHGVSKDHWLDAYCIACSVLPNDTCDKTINSRVPYEFKQFRRHDRRALNNENMSRVYTFNGKMVATNRHKATEQTTDSLEEFRQRQPNDVCNLKVKEHHPTYRNMNRNYPGSVFLIGKQVHVMQGIAGSKNGEATTYKDTNANSIAAGKCKFVAKNSGILFV

SEQ ID NO: 15414 - protein, 414 aa, unidentified; identical to SEQ ID NO: 7107
  REGION 1..414: note = Human gut metagenome

SEQ ID NO: 15415 - protein, 312 aa, unidentified
  REGION 1..312: note = Human gut metagenome
KFLPISDVVLEINKFAFMRLDNPNVQKWQYQQGPLYQKASLEEAVSEMQEHHCLFCKNTIDHYHHVVPQHKNGSNTIGNIVGLCAKHHDLVHKDTSWQEKLAKKKTGLNKRYGALSVLNQIIPALTKELSSLFPKHFFATNGKSTYDYRAAHGVSKDHWLDAYCIAGSVLPNDACDNNINNRVPYELKQFRRHDRRALHKENMSRVYTLNGKKVATNRHKAVEQATDSLEEFCQNHPDDVCKLKVKEHHPEYRNPKRNFPGCVFLVGKHTHVMQGTSGSHNGKADGYYDTNGNSYSSGKCKFVVKNEGIVFT

SEQ ID NO: 15416 - protein, 406 aa, unidentified; identical to SEQ ID NO: 6526
  REGION 1..406: note = Human gut metagenome

SEQ ID NO: 15417 - protein, 451 aa, unidentified
  REGION 1..451: note = Marine sediment metagenome
MQKLLVELKNTLGDAPQVPCSVSEVLNRDKSLSVPYKVLANNSSDEDQHSGKSRQDLRVPVLNMRGKPLMPTTPGKARILLQQRKATVIQRSPFTIQICYLTGNYTQNIKLGIDAGYSTIGFSTVTEKSELLSGELTLRKRVSKFIEQKRHYRRARRNRLWHRKPRFNNRSKLEGWFAPSIQHKLETHLRLIKKLAKILPITKIRVEVASFDTHKLQNPEIKGVEYQQGELQGYEVREYLLEKWGRKCAYCGKSNLPLEIEHIVPKIRGGTDRVSNLTLACHKCNQKKGDKTASEFGYPEIQKKAKQTLKATAFMNIVRWRLVNTLKCDWTYGYITKHDRIKFGMEKSHVNDAFVIAGGTTQSRSKPYRLTQTRRNNRSIQTNRRGYKPSIRRQMYRLHPNDLVRYIKTLYNVKGVHSYGKYVILVDKVGKLIDINVKKVELVKYGKGIQF

SEQ ID NO: 15418 - protein, 476 aa, Ferroplasma sp.; identical to SEQ ID NO: 4267

SEQ ID NO: 15419 - protein, 423 aa, Moorena sp.
MLTYVLNKDGQPLMPTGRSGAKVIRRCPFTIQLLYEPETAVVQDITLGVDAGSKYIGLSATTEDRVLYESEVELRNDIVELISTRREARHARRNRKTRYRAPRFDNRTSSKKEDWLAPSIRQKIHSHLKVIADVHEILPVSKVIIEVASFDTQLLKAAEEGRPLPQGTDYQFGEQLGFYNTREYVLFRDNHTCQCCKGKSKDKVLNVHHIESKKVGGNAPNNLITLCETCHTGYHKGVVKFPSSIRRGMKFNDASFMGIMRWPVYSRLKEIYPSVELTYGYKTKNMRIENQLPKEHYIDARCISGNPKAKSDGIVYYQKKVRCHNRQIHKFKVNKDGLRKLNQAPYLVKGFRLWDKVLYNSEECFVQGRRSSGFFQLKKLDGTMISASASCKKLSLVETGKHFITERKRAIPPTVEECGFSCL

SEQ ID NO: 15420 - protein, 470 aa, Ruminococcus sp.; identical to SEQ ID NO: 2433

SEQ ID NO: 15421 - protein, 420 aa, unidentified
  REGION 1..420: note = Human gut metagenome
MQYVYVLNKHGEPLMPCSSGKARLLLKQQKARVVKRTPFTIKLLYGSTGYKQPITLGVDAGSKHVGLSASTEKRELYCEEFTPRNDVVELLSTRRQYRRSRRNRKTRYRAPRFDNRVHSKHKGWLAPSVEVKIQEHITVIKRICRILPVTLVRVETAEFDTQRLKAMLAGKPLPVGTDYQLGEMYDEYNVRQYVLKRDNYTCQCCGAHTTAKKTVKLHVHHLESRKIGGNAPSNLITLCTTCHNALHKGKVSLDSKERGKPMRDAAFMGIMRKTLMSRLREELPIPVQGTYGYITKMRREQNDIKKSHINDARCISKHPLAEPCSVCYRTKAIRHHNRQTHKANFSKGGIRKRSQMPYVVEGYRLWDKVLYKGQECFVSSRRASGSFTLKKLDGTRISKGVTFKKLRLLEPATNYLIERM

SEQ ID NO: 15422 - protein, 469 aa, unidentified; identical to SEQ ID NO: 8572
  REGION 1..469: note = Human gut metagenome

SEQ ID NO: 15423 - protein, 451 aa, unidentified; identical to SEQ ID NO: 13082
  REGION 1..451: note = Human gut metagenome

SEQ ID NO: 15424 - protein, 406 aa, unidentified
  REGION 1..406: note = Human gut metagenome
MRGKPLMPCSPAKARHMLKAGKAVVVRRTPFTIKLTIATGETKQDVTLGVDAGARHVGISATTEKEEVFASEVALRQDITGLLADRLAFRRARRNRKTRYRAPRFNNRVRSKHKGWLAPSVENRIQAHMSRIEAVCRLLPVTKIVIETASFDIQKIRNPEVEGTGYQQGDQLGFWNVREYVLFRDGHICQHCRGRSKDPILNVHHLESRKTGGDAPNNLITLCETCHKAYHAGKIKLKVKRGQSFRAEAFMGIMRWTLLDRVRKTHPELPVENTYGYLTKHKRIALGLPKTHCADAFCIAGNLKALRRGDFLFQQQTRKHNRQIHRCSILKGGVRKLNQAPFLVKGFRLFDKVRIGGQIGFVFGRRVRGTFNIRRLDKTVIGTDINCKKLSLLETRKTFLTELRKE

SEQ ID NO: 15425 - protein, 539 aa, Streptomyces sp.
MGHGPPLPAPAITFREVDPPMATFSAGQQIHRAVPPQRRALESAGADTPRIGHETARGRHVPPVAPSGEHVREETVGGSPAADGDTFRPAEAGETPRERHPSVFVLDRHGAPLQPCHPARARKLLGKGRAVVARHTPFVIRLKDRTIAESTVEGVELGIDPGSRHTGIAVFTATGGERRGRFAVRLDHRGAQIRRKLQQRSDFRRGRRTRNLRYRAPRHDNRARREGWLAPSLRHRVDTTVAWVDRLARWAPVTAVHVESVAFDTHAISSGGPLEGAEYQHGTLHGTEVREYLRTKWKRACGYCGATGVPLNVDHVRPTSRGGSDRVSNLVLACVPCNQEKTNRPVEEFARAKTRAARILAQAKVPLRDAAAVNATRWALRRALEARLPTHGASGGRTRWNRIRNHLPKTHTLDALAVGELGAVTETVNRVLIAGCTGRGTHARTRSDAYGFPRLRLPRRKRFFGFMTGDLVRACVPDGKNAGTHTGRVAVRASGSFAVRTQSGLFTARHTRFRLLQRADGYAYQATSEGQPGYLVPRP

SEQ ID NO: 15426 - protein, 452 aa, unidentified; identical to SEQ ID NO: 14057
  REGION 1..452: note = Human gut metagenome

SEQ ID NO: 15427 - protein, 456 aa, unidentified
  REGION 1..456: note = Marine metagenome
MAIFVLDKKKQPLMPCSEKRARLLLARGRAVVHKRYPFTIRLKDRVGGETQPLRLGIDPGSKTTGLALMREPDSQQRHVLCLFELIHRGFQIKKALQQRAAFRRRRRSANLRYRAPRFNNRIKPKGWLAPSLQHRVDTVMAWVNRLSKSAPITGISQELVRFDTQKLESPEISGVEYQQGTLLGYEVREYLLEKWGRECAYCGTADTPLEIEHVVPRSRGGSNRVSNLTLSCHPCNAEKDSQTLTDFFATNKGLKKRLKANGHAADARLDRVQRQLKQPMRDASAVNATRWALFSALKTTDLPVAVSSGGHTKYNRQRLNIPKTHALDAACVGAFEKLHDWTVPTLTIKAMGRGSYQRTRLTKHGFPRGFLMRQKQVHGFQTGDMVRAIVPTGKKAGTHTGRVAIRKTGSFNIQAEYGAVQGISHKYCTLIQRSDGYGYYVTLFSNLTGEAGRAVA

SEQ ID NO: 15428 - protein, 384 aa, unidentified
  REGION 1..384: note = Human gut metagenome
MVKSGMVMRKLPMYAADKFVTCKFIRNTQARFCNRKRCPDWITPTVQHLVQTHLNIIRKISRYLPVTDIAFEVNRFAFMHMENPKAMGVDFQNGPLKGYDDVKEAICTQQHGKCLMCKKPISHFHHIVPRSRGGSDTIQNLAGLCPECHTKVHTDTTFRKDFDRKKSGQLKKYGALSALNQAVPFICKKLLEEYGEEHVHFCGGLDTSLIRTALGFEKTKKDQMHEVDAYCVGLAALEVNEVETPAFDHTFQIRQFRRQDRSIIHHQTGRSYYQGKEKVAQNRKPGFEQKTTALSQWYEEQVRIHGEKEAEKLRSQLRVEKSCRHYNDMDRFLPGAVFLYEGKRYVLSGRITNGKYLRACGQGMKNFPAAECTFIRHNAGLVFI

SEQ ID NO: 15429 - protein, 403 aa, unidentified
  REGION 1..403: note = Marine metagenome
RLGIDPGSKTTGLALMREPDSQQRHMLCLFELVHRGLQIKKALQQRAAFRRRRRSANLRYRAPRFNNRTKPKGWLAPSLQHRVDTVMAWANRLSRLAPVTAISQELVRFDTQKLENPEISGVEYQQGTLLGYEVREYLLEKWGRECAYCGTADTPLEIEHVVPRSRGGSNRVSNLTLSCHPCNQSKDALPLTDFFATDKGLKKRLKANGHTANARLERVQRQLKQPLRDASAINATRWALFNALNATGLPVTVASGGRTKYNRQRLGIPKTHALDAACVGAFDALHAWQVPTLTIKAMGRGSYQRTRLTKHGFPRGYLMRQKQVHGFQTGDMVRAMVPTGKKAGTHTGRVAVRKTGSFNIQTEQGAVQGISHKYCTLIQRGDGYGYHFTPFTHLTGGAGQAVA

SEQ ID NO: 15430 - protein, 468 aa, unidentified; identical to SEQ ID NO: 7616
  REGION 1..468: note = Ga0373628_0100117

SEQ ID NO: 15431 - protein, 417 aa, unidentified
  REGION 1..417: note = Human gut metagenome
MPCSPAKARLLLKERKAIVKRRTPFTIQLTIATGEAKQPVALGVDSGYKHIGLSATTEKAELYASEVELRQDITDLLSARLALRRSRRSRKTRYRAPRFNNRVASKHKGWLAPSVENRIAAHLSRVEAVMRVLPVTAITVETAVFDTQLLKTPDIAGAAYQQGEQLGFWNVREYVLFRDGHVCQHCRGKSKDPILNVHHIESRRTGGDAPNNLITLCETCHKAFHRGEIKLKVRRGKSFKAETFMGIMRRTLFERLKKAHPELNVRNTYGYLTKHKRISYGIAKSHCADAYCIADNLDAKRLEGFFFQKQTRKHNRQIHKLLILKGGLKKKNQAPYEVKGFRLFDKVICKGEEAFIFGRRTSGSFDVRRLDGTRISAGINYKKLRLLEPRTTYLTEFRKEAALPLLHECRGFRAEFL

SEQ ID NO: 15432 - protein, 406 aa, unidentified
  REGION 1..406: note = Human gut metagenome
VVYVQDIDGNPLMPTTRHGKVRRLLKAKKATVVNLCPFTIRLLYDTTGYKQEITLGVDAGTKHVGLSATTKSKELYASEVILRSDVVDLLSTRRELRRARRYRLRYRKPRFNNRIKSKKDKWIAPSIRQKIDSYIRIIGFVYSILPVSKLIIEVAQFDTQKIKNPEISGKEYQEGEQLGFWNVREYVLARDGHKCQHCKGKSKDSILNVHHIESRKTGGDSPSNLITLCETCHKEFHKGKIKLKVKRSASLRDAAVMGIMKWELYDELKSLYPNIKMTFGYITKHDRINHGIEKSHVSDAFVISRNFDSYRLGYYYKQKLVRRHNRQIHKMKILKGGIKKPNQAPFKVFGFRLFDKVRYQDNVYFVYGRRTSGCFNIRDINGNNNKNPTFKKLTYISHGLISVETV

SEQ ID NO: 15433 - protein, 424 aa, unidentified; identical to SEQ ID NO: 8578
  REGION 1..424: note = Human gut metagenome

SEQ ID NO: 15434 - protein, 494 aa, unidentified
  REGION 1..494: note = Human gut metagenome
MDMVYVLNKDGKPLMATTRGGRVRYLLKEKKARVVSSTPFTIQLNYDTPDATQDLILGIDPGRTNIGVAVVKEDGQCVFSAHLETRNKDVPLLMKKRAAFRRNHRTLDRRRKRQRRAKAAGTTIDEGSVERLLPGYEKPIMCHHIRNKEARFNNRSRPAGWLTPTANHLLQTHINLIAKVAKFLPITKVVVELNRFAFMAMDNPNIRRWEYQQGSLCGLGSVEDAVYAQQDGHCLFCKKPIDHYHHVIPRHKRGSETLANRCGLCAKHHDLVHTDKAWADKLVTRKEGMNKKYHALSVLNQIIPHLMEYIGSETLYDAYATDGRSTKGFRIAKNVPKEHYTDAYCIACSILDADTKVSTPVEPFELKQFRRHDRQACIRQMVDRKYLLHGKVVAANRHKAIEQKSDSLEEFREAHGNAAVSQLTVKPHHSQCKDMARIMPGAMMDFDGIVGVFKGSSGRNNGTPNYYNSTKGERFLTRSCVLLAQNAGMVFIPA

SEQ ID NO: 15435 - protein, 417 aa, Parasutterella sp.
LMPCSPAKARLLLKEKKAIVVRRTPFTIQLTIATGESKQPVSLDVDAGYKHVGLSASTEKAELYASEVELRQDITDLLSARRALRESRRNRKTRYRAPRFDNRIRTKRKGWLAPSVENRINAHLSRIESVLRLLPVTKITVETASFDTQLLKNPDISGKEYQEGEQLGFWNIREYVLCRDRHVCQHCYGRSKDPVLNVHHLESRRTGGDSPGNLITLCETCHKALHRGEITLKAKRGQSFRAEAFMGIMRSEVPNRLKASHPELEVNNTYGYRTKHARIANDIAKSHCADAFCIAGNLGAERLCEFFFQKQTRRNNRQIHKLSILKGGIRKRNQAPFEVKGFRLFDKVACQGEEGFIFGRRSSGFFDVRKLDGTRISAGISCKKLHLLEKRRTYLTEIRKEEALPPLPEGRGLRAKM

SEQ ID NO: 15436 - protein, 424 aa, unidentified; identical to SEQ ID NO: 3232
  REGION 1..424: note = Human gut metagenome

SEQ ID NO: 15437 - protein, 460 aa, unidentified; identical to SEQ ID NO: 14615
  REGION 1..460: note = Ga0315285_10018821

SEQ ID NO: 15438 - protein, 430 aa, Desulfobacter sp.
LNVFVLDTNKKPQNPVHPAKARLLLTEGKAAVFRQFPFTIILKETVLDVASNPLRIKIDPGSRETGIAVINDDTGEIVFAMGLRHRGQQIKNNLESRRAIRRSRRNRKTRYRKPRFDNRTRAEGWLPPSLKSRVHNIETWVNRLCRFCNIQAISMELVRFDMQKIQNPEISGVAYQQGELMGYEVREYLLEKWDRTCAYCGKTDIPLEIEHIVPKSKGGSNRVSNLTLACTACNRKKGNKSLEQFLSKKPRLLKRIQKQSKVPLKDAGAVNTTRWDLFRTLKKTGLPVETGSGGLTKFNRTTRGLHKTHWLDAACVGKSTPEKIFQIDKTVLIVKADGHGSRQMCRVNKFGFPRTTAKSTEKKVKGFQTGDIVKAVVTSGKKVGTYIGRVAVRKSGSFNIKTVDKTVQGISWKYCRLLHASDGYSYNTTC

SEQ ID NO: 15439 - protein, 424 aa, unidentified; identical to SEQ ID NO: 3434
  REGION 1..424: note = Human gut metagenome

SEQ ID NO: 15440 - protein, 442 aa, Lactobacillus sp.; identical to SEQ ID NO: 14540

SEQ ID NO: 15441 - protein, 424 aa, unidentified; identical to SEQ ID NO: 3434
  REGION 1..424: note = Human gut metagenome

SEQ ID NO: 15442 - protein, 512 aa, unidentified
  REGION 1..512: note = Human gut metagenome
MSTVYVLNKDGKPLMPTTRGGHVRHLLKEKKARVVTSKPFTIQLLYETDDVVQPLYLGIDPGRTNIGVAVVKTDGTAVFTAHLETRNKEIPKLMQGRKKARRARRTNGRRCRRQRRAKANGTISKKCVKQTTAQNGSVSKRAKKIGVIKRHLPGCEKKVLCIGIKNKEAKFSNRTRPEGWLTPTANQLLQTHINLIKKIRKFLPVNDVVLEINKFAFMQLDNPNIQKWQYQQGPLYQKASLEEAVSEMQEHHCLFCKQSIVHYHHVVPQSENGSDTIGNIVGLCTKHHDLVHKDTAWQKKLAKKKTGLNKKYGALSILNQIIPALTKELSSLFPKHFFATNGKSTYDYRSAHGVSKDHWLDAYCIACSVLPNDVCDSGINNRVPYELKQFRRHDRRALNNENMSRVYTLNDNVVATNRHKATKQTTDSLEEFRQRQPNDVCKLKVKEHHPEYRNPERNFPGCVFLVGKQTHVMQGTSGSHNGKADGYYNTNGNSYSSGKCKFVAKNEGIVFA

SEQ ID NO: 15443 - protein, 450 aa, unidentified; identical to SEQ ID NO: 12674
  REGION 1..450: note = Human gut metagenome

SEQ ID NO: 15444 - protein, 459 aa, Ammonifex sp.
MVFVLDRKGRPLMPCSERRARKLLEQGRAVVVRLEPFVIRLKDRVAEEASLQPLRLKIDPGYEVTGISVVRVAGGKEVVVFFAEVHHRTDVPGKLLSRRQARRSRRSRKTRYREPRFDNRGRPEGWLPPGAVARVNQVLSVVGKLVRWLPVTEIVVESAKFDTQKLQNPEVSGVEYQRGELQGYEVREYLLEKYGRKCAYCGKENVPLEVDHVVPKSRGGTDRVSNLTLACRECNRAKGNKLPQEWLEELKNSGRAVDRKRAENIPKVLARLKEPLKAAACMNATRYVLVERLRALGPPVLTATAAQTKYNRARFNLPKTHYFDACCVGEVSGELEVAAGYVQVFRAVGRGTRQMANLDRHGFPRGHRARGKIHSGFMTGDLAVAEVPAGRYAGRYVGYVAVRRSGYFDLKDLSGRRVCQGIAFRHFKLVQRFDGWRYEKFKIAALSSPHLKVGASSAA

SEQ ID NO: 15445 - protein, 420 aa, unidentified
  REGION 1..420: note = metagenome
MQYVYVLNKHGEPLMPCSPRKARLLLKQKKACVIKRTPFTVKLLYGSAGYKQPVTLGVDAGSKHIGISATTEKHELYREEATPRNDVVDLLSARRAFRRSRRNRKTRYRAPRFNNRVHSKHKGWLAPSVEVKIQEHITLIKHACRILPVTLVRVETAEFDTQRLKAMLEGKPLPVGTDYQLGEMYDEYNVLQYVLKRDNYTCQCCGAHYTKTKGVKLHVHHIETRRTGGNAPNNLITLCKSCHKALHAEKVTLDGKKRGKPLKDAAFMGIMRKTLMERLRKELKIPVPGTYGCITKYLREKNGIPKSHTNDARCISKNPLAIPCDTCYYTKAVRHHNRQLHKATILKGGIRKANQAPYIVKGYRLWDKVAYNGTECFITGRRTSGYFALKELDGTVVSNSISYKKLRLLEAATNYIIERK

SEQ ID NO: 15446 - protein, 470 aa, unidentified; identical to SEQ ID NO: 2925
  REGION 1..470: note = Human gut metagenome

SEQ ID NO: 15447 - protein, 430 aa, Moorena sp.; identical to SEQ ID NO: 3328

SEQ ID NO: 15448 - protein, 518 aa, unidentified; identical to SEQ ID NO: 3878
  REGION 1..518: note = Human gut metagenome

SEQ ID NO: 15449 - protein, 338 aa, Moorena sp.; identical to SEQ ID NO: 4723

SEQ ID NO: 15450 - protein, 430 aa, unidentified; identical to SEQ ID NO: 6608
  REGION 1..430: note = Human gut metagenome

SEQ ID NO: 15451 - protein, 425 aa, Ktedonobacter sp.; identical to SEQ ID NO: 6721

SEQ ID NO: 15452 - protein, 424 aa, Microcoleus sp.
MSNFVFVIDTNRKPLSPCKPGIARSLLKAGKAAVFRRYPFTIVLKKAVETNPEPLELKLDPGSKVTGVAIKQDNKIIFGAELQHRGQQIKDALLSRRQLRRGRRNRKTRYRKARFLNRTRPDGWLAPSGQHRVETTLTWVRKLIRLAPVASIVQELVRFDSQLMQNPEISGVMYQQGELQGYEVRQYLLEKWHRQCAYCSAENVPFEVEHIQPKSRGGSDRVSNLTLACHDCNQKKGNQDIRAFLAAKPDLLNRILKQAKLPLKDAAAVNSTRWALFNALKETGLPVTTGTGGQTKFNRHRLGLAKSHWLDAACVGSIDTLKVLTSKPLLIVAKGQGTRQICGTNQYGFPIRHKSRVQIHKGFQTGDIVSATVTAGKKVGSYTGRLLCRASGSFDIVTKAGRVTGISHKYCKAIHKKDGYSYGF

SEQ ID NO: 15453 - protein, 413 aa, unidentified; identical to SEQ ID NO: 3924
  REGION 1..413: note = Human gut metagenome

SEQ ID NO: 15454 - protein, 512 aa, unidentified; identical to SEQ ID NO: 6489
  REGION 1..512: note = Human gut metagenome

SEQ ID NO: 15455 - protein, 536 aa, unidentified
  REGION 1..536: note = Human gut metagenome
VLRPRYQYPTRWYPSREQGSGNGCLSGEENTDLEQEVSGTLSKGDHSHPGEQDFCVPAITIQGGPAMSVFVVGLNGCRLMPTSERKARLLLKHGKASVYRKVPFTIKLNYKTGSRTQSGYLGIDTGSQHIGVSVVREDGTVLHKEEIGLRDSMSKRKLMQSRASSRRGRRHRKTRYRHPKWRPKAKRVYCEIPDRKGRHWKKKEITFASKRAKGWLPPSLQSKTDHHIWWIKKLQDLLPEGYRLSIELGRFDPARLKDPEIHGELYQKGPQYDYENVRAYVLNRDRYTCQVCGKKGGKLHVHHILYRSHGATDDPQYMATVCSDCHNTENHQQGGILYQWMQKQKKFTRGLRDATFMNILRKRLIEAFPGATFTYGNITKADRERLRLPKSHGNDATAIAIVKTGIMTVKDKEPVIYIQQVRRKKRSLHEETPRKGRKEPNRKASRYDKNTKAVTVTKRKNKKKITITGCLFDRVELNGKKGWISGFTDKSCYVKDENDQYIRTSPKYKQVSLSKLKILHHCGNWAIGARQSLGKG

SEQ ID NO: 15456 - protein, 494 aa, unidentified
  REGION 1..494: note = Human gut metagenome
MTMVYVQNKDGKPLMPTTRYCYVRLLLKEKKARVVCTTPFTIRLNYDTPDITQDLILGIDPGRTNIGVAVVKEDGQCVFSAHLETRNKEVPLLMKKRAAFRRQHRTQDRRRKRQRRAIAAGTTVESNTIERLLPRYEKPIVCQHIRNKEARFNNRSRPAGWLTPTANHLLQAHINLIAKAAKLLPITKVVVELNRFAFMAMDNPNIRRWEYQQGPLYGLGSVKDAVYAQQDGHCLFCKKPIDHYHHVVPRHKGGSETLANRCGLCAKHHDLVHKDKAWAEKLVTRKSGMNKKYHALSILNQIIPHLMEYLGRETPYDVYATDGKSTKGFRVAKNVPKEHYTDAYCIACSILDTNIKVSTPVEPFELKQFRRHDRQSCIRQMVDRKYLLDGKVVVTNRHKAIEQKSDSLAEFREAYGDAAVSQLTVRPHSPQYKDMARIMPGAVMDFDGIVGVFKGSSGRNNGTPNYYNSTKGARVLTKRCALLAKNVGMVFIPA

SEQ ID NO: 15457 - protein, 451 aa, unidentified; identical to SEQ ID NO: 5203
  REGION 1..451: note = Human gut metagenome

SEQ ID NO: 15458 - protein, 420 aa, unidentified
  REGION 1..420: note = Human gut metagenome
MQYVYVLSKHGEPLMPCSPGKARLLLKEKKARVVRRTPFTIKLLYGSAGYKQPITLGVDAGSKHVGLSASTKKRELYREEFTPRNDVVKLLSKRKQYRRSRRNRKTRYRAPRFNNRVHSKHKGWLAPSVEVKIQEHITVIKRICRILPISLVRVETAEFDTQRLKAMLEGKSLPVGTDYQLGEMYDEYNVRQYVLKRDNYTCQCCGAHTTKKKTVKLHVHHLEGRQVGGNAPNNLITLCVDCHKALHAGKVKLDGKKRGKSFKDAAFMGIMRKTLMARLRDELPIPVQGTYGYITKMRREQNDIKKSHVNDARCISKHPLAEPCSVCYRTKAIRHHNRQTHKANFSKGGTRQRSQMPYVVEGYRLWDKVLYKGQECFVSGRRASGSFTLKKLDGTRISKGVTFKKLRLLEPATNYLIERM

SEQ ID NO: 15459 - protein, 419 aa, unidentified
  REGION 1..419: note = Human gut metagenome
MVYMISQDGKPLMPCSNSIARLLLKQSKAKVKKREPFTIKLTYETTNYTQDLTLGVDTGSGTIGTSVSKDNGDIIYMSEVVIRNDITGKMTQRAKYRRNRRNRKACYRKARWLNRANSIKNDRFSPTMQSKLHSHVKEIEYIKFILPITEMVFETGQFDTHLMKNPNLANPKIKHWGYQKGINYGFENTKAMVLNRDNYTCQYYKGKHKDSKLEVHHILFRSQGGSDEESNLITLCHTCHKDLHSGKINPKLSGKVKGNLKYATQMNSIRKQLFKLYPDAVETFGYVTKANRLLLGIDKEHYYDACTIATQGNIFTVKSNLYKKKCISDGDFQKTKGIRSEQPIITDKICGFRKFDKVRYFGNKYFIKGRMSTGYAVLMDIDGNKVDFSAMPKGYKTPKLSNCKRIMARSTEMIQTLVI

SEQ ID NO: 15460 - protein, 462 aa, unidentified
  REGION 1..462: note = Human gut metagenome
MSVLVIGRNGRALMPTTSRKARILLKKETASVVCRHPFTIQLLYKTGCATQEGCIGIDTGSQHIGVGITCGNRVILKEEHELRSSMEKRSLLVTRAAMRRGRRYRKVRYRKPKWRQHTKRMYFEKPNRRGQHWRKVKTTTQSPRSKGWLPPSLQSKCDHHFRIIDRYLKYLPDSITRNLVIEAGRFDMARMNDPMIHGEMYQRGPMYDAENLRAYIFARDNYQCACCKAKAGTTRKADGTTVKLVAHHILFRSRGATDNPKYMVSVCDHCHTTKAHQPGGVLYFWMENNKKVTRGLRDATFMNILRQRLFARYPQAAFTYGNITAADRKQLRLPKSHANDAVAISLFGKEVSAVRDTCQTVHYKQVRKSKRSLHEAIPRKGRKNPNTKAVRNKKNTTQVNGFKLWDSVLADGKKLFICSFTGTSAYLVDKNGCYVSQPGKTYKQWPLSKLKRLHHNGNWLMT

SEQ ID NO: 15461 - protein, 415 aa, Eubacterium hallii
MVYVVANDGQPLMPTNRYGKVYRMLRSGMAVVVKKCPFTIQLQYESERNVQPVALGIDAGSKHVGVSATTKAKVLYESDVELRGDIVKLLATRRQLRRSRRSRKTRYRPARFDNRKRKNGWLAPSIRQKIESHLTVVANVCKILPVSRIIVETASFDIQKIKNPDIQGTEYQQGEQMDFWNVREYVFFRDGHTCQCCKGRSKDKILNVHHIESRKTGGNAPNNLITLCETCHKGYHNGTVTLPKNIKRGMKFKDAAFMGIMRWTFYNTLKEQYEPDIPVHYTYGYITKNTRINHNLPKGHCIDARCISGNPDAVSDGTYYYQKKVRCHNRQIHKQTILKGGIRKSNQAEYLVRGFRLFDKVRYQGREYFIFGRRKSGFFDIRTLSGEKVNKGSINVKRLTFVDTRKNYLTERRTV

SEQ ID NO: 15462 - protein, 473 aa, unidentified; identical to SEQ ID NO: 3562
  REGION 1..473: note = uncultured beta proteobacterium

SEQ ID NO: 15463 - protein, 442 aa, Selenomonas sp.; identical to SEQ ID NO: 4776

SEQ ID NO: 15464 - protein, 411 aa, unidentified; identical to SEQ ID NO: 2867
  REGION 1..411: note = Human gut metagenome

SEQ ID NO: 15465 - protein, 447 aa, unidentified
  REGION 1..447: note = Ga0373625_0016929
VVYIISKTGKPLMPTNRLGKVRHLLKDGLAKVVQRTPFTIQLLYDSDEYTQPITLGVDAGSKTIGLSATLVPPSNGRTETDKKEVFSAEVQLRTDIVDLLSTRRQNRRTRRSHKTRYRKVRFLNRRIDKGWLVPSIRHKIATHLTMVDKIHKILPITKIIVEVAQFDIQKIKNPEISGVEYQQGVQLGFFNVREYVLYRDDHKCQLCKGKSKDKILNVHHIESRKTGGNAPNNLITLCETCHKKHHEGDIKLKIKRGTIFKDPAFMGIMRWALYNTLKEKYPNVLMTYGYITKNTRIANNLPKNHRTDALCITGNPTVVGLDTWYYCKKVRCQNRQIHKNTINKGGARKINQLPFIVFDIRLFDKVKYNNQECFVFGRRLSGSFDIRLLDGTTVNAGVGYKKVKVLEQRKTILIESRKAIPPTADIDQTQFETDQQPVGFLAEKDHE

SEQ ID NO: 15466 - protein, 430 aa, unidentified
  REGION 1..430: note = Human oral metagenome
MTKTLTTQTTQACVLDQQGKPLMPTTRLGKVYRLLKTQKAHIVSYEPFTIQLDYEPDTQVIQPMTLGVDSGAIHSGYSLANEHREYYSVEVVARNDISNRLSERHMYRRNRRTRKARYRKPRFKNRKNKKKGWLPPSLEQKVAVQVNEIDHLHRYFPIETIIVEVAEFDIQKIKNPDISGIEYQQGTLQGYNIRNYLLEKHGRKCFYCGKSVSDFEVEHMLPKSKGGSNRIDNLTLSCHDCNEKKGTLTAEEFIRQTLPATKAAAKLKQLPNEKRLFKYMAYMNATRWALYDAIKRTYPNVKMTYGYITKYNRIQAGLPKAHHIDAKCITGFATVPSTSQTVVKVKMRRHNRQLHRATFSKGHVRKAASLPTTVFGFQLYDLVCFDNHRYYIKGRRSSGAFALVSVEGLKNEERMYKKTNIISTYECLFN

SEQ ID NO: 15467 - protein, 419 aa, unidentified
  REGION 1..419: note = Human oral metagenome
MLNNQKEYAFVLDAEGKKLDPTIIQNAWRLVRQKKATLIAKRPMTIQLKKVVDTPNNDEIRMGIDDGAKYVGLALVQKCKTKNKVIFVATMEHRIDVHKKIVQRHEYRRYRRYLKRYRKDKSLNRANSRKQGWISPTIKQKRHAVIRIVDVLSKYICIDSIYLEDVAIDIRVLTEGHQIYGEQYQISNRLDENLRKATVLRDNCKCQLCGKKNCRLEVHHITPRRMNGSNTIGNLITLCSDCHSKVTGREMEFADQFYSKIGKKRNNYGLIYASHVMIGKTWLREELAKRAQLTLTTGGDTANKRINWNLEKSHEVDAVCITSLRPESVNVKKWRIKPLRHQIKKRKTIEVLGFRHRDIVSYVYRNGEYHEGYVTAIFPLSKRRKENLSFQSQTKHCCRVAINKCKFICRPNKFYWLSS

SEQ ID NO: 15468 - protein, 423 aa, Moorena sp.; identical to SEQ ID NO: 13756

SEQ ID NO: 15469 - protein, 442 aa, unidentified; identical to SEQ ID NO: 3218
  REGION 1..442: note = Human gut metagenome

SEQ ID NO: 15470 - protein, 403 aa, Moorena sp.
AKVIRRCPFTIQLLYEPETAVVQDITLGVDAGSKYIGLSATTEDRVLYESEVELRNDIVELISTRREARHARRNRKTRYRAPRFDNRTSSKKEDWLAPSIRQKIHSHLKVIADVHEILPVSKVIIEVASFDTQLLKAAEEGRPLPQGTDYQFGEQLGFYNTREYVLFRDNHTCQCCKGKSKDKVLNVHHIESKKVGGNAPNNLITLCETCHTGYHKGVVKFPSSIRRGMKFNDASFMGIMRWPVYSRLKEIYPSVELTYGYKTKNMRIENQLPKEHYIDARCISGNPKAKSDGIVYYQKKVRCHNRQIHKFKVNKDGLRKLNQAPYLVKGFRLWDKVLYNSEECFVQGRRSSGFFQLKKLDGTMISASASCKKLSLVETGKHFITERKRAIPPTVEECGFSCL

SEQ ID NO: 15471 - protein, 431 aa, unidentified
  REGION 1..431: note = Human gut metagenome
MPNKVYVINKHGRPLMPCSPAKARHLLDEGKAKIKKRTPFTIQLVYGSSGYTQEVILGVDAGSKTIGVSASTKKEELFAANVIPRNDVVDLLSTRREFRRARRNRKTRYRKPRFDNRVRSKHKGWLAPSVEVKIQEHITSIKRVCRILPVSKVVIETAEFDLQLLKAIADGKPVPQGEDYQKGEMYGHYNVRQYVLWRDDYTCQCCGAHATKKKEVRLHVHHLESRKVGGDAPDNQVTLCESCHEKLHKGLITAKDFKKRKRRSTRDATFMGIMRKTLMQMLCSELPIPVVKTRGYITKATREKLLVLPKSHTNDALAIAQGKRGFNVGYLPEIAQIDKIYTIRPVRHHNRQLHKAAILKGGIRKSNQAGKYVFGYRLFDKVQFNGQDCFIFGRRTTGIFTIKTINGKMIKDGISFKKLKPVEKSTSYLIA

SEQ ID NO: 15472 - protein, 411 aa, unidentified
  REGION 1..411: note = gut metagenome
MVYVQDIDGKPMMPTTRHGKVRRLLKDNKAVVVNTCPFTIKLTYKTSDYKQEIVLGVDSGTKHVGLSATTKSKELYASEVILRSDVVDLLSTRRGLRRTRRSRLRYRKQRFNNRVKSKKDGWIAPSVRHKIDSHIRIISFVYSILPVSKLIIEVAQFDTQKIKNPEISGKEYQEGEQLGFWNVREYVLARDGHKCQHCKGKSKDPILNIHHIESRKIGGDSPSNLITLCETCHKEFHKGNIKLKVSRGKSLRDAAVMGIMKWKLYEELKSRYDNVSMTFGYITKYNRINHGIEKSHVSDAFVISRNFNSCRLGYYYKRKLVRRHNRQIHKMKILKGGIRKRNQAPFKVFGFRLFDKVMFQGEEHFIYARRLSGQFNIRDINGENKKDVSCKKLKYVSHGLVSVKTNLFLSQ

SEQ ID NO: 15473 - protein, 443 aa, unidentified
  REGION 1..443: note = Human gut metagenome
LTKDENRPSGRTTGLRAEQAEPAGIRKGDTLKVFVLNMRSKSLMPCSPAKARHMLKAGKAVVVRRTPFTIKLTIATGETKQDVTLGVDAGARHVGISATTEKEEVFASEVALRQDITGLLADRLAFRRARRNRKTRYRAPRFNNRVRSKHKGWLAPSVENRIQAHMSRIEAVCRLLPVTKIVIETASFDIQKIRNPEVEGTGYQQGDQLGFWNVREYVLFRDGHVCQHCHGRSRDKILNVHHLESRKTGGDAPNNLITLCETCHKAYHAGKIKLKVKRGQSFRAEAFMGIMRWTLLDRVRKTHPKLPVENTYGYLTKHKRIALGLPKTHCADAFCIAGNLKALRRGDFLFQQQTRKHNRQIHRCSILKGGVRKLNQAPFLVKGFRLFDKVRIGGQIGFVFGRRVRGTFNIRRLDKTVIGTDINCKKLSLLETRKTFWVIGFNG

SEQ ID NO: 15474 - protein, 427 aa, unidentified; identical to SEQ ID NO: 5062
  REGION 1..427: note = Human gut metagenome

SEQ ID NO: 15475 - protein, 415 aa, unidentified; identical to SEQ ID NO: 5047
  REGION 1..415: note = Human gut metagenome

SEQ ID NO: 15476 - protein, 420 aa, unidentified
  REGION 1..420: note = Human gut metagenome
MQYVYVLNKHGEPLMPCSPRKARLLLKQKKACVIKRTPFTVKLLHGSAGYKQPVTLGVDAGSKHIGISATTEKHELYREEATPRNDVIDLLSARRAFRRSRRNRKTRYRAPRFNNRVHSKHKGWLAPSVEVKIQEHITLIKHVFRILPVTLVRVETAEFDTQRLKAMLEGKPLPVGTDYQLGEMYDEYNVRQYVLKRDNYTCQCCGAHSTKTKGVKLHVHHIETRRTGGNAPNNLITLCKACHKALHAEKVTLDGKKRGKPLKDAAFMGIMRKTLMERLRKELKIPVQGTYGYITKYLREKNGIPKSHTNDARCISKNPLAIPCDTCYYTKAVRHHNRQLHKATILKGGIRKANQAPYIVKGYRLWDKVAYNGTECFITGRRTSGYFALKELDGTVVSNSISYKKLRLLEAATNYIIERK

SEQ ID NO: 15477 - protein, 424 aa, unidentified; identical to SEQ ID NO: 11073
  REGION 1..424: note = Human gut metagenome

SEQ ID NO: 15478 - protein, 451 aa, unidentified
  REGION 1..451: note = Human gut metagenome
MSVAVMSKTGMRLMPTSEYRARKLLKSKKATVYRYNPFTIQLTERETGDVQTVELCMDTGYLHIGTSVKSEKHEYLGVQIDTLTDEKQKHDACRMYRRQRRSRKRYRQSRFNNRKRSDGWIAPSLEHKKDIHIQTISRICNAMPITNITLEMGNFDTQVLKALEENRPLPQGTDYQHGERYGIATLREAVFARDKYTCQCCRKTIADGAILHVHHIIYRSRGGTNRMSNLATVCDRCHTPANHKPDGRLYNWKPKIASFKGATFMTAVRWKMYNEVKSKFSDINIHITYGAETKEQRRAFDITKSHVNDALVMGQFHPKHRSRPVCYKKKRRNNRCLEKFYDAKYIDSRDGKKRSGQELFNGRINRNHKKDSENLHQYRQQKVSAGRRTIRKQHYSIQPHDIIVFNRQQFETSGCHCNGARAILLPQKKSVAIKKLSIHKYAGGYFKSDFT

SEQ ID NO: 15479 - protein, 420 aa, unidentified
  REGION 1..420: note = Freshwater metagenome
VLVYILNNQGKPLMPCKPQKARKLLKQNKAKVIKKEPFTIQLLFGSSGYKQLITLGVDAGSKNIGVSATTDKKELFGAEIELRNDIVDLLSDRRQYRRSRRNRTTRYRKARFLNRVSTKKEGWLTPSILNKIQTHLNVIQIVNQILPITKTIVEVASFDIQKIKNPNISGEEYQQGEQSGFWNVREYVLFRDNHICQCCKGKSKDKILNVHHIESRKKGGNAPNNLITLCETCHNNYHLGKIKLPSNIKRGMSFKDSSFMGIMRWAFYNKLKELYANVSLTYGYITKNTRIENKLPKAHRIDAVCISGNPNVKLLDNYYYIKQVRRHNRQIHKAKILKGGKRKLNQASYEVKGFRLFDKVKYEGKECFIFGRRSSGYFDLRKLDGEVTHRSASYRKIELISRRKSLLWEKRYEIQEQKSF

SEQ ID NO: 15480 - protein, 277 aa, unidentified
  REGION 1..277: note = Human gut metagenome
CRILPITLVRVETAEFDTQRLKAMLAGKPLPVGTDYQLGEMYDEYNARQYVLKRDHYTCQCCGAHTTTMKSVKLHVHHLESRKVGGNAPSNLITLCTTCHDNLHKRKVTLDGKKRGKTLRDAAFMGIMRKALMARLKEELSIPVQETYGYITKMRREQNDIKKSHVNDARCISKHPLAEPCSVCYRTKAIRHHNRQIHKANFSKGGYRKRSQMSYIVEGYRLWDKVLYKGQECFISGRRASGRFALKKLDGTSISKSVTFKKLRLLEPATNYLIERM

SEQ ID NO: 15481 - protein, 442 aa, unidentified; identical to SEQ ID NO: 3218
  REGION 1..442: note = Human gut metagenome

SEQ ID NO: 15482 - protein, 443 aa, Anoxybacillus sp.; identical to SEQ ID NO: 10273

SEQ ID NO: 15483 - protein, 340 aa, unidentified
  REGION 1..340: note = Human gut metagenome
LLIYQKEHGIMQYVYVLNKHGEPLMPCSPCKARLLLKQKKACVVKRTPFTIKLLYGSTGYKQPITLGVDAGSKHIGISAATEKYELYCEEATPRNDVVDLLSARRAFRRNRRNRKTRYRAPRFDNRVHSKHKGWLAPSVEVKIQEHITLIKRVCRILPVTLVRVETAEFDTQRLKAMLEGKPLPVGTDYQLGEMYDEYNVRQYVLKRDNYTCQCCGAHPTKTKAVKLHVHHIETRRTGGNAPNNLITLCTACHKALHAGKVTLNGKKRGKPLKDAAFMGVMRKTLMERLLKELKIPVQETYGYITKYLREKHSIPKSHTNDARCISKNPLAIPCDTCYYT

SEQ ID NO: 15484 - protein, 406 aa, unidentified; identical to SEQ ID NO: 2752
  REGION 1..406: note = Human gut metagenome

SEQ ID NO: 15485 - protein, 431 aa, unidentified
  REGION 1..431: note = Human gut metagenome
MPNKVYVINKHGRPLMPCSPAKARHLLDAGKAKVKKRTPFTIQLVYGSSGYTQEVILGVDAGSKTIGVSALTKKEELFAANVIPRNDVVDLLSTRREFRRARRNRKTRYRKPRFDNRVRSKHKGWLAPSVEVKIQEHITSIKRVCRILPVSKVVIETAEFDLQLLKAIADGKPVPQGEDYQKGEMYGHYNVRQYVLWRDDYTCQCCGAHATKKKEVRLHVHHLESRKVGGDAPDNQVTLCESCHEKLHKGLIAEKDFKKRKRRSTRDATFMGIMRKTLMQRLCSELPIPVIETRGYITKATREKLLVLPKSHTNDALAIAQGKRGFNVGYLPEIAQIDKIYTIRPVRHHNRQLHKATILKGGIRKSNQTEKYVFGYRLFDKVQFNGQDCFIWGRRTTGIFTIKTINGKMIKDGISFKKLKPVEKSTSYLIA

SEQ ID NO: 15486 - protein, 279 aa, unidentified
  REGION 1..279: note = Human gut metagenome
VVVETAEFDLHLLKAIADGKPVPQGEDYQKGEMYGHYNVRQYVLWRDNYTCQCCGTHPSKKKEVRLHVHHLESRKVGGDAPDNQVTLCESCHEKLHKGLIAEKDFKKRKRRSTRDATFMGIMRKTLMQRLCSELPIPVIETRGYITKATREKLLVLPKSHTNDALAIAQGKQGFNVGYLPGIVQINKIYTIRPVRHHNRQLHKATILKGGIRKSNQTEKYVFGYCLFDKVQFNGQDCFIWGRRTTGIFTIKTINGKMIKDGISFKKLKPVEKSTGYLIA

SEQ ID NO: 15487 - protein, 442 aa, unidentified
  REGION 1..442: note = Human gut metagenome
MSVSVFVLDKRKKPLMPCRPARARKLLNAGRARVVKTYPFTIRLVDRLLENSAVQPVAVKVDPGSEQSGMAVVRDDGKAHHHALFFINLVHRGKVIRDRLTGRRAFRHRRRSANLRYRAPRFLNRKRRKGWLPPSLQHRVDTTMSWVKKLRKLVPVTALWVENVKFDTQKLQNPEVSGVEYQQGTLFGFEVREYLLEKFGRRCVYCGAENTPLNIDHVVPRAKGGSDRVSNLVLACTDCNQKKGAQPLEAFLKDKPQQFERIRRQLKAPLRDAAAVNATRWALFNALKQTGLPVATGTGAQTKFNRKAFGIPKEHWLDALCVGRIDSADHPEGMGILQVRCTGRGSYQRTLLNKYGFPRGYLMRQKRVHGFATGDMGRAVVPSGKKAGIHQGRVAVRGTGSFAIQKADGKVDGIHWRHCRLISRNDGYGYAWLRPAPHSSPV

SEQ ID NO: 15488 - protein, 415 aa, unidentified; identical to SEQ ID NO: 6534
  REGION 1..415: note = Human gut metagenome

SEQ ID NO: 15489 - protein, 517 aa, Leptospirillum sp.
MLPQSRALEAADADNREGQDETVGGKGAIPKPVDNIPEGRRFARSALRPQGQCNVRFDGGFVQVFVLDKKKKPLMPCHPARARELLREGRAVVHRIAPFTIRLKDRIGGETQPIRVKLDPGSKTTGLAVVREEETDGETTAHVLFQAEIHHRGSAIKKRLDQRRSFRRRRRSQLRYRTPRFDNRTRPDGWLPPSLRHRVDTTLAWVERLRRLVPVSELSQELVRFDMQKIENPEISGAEYQQGTLAGYEVREYLLEKWGRTCAYCGASDMPLEIDHIHPRSLGGSERVSNLTLACRSCNLKKGNRPVGEFLAKTPERLSTILARAKAPLKDAAAVNTTRLALFQALKATGLPVEVASGGRTKYNRTRLGIPKRHSLDAACVGKVDRIEGWNRPFLSVKATGRGSYQRTRLDAFGFPRGSLTRTKAHFGFQTGDRVMAIVTKGKKTGTYAGRVAVRSSGSFNIQTGSGVVQGISYKDCRLLQRADGYGYSIHPITEKGEAGEALSLPGMNAGLSRARG

SEQ ID NO: 15490 - protein, 396 aa, unidentified; identical to SEQ ID NO: 4508
  REGION 1..396: note = Human gut metagenome

SEQ ID NO: 15491 - protein, 417 aa, unidentified
  REGION 1..417: note = Human gut metagenome
MPCSPAKARLLLKEKKAIVKRRTPFTIQLTIATGEAKQPVTLGVDSGYKHIGLSATTEKAELYASQVELRQDITDLLSARLALRRSRRSRKTRYRAPRFDNRVASKREGWLAPSVENRIAAHMSRVEAVMQVLPVTAITVETAAFDTQLLKNPDITGAAYQQGEQLGFWNVREYVLFRDGHVCQHCRGKSKDPILNVHHIESRRTGGDAPNNLITLCETCHKAFHRGEIKLKVRRGKSFKAETFMGIMRWTLLERLKKAHPELRVRNTYGYLTKHKRISHGIAKSHCADAYCIADNLGAKRLEGFFFQKQTRKHNRQIHKLSILKGGLKKKNQAPYEVKGFRLFDKVICKGEEAFIFGRRTSGSFDVRRLDGTRISAGINYKKLRLLEPRTTYLTELRKEAALPPRHKCRGFCADFL

SEQ ID NO: 15492 - protein, 419 aa, unidentified; identical to SEQ ID NO: 3628
  REGION 1..419: note = metagenome

SEQ ID NO: 15493 - protein, 496 aa, Streptomyces sp.; identical to SEQ ID NO: 4777

SEQ ID NO: 15494 - protein, 462 aa, Moorena sp.
MSRVAAQAATPVTGVRSRDAEIAVRKASIVTQRRVFVLGKSKHSLMPCHPARARALLKAGQAVIHRKYPTVIRLKTRTTGATQPVAFKLDPGAKTTGIALVRIHHLNPKIQSVLFTCELTHRGFAIRDSITQRASFRGSRRGRKTRYRAPRFLNRGGDKTGWLPPSLRHRLETILSWVARYRRWLPVTHIIVESVCFDMQLMQNPEISGVEYQQGELADVELREYLLEKWGRKCAYCDKDHVPLNLDHVVPKSRGGPRRASNFTLSCVPCNQAEGNQSIEAFLAKDPQRLAKILRHAKAPLAAAAAVNATRNAVVRALAATGLPVETGTGGRTKWNRTRFSLPKSHALDAACVGQVDGLFGADMAPLSIRCMGRGPHQRTRLTADGFPRGYLTRQKDHFGFRTGDIVRAIVPSGKRKGTHSGRVAVRATGNFNVQTKTGVVQGIAHRHCEIAQCADDYAYAG

SEQ ID NO: 15495 - protein, 420 aa, unidentified; identical to SEQ ID NO: 9464
  REGION 1..420: note = Human gut metagenome

SEQ ID NO: 15496 - protein, 349 aa, unidentified; identical to SEQ ID NO: 2731
  REGION 1..349: note = Human gut metagenome

SEQ ID NO: 15497 - protein, 452 aa, unidentified
  REGION 1..452: note = Ga0315279_10000169
MNMQTLQPKFKNVPTDASLVRSSTTLPLNRNESASVVEKVLSCNNPEVNLRKQVSGLTVIVPVLSLEGSPLMPCTPVKARHLLEKRRAHVVKLNPFIIRLNFKCESIVQEISFGMDAGYKNIGYSAITDTKEILSGEIALDNKTKSRMNERKMYRRNRRYRLRYRKPRFDNRVKPEGWLPPSIKRKFDTHINFIKGLKKMLPIKKVTVEIGNFDIQKIENPDISGVQYQQGDLYGYYNLKLYLLEREKGKCQLCGKKFTKENKPHMHHIKQRSEGGTSRAEGIALIHKSCHEDLHKKKLFHKLKPAKAYKAETFMSIVGGMFKKFLDCDVTYGYETCAKRKELGLEKSHVNDAFVIAGGTIQTRCLPSMIEQKRINNRTLQTNRKGFSSSIRKQRHKIQNRDFIWISGKKYLSGGVASRGTQVYYFDGSEKKLIPSKKIEKIYNTDNLIWLD

SEQ ID NO: 15498 - protein, 451 aa, unidentified
  REGION 1..451: note = Human gut metagenome
MTTFVFVLDRKGRSLMPCHPARARTLLKKGRARVHKVFPFTIRLTDRELENSSVQPMLIKIDPGSKETGIALVREEKNKGHHALCFINLQHRGQQIRNALYKRRCLRRSRRSRNLRYRSPRFLNRRRAEGWLAPSLQHRADSILSWVSRLRKIAPVERISQELVKFDTQLIQNSKIEGIEYQQGELVGYEIREYLLEKFGRKCIYCGADNVPLNIDHVIPKSKGGSNRASNLVLACVQCNQKKGSRSVEEFLKDKPEVLRQIKNQLKQPLKDAASVNATRWKLFNKLKSTSFPFEVGSGALTKFNRKKFGIPKAHWLDALCVGNVPSVTNWRNLNVLNIKCCGRGAYQRTRTDKYGFPRGICMRQKKVYGFSTGDMVKAIIPKGKKKGVYVGKVAVRKTGSFNLQTSGQTIQGISYRYCRLITHSDGYSYSWKSCPIPPRVETRGILGEVR

SEQ ID NO: 15499 - protein, 429 aa, Lactobacillus sp.
  SITE 429: note = misc_feature - Xaa can be any naturally occurring amino acid
MKGKKAMQNRVFVINKHGKALMPCKPRKARILLRDGKAKVLKKEPFTIQLLYGSTGYKQDISVGIDSGQRYIGLAVTSQNKVLFQGEVELRQDVKKLIDTRRTYRRSRRNRKTRYRKSRFLNRIAKKKDNWLPPSVASKVNHNINWIKRLLSVLPKADLHIEVGKFDMQKMKNPEINGEGYQQGDLYGYQTVKQFVLARDNYTCQVCKKKGGKFKIHHIIYRSLGGTNTVDNLITVCSNCHTTKNHQTGILAKWCKDKKKVNKSYKGATFMNILKRRLFLAFPQAKFQYGAWTTLQRADLELTKSHYNDAVAISGIRKVKAKPTSIMMFKQFRKKKRSLHEATARKGRKTPNITSKRNAKNTKYAKGFWLNDYVKIKDSNKKGYISGFMSKGTNVRLRDIFGEYVSNSDKSYTSTKNISLINHSNNWQX

SEQ ID NO: 15500 - protein, 413 aa, unidentified; identical to SEQ ID NO: 14300
  REGION 1..413: note = Human gut metagenome

SEQ ID NO: 15501 - protein, 427 aa, Moorena sp.; identical to SEQ ID NO: 5713

SEQ ID NO: 15502 - protein, 388 aa, Scytonema sp.; identical to SEQ ID NO: 2683

SEQ ID NO: 15503 - protein, 420 aa, unidentified
  REGION 1..420: note = Human gut metagenome
MQYVYVLNKHGEPLMPCSPGKARLLLKQQKACVVKRTPFTIKLLYGSTGYKQPITLGVDAGSKHVGLSASTEKRELYREEFTPRNDVVDLLSTRRQNRRSRRNRKTRSRAPRFDNRVHSKHKGWLAPSVEVKIQEHITVIKRICRILPVTLVRVETAEFDTQRLKAMFTGKPLPVGTDYQLGEMYDEYNVRQYVLKRDNYTCQCCGAHTTAKKTVKLHVHHLESRKIGGNAPSNLITLCTTCHNALHKGKVFLDGKERGKTLRDAAFMGIMRNTLLERLRNELHISVQNTYGYITKLLREQNDIKKSHVNDARCISKHPLAEPCSVCYRTKAIRHHNRQTHKANFSKGGIRKRSQMPYVVEGYRLWDKVLYKGQECFVSGRRASGSFTLKKLDGTRISKGVTFKKLRLLEPATNYLIERM

SEQ ID NO: 15504 - protein, 504 aa, unidentified; identical to SEQ ID NO: 3854
  REGION 1..504: note = Human gut metagenome

SEQ ID NO: 15505 - protein, 447 aa, Moorena sp.; identical to SEQ ID NO: 2820

SEQ ID NO: 15506 - protein, 438 aa, unidentified; identical to SEQ ID NO: 4848
  REGION 1..438: note = Human gut metagenome

SEQ ID NO: 15507 - protein, 424 aa, unidentified
  REGION 1..424: note = Human gut metagenome
MVYVISQKNKPLMPCSSPIARLLLKLGRAKVKKREPFTIKLTYETTNYIQNLTLGVDTGSGTIGTAVSNDNSDIVYMSEVIVRNDIMDKMTQRRKYRKNRRGRKTRYRKARWLNRANSTKTDRFSPTMQSKLHSHVKEIEYIKSILPITTMVFETGQFDTHLMKNPNLANPKVKHWGYQKGVNYGFENTKAMVLNRDNYTCQCCKGKHKDSKLEVHHIIFRSQGGSDEESNLITLCHTCHKDLHSGTINFKLKGKLKGNLKYATQMNSIRKQLFRIYPDAIETFGYVTKANRLVLGIDKEHYYDACTIATQGNIFTVKSNLYKKKCVSDGDFQKTKGIRSEQPIVTDKICGFRKFDKVRYFGNDYFIKGRMSTGYAILMDIDGNKADFSAMPKGYKTPKMVKLKRIEARTTWMITTVEVTPNIA

SEQ ID NO: 15508 - protein, 442 aa, Sutterella sp.
MSTSVFVLDKRHRPLMPCRPARVRRLLRAGRARVVKRFPFVIRLVDRTVEQSEVQPVLIKLDPGSRETGAAVVRDDEKKRHHALAFFVIKHRGGAIRDALKARSAFRRRRRSQNFRCRSPRFLNRVKPKGWLPPSLRHRVETTLSFVRRMCRYLPVSGIATELVKFDSQKLQNPEVSGVKYQQGTLFEYEVREYLLEKFGRKCVYCGAEGVPLNIDHVVPRAKGGSNRVSNLVLACVSCNQKKGARSLEDFLKGKPEVLARVRRELKTPLRDAAAVNATRWVLFNELKATGLPVETGSGALTKLNRHAFGVEKEHWLDALCVGRLNGVVTRKGLNVLEIRCMGRGSRQRTRLTKYGFPRGYLMRQKCVHGFATGDMVEANVPKGKKAGLWRGRVAVRVSGSFNIQTPKGVIQGVGWKHCRLISHNDGYGYAWLGHAPHSSPA

SEQ ID NO: 15509 - protein, 413 aa, unidentified
  REGION 1..413: note = Human gut metagenome
MTDYAFVLDANNKQLAPTKEQKAWFLIRRKRATLVSKYPLVIQFKKKIPDKEICKDEIRCGIDDGGLHVGVALVQKCQTRNKVVFKGVIEQRNDVKHLMDIRRGYRSYHRYHKRYRPARFNNRSSSKREGRIAPSVLQKRQAIIRVINQLNRWINITNYWLEDVAIDIRALTDGYKPYRWQYQKSNRLDENIRKAVILRDGCKCMECGKSNCKLEVHHIKPRRLKGSNTLGNLITLCTKCHQKTEGVEELYMDRYFALLNSSDNRNLDYTQHVMIGKQWLREQLSNLGMLYLTNGGDTANKRIDWDITKSHSNDAICITDLRPDTCEIKEWVIKPMRRQSKAKTDNVLGIKHRDLVEYTFRNGETHRGYVTALYPEQNAINFQSPIKHCKKVNAGKCKVLWKYSKIYWLDNVS

SEQ ID NO: 15510 - protein, 413 aa, unidentified; identical to SEQ ID NO: 3220
  REGION 1..413: note = Human gut metagenome

SEQ ID NO: 15511 - protein, 493 aa, unidentified
  REGION 1..493: note = Human gut metagenome
MAAVYVISASGKPLMPTTRCGHIRGLLNAGKARVVEREPFTIQLKYETPDVTQPLYLGIDPGRTNVGSVVVREDGECVFTAQLTTRNKDVPKLMKARKQFRMAHRRLKRRCKRQRRAKAAETLSQKGEFQRLLPGYEESILCKGIRNKEARFNNRQRPAGWLTPTANHLLLTHLNMVKKLQKLLPITDVVLEVNRFAFMAMENPSIRRWQYQQGPLYGKGSVEDAVYAQQDGHCLFCGKPIAHYHHVVPQHKNGSETLENRVGLCNEHHDLVHKDRAWDAKMKETKAGLNKKYHALSVLNQIIPALTEQLTAMFPQHAFVTTGKDTADFREDYGIAKEHHLDAYCIACSVLAEPTKVAAPTGKPHRLMQFRRHDRQVCHKENIKRVYLSEGKAVATNRHKAIEQKDDSLEEFRKTHTQQEVSALTVKDHQPVYKDMRRFMPGGVFLFNGKVHTLQRSHGRYKGMPFYYIDTDGSKNHAKGCIFLQQNCGLRWV

SEQ ID NO: 15512 - protein, 423 aa, unidentified
  REGION 1..423: note = Human gut metagenome
MVYVISKSGKPLMPCENVIARLLLKSGRAKVKRKRPFTIKLTVETTEYTQPLTLGVDTGSGTVGSAVSDDEGHILYMSEVKLRNDIKDRMDQRRKYRRSRRQRKTRYRKRRFLNRGASIRRDRLPPTLVSKLHAHIREIEFIKSILPITRLVLECGQFDMQLMNDPFIRSKGKIHWAYQKGPNYGFANTKEMVLNRDNYICQCCKGKRKDSKLEVHHIVFQSQGGSDSQENLITLCHTCHSLLHSGKISLDKVGIKKGTLSHATQMNVLRSQLLKIYTNAIETFGYVTKENRQYLNLPKEHYIDACVIASCGNQITIESLLYKRVCINDGDFQQTKGITSEQRLNTKKIFGFRKFDLVKYFGNEYLIKGRMTNGGYAILSDIDGNTVNFRKTSRHGKTVKLKDCKRLFARKSIMTITTSASDD

SEQ ID NO: 15513 - protein, 502 aa, Flavonifractor sp.; identical to SEQ ID NO: 2616

SEQ ID NO: 15514 - protein, 270 aa, unidentified
  REGION 1..270: note = Human gut metagenome
LSIKTLINIGKGVIYSSICTGLSLQTYQKRKEVPYMVYVLDIDGQPLMPTTRHGKVRRLLNSHLAKVVKRCPFTIQLLYQSTKETQPVSLGVDAGSKHIGMAATTEKKVVYQEELFPRNDVVKLLSARRTLRRTRRNRKTRYRKPRFNNRVHSKHKGWLAPSVEVKIQEHITAIKRICQILPISEIQVETAEFDLQRLKAMKEGKTLPVGTDYQLGEQYDFYNTRQYVLHRDGYTCQCCGTHDNNIKLHMHHIESRQTGGDAPNNLITLC

SEQ ID NO: 15515 - protein, 421 aa, unidentified
  REGION 1..421: note = Human oral metagenome
MFVYVLDKNGQPLMPTQRFGKVRRLLRDKKAKVVKRCPFTIRLLYEPETKIVQDIVLGVDTGSKYVGVACVGNSKVLYQSQIELRDDIERKMDSRRMYRRSRRNRKTRYRKPRFLNRRNSIRKDRYCPTIVSKYYSHEREIEFCKKILPIKDIVLEAGKFDTQLMEKPWLQEHKWAYQKGVNYGYANAREHALVRDSYTCQCCGKKNCRLEVHHIKFRSEGGSDTLENLITLCEDCHKAVHLGKITLKLKGKHKSNLRHATQMSIIRSMLLKKYSDAIETFGFVTKANRENLSLKKDHYLDACVIASGGLEFELSDVLYRKRCVPVQNRVLTRGIRSERKIPTGKVHGFKRYDKVEYLGKVCFVKARRTKGDFVLMDIGNNSIDFRVIGGCQNPSHKKIKRLNTRRGVICIIQKVQNREER

SEQ ID NO: 15516 - protein, 458 aa, Lactobacillus sp.; identical to SEQ ID NO: 4474

SEQ ID NO: 15517 - protein, 431 aa, unidentified
  REGION 1..431: note = metagenome
MPNKVYVINKHGRPLMPCSPAKARHLLDDGKAKVKKRAPFTIQLVYGSSGYTQEVILGVDAGSKTIGMSASTTKEELLSAEVKPRNDVVDLLSTRREPRRARRNRKTRYRKPRFDNRVRSKHKGWLAPSVEVKIQEHITAIRRVCGILPVSKVVVETAEFDLQLLKAIADGKPVPQGEDYQKGEMYGHYNVRQYVLWRDNYTCQCCGAHATKKKEVRLHVHHLESRKVDGDAPDNQVTLCESCHEKLHKGLIAEKDFKKRKRKSTRDATFMGIMRKTLMQRLCSELPIPVVKTRGYITKATREKLLVLPKSHTNDALAIAQGKRGFNVGYLPEIAQIDKIYTIRPVRHHNRQLHKATILKGGIRKSNQTEKYVFGYRLFDKVQFNGQDCFIWGRRTTGIFTIKTINGKMIKDGISFKKLKLVEKSTSYLIA

SEQ ID NO: 15518 - protein, 431 aa, unidentified; identical to SEQ ID NO: 3235
  REGION 1..431: note = Human gut metagenome

SEQ ID NO: 15519 - protein, 430 aa, unidentified; identical to SEQ ID NO: 4504
  REGION 1..430: note = Human gut metagenome

SEQ ID NO: 15520 - protein, 442 aa, unidentified
  REGION 1..442: note = Human gut metagenome
MSTSVFVLDKKHRPLMPCRPARARRLLRAGRARVVKRFPFVIRLVDRTVEQSEVQPVLIKLDPGSRETGAAVVRDDGKKRHHALAFFVIEHRGGAIRDALKARSAFRRRRRSQNLRCRSPRFLNRVKPKGWLPPSLRHRVETTLSFVRRMCRYLPVSGIAAELVKFDSQKLQTPEVSGIEYQQGTLFEYEVREYLLEKFGRKCVYCGAEGVPLNIDHVVPRAKGGSNRVSNLVLACMSCNQKKGARSLEDFLKGKPEVLARVRRELKTPLRDAAAVNATRWVLFNELKATGLPVETGSGALTKLNRHAFGVEKEHWLDALCVGRLNGVVTRKGLNVLEIRCMGRGSRQRTRLTKYGFPRGYLMRQKCVHGFATGDMVETNVPKGKKAGLWRGRVAVRVSGSFNIQTPKGVIQGVGWKHCRLISHNDGYGYAWLGHAPHSSPA

SEQ ID NO: 15521 - protein, 423 aa, unidentified; identical to SEQ ID NO: 2741
  REGION 1..423: note = gut metagenome

SEQ ID NO: 15522 - protein, 507 aa, unidentified; identical to SEQ ID NO: 10455
  REGION 1..507: note = Human gut metagenome

SEQ ID NO: 15523 - protein, 442 aa, unidentified; identical to SEQ ID NO: 3791
  REGION 1..442: note = Human gut metagenome

SEQ ID NO: 15524 - protein, 346 aa, unidentified; identical to SEQ ID NO: 4983
  REGION 1..346: note = Human gut metagenome

SEQ ID NO: 15525 - protein, 484 aa, Streptomyces sp.; identical to SEQ ID NO: 9080

SEQ ID NO: 15526 - protein, 470 aa, unidentified; identical to SEQ ID NO: 2825
  REGION 1..470: note = Human gut metagenome

SEQ ID NO: 15527 - protein, 449 aa, unidentified; identical to SEQ ID NO: 4729
  REGION 1..449: note = Synthetic metagenome

SEQ ID NO: 15528 - protein, 413 aa, unidentified
  REGION 1..413: note = Human gut metagenome
MVYVLNVNGQPLMPTENHAKVRILLRQGKAKVVNNCPFTIQLLYSSTNYTQPVTLGVDAGSKHIGLSATTEDKELYAADVELRNDIVKLLAARRTSRRSRRNRKTRYRKPRFNNRKRDKGWLAPSIKEKIGTHLKVVDDTCKLLPVSKIIVETASFDIQKIKNPDVSGTDYQQGEQLGFWNIREYVLFRDGHKCQCCKGKSKDKILNVHHIESRQTGGNAPNNLITLCETCHTGYHKGIIKLPAKIKRGMKFNDAAFMGIMRWAFYGELKKRYPDVSLTYGYITKNTRIKNGLPKEHYVDARCISSHPLARPLGTVFYIKKVRCHNRQIHKFTILKKGVRKRNQAEYEVYGFRLYDKVLWKGRICFVFGRRSTGRMDLRLLDGTHINASVGYKNIKLLRMRSNYLIEVRSAIG

SEQ ID NO: 15529 - protein, 430 aa, Moorena sp.
MVYVLDKDGNPLMPTKRYGKVRHPLKEKKAKPVRRQPFVIQLMYDPGRHKQPVDLGVDAGSKHIGVSAVSGNRELLSAQIDIRGDIRGGLKTRRDARRSRRNRKTRYRKPRFLNRVKSKHKGWIAPSVEAKCAAHVKVIDDIRSFLPVTDITIEMAAFDTQMLKAEMNGDPLPSGEDYQHGESEGYDNIKAYVKWRDGYKCAVCNAKGPLQVHHRQQRKDGGTNTPANLITVCPECHKKYHAGLLPEAKAKKLGPNAKAPKLRDASFMGTMRWKVWNKVKESGIPLHMTCGYKTAEKRREYDLPKGHRIDARCISGHPDAEPADEWFMCQKVRDHNRQLHKRNPNEGGFRQKNQNANMIKGFCLNDTVRFDGHDYFIHGKRSPRKNPETGKMTDSAFTIVDLDGNKTDRAPSRLKLKHHNGHMLIERRNA

SEQ ID NO: 15530 - protein, 442 aa, unidentified; identical to SEQ ID NO: 3791
  REGION 1..442: note = Human gut metagenome

SEQ ID NO: 15531 - protein, 465 aa, unidentified; identical to SEQ ID NO: 6446
  REGION 1..465: note = gut metagenome

SEQ ID NO: 15532 - protein, 406 aa, unidentified
  REGION 1..406: note = Human gut metagenome
MVYVQDINGKPMMPTTRHGKVRRLLKDKKAVVVSLCPFTIKLMYVTSDYKQEIVLGVDAGTKHVGLSATTKSKELYASEVTLRSDIVDLLSTRRELRRTRRNRLRYRKPRFNNRIKSKRPGWVAPSVKYKIDAHIRVIDNVCSILPISRIVIEVAQFDTQKIKNPDISGKEYQEGDQLGFWNVREYVLARDGHKCQYCKGKSKDKILNVHHLESRKTGGDSPSNLITLCETCHKEYHKGNIKLKVKRGASLRDAAVMGIMKWKLLDKLKSLYSNVSMTFGYITKHNRIKHEIKKSHISDAFVISKNFEAKRPGYYFKEKLVRRHNRQIHKMKILKGGKKKMNQAAFKVFGFRLFDKVEFQGNEYFIYARRLSGYFNIRDINSENKKDVTYKKLTHIGHGLISVETG

SEQ ID NO: 15533 - protein, 465 aa, Moorena sp.; identical to SEQ ID NO: 5576

SEQ ID NO: 15534 - protein, 414 aa, unidentified
  REGION 1..414: note = Human gut metagenome
MPCSPAKARHLLKEKKAIVVRRTPFTIQLTIATGESKQAVNLGVDAGYKHVGLSASTEKAELYASEVELRQDITDLLSARRALRRARRNRKTRYRAPRFDNRIRTKRKGWLAPSVENRINAHLSRIETVLRLLPVTKITVETASFDMQLLKNPDISGKEYQEGEQLGFWNVREYVFFRDGHVCQHCHGRSKDPVLNVHHLESRRTGGDSPGNLITLCETCHKALHRSEITLKAKRGQSFRAEAFMGIMRWEVLNRLKASHSELEVHNTYGYRTKHARIANGIDKSHCADAFCIAGNLGAKRPGEFLFQKQTRRNNRQIHKLSILKHGLRKRNQAPFEIKGFCLFDKVVCKGEEGFIFGRRSSGYFDVRKLDGTRISAGISYKKLRLLEKRRTYLTEIRKEEALPPLPEGRGLRA

SEQ ID NO: 15535 - protein, 305 aa, unidentified
  REGION 1..305: note = Human gut metagenome
RASSIKKDRFSPTMQSKLHSHVREIEYIQSILPVTEMVFETGQFDMHLMKNPSLANPKVRPWGYQKGANYGFENTKAMVLNRDNYTCQCCKGKHKDSKLEVHHIVFRSQGGSDEESNLLTLCHTCHKDLHSGKITPKLSGKVKGNLKYATQMNSIRKQLFRFYPNAIETFGYVTKVNRLHLGVAKEHYYDACTIATQGNAFNVKSNLYKKKCVSDGDFQKTKGIHSEQPIVTDKICGFRKFDKVRYFGNDYFIKGRMSTGYAILMDIDGNKIDFSTMPRGYKTPKLSNCKRITARSTVMTQVKVV

SEQ ID NO: 15536 - protein, 457 aa, Planktothrix sp.
MVLNNLKVQECQSRMMRKCHVRFVGEEDGAIHASLPDLKEVQNDNDNLKPLRIKIDPGAKFTGLALVSDKNIVWAAELEHRGFTIRDSLTSRRQIRRSRRQRKTRYRKPRFLNRRRKDGWLPPSLMSRVYNIQTWVNRLCKLAPIKAISLELVKFDTQKMVNPEINGVEYQRGEIWGYEVRQYLLEKFNHTCVYCGVTNKPFNLDHFHPKSKGGSDRVSNLVLSCVECNQAKGDKLPAEFLSDRLDILTKIDKQRKQPLADAAAVNATRWKLKDILESIGLPVELGSGGLTKYNRQRLNISKTHWTDAACVGLSTPNSLNIMGYQPLIIKAMGRGSRQMVKPDKYGFPRTSPKLRQKSFYGFMTGDIVKAVVSKGKKVGTYVGRIAVRKTGNFNIKTKTDTVQGISHKYCRQLHKSDGYAYSFGQVLSQKINQPKPPTQNTQVQRFKGIQGEQLSLF

SEQ ID NO: 15537 - protein, 513 aa, unidentified; identical to SEQ ID NO: 4541
  REGION 1..513: note = Human gut metagenome

SEQ ID NO: 15538 - protein, 412 aa, unidentified
  REGION 1..412: note = Human gut metagenome
MIYVLNQNGQPLMPTKNHAKVRILLKSKKAKVIRRCPFTIQLAYSSTNYTQNINLGVDAGSKHIGISATTKNKVLFESDVELRNDIVNLLSTRRQNRRTRRNRKTRYRKPRFDNRKRKDGWLAPSVQNKVDTHLMVIRKVHEILPVSKIIVEVASFDIQKIKNPTIGGTEYQQGSQLDFWNVREYVLFRDNHTCQCCKGKSKDKILNVHHIESRKTGGDAPNNLITLCETCHIGYHKGTVNLPKRIKRGMSFKDASFMGIMRWAFYNKLKEIYPNVSLTYGYITKNTRIENKLPKDHYIDARCISGNPKAVSDWGVYYQKKVRCHNRKIHKNAILKDGYRKRNQAPYEVMGFRLYDKVRWKQQNCFIFGRRSTGRMDLRLLDGTKVNASVGYKNLKMLEMCKNILIELRMEV

SEQ ID NO: 15539 - protein, 431 aa, unidentified
  REGION 1..431: note = metagenome
MPNKVYVINKHGRPLMPCSPAKARHLLDDGKAKVKKRAPFTIQLVYGSSGYTQEVILGVDAGSKTIGMSASTTKEELLSAEVKPRNDVVDLLSTRREFRRAQRNRKTRYRKPRFDNRVRSKHKGWLAPSVEVKIQEHITSIKRVCRILPVSKVVIETAEFDLQLLKAIEEGKPVPQGEDYQQGEMYGHYNVRQYVLWRDGYTCQCCGAHATKKKEVRLHVHHLESRKVGGDAPDNQVTLCESCHEKLHKGLIAEKDFKKRKRKSTRDATFMGIMRKTLMQRLCSELPIPVIETRGYITKATREKLLVLPKSHTNDALAIAQGKQGFNVGYLPEIAQIDKIYTIRPVRHHNRQLYKATILKGGIRKSNQTEKYVFGYCLFDKVQFNGQDCFIWGRRTTGIFTIKTINGKMIKDGISFKKLKPVEKSTGYLIA

SEQ ID NO: 15540 - protein, 327 aa, Sutterella sp.
MSTTVFVLDKKHRPLMPCRPARARRLLRAGRARVVKRFPFVIRLVDRTVEQSEVQPVLIKLDPGSRETGAAVVRDDGKKRHHALAFFVIEHRGGAIRDALKARSAFRRRRRSQNFRCRSPRFLNRVKPKGWLPPSLRHRVETTLSFVRRMCRYLPVSGIATELVKFDSQKLQNPEVSGVKYQQGTLFEYEVREYLLEKFGRKCVYCGAEGVPLNIDHVVPRAKGGSNRVSNLVLACVSCNQKKGARSLEDFLKGKPEVLARVRRELKTPLRDAAAVNATRWVLFNELKATGLPVETGSGALTKFNRHAFGVEKEHWLDALCVGRLNG

SEQ ID NO: 15541 - protein, 464 aa, unidentified; identical to SEQ ID NO: 3455
  REGION 1..464: note = Human gut metagenome

SEQ ID NO: 15542 - protein, 401 aa, unidentified; identical to SEQ ID NO: 10407
  REGION 1..401: note = Human gut metagenome

SEQ ID NO: 15543 - protein, 438 aa, unidentified
  REGION 1..438: note = Human metagenome
MVFVLDKSKKPLDMIPNAKARMLLKNKLAVVAKIYPFTIRLKDNRCGSKDRAYTVKLDPGSKTTGIAIIDDKNAVVMLAELEHRGRIIKKNLDSRRAVRRSRRQRKTRYREARFLNRIKPQGWLAPSVKSRADNVISFIRKYKKLLNIVKVEIERVSFDTAQMSSEIKLYGVDYRQGSLYQKKLREFIFSRSNGKCSYCGKQAQEIDHIVPRSKGGTDSSYNLVASCRSCNERKSNLTLKEFGKIMNKDYSHLEPKKLPKDAAIVQSARNYTVKEISKLVADTKSYDAWLTKYNRDELGLPKQHYYDALSVGNAQDYKFLTDKVLIISAKGRGSRQMCRMDKFGFPRTSPKGSKSVKGFQTGDIVKAVVPSGLKRGEYFGRVIIKSSGYFKINTEDALIEGIGYKYCRLIQRNDGYSYNYKERDFLSAINNRVSVVKI

SEQ ID NO: 15544 - protein, 447 aa, unidentified; identical to SEQ ID NO: 3138
  REGION 1..447: note = uncultured beta proteobacterium

SEQ ID NO: 15545 - protein, 450 aa, Moorena sp.; identical to SEQ ID NO: 2935

SEQ ID NO: 15546 - protein, 413 aa, unidentified; identical to SEQ ID NO: 12513
  REGION 1..413: note = Human gut metagenome

SEQ ID NO: 15547 - protein, 478 aa, Pantoea sp.
VAVFVLDIHGKALMPCTEKRARLLLDRGRARVHRLLPMVVRLVDRQAGDCEFQPLRLKIDPGSKTTGLALVREVAAVDALTGEVQLGVAVLNLLELVHRGRQISEAMTARRQMRRRRRSNLRYRAPRFLNRGGDKTGRLAPSLQHRVDTTMTWVRRIQRWAPVRAISSELVRFDMQALQNPEIDGIEYQQGTLFGYELREYLLEKWGRQCAYCGARNLPLQIEHIRAKAHGGSNRASNLTLACACCNQKKAARSIEDFLAQDHKRLNAILAQVQKPLRDAAAVNATRWALANALQATGLPVELASGGRTKFNRSALGVPKTHALDAACVGQVHSIKNWNSPTLALKAMGRGSYQRTRLDKFGFPRGYLMRSKRVHDFATGDMVRADVPKGLKAGVHWGRVAIRATGRFNIQLNQAGVSAVVQGIHYRHCRIVQRNDGYGYFLNPANHTKRDQVRPKASDASHPALYLPGMNAEVSRAL

SEQ ID NO: 15548 - protein, 465 aa, unidentified; identical to SEQ ID NO: 3603
  REGION 1..465: note = Human gut metagenome

SEQ ID NO: 15549 - protein, 347 aa, unidentified
  REGION 1..347: note = Human gut metagenome
RNDVVDLLSTRREFRRARRNRKTRYRKPRFDNRVRSKHKGWLAPSVEVKIQEHITSIKRVCRILPVSKVVIETAEFDLQLLKAIEEGKPVPQGEDYQQGEMYGHYNVRQYVLWRDGYTCQCCGAHATKKKEVRLHVHHLESRKVGGDAPDNQVTLCESCHEKLHKGLITAKDFKKRKRRSTRDATFMGIMRKTLMQMLCSELPIPVVKTRGYITKATREKLLVLPKSHTNDALAIAQGKRGFNVGYLPEIAQIDKIYTIRPVRHHNRQLHKATILKGGIRKSNQAEKYVFGYRLFDKVQFNGQDCFIWGRRTTGIFTIKTINGKMIKDGISFKKLKLVEKSTSYLIA

SEQ ID NO: 15550 - protein, 424 aa, unidentified; identical to SEQ ID NO: 8578
  REGION 1..424: note = Human gut metagenome

SEQ ID NO: 15551 - protein, 431 aa, unidentified; identical to SEQ ID NO: 4306
  REGION 1..431: note = Human gut metagenome

SEQ ID NO: 15552 - protein, 400 aa, unidentified
  REGION 1..400: note = Human gut metagenome
AKVKKRTPFTIQLVYGSSGYTQEVILGVDAGSKSIEISASTKKEEVFAADVTPRNDVVDLLSTRREFRRARRNRKTRYRKPRFNNRVRSKHKGWLAPSVEVKIQEHITSIKMVCRILPVSKVVVETAEFDLQLLKAIEEGKPVPQGEDYQQGEMYGHYNVRQYVLWRDNYTCQCCGAHPTKKKEVRLHVHHLESRKTGGDAPGNLVTLCDSCHEKLHKGLITEDDFKKRKRRSTRDATFMGIMRKTLMQRLCSELPIPVIETRGYITKATREKLLVLPKSHTNDALAIAQGKHGFNVGYLPGIEQIDKIYTIRPVRHHNRQLHKATILKRGIRKSNQAEKYVFGYRLFDKVQFNGQDCFIWKRRTSGYFVVKTIDGKIIHNSASFKKLRIAERASNYLIA

SEQ ID NO: 15553 - protein, 415 aa, unidentified; identical to SEQ ID NO: 10543
  REGION 1..415: note = Human gut metagenome

SEQ ID NO: 15554 - protein, 364 aa, unidentified
  REGION 1..364: note = Human gut metagenome
MKVFVIGMTGKRLCPTSPSKAKKLLKAGKAHVYRRVPFTIRLDYKTGGSAPALKLGIDTGEQHIGTAVCNDATVFCKSEIELIKSMEKKKRLEKRKIYRRSRRYRKTRYRHPKFRFRTKRVYVEGGYRKRKGGKMVLRHWKKVPNSVMTNRHEGWLPPSIESKVKHHIDWINRYMDVLPDGTMLGIEVARFDIARMKDPSIRGELYQFGRMYGRENTKAYVLAKFDYTCPICKKKFDRDRKPRMHHVTMRKNAATDNPDEYAPVCVLCHSGEEHLPGGVLDKLAKECRRREYREPTFMNILRRRLFETYPEAEFTYGNITNADRKMLGLEKTHANDAVSIAMHSNRLRRYGLLPPGSQEETVPS

SEQ ID NO: 15555 - protein, 437 aa, unidentified
  REGION 1..437: note = Human gut metagenome
MVGGVSQIFQKKEVSALDTVAVISASGRKLMPTNSYKARRLLKSKRAVIYRYRPVFTIKLVDRTNGYTQPIEYKCDTGYQNIGISICSDTKEFVNEQRDLLKDEVKRHSDSRKYRRTRRNRLRYRKARWNNRKGMISKDGFAPSIRNKRDVHARLYEEYYKVFPITKAVFEMGQFDTQVLKAVEVGLPILDGTDYQRGEQYGYATLREAVFARDNYKCICCGKSAIKDGVKLRIHHIGYLSGDRSNRMANLGSVCENCHTSKNHKPGGKLYSLKPELKTFKGATFMTTVRYSMVKKLKVMTPTVDIKVTYGAATKLARKTLNVKKTHSNDAYCMGEFHPKHRSDFKHYRKCRRNSRVLSRFYDAKYRDLRDGSVKTGSQLSCGRTNRKISRHAELDERIYRAHKISKGRVSTRRQHYSLRPGDKVLYDGKVYFVTGM

SEQ ID NO: 15556 - protein, 412 aa, unidentified
  REGION 1..412: note = Viral metagenome
MVYVINKQGQALMPTERFGKVRRLLKNSLAHVVCRIPFTIQLDYDTTDYTQPVSLGVDAGSKHIGISATTSEKELYAADVELRNDIVDKLSTRREQRRTRRSRLRYRKARFNNRVSSKRKGWLAPSVENKIQTHLTVVEKIHKFLPITNIVVETAAFDIQKINNPSISGSEYQQGEQLDFFNVREYVLFRDNHTCQHCKGKSKDKVLNVHHIESRKTGGDSPKNLITLCETCHKAYHRGDFELNVKRGKSFRDSAFMGIMRWSFYDRLKNIYPNVSMTFGYITKNARITNNLPKEHYVDARCISGNPMSKPLGYYFYQKKVRCQNRQIHKANFLKGGRKKLNQAPFFVKGFRLFDLVEYQKDLYYIFGRRSNGSFDIRKLDGTKVNKGSINCKYLRLISTRKSITTELNGKV

SEQ ID NO: 15557 - protein, 420 aa, unidentified; identical to SEQ ID NO: 3288
  REGION 1..420: note = Human gut metagenome

SEQ ID NO: 15558 - protein, 406 aa, unidentified; identical to SEQ ID NO: 2752
  REGION 1..406: note = Human gut metagenome

SEQ ID NO: 15559 - protein, 427 aa, Enterococcus sp.; identical to SEQ ID NO: 2410

SEQ ID NO: 15560 - protein, 422 aa, unidentified
  REGION 1..422: note = Human gut metagenome
ISACLRFWEKILKARHLLDDKKAKVVKRMPFTIRLLYGSTKYIQPIILGVDAGSKAIGLSASTAKEEVFAAEVMPRNDVVENLSTRREFRRARRNRTTRYRKPRSDNRVRSNHERWLAPSVKVKIQEHITSIKRVCTILPISKVVIETAEFDLQLLKAIQEGKPIPEGEDYQKGEMYGSYNVCQYVLWRDNYTCICCGVRGTPKNPVRLHVHHFESRKYGGNAPDNHGTLCDDCHKKFHLGIITDVKLKTRRRQSTRDAAFMGIMRKTLMWRLRTELFIPVAETKGYITKATREKLLVLPKSHTRDALAIAQGRHGFGIKEYAYVEPANHIYTVRPVRHHNRQLHKASILKGGIRKRNQASKYVFGFRLYDKVLYQGKACFVWGRRTSGTFLLRTIDGIKVKDGVSYRNLTLLERSSNYLIA

SEQ ID NO: 15561 - protein, 455 aa, unidentified; identical to SEQ ID NO: 11536
  REGION 1..455: note = Human gut metagenome

SEQ ID NO: 15562 - protein, 372 aa, Moorena sp.
MVYVLNKNGEPLMPTERHGKVRRMLRDGKAHVVRLVPFTIQLDYSSEEVVQEVSLGVDAGSKHIGISATTEGRELFAMQVEERDDIVELIASRRETRRTRRSRKLRYRASRFDNRRRKDGWMTPSSEYRISAHLRMIRLVCSILPITKTTIEVAQFDAQKIKNDKISGVEYQQGEQLGFWNVREYVLARDGHVCQHCKGKSKDKILNVHHIESRKTGGNAPNNLITLCETCHKAYHDGEITLKLRRGTSLRDAAAMSIMRWEVYNRAKQEFKNVHLTYGYVTKHARIHNSIAKTHCADALCISGNVGAERLSWFYGVRLTRRHNRSLHLFKPKKGGIVFRAFFYLCTNLFRNKTFFIAKNFQKIPTYLHKAT

SEQ ID NO: 15563 - protein, 512 aa, unidentified
  REGION 1..512: note = Human gut metagenome
MSTVYVLNKDGKPLMPTTRCGHVRHLLKEQKARVVTSKPFTIQLLYEADDLVQSLYLGIDPGRTNIGVAVVKADGTAVFTAHLETRNKEIPKLMKKRKESRRARRTNGRRCRRQRRAKANGTISKKCVKHDTAQNGSVSKRAKEIGVIKRHLPGCEKDVLCIGIKNKEAKFSNRTRPEGWLTPTANQLLETHINLVKKIQKFLPISDVVLEINKFAFMRLDNPNVQKWQYQQGPLYQKANLEETVSEMQEHHCLFCKKKIDHYHHVVPQHKNGSNTIDNIIGLCTQHHDLVHKDATWQKRLAKKKTGLNKKYGALSVLNQIIPALTKELSSLFPKHFFVTNGKSTYDYRAAHGVSKDHWLDAYCIACSVLPNDTCDKTINSRVPYELKQFRRHDRRALNNENMSRVYTFNGKMVATNRHKATEQTTDSLEEFRQRQPNDVCNLKVKEHHPTYRNMNRNYPGSVFLVGNQVHVMQGIAGSKDGEATTYKDTNANSIAAGKCKFVAKNSGILFV

SEQ ID NO: 15564 - protein, 408 aa, unidentified
  REGION 1..408: note = Human gut metagenome
MVYVQDIDGKPMMPTTRHGKVRRLLKANKATVVNLCPFTIRLTYATSGYKQEIVLGVDSGTKHVGLSATTKSKELYSSEVILRSDIVELLSTRRELRRTRRNRLRYRKPRFGNRVKSKHHGWVAPSVRHKVDAHIRVIDNICSTLPISRIIVEIAQFDTQKIKNPDISGNEYQEGDQLGFWNVREYVLARDGHKCQHCKGKSKDPILNVHHIESRKTGGDSPSNLITLCETCHKEYHKGNIDLKVKRGKSLRDAAVMGIMKWKLYEELKSRYPNVSMTFGYITKYNRIKYGIEKYHISDAFVISKNFNALRLEYHYKVRLVRRHNRQIHKQKVLKGGAKKPNQSPFEVFGFRLFDRVMFEGNYYFIFGRRKSGSFNIRDINGGNQRNVTYKKLKLSIGKRFMIQKEMN

SEQ ID NO: 15565 - protein, 406 aa, Geobacillus sp.; identical to SEQ ID NO: 11768

SEQ ID NO: 15566 - protein, 476 aa, unidentified
  REGION 1..476: note = Candidatus Carbobacillus altaicus
MVFVLDKHKQPLMPCSEKRARLLLRRGRAVVHKLAPFTIRLKDRTVGQSEVQPLQVKLDPGSKISGVAVLRGDEVVFLGEIHHRTDIKDRLEKRRMIRRNRRNRKTRYRKPRFLNRRPEKCAGCGRNAKHGSRYCRKCGQQPKDNGYRETRLPPSLRARVDQVMNASRKIRVPIGGISMELIRFDMQKLENPEISGVEYQHGTLWGYEVKEYLLQKFGHRCAYCLGESGDPVLEVEHVVPRSRGGTDRVSNLAIACRTCNEEKDNLMPNEWLGTLQRSKRKLDQVRADNLPKVLGQLKAPLRDAAAVNTTRWALYRRLLSLCIPEEVGSGGRTKWNRERMELPKEHYWDAACVGESTPERFWNIPAWVQVWEAKGRGNRQVCRTDKHGFPIRHLSRQKRHYGFQTGDMVVAEIPRGKYAGKWRGRVTVRASGTFDVFVRAVRAVQGVNHKYCRVLQRGDGWAYEQTRTAIAAPPHD

SEQ ID NO: 15567 - protein, 456 aa, unidentified; identical to SEQ ID NO: 6138
  REGION 1..456: note = metagenome

SEQ ID NO: 15568 - protein, 423 aa, unidentified
  REGION 1..423: note = Human gut metagenome
MRVFVFNMRGEPLMPCTQRKARLLLKTGKAKIYKYNPFTIQLKYVTGENKQECHVGIDTGSKYIGLAVTSENKVLFKGEVELRQDVKSKIDTKRIYRRSRRNRKTRYRRCRFLNRKRFGKWLPPSLQNRINHTFKWIDKLCSFIPESILHIEVGKFDIAKMINPEVHSVDYSQGQTYGYQGERYFIFARDNYTCQVCGERNKPLQTHHIIYVSNGGTNRVDNQITVCKECHTSTNHKNGGIFYKWQKEHKKVKQYKEPPFMNVLRQQILNQYPQALITYGFETTIKRKNIGLEKTHYNDAIVISGVSTISENLHEWLLIRQFRKKKRSLHEGVPRKGRKEPNRIQKRNSKNTPYYRGFYLNDKVSVFGKSGYITGFTNSGAYVKGVDGEYIVLPNKSYKRVNIASLKFICHNNNWQYITKNAV

SEQ ID NO: 15569 - protein, 428 aa, unidentified; identical to SEQ ID NO: 5055
  REGION 1..428: note = Human gut metagenome

SEQ ID NO: 15570 - protein, 420 aa, unidentified
  REGION 1..420: note = Human gut metagenome
MQYVYVLNKHGEPLMPCSPGKARLLLKQQKAHVIKRTPFTIKLLYGSTGYKQPITLGVDAGSKHVGLSASTEKRELYREEFTPRNDVVDLLSTRKQNRRSRRNRKTRYRPPRFDNRVHSKHKGWLAPSVEVKIQEHITVIKRICRILPITLVRVETAEFDTQRLKAMLEGKPLPVGTDYQLGEMYDEYNVRQYVLKRDNYTCQCCGAHTTAKKAVKLHVHHLESCKMGGNAPGNLITLCITCHDALHKGKVSLDNKKRGKPMRDAAFMGIMRRTLMSRLREELPITVQGTYGYITKMQREQNDIKKSHVNDARCISKHPLAEPCSVCYRTKAIRHHNRQTHKANFSKGGIRKRSQMPYVVEGYRLWDKVLYKGQECFVSGRRTSGSFTLKKLDGTRISKGVTFKKLRLLEPATNYLIERM

SEQ ID NO: 15571 - protein, 517 aa, Leptospirillum sp.
MLPQSRALEAADADNREGQDETVGGKGAIPKPVANIPEGRRFERSALRPQGQNNVRFDGGFVQVFVLDKKKKPLMPCHPARARELLREGRAVVHRIAPFTIRLKDRIGGETQPIRVKLDPGSKTTGLAAAREEETDGEKTAHVLFQAEIHHRGSAIKKKLDQRRAFRRRRRSQLRYRTPRFDNRTRPDGWLPPSLRHRVDTTLAWVERLRRLVPVSELSQELVRFDMQKIENPEISGIEYQQGTLAGYEVREYLLEKWGRTCAYCGSENVSLEIDHIHPRSLGGSDRVSNLTLACRSCNLKKGNRPVGEFLAKTPERLSTILARAKAPLKDAAAVNTTRWALFQALKATGLPVEVASGGRTKYNRTRLGIPKGHSLDAACVGKVDRIEGWNRPCLSIKATGRGSYQRTRLDAFGFPRGSLTRTKAHFGFQTGDRVLAIVTKGKKTGTYAGRVAVRSSGSFNIQTGSRVVQGISYKDCRLLQRADGYGYSIHPITEKGGAGEAISLPGMNAGLSRARG

SEQ ID NO: 15572 - protein, 454 aa, unidentified; identical to SEQ ID NO: 8421
  REGION 1..454: note = Human gut metagenome

SEQ ID NO: 15573 - protein, 477 aa, unidentified; identical to SEQ ID NO: 8085
  REGION 1..477: note = Human gut metagenome

SEQ ID NO: 15574 - protein, 406 aa, unidentified; identical to SEQ ID NO: 2703
  REGION 1..406: note = Human gut metagenome

SEQ ID NO: 15575 - protein, 428 aa, Enterococcus sp.; identical to SEQ ID NO: 4335

SEQ ID NO: 15576 - protein, 490 aa, unidentified
  REGION 1..490: note = Human oral metagenome
MYVVYVLNRQGKPLMPTKRFGHVRRMLKTGKAKAISTKPFVIQLQYESTDFVQPLYGGTDPGRTNIGEAVLNNKGEVVYAAHVLTRNKEIPKLMADRATHRRASRRGERLRRKRRAKANGTMTCFPEGRKLPGYKDGVLELKDIINTESRFNNRKRPAGWLTPTARQCIQTHLNMVQNICKILPVTDWTLEYNRFAFMQLEDGSVRGWDLQNGRLKGYASKEDYVYALQGGVCVCCGASIEHYHHIKPRHKGGSNTHENLVGLCSVCHAEIHIGKRNLDKIGKYKKYAGTSIVNIAIPFIWDGIVKMFGDKAHICEGQETAELRRANNIPKEHFADAVCIAGIGSGITPQYDDNQPFKLRQFRCHDRSRINAQVERTYLDGKTIVAKNRKPRFEQKGDALSDLQSKIAKEHGELAARRAVSKLVVKKSYRRYNVPERIKPSAVFMFNNKKYLLRGQLTNGMYYRAFGEGTKNFPSRNCEVVSSGCSLTYM

SEQ ID NO: 15577 - protein, 462 aa, unidentified
  REGION 1..462: note = Human gut metagenome
MSVLVIGSNGRALMPTNPRKACLLLKKKTASVVCRHPFTIQLLYKTGCATQEGCIGIDTGSQHIGVGVTCGDRVILKEEHELRSSMEKRSLLATRAVMRRGRRYRKVRYRKPKWRHHTKRMYFEKPNRRGQHWRKVKTTTQSPRPKGWLPPSLQSKCDHHFRIIDRYLKYLPDSITRNLVIEAGRFDMARMNDPMIHGEMYQRGPMYDAENRRAYIFARDNYQCACCKAKAGTTRKTDGTTVKLVAHHILFRSRGATDNPKYIISVCDHCHTTKAHQPGGILYSWMENNKKVARGLRDATFMNILRKRLFARYPQAAFTYGNITAADRKQLRLPKSHANDAVAISLFGKEVSAVRDTCQTVHYKQVRKSKRSLHEAIPRKGRKNPNTKAVRNKKNTTQVNGFKLWDSVLADGKKLFICSFTGTSAYLVDKNGCYVSQPGKTYKQWPLSKLKRLHPNGNWLMA

SEQ ID NO: 15578 - protein, 512 aa, unidentified
  REGION 1..512: note = Human gut metagenome
MSTVYVLNKDGKPLMPTTRGGHVRHLLKEQKARVVRTKPFTIQLLYETDDVVQPLYLGIDPGRTNIGVAVVKADSTAVFTAHLETRNEEIPKLMQGRKKARRARRTNGRRCRRQRRAKANGTISKKCVKQTTAQNGSASKRAKEIGVIKRHLPGCEKDVLCIGIKNKEAKFSNRTRPEGWLTPTANQLLKTHINLVKKIRKFLPISDVVLEINKFAFMRLDNPNIQKWQYQQGPLYQKASLEEAVSEMQEHHCLFCKKSIAHYHHVVPQSENGSNTIGNIVGLCTKHHDFVHKDTAWQKKLAKKKTGLNKKYGALSVLNQIIPALTKELSSLFPKHFFATNGKSTHDYRIAHDVSKDHWLDAYCIACSVLPNDTCDRTINSRVPYELKQFRRHDRRALHKENMSRVYTLNGKSVATNRHKATEQTTDSLKEFRQRQPNDVCKLKVKEHHPTYRNMNRNYPGSVFLIGKQVHVMQGIAGSKNGEATTYKDTNANSIAAGKCKFVAKNSGILFV

SEQ ID NO: 15579 - protein, 422 aa, unidentified; identical to SEQ ID NO: 5333
  REGION 1..422: note = Human gut metagenome

SEQ ID NO: 15580 - protein, 414 aa, unidentified
  REGION 1..414: note = Human gut metagenome
MPCSPAKARHLLKEKKAIVVRRTPFTIQLTIATGESKQAVNLGVDAGYKHVGLSASTEKAELYASEVELRQDVSDLLSARRALRRARRNRKTRYRAPRFDNRIRTKRKGWLAPSVENRINAHLSRIEAVLRLLPITKITVETASFDMQRLKNPDISGKEYQEGEQLGFWNVREYVLFRDGHVCQHCHGRSKDPVLNVHHLESRRTGSDSPDNLITLCETCHKALHRGEITLKAKRGQSFRAQAFMGIMRREVLNRLKASYPELKVHETYGYLTKHARIANGIVKSHGADAFCIAGNLGAERLGEFFFQKQTRRNNRQIHKLSILKGGIRKRNQAPFEAKGFRLFDKVACQGEEGFIFGRRSSGYFDVRKLDGTRISAGISYKKLRLLEKRRTYLTEIRKEEALPPLPEGRGLRA

SEQ ID NO: 15581 - protein, 406 aa, unidentified; identical to SEQ ID NO: 3980
  REGION 1..406: note = Human gut metagenome

SEQ ID NO: 15582 - protein, 470 aa, unidentified; identical to SEQ ID NO: 2825
  REGION 1..470: note = Human gut metagenome

SEQ ID NO: 15583 - protein, 457 aa, unidentified
  REGION 1..457: note = Human gut metagenome
VWLYQAVYNLGEGFLPSSEERTAFYWLLIYRKEHGIMQYVYVLNKHGEPLMPCSPGKARLLLKQQKACVVKRTPFTIKLLYGSAGYKQPITLGVDAGSKHVGLSASTEKRELYREEFTPRNDVVDLLSTRRQNRRSRRNRKTRYRAPRFDNRVHSKHKGWLAPSVEVKIQEHITVIKRICRILPVTLVRVETAEFDTQRLKAMLKGKSLPVGTDYQLGEMYDEYNVRQYVLKRDNYTCQCCGAHPTEKKPVRLHVHHLESRHVGGNAPNNLITLCVACHKALHEGKITLDKGKKRGKPLRDAAFMGIMRNTLLARLKDELNIPVKQTYGYITKLLREKNKIPKSHVNDARCIAKAPNAKPCDTMLYTRALRHHNRQIHKAKILNGGIRKKNQAPYLVKGFRLWDKVRYNGEECFITGRRSSGYFALKKYDGTVISNCASYKKLMLLEAATNYITERS

SEQ ID NO: 15584 - protein, 423 aa, Microcoleus sp.
MSNFVFVLDTQKRPLNPIHPGIARKLLTNGKAAVLKRYPFTLILKVEVTATRKPITLKIDPGSRTSGFALVQGEKVIFGAELTHRGQAIKASLESRRSLRRVRRNRHTRYRPARFLNRTRPKGWLAPSLQHRVETTLTWVTRLMKLAPIASIVQELVRFDLQQLENPEISGIEYQQGVLCGYEVREYLLNKWDRKCAYCGVTNTPLQVEHIHPKAKGGSNRISNLCLACEKCNIKKGTQNIEQFLSKKPEVLKGVLSQAKRSLKDATAVNSTRWALFNRLSMTGLPVSTGSGGLTKFNRTRLSLAKTHWLDAACVGNVESLKILTNKALLIKATGQGTRQMCRTDKFGFPCRYVPRLKFVKGFQTGDIVKAIVTSGKKVGKYVGRVAVRTSGSFNISASELVSGVSHKYCSIIHRKDGYSYAA

SEQ ID NO: 15585 - protein, 422 aa, unidentified; identical to SEQ ID NO: 11861
  REGION 1..422: note = Human gut metagenome

SEQ ID NO: 15586 - protein, 451 aa, unidentified
  REGION 1..451: note = Archaeon sp.
MQKLLVEFKNTPGDAPQVPCSVSEALNREETLSVPHKVLANNSSDEDLRSSKSGQDLQVPVINMHGKPLMPTRSRKARILLKQRKATVVQRTPFIIKLNYPVGGNKQALTMGIDAGYSTIGFSTVTEKSELLSGELTMRKKISKLIEQRSNYRRTRRGKLWHRKPRFNNRSKPEGWFAPSIQHKLETHLRLIDKLKNILPITEIIVEVASFDTHKLQNPEIKGVEYQQGELQGYEVREYLLEKWERKCAYCGKSNLPLEIEHIIPKSRGGTDRVSNLTLACHKCNQKKGDKTASEFGYPEVQKKAKQTLKANAFMNIVRWRLVNTLKCDWTYGYITKHDRIKFGMEESHINDAFVIAGGTNQSRTKPYKLTQTRRNNRRLQNNRKGFKPAIRRQMYKLHPNNLVKYLKNLYKVKGVHSYGKYVILVDKVGELVDINVKKVELVKHGKGIQF

SEQ ID NO: 15587 - protein, 515 aa, unidentified
  REGION 1..515: note = Human gut metagenome
MTALEEKLSKTEYIYVLGFDGKPQMPTRRKRHVLKLLKTGRARIAEDIPFTIRLTYRNAPVLQPVTLAEDPGRTNIGAAVLSPLGGLLFAAVIETRNKEIKKLMADRQKSRQASRRGERKARQRLAKRYGSMVKSGMVMRKLPMYAADKFVICKFIRNTQARFCNRKRCPDWITPTVQHLVQTHLNIIRKISRYLPVTDIAFEVNRFAFMHMENPEAMGVDFQNGPLKGYGDVKEAIRTQQHGKCLMCKKPITHFHHIVPRSRGGSDTIQNLAGLCTECHTKVHTDTAFRKDFDEKKSGQLKKYGALSALNQAVPFICKKLLEEYGEEHVHFCRGLDTSLIRTAFGFEKTKKNQMHEVDAYCIGLAALEVNEVETPAFDHTFQIRQFRRQDRSIIHHQTGRSYYQGKEKVAQNRKPGFEQKTTALSQWYKEQIRIHGEKEAEKLRSQLRVEKSCRHYNDMDRFLPGAVFLYEGKRYVLSGRITNGKYLRACGQGMKNFPAAECTFIRHNAGLVFI

SEQ ID NO: 15588 - protein, 431 aa, unidentified; identical to SEQ ID NO: 13666
  REGION 1..431: note = Human gut metagenome

SEQ ID NO: 15589 - protein, 364 aa, Oscillatoria sp.
DPGSKVTGIALKQGNHIIFGAELQHRGEQIKEALLSRRQLRRGRRNRKTRYRPARFLNRTRREGWLPPSLQHRVDTLMTWVNRFRRLTPVGSIAQELVRFDLQLMKNPDISGVEYQQGALQGYEVREYLLEKWGRNCAYCGVQNVPLEVEHIQPRSKGGSDRVSNLTMACHSCNQAKGNGDIRDFLSGQPDLLGRILKQTQLPLKDAAAVNSTRWALFKALKATGLRVTTGTGGQTKFNRLRLNRPKAHWLDAACVGPVDSLDILTSKPLLIRAKGHGTRRMCGTNKYGFPIRHRSRRQIHKGFRTGDIVAATVTAGKKIGSYVGRVLCRASGSFDITTASGRVAGISHKYCKPIHRKDGYAYA

SEQ ID NO: 15590 - protein, 570 aa, Streptomyces sp.
MRHVRSLNSNVTHTTPLSPKSLRAPASGATCPRRPHVRVISPDPCSLGNPRCVASGTSREGRSLAPSYRVTSPGHHDLRISRGASMTTFFTGEQTHQAVLPQQPALESAGADTPGSRDETAHGLPDPKPGTGVGHGRGETGAVRTRTRRRHARRLDPGSKATGIAVTDERDEVGAKGRTALVRRGLVSIELRHRGRQIHSGMVRRAGHRRRRRSANLRYRAPRRDNRTRPDGWLPPSLRHRIDSTMSLVARLCRYAPVLEIHVEQVAFDTALIAAAVSSREQDFSERTHAGSEIRESLLAKWERSCAYCGATGVLLNIEHVRPRSRGGSDRVANLVIACVPCNQAKGTARIDEFLADRPARLERVIAQLRRPLHDVAAMNTTRLLLVKTLATHGVAVHTWSGGRTSWNRLAMGLPKSHTLDALATGVIDLERGDAVVRIPAQILVVRSTGRGSYARTTPDRYGFPRLQRPRRKIHHGFSTGDLVAAVVPKGKWAGRWVGRVSVRAGGQHRITTLTSRFDVSHRNLRLLQRADGYTYGFADEIRLSEEHGPAYSGCTLKGGDPGNVRTPDA

SEQ ID NO: 15591 - protein, 417 aa, unidentified
  REGION 1..417: note = Human gut metagenome
MPCSPAKARLLLKEKKAIVKRRTPFTIQLTIAMGEAKQPVTLGVDSGYKHIGLSATTEKAELYASQVELRQDITDLLSARLALRRSRRSRKTRYRAPRFNNRVASKHKGWLAPSVENRIAAHLSRVEAVMRVLPVTAITVETAAFDTQLLKDPDIAGGAYQQGEQLGFWNVREYVLFRDGHVCQHCRGKSKDPVLNVHHIESRRTGGDAPNNLITLCETCHKAFHRGEIELKVKRGKSFKAETFMGIMRWTLFERLKKAHPELSVRNTYGYLTKHKRISHGIAKSHCADAYCIADNLGAKRLEGFFFQKQTRKHNRQIHKLSILKGGLRKKNQAPYEVKGFRLFDKVICKSEEAFIFGRRTSGSFDVRRLDGTRISAGISYKKLRLLEPRTTYLTEFRKEAALPPLHKCRGFRAEFL

SEQ ID NO: 15592 - protein, 428 aa, unidentified
  REGION 1..428: note = Human gut metagenome
LEIILKVAVLSMRGQCLMPCSPRKARVLLREKKAVVKQKSPFTIQLTIPTGETKQEVTLGVDAGSKHIGISVTTAKTELFASEVELRQDVTGLLADRRALRRSRRARKTRYRATRFNNRVHSKHKGWLAPSIENHIQAHLSRIEAVLKLFPVTKIVVETASFDIQKIKNPAITGNGYQQGELLDFFNLREYILWRDNHTCQHCKGKSKDKVLQVHHLESRRTGGNATNNLITLCKTCHEKSHTGEITLNIKRGRSFKDAAFMNIMRPAFVARLRKAHPGMLIEETYGYITKYQRIKLKLPKTHCADAFCIAGNLHATRSDVYLYQKQTRKHNRQIHKVNAIKGGIRKLNQAPYIVKGFRLFDKVKCFGKKCYGKEGFIMGRRQDGGFDIRTIDGQHISKSVSPKKLKLIQKRKTFLTAIKKEGASSPV

SEQ ID NO: 15593 - protein, 431 aa, unidentified
  REGION 1..431: note = Human gut metagenome
MPNKVYVLNKHGRPLMPCSPAKARHLLDAGKAKVKKRTPFTIQLVYGSSGYTQEVILGVDAGSKTIGMSASTTKEELLSAEVKPRNDVVDLLSTRREFRRARRNRKTRYRKPRFDNRVRSKHKEWLVPSVEVKIQEHITSIKRVCRILPVSKVVIETAEFDLQLLKAIEEGKPVPQGEDYQQGEMYGHYNVRQYVLWRDDYTCQCCGAHATKKKEVRLHVHHLESRKVGGDAPDNQVTLSESCHEKLHKGLIAEKDFKKRKRRSTRDATFMGIMRKTLMQRLCSELPIPVIETRGYITKATREKLLVLPKSHTNDALAIAQGKQGFNVGYLPEIAQIDKIYTIRPVRHHNRQLHKAAILKGGIRKSNQAEKYVFGYRLFDKVQFSGQDCFIWGRRTTGIFTIKTINGKMIKDGISFKKLKLVEKSTSYLIA

SEQ ID NO: 15594 - protein, 424 aa, unidentified; identical to SEQ ID NO: 3351
  REGION 1..424: note = Human gut metagenome

SEQ ID NO: 15595 - protein, 518 aa, Anaerostipes sp.; identical to SEQ ID NO: 3878

SEQ ID NO: 15596 - protein, 436 aa, unidentified
  REGION 1..436: note = Human oral metagenome
MTKTLATQTTQACVLDRQGQPLMPTTRLGKVYRLLKAKKAHIVSYEPFTIQLDYEPDTQVIQPMTLGVDSGAIHSGYSVANEHREYYNAEVIARNDISNRLSDKRMYRQNRRSRKTRYRQPRFNNRKNKKKGWLPPSLEQKVAVQVNEIGHIHRYFPIETIIVETAEFDIQKIKNPDISDIEYQQGTLQGYNIRNYLLEKHGRKCFYCGKAVSDFEVEHMFPKSRGGTNRIDNLTLSCHNCNEKKGTLTAEEFIKQTLSAKKAASKLKQLPNEKRLFKYMAYMNATRWALYDAIKERYPNVKMTYGYITKYNRIQAGLPKAHHIDAKCITGFATVPSMSQTVVKVKMRRHNRQLHRATFSKGHVRKAASLPTTVFGFQLYDLVLFNNHRYYVKSRKSSGYFRLTSVEGLKNEERTYKKLTLLAHTNAYLTHRYVNA

SEQ ID NO: 15597 - protein, 493 aa, unidentified; identical to SEQ ID NO: 2644
  REGION 1..493: note = Human gut metagenome

SEQ ID NO: 15598 - protein, 407 aa, unidentified
  REGION 1..407: note = Human gut metagenome
MPCSPAKARLLLKEKKAAVVRRTPFTIQLTIATGESKQPVSLGVDAGYKHVGLSASTEKAELYASEVELRKDITDLLSARRALRRARRNRKTRYRAPRFNNRIRTKRKGWLAPSVENRINAHLSRIEAVLRLLPVTKITVETASFDMLLKNPDIAGKEYQEGEQLGFWNVREYVLFRDGHVCQHCYGRSKDPVLNVHHLESRRTGGDSPGNLITLCETCHKALHRGEITLKAKRGQSFRAEAFMGMMRWEVLNRLKASHPELEVHNTYGYRTKHARIVNGIDKSHCADAFCIAGNLGAERLCEFLFQKQTRRNNRQIHKLSILKGGIRKRNQAPFEIKGFRLFDKVACKGEEGFIFGRRSSGYFDVRKLDGTRISAGISYKKLRLLEKRRTYLTEIRKEEAIPNSPA

SEQ ID NO: 15599 - protein, 413 aa, unidentified; identical to SEQ ID NO: 2636
  REGION 1..413: note = Human gut metagenome

SEQ ID NO: 15600 - protein, 439 aa, unidentified; identical to SEQ ID NO: 8850
  REGION 1..439: note = gut metagenome

SEQ ID NO: 15601 - protein, 423 aa, Scytonema sp.; identical to SEQ ID NO: 2740

SEQ ID NO: 15602 - protein, 431 aa, unidentified
  REGION 1..431: note = Human gut metagenome
MPNKVYVINKHGRPLMPCSPAKARHLLDEGKAKIKKRTPFTIQLLFGSTGYTQEVILGVDAGSKTIGLSASAETEELLSAEVKPRNDVVDLLSTHREFRRARRNRKTRYRKPRFDNRVRSKHKGWLAPSVEVKIQEHITSIKRVCRILPVSKVVIETAEFDLQLLKAIADGKPVPQGEDYQKGEMYGHYNVRQYVLWRDDYTCQCCGAHATKKKEVRLHVHHLESRKVGGDAPDNQVTLCESCHEKLHKGLITAKDFKKRKRRSTRDATFMGIMRKTLMQMLCSELPIPVVKTRGYITKATREKLLVLPKSHTNDALAIAQGKRGFNVGYLPEIAQIDKICTIRPVRHHNRQLHKAAILTGGIRKSNQAEKYVFGYRLFDKVQFNGQDCFIWGRRPTGIFTIKTINGKMIKDGISFKKLKPVEKSTSYLIA

SEQ ID NO: 15603 - protein, 400 aa, unidentified
  REGION 1..400: note = metagenome
AKVKKRTPFTIQLVYGSSGYTQEVILGVDAGSKTIGVSALTKKEELFAANVIPRNDVVDLLSTRREFRRARRNRKTRYRKPRFDNRVRSKHKGWLAPSVEVKIQEHITAIRRVCGILPVSKVVVETAEFDLQLLKAIADGKPVPQGEDYQKGEMYGHYNVRQYVLWRDDYTCQCCGAHATKKKEVRLHVHHLESRKTGGDASGNLVTLCESCHEKLHKGLITEDDFKKRKRRSTRDATFMGIMRKTLMQRLCSELPIPVIETRGYITKATREKLLVLPKSHTNDALAIAQGKHGFNVGYLPGIEQIDKIYTIRPVRHHNRQLHKATILKRGIRKSNQAEKYVFGYRLFDKVQFNGQDCFIWKRRTSGYFVVKTIDGKIIHNSASFKKLRIAERASNYLIA

SEQ ID NO: 15604 - protein, 423 aa, Moorena sp.
MSNFIFVVDTNKKPLTPCKSSMARKLLTAGKAAIFRRFPCTIILKKAVTATIESITLKLDPGSKTTGIALLQGEKVIFGAELTHRGQTIKASLESRRSLRRGRRNRHTRYRQARFLNRTRKKGWLAPSLQHRVETTLTWVEKLRRLAPIGLIVQELVRFDLQQLENPEISAIEYHQGELQGYEVRQYLLNKWNRKCAYCDAENVPLQVEHIHPKSQGGSNRISNLCLACQKCNQKKGTQNIEQFLAKKPDILSRILTQSKRPLKDAAAVNSTRWTLFGRLKETGLPVLTGSGGLTKFNRSRLQLPKTHWLDAACVGQVEALELLTNKPLLIKETGHGTRQMCRTDKFGFPSRYVPRNKFVKGFQTGDIVKAIVISGKKIGEYVGRVAVRTTGSFNISASELVQGISHKYCKIVHKKDGYSYAY

SEQ ID NO: 15605 - protein, 452 aa, Petrotoga sp.; identical to SEQ ID NO: 7138

SEQ ID NO: 15606 - protein, 462 aa, Moorena sp.; identical to SEQ ID NO: 4520

SEQ ID NO: 15607 - protein, 443 aa, unidentified
  REGION 1..443: note = Human gut metagenome
VVKANGTAVFTAHLETRNKEVPKLMQDRKKARRARRTNGRRCRRQRRAKANGTISKKCVKQDTAQSKNPSKRAKEIGIIKRRLPGYKKDVLCIGIKNKEAKYTNRTRPEGWLTPTANQLLQTHINLVRKMQKFLPISDVVLEVNKFAFMRLDNPDIQKWQYQQGPLYQKGSLENAVSEMQEHHCLFCDKPIDHYHHVVPQSENGSNTIANIVGLCAEHHNLVHKDAAWQKKLAEEKVGLNKKYGALSVLNQIIPALTNKLSVLFPKHFFVTAGKSTHDYRAAHGVSKDHWLDAYCIACSVLPSNVCDSNINNHMPYELKQFRRHDRRVLNNENMNRVYTLDNKAVAINRHKATEQEAASLEEFRKEHPNDVCKLKVKEHHPTYRNMNRNYPGSIFLVGKHVHIMQGIAGSKDGKATTYKDSNANSITASKCKFVAKNSGILFV

SEQ ID NO: 15608 - protein, 515 aa, unidentified
  REGION 1..515: note = Human gut metagenome
MTALEERLSKTEYIYVLGFDGKPQMPTRRKRHVLKLLKTGRARITEDIPFTIRLTYRNAPVLQPVTLAEDPGRTNIGAAVLSPLGGLLFSAVIETRNKEIKKLMADRKKSRQASRRGERKARQRLAKRYGSMVKSGMVMRKLPMYAADKFVTCKFIRNTQARFCNRKRCPDWITPTVQHLVQTHLNIIRKISKYLPVTDIAFEVSRFAFMHMENPKAMGVDFQNGPLKGYDDVKEAIRTQQHGKCLMCKKPIAHFHHIVPRSRGGSDTIQNLAGLCPECHTKVHTDTAFRKDFDRKKSGQLKKYGALSALNQAVPFICKKLLEEYGEEHVHFCRGLDTSLIRTALGFEKTKKNQMHEVDACCIGLAALEVNEVETPAFDHTFQIRQFRRQDRSIIHHQTGRSYYQGKEKVAQNRKPGFEQKTTALSQWYEEQVRIHGEKEAEKLRSQLRVEKSCRHYNDMDRFLPGAVFLYEGKRYVLSGRITNGKYLRACGQGMKNFPAAECTFIRHNAGLVFI

SEQ ID NO: 15609 - protein, 330 aa, unidentified
  REGION 1..330: note = Human gut metagenome
MVYVVANDGQPLMPTERHGKVCRMLKSGIAKVVKKCPFTIQLQYESERNVQPVALGIDAGSKHVGVSATTKAKVLYESDVELRDDIVKLLATRRQLRRRRRSRKTRYRPARFDNRRRKEGWLAPSIRQKIESHLTVVANVCKILPVSQIIVETASFDIQKIKNPDIQGIEYQQGEQMDFWNIREYVLFRDGHTCQCCKGKSKDKVLNVHHIESRKTGGNAPNNLITLCETCHKGYHNGTVTLPKNIKRGMKFKDAAFMGIMRWTFYNTLKEQYEPDIPVHYTYGYITKNTRINHNLPKGHCIDARCISGNPDAVSDGTYYYQKKVRCHNR

SEQ ID NO: 15610 - protein, 420 aa, unidentified; identical to SEQ ID NO: 3153
  REGION 1..420: note = Human gut metagenome

SEQ ID NO: 15611 - protein, 442 aa, Lactobacillus sp.; identical to SEQ ID NO: 4549

SEQ ID NO: 15612 - protein, 378 aa, Moorena sp.; identical to SEQ ID NO: 11223

SEQ ID NO: 15613 - protein, 417 aa, unidentified; identical to SEQ ID NO: 5520
  REGION 1..417: note = Human gut metagenome

SEQ ID NO: 15614 - protein, 465 aa, unidentified
  REGION 1..465: note = Human gut metagenome
MSTCACVLSKNGERLMPTIRLGKVRHLLKDGKAKIIKHHPFTIQLLYDSETNIQPIEICEDVGYNYIGISVKSQSHEYVSVQYDTLQDEKDCHDSCRKMRRIRRNRLRYRKPRFDNRKRNKGWLAPSLEHKKELNVNVIKMYCKVVPITHVTVEVGSFDTMLVKAIQEGKAIPEGADYQKGPRYNLATLREAVFYRDKYTCQVCGRKANEGAILHVHHMFYWKGRHGNSLSELLTVCEKCHTPANHQQGGKLYRFGENIKFANLSGAAFMNTVRWQIVNELYTAFGKLFVTFTYGAMTKEKRIAFHLEKCHNNDAYAMGNFHPVDRCAFEHYKKVKRNNRILEKFHDSQYIDIRTGKVANGRSLFNGRINRSHKKNSENLHKYRGKRTRKGYRALRRKKVALNPGDLVSLNGEILVVHSTHAGKNGYVGVEFKAPSKSGKKSASLKKLKIVKTSNSMRSAWTKVS

SEQ ID NO: 15615 - protein, 512 aa, unidentified; identical to SEQ ID NO: 3971
  REGION 1..512: note = Human gut metagenome

SEQ ID NO: 15616 - protein, 440 aa, unidentified
  REGION 1..440: note = Human gut metagenome
MPTNSYRARRLLKSKRAVIHKYRPVFTIKLVDRTNGYTQPIEYKCDTGYQNIGISICSDTKEFVNEQRDLLKDEVKRHSNSRKYRRTRRNRLRYRKARWNNRKGMISKDGFAPSTRNKRDVHIHLYEEYYKVFPITKAVFEMGQFDTQVLKAVEAGLPVPEGTDYQRGEQYGYATLREAVFVRDSYTCICCGKSAIKDGVKLRIHHIGYLSGDRSNRMANLGSVCESCHTSKNHKPGGKLYSLKPELKTFKGATFMTTVRYSMVKKLKVMTPTVDIKVTYGATTKLARRVLSVKKTHSNDAYCMGEFHPKHRSDFKHYKKCRRNSRVLSRFYDAKYRDLRDGSVKTGSQLSCGRTNRKISRHTKLDERIYRAHKISRGRVSIRRQHYSLRPGDRVLYDGKVYFVTGMQNSGTHVKLTNGKVCSLKKVHVLQHCNAWTAVI

SEQ ID NO: 15617 - protein, 470 aa, Thermoanaerobacterium sp.
VWQTQKAEITLARRDYLLIALLVLYRTPKGEFYMVFVLDKHKKPLMPCTEKRARLLLESGRAVIHKINPFVIRLKDVTVDNCIIQPCRIKIDPGSKVTGIAILQGEKVLLLVELYHKQGIKKSLDDRRNHRRFRRNKLRYREPRFDNRKREKGWLPLSLEARVQQVINTVKKLAKYIPIDNISIEHVKFDTQLMQNPEISGVEYQQGELQGYEVREYLLVKWGRKCAYCGKENVPLEVEHIVPKSRGGTDRVSNLTIACHECNQKKGNMTAEEFGYPDIQKQAKQPLKDAAMINATRWKTYNLLKEMYPVECGTGALTKKNRIDRNLPKEHYCDACCVGQSTPKEFVFKADYILEFHAKGRGTRQRTLLNKYGFPRAYLSRQKEYFGFQNGDYVKAEVPKGKYKGQYTGYVAVRKSGYFDIRDANGKNIAQGISYQYCHIIQRYDGYKYGRRKRHILLHPSDAMDGVSCA

SEQ ID NO: 15618 - protein, 431 aa, unidentified
  REGION 1..431: note = Human gut metagenome
MPDKVYVISRLGHPLMPCSPAKARHLLDDKKAKVVKRMPFTIRLLYGSTKYIQPIILGVDAGSKTIGLSASTAKEEVFAAEVMPRNDVVENLSTRREFRRARRNRTTRYRKPRSDNRVRSNHERWLAPSVKVKIQEHITSIKRVCTILPISKVVIETAEFDLQLLKAIQEGKPIPEGEDYQKGEMYGSYNVCQYVLWRDNYTCICCGVRGTPKNPVRLHIHHFESRKYGGNAPDNHGTLCDDCHKKFHLGIITDVKLKTRRRQSTRDAAFMGIMRKTLMWRLRTELFIPVAETKGYITKATREKLLVLPKSRTRDALAIAQGRHGFGIKEYAYVEPANHIYTVRPVRHHNRQLHKASILKGGIRKRNQASKYVFGFRLYDKVLYQGKACFVWGRRTSGTFLLRTIDGIKVKDGVSYRNLTLLEQSSNYLIA

SEQ ID NO: 15619 - protein, 440 aa, Moorena sp.; identical to SEQ ID NO: 5150

SEQ ID NO: 15620 - protein, 431 aa, unidentified; identical to SEQ ID NO: 3801
  REGION 1..431: note = Human gut metagenome

SEQ ID NO: 15621 - protein, 424 aa, unidentified; identical to SEQ ID NO: 3434
  REGION 1..424: note = Human gut metagenome

SEQ ID NO: 15622 - protein, 425 aa, unidentified; identical to SEQ ID NO: 2429
  REGION 1..425: note = Human gut metagenome

SEQ ID NO: 15623 - protein, 458 aa, unidentified
  REGION 1..458: note = Human gut metagenome
VSYTARYVPAYRIKHITKKEVPYMVYVLDIDGQPLMPTSRHRKVRKLLNSHLAKVAKRCPFTIQLLYQSTKETQPVSLGVDAGSRHIGLAATTEQKVVYQEELVPRNDVVKLLSARRALRSSRRSRKTRYRKPRFNNRVHSKHKGWLAPSVEVKIQEHITAIKRICQILPISDIHVETAEFDLQRLKAMEEGRPLPVGTDYQLGEQYDFYNTRQYVLHRDEYTCQCCGTHDNNVKLHVHHIESRQTGGDAPNNLITLCEHCHKLLHAGKTILPKGKKRGKSYRDATFMGIMRKTLLERLRKEVDVPVSWTYGYITKYWREKTDLEKSHINDAICISKYPYAKPLDTYYLTKAVRHHNRQIHKSNFSKGGIRKRNQAPYLVKGFRLFDKVLYQGKSYFIFGRRATGYFDIRTLDGTKINKGSIGYRKLRIQDTAKAYLTETKKEARAIPHMNEFTCVLA

SEQ ID NO: 15624 - protein, 408 aa, Bacillus sp.; identical to SEQ ID NO: 4228

SEQ ID NO: 15625 - protein, 201 aa, unidentified
  REGION 1..201: note = Human gut metagenome
NAPDNHRTLCDDCHKKFHLGIITDVKLKTRRRQSTRDAAFMGIMRKTLMWRLRTELFIPVAETKGYITKATREKLLVLPKSHTRDALAIAQGRHGFGIKEYAYVEPANHIYTVRPVRHHNRQLHKASILKGGIRKRNQASKYVFGFRLYDKVLYQGKACFVWGRRTSGTFLLRTIDGIKVKDGVSYRNLTLLERSSNYLIA

SEQ ID NO: 15626 - protein, 413 aa, unidentified
  REGION 1..413: note = Human gut metagenome
LKVFVLNMRGKPLMPCSPAKARHMLKAGKAFVVRRTPFTIKLTIATGETKQDVTLGVDAGARHVGISATTEKEEVFASEVALRQDITGLLADRLAFRRARRNRKTRYRAPRFNNRVRSKHKGWLAPSVENRIQAHMSRIDAVCRLLPVTKIVIEAASFDVQKIKNPTIEGTDYQQGDQLGFWNVREYVLFRDGHICQHCRGRSKDPILNVHHLESRKTGGDAPNNLITLCETCHKAYHAGKIKLKVKRGQSFRAEAFMGIMRWTLLDRVRKTHPKLPVENTYGYLTKHKRIALGLPKTHCADAFCIAGNLKALRRGDFLFQQQTRKHNRQIHKCSILKGGVRKLNQAPFLVKGFRLFDKVRIGGQIGFVFGRRVRGTFNIRRLDKTVIGTDINCKKLSLLETRKTFLTELRKE

SEQ ID NO: 15627 - protein, 442 aa, unidentified; identical to SEQ ID NO: 2903
  REGION 1..442: note = Human gut metagenome

SEQ ID NO: 15628 - protein, 453 aa, Moorena sp.; identical to SEQ ID NO: 12267

SEQ ID NO: 15629 - protein, 531 aa, Acidithiobacillus sp.
MLAKGKAPKVPAASARLSAGTDGAGYKPSRGDIDRKVRVTSVRKDIGEKMAVFVLDRRKKPLMPCSEKRARMLLERGRARVHHMVPFTIRLVDRLVENSALQPVRLKLDPGSKTTGLALVREKETVDVSTGEIIRTLTVLMLLELKHRGHAIRDALTSRGAFRRRRRGNLRYRPARFDNRTKPEGWLAPSLQHRVGTTLAWVERLMRWAPVTALSQELVRFDTQQMQNPEISGTEYQQGTLLGYEVREYLLEKWGRECVYCGVENVPLEIDHIHPRSKGGSDRVSNLTVSCHDCNQAKSNMPVEQFLAKRPERVRKILAQAKAPLRDAAAVNSTRWALFQRLKATGLDVESASGGRTKWNRHQLDIPKEHCLDGACVGHVDAIERWQQPVLSIKATGRGSYQRTRLTKYGFPRGYLTRSKSAFGFHTGDMVKAVVTKGKKSGTWLGRVAIRASGSFNIQTAVCKTGNGLVQGIHHRFCTLIQRADGYGYSWTKIASTSARTNTQGDAEMGRSVTAALSLPGLNPGVSRATG

SEQ ID NO: 15630 - protein, 242 aa, unidentified
  REGION 1..242: note = Human gut metagenome
MPNKVYVINKHGRPLMPCSPAKARHLLDEGKAKVKKRTPFTIQLVYGSSGYTQEVILGVDAGSKSIEISASTKKEEVFAADVTPRNDVVDLLSTRREFRRARRNRKTRYRKPRFNNRVRSKHKGWLAPSVEVKIQEHITSIKMVCRILPVSKVVVETAEFDLQLLKAIEEGKPVPQGEDYQQGEMYGHYNVRQYVLWRDNYTCQCCGAHPTKKKEVRLHVHHLESRKVGGNAPGNLVTLWRC

SEQ ID NO: 15631 - protein, 448 aa, unidentified
  REGION 1..448: note = bioreactor sludge metagenome
MIYVISKDGKPLMPTKRRGKVRHLLKDGKAIIVKYEPFTIQLLYETTDYTQKIILGVDPGSKNLALTAITEKGNILYQAEVTLRTDIKENIRKKRTLRRARRQRKTPYRKRRFLNRKKPQGWLPPSIRARLHTHYQMVKSVASILPVTMIILEVGQFDTQAIINPDIEGTEYQNGQMAGFDSVKEFVKLRDKFTCHYKELRPDIICNDTLVVDHIIPQSKGGTSRPDNLITSCESHNIKKSNLSYKEFTGKKRPVPLSLKETPFMNILKDYLLMELQKIAPSRYTFGLYTRRKRKEFFLEKSHLNDSIAITGIKPVETPHCGVSTIYHIKQVRKKKRSLHEEIPRKGRSKPNRTARRNRKNIKSIEQKGVKWSLWDKVYIPQLHKTGFISGFTDRWAYIQELDGSYLQLSRKYRQNNPKKIRLISRNNNYIYMEEKSNHRKESSFISH

SEQ ID NO: 15632 - protein, 431 aa, unidentified; identical to SEQ ID NO: 4463
  REGION 1..431: note = Human metagenome

SEQ ID NO: 15633 - protein, 436 aa, unidentified
  REGION 1..436: note = Human oral metagenome
MTKTTTQKVTQVCVLDQNGQPLMPTQRLGKVYRLLKTKKAHIVAYEPFTVQLDYEPKTHIIQPMTLGVDSGAIHSGYSLANEHREYYSAEVIARDDISKNISDKRMYRRSRRSRKTRYRKPRFNNRKNKGKGWIPPSLEQKVSVQVKEIKHLHQYFPIKDIIIEVAEFDIQKIENPDISGKEYQQGTLQGYNIRNYLLEKYHHKCFYCDKDVSTFEVEHMIPKARNGSNRIDNLTLSCHNCNQKKGTLTAEEFIRQTLSPQKAAQKLRQLPETKQLLKYMAHMNVTRWVLYNTIKETYDSVSLTYGYITKHNRINAGLPKAHHIDAKCITGLSTVPSFDVTVVKTKMRRHNRQLHRATFSKGHIRRAATLPKHVHGFQLYDIVMFNKHRYYIKSRRSSGSFTLVSLEGLKGTERTYKKLTFLTHTNAYLTNRYVND

SEQ ID NO: 15634 - protein, 431 aa, unidentified
  REGION 1..431: note = Human gut metagenome
MPNKVYVINKHGRPLMPCSPAKARHLLDDGKAKVKKRTPFTIQLIYGSSGYTEDVILGVDAGSKTIGLSASTEQEELFAANVTPRNDVVDLLSTRREFRRTRRSRKTRHRKARFNNRVHSKHRGWLAPSVEVKIQEHITCIKRVCNILPISKVVVETAEFDLQLLKAVEEGKPVPQGEDYQKGEMYGHYNVRQYVLWRDGYTCQCCGAHSTKKKDVKLHVHHLETRKTGGDAPSNQITLCEDCHQKLHKGLIPAADFKKRKRKSTRDAAFMGIMRNTLMQRLRSELPIPVAETRGYITKATREKLLVLSKSHTNDALAIAQGRHGFNVGYLQSIPQNNRIYTIRPVRHHNRQLHKATVLKGGIRRVNQAVKYVYGFRLYDKVRYNGVECFVWARRVMGYFRLRHLGGENVKCGANYKNLELLERSQNYLIA

SEQ ID NO: 15635 - protein, 419 aa, unidentified; identical to SEQ ID NO: 6355
  REGION 1..419: note = Human gut metagenome

SEQ ID NO: 15636 - protein, 423 aa, unidentified
  REGION 1..423: note = metagenome
MVYVLNIDGQPLMPTDRHGKVRHLLKDGRAEVVKRCPFTIRLLYDSTHYTQDIVLGVDAGSKHIGLSGTTETKELYASDVELRNDIVDLISTRRQNRRSRRNRKIRYRKARFQNRVSGKKNWLAPSIRQKVDTHMTVVSRVCMILPVTKIIVETASFDIQKIKDPDISGTGYQQGEQLDFWNVREYVLSRDGHTCQCCKGKSKDPVLNVHHIESRKTGGDAPNNLITLCETCHKGYHSGAVQLPKAIHRGMRFKDAAFMGIMRWAFYNKLKEVYEPQDIEVSMTFGYLTKNTRIRHYLPKEHYIDARCISGHPEAIPSNEVFYQKKVRCHNRQIHKNTILKGGVRKRNQAGYLVKGFRLFDKVAYEGREYFIFGRRQSGFFDLRDLSGCKVNKGSLSYRKIGFLEPRQYYLCERRVMDTQGCA

SEQ ID NO: 15637 - protein, 278 aa, unidentified
  REGION 1..278: note = Human gut metagenome
VVVETAEFDLHLLKAIADGKPVPQGEDYQKGEMYGHYNVRQYVLWRDDYTCQCCGAHATKKKEVRLHVHHLESRKVGGDAPDNQVTLCESCHEKLHKGLIAEKDFKKRKRKSTRDATFMGIMRKTLMQRLYSELPIPVIETRGYITKATREKLLVLPKSHTNDALAIAQGKQGFNVGYLPGIVQINKIYTIRPVRHHNRQLHKAAILKGGIRKSNQVGKYVFGYCLFDKVQFNGQDCFIWGRTTGIFTIKTINGKMIKDGISFKKLKPVEKSTSYLIA

SEQ ID NO: 15638 - protein, 465 aa, Calothrix sp.; identical to SEQ ID NO: 5126

SEQ ID NO: 15639 - protein, 443 aa, Anoxybacillus sp.; identical to SEQ ID NO: 2702

SEQ ID NO: 15640 - protein, 242 aa, unidentified
  REGION 1..242: note = Human gut metagenome
LQFYRKEHGIMQYVYVLSKHGEPMMPCSPGKARLLLKQQKACVVRRTPFTIKLLYGSAGYKQPITLGVDAGSKHVGLSASTEKRELYREEFAPRNDVVELLSTRRQNRRSRRNRKTRYRAPRFDNRVHSKHKGWLAPSVEVKIQEHITIIKRICKILPISLVRVETAEFDTQRLKAMLAGKPLPVGTDYQLGEMYDEYNVRQYVLKRDNYTCQCCGAHTTAKKLVKLHVHHLESRKTGGNAP

SEQ ID NO: 15641 - protein, 416 aa, unidentified
  REGION 1..416: note = Human gut metagenome
MVYVLDKNGQPLMPTDRHRKVRLMLQSGQAKVIKRCPFTIQLNYDSGHQTQEISLGIDAGSKHIGVSATTKIKVLYEADVELRNDIVDLLSSRRELRRGRRNRKTRYRQAKFNNRRRGNGWLAPSIRQKIGTHLTVVKNICKILPISRIMVETASFDIQKIKNPDIQGAEYQQGDQLGFWNVREYVLFRDGHTCQCCKGKSKDKILNVHHIESRKTGGNAPNNLITLCETCHTGYHKGTVQLPKAIKRGMRFKDAAFMGIMRWAFYEALKQQYEPVGTPVHNTYGYITKHTRIAYDLPKEHYVDARCISGNPEASSNGEYYYQKKVRCHNRQIHKLTVLKGGIRKQNQATYLVKGYRLFDKVSYQGKGYFVFGRRQSGFFDIRTLSGEKVNKGSLSCKKLKFIATRTYYLTERRAV

SEQ ID NO: 15642 - protein, 283 aa, unidentified
  REGION 1..283: note = uncultured cyanobacterium
LRKYSPVTAISQELVRFDTQIMQNPEISGKEYQQGTLAGYETREYLLEKWGWKCAYCDLKDVPFQIEHIHPRAKGGSDRISNLTLSCEKCNIKKGTKDIKDFLKKDPERLKKIQFQAKQPLGDAAAVNSTRFKLLEVLKATGLPIETGSGGLTKFNRTTQNLEKTHWIDAACVGKSTPEKLNIKGVKPLIIKAAGHGTRQSCRTDKQGFPIRHCAREKIHFGFQTGDIVKAVVDKGKKIGTHVGRIATRATGSFNISTVKGLVEGISHRFCKAIHRKDGYGYQ

SEQ ID NO: 15643 - protein, 480 aa, unidentified; identical to SEQ ID NO: 7001
  REGION 1..480: note = Human gut metagenome

SEQ ID NO: 15644 - protein, 572 aa, unidentified
  REGION 1..572: note = Human gut metagenome
LFLQIPQAFGCLLRLSIFPVDSSARVALSRTIPLTANTQPRETQPPVSAGETYSKRRVAYMPTVYVLNKDGKPLMPTTRCMHVRHLLKNGKARVVKSKPFTIQLLYETDDVVQPLYLGIDPGRTNIGVAVVKADGAAVFTAHLETRNKEVPKLMKKRKESRCARRTNGRRCRRQRRAKTNGTISKKCVKQTTAQNGSVSKRAKEIGVIKRHLPGCEKDVLCIGIKNKEAKFTNRARPEGWLTPTANQLLQTHINLVKKIQKFLPISDVVLEVNKFAFMQLDNPNIQKWQYQQGPLYQKGSLENAVSEMQEHHCLFCEKPIEHYHHVVPKSENGSNTIANIVGLCTEHHNLVHKDATWQKKLAKEKVGLVKKYSALSVLNQIIPALTKEMNSLFPKHFFVTNGKSTYDYRTAHGVSKDHWLDAYCIACSVLPNDVCDSNINSHVPYELKQFRRHDRRVLHKANMSRVYTLNGKTVATNRHKAIKQTTDSLEEFRQSHPGDVCKLKVKEHHPAYRNLNRNYPGSVFLVDGQVHVMQGVSGSHNGKADGYYNTNGNAYPYYKCKFVVKNEGIVFA

SEQ ID NO: 15645 - protein, 417 aa, unidentified
  REGION 1..417: note = Human gut metagenome
MPCSPAKARLLLKEKKAIVKRRTPFTIQLTIATGEAKQPVALGVDSGYKHIGLSATTEKAELYASEVELRQDITDLLSARLALRRSRRSRKTRYRAPRFDNRVASKREGWLAPSVENRIAAHMSRVEAVMQVLPVTAITVETAAFDTQLLKNPDIAGEAYQQGEQLGFWNVREYVLFRDGHVCQHCRGKSKDPILNVHHIESRRTGGDAPNNLITLCETCHKAFHRGEIKLKVKRGKSFKAETFMGIMRWTLFERLKKAHPELRVRNTYGYLTKHKRISHGIAKSHCADAYCIADNLGAKRLEGFFFQKQTRKHNRQIHKLSILKGGLRKKNQAPYEVKGFRLFDKVICKGEEAFIFGRRTSGSFDVRRLDGTRISAGINYKKLRLLEPRTTYLTEFRKEAALPPLHECRGFRAEFL

SEQ ID NO: 15646 - protein, 431 aa, unidentified; identical to SEQ ID NO: 6230
  REGION 1..431: note = Human gut metagenome

SEQ ID NO: 15647 - protein, 475 aa, Ferroplasma sp.
MEKNMKEKQKLDRRDTYTPADAPQVRGNCDHALNREETLSVHGLKTPSNNPDVDIQSGMTGQDLRVPVINMRNEPLMPTSPGKARRLLKHNRARVISSNPFTIQLLYATGETKQPATLGIDAGYKHIGFSVVTEKRELISGEAVMRTDMPKLNVEKSMYRRNRRNRLWYRQPRFMNRRNNSKGWFAPSIAHKLQTHIRLIEKLKRILPVSKVIIEVASFDQQKMKNPEISGIEYQQGELQGYEVREYLLEKFHRTCVYCGKTNVPLEIEHLTPRSRNGPDTVDNLAISCHECNQKKNNLTAEEFGYPEVRKRALKSLKDAAFMNIVRWKLTQLTGSAYTFGYITKKNRISLGLDKSHANDAFVIAGGTTQARSTVFNVTQRRRNNRSLQINRKGFRPSIRRRRYPLQPGDVVEFGESRYGVVGVHSYGNYVIIRNGEKKMEVNIKKVKLVKYGKGLRFTTQFLPTLSHVVSLEGS

SEQ ID NO: 15648 - protein, 472 aa, unidentified
  REGION 1..472: note = Ga0315284_10114450
MLSSSWHCRARSCYGRWGDREGFACKKPFGPGRGKHYRRKPRGLFPVQLVFVLDTCRRPLAPVRPAEARILLSAGKAAVLRRFPFTIILKEEKPDEPVNTVIVKIDPGSKTTGLALVDLEGKVLFCAELQHRGLAIKARMEARRVVRRSRRNRKTRYRKPRFLNRRRSVGWLPPSTRHPILTIMTWVNRFRKLCNVVGISVERVKFDMQAMMNPETSGIEYQQGTLAGYTVREYLLEKWNRTCGYCGAKDVPLQVEHILAKHNHGTDRVSNLTLACEPCNRKKDKILVEVFLKDKPAVLKRILAQAQQPLRDAAAVNATRNALFAVLVATGLPVETGTGAQTKFNRVRLGYPKVHWIDAACVGDSGGVVILNPETKPLLIKATGHGNRQMCGTDRFGFPKQHRTRQSSHFGFHTGDIVMAVVPKGKFIGTHVARVSTRASGNFKLAGIGDVNHRYCAAVHRQDGYAYDQTTG

SEQ ID NO: 15649 - protein, 436 aa, Lactobacillus sp.; identical to SEQ ID NO: 14681
  REGION 49..52: note = misc_feature - Xaa can be any naturally occurring amino acid

SEQ ID NO: 15650 - protein, 419 aa, Anaerostipes sp.
  SITE 419: note = misc_feature - Xaa can be any naturally occurring amino acid
MVYVISQDGKPLMPCSDPIARLLLKQGKAKVKKREPFTIKLTYETTNHTQGLTLGVDTGSGTIGTAVSKDNGDIVYMSEVVVRNDITDKMTQRAKYRRNRRNRKTRYRKARWLNRASSIKKDRFSPTMQSKLHSHVREIEYIQSILPVTEMVFETGQFDMQLMKNPSLANPKVRPWGYQKGANYGFENTKAMVLNRDNYTCQCCKGKHKDSKLEVHHIVFRSQGGSDEESNLLTLCHTCHKDLHSGKINPKLSGKVKGNLKYATQMNSIRKQLFRFYPNAIETFGYVTKANRLHLGVDKEHYYDACTIATQGNAFNVKSNLYKKKCVSDGDFQKTKGIRSEQPIVTDKICGFRKFDKVRYFGNDYFIKGRMSTGYAILMDIDGNKIDFSTMPRGYKTPKLSNCKRITARSTVMTQVKVX

SEQ ID NO: 15651 - protein, 557 aa, unidentified; identical to SEQ ID NO: 10483
  REGION 1..557: note = Human gut metagenome

SEQ ID NO: 15652 - protein, 477 aa, unidentified
  REGION 1..477: note = Human gut metagenome
MIIALDKYKRPLGFLTERRCRILMERKRAVLYRVFPTVVILMDVDARTIPDLPSFRIKIDPGSKYTGIAIIRNDTDEFVYAMQIEHRGDAVRAALNKRKNARRNRRSRETGYRRAKWGNRCLSEKDKRSYDSSREDGWLPPSIRSAADNVISWVRRLGRWINLTECSFEAVRFDTQLMEDPDIEGEEYQHGTLFGLEIKEYLMEKFGHTCQYCGGKSGDPVLEWEHMRPKSRGGSDRVKNALLSCSSCNKDKGNRTPEEWLEQIKARLPREKGKRKELDEERVKLIQKVIDGKPQGSALRYAAWVSSSRRYLEKALFGIFGDVECSSGGRTKYNRTELGYPKEHHYDALCVGTVPEKGYHDRTNGYYLYAKAAGRGTRLRGHLNKCGMIVTKWTDRKNGFFGFQTGDIVVAEVPHKTPKPYKYEGRFVGRVMVRATGSFDIKTTDGKLVTVKEQYCRLLQANSGYQYTMKRAIPLGH

SEQ ID NO: 15653 - protein, 420 aa, unidentified; identical to SEQ ID NO: 3685
  REGION 1..420: note = Human gut metagenome

SEQ ID NO: 15654 - protein, 434 aa, Moorena sp.
MQNYVFVIDTNKQPLNPIPPKKARRLLNKGKAAVFRMYPFTIILKTAIRQSRRCANNNPSISPCQIKIDPGSKVTGFALVQNNQVIWGMELEHRGGLIKKKLESRGAVRRGRRNRNTRYRKPIFLNRKRPEGWLPPSLEHRILTIQTWVKRLIKFCPVNEIWVERVKFDTQKMQNPEISGIQYQQGELAGYEVREYLLEKWGRECTYCGKQSVPLQIEHIHPRSLGGSDSALPTLRERVSNLCLACEKCNQRKGNKPIEDFLKKKPSLLQKIKSKAKQPLKDATAVNATRNKLVKVLQLIKVVVTGTGAQTKYNRTRLELPKQHWIDAACVGDIETLVLRTSQPLLVTCKGQGGRQKAALNKYGYPIRHNPLKPIKGWVTGDIAKHQKLGIGKVTPRSKGSFGFTPLGTKGYKSCKPQDISAIYRKDGYTYSFC

SEQ ID NO: 15655 - protein, 419 aa, unidentified; identical to SEQ ID NO: 4877
  REGION 1..419: note = Human gut metagenome

SEQ ID NO: 15656 - protein, 515 aa, unidentified
  REGION 1..515: note = Human gut metagenome
VTDVSTIYVLNKDGKPLMPTTRCGHVRYLLKEKKARVAASKPFTIQLLYETNDVVQPLYLGIDPGRTNIGVAVVKTDGTAVFTAHLETRNKEIPKLMKKRKDSRRARRTNGRRCRRQRRAKANGTISKKCVKQTTAQNGSVSKRAKEIGVIKRHLPGCEKEVLCIGIKNKEAKFSNCVKPEGWLTPTANQLLQTHINLVKKIRKFLPISDVVLEINKFAFMQLDNPNIQKWQYQQGPLYQKASLKEAVSEMQEHHCLFCKKPIAHYHHVVPQSENGSDTIGNIVGLCTKHHDLVHKDTSWQEKLAKKKTGFNKRYGALSVLNQIIPALTKELSSLFPKHFFATNGKSTYGYRAAHGVSKDHWLDAYCIAGSVLPNDAYDSNINNRVPYELKQFRRHDRRALHKENINRVYTLNGKKVATNRHKAIEQTTDSLEEFRQNHPNDVCKLKVKEHHPEYRNPKRNFPGCVFLVGKHTHVMQGTSGSHNGKADGYYDTNGNSYPFGKCKFVAKNEGIVFA

SEQ ID NO: 15657 - protein, 438 aa, unidentified
  REGION 1..438: note = metagenomes
LKQTLLLGTNAKMLKPNFVLVIDTNLKPLIPCTPCIARKLLEAGKAAIYRQYPFTIVLKKAVTANPEPIELKLDPGSKVTGIALVQGQKVVFGAELTHRGQAIKMSLESRRAVRMGRRARHCRYRQARFLNRTRPKGWLAPSLAHRVKTTITWVKRFIKLAPIGSIVQELVRFDLQQHENPEISGTEYTQGTLAGFEVREYLLNKWDRKCTYCGIENVPLQIEHIHPKAKGGSNRISNLCLACEKCNLKKGTQDIEQFLSKKPDLLKRIKAQQKRPLKDAAAVNSTRWALFNQLQEAGLPVSTGSGGKTKFNRTRLKLEKTHWLDAACVGDLESLSVLTSQPLRIKATGHGSRQMCRINKYGFPCSKPKQSFTHCKTGDIVSITLTKPKVRFEVGTHKGRVKTPTEHGLEIKIGEYRLVVGDMTSVKFIHKQDGYSYQ

SEQ ID NO: 15658 - protein, 417 aa, unidentified
  REGION 1..417: note = Spirochaetales bacterium UBA6368
MVYVHNCFGLPLMPCTEAKAKHLLKAHKAKVVNLTPFTIRLNFVVDDITQPVTLGVDAGYKTIGLSASTENKVLFEGEVKLREDITTLLEGRRSLRRGRRNRKTRYRAPHFDNRVRSKNKGWLSPSVENRIGTHLSVIDKVYRLVPVSRIVVEVASFDIQKINNPDIEGEGYQKGEQLGFWNVREYVLWRDVHKCRNCSGKTKDTVLEVHHLVQRKEGGSDRPDNLITLCKTCHDAYHRGEIKLDKPKKGFKDATFMGVMRKTLVKRLRELYGSDMAKVTYGYITKNTRIENNLDKTHYIDARCIANHPTATSSETVYSLLKRRSHNRQIHKLTLLKGGVRKNNQCPRKIFGFRLFDTVLYNREICSVQGRRTSGYFDIRKPNGEKVSEGASYKKLKLISRSKNIDIWKCNATLTAY

SEQ ID NO: 15659 - protein, 421 aa, unidentified; identical to SEQ ID NO: 7637
  REGION 1..421: note = Human gut metagenome

SEQ ID NO: 15660 - protein, 406 aa, unidentified; identical to SEQ ID NO: 6079
  REGION 1..406: note = Human gut metagenome

SEQ ID NO: 15661 - protein, 544 aa, unidentified; identical to SEQ ID NO: 9768
  REGION 1..544: note = Human gut metagenome

SEQ ID NO: 15662 - protein, 456 aa, unidentified
  REGION 1..456: note = Human gut metagenome
MSTCVCVLSNSGERLMPTFRLGKVRRLLKDGKAKIVKHHPFTIQLLYDSKTNTQPIEICEDVGYNYIGISVKSESHEYVSAQYDTLQDEKEHHDDCRKYRRTRRNRLRYRKPRFDNRKRSEGWLAPSLEHKKQLNIRLIERYVSVIPITRATVEVGSFDTMLLQAIQKGESKPEGVDYQKGPRYNLATLREAVFYRDNYTCQVCGRKIADGAILHMHHMFYWKGRHGYQLDELVTACEKCHTPANHQKGGKLFGFGENKEFANLSGAAFMNAVRWQIVNALYATYGKEFVTITYGAMTKEKRIALQLEKTHNNDAYAMGDYHPACRCKFRHYQKRRRNNRVLEKFYDATYIDARTGNKAKGKELFNGRINRNHKKDSENFHKYRSKKVSKGRRSIRRQRYAIQPYDTVRLEGKTYITSGCHNKGTRLLIPANGKSKSVAISKVQVVCHAGAWIQII

SEQ ID NO: 15663 - protein, 318 aa, Parasutterella sp.; identical to SEQ ID NO: 12461

SEQ ID NO: 15664 - protein, 431 aa, unidentified
  REGION 1..431: note = metagenome
MPNKVYVINKHGRPLMPCSPAKARHLLDAGKAKVKKRTPFTIQLVYGSSGYTQEVILGVDAGSKTIGMSASTTKEELLSAEVKPRNDVVDLLSTRREFRRARRNRKTRYRKPRFDNRVRSKHKGWLAPSVEVKIQEHITSIKRVCRILPVSKVVIETAEFDLQLLKAIEEGKPVPQGEDYQQGEMYGHYNVRQYVLWRDDYTCQCCGAHATKKKEVRLHVHHLESRKVGGDAPDNQVTLCESCHEKLHKGLIAEKDFKKRKRRSTRDATFMGIMRKTLMQRLCSELPIPVVKTRGYITKATREKLLVLPKSHTNDALAIAQGKQGFNVGYLPGIVQINKIYTIRPVRHHNRQLHKATILKGGIRKSNQTEKYVFGYCLFDKVQFNGQDCFIWGRRTTGIFTIKTINGKMIKDGISFKKLKLLEKSTSYLIA

SEQ ID NO: 15665 - protein, 442 aa, Lactobacillus sp.; identical to SEQ ID NO: 3826

SEQ ID NO: 15666 - protein, 414 aa, unidentified
  REGION 1..414: note = Human gut metagenome
MVYVINKQGQALMPTERFGKVRRLLKNSLAHVVCRIPFTIQLDYDTTDYTQPVSLGIDAGSKHIGISATTSEKELYAADVELRNDIVDKLSTRRELRRTRRSRLRYRKARFNNRVSSKRKGWLAPSVENKIQTHLTVVEKIHKFLPITNIVVETASFDIQKINNPSISGVEYQQGEQLDFFNVREYVLFRDNHTCQHCKGKSKDKVLNVHHIESRKTGGDSPKNLITLCKTCHKAYHRGEFKLNIKRGKSFRDAAFMGIMRWKLYDRLKNIYPNVSMTFGYITKNTRITNNLPKEHYVDARCISGNPVAKPLGYYFYQKKVRCQNRQIHKANFLKGGRKKLNQAPFLVKGFRLFDLVEYQKELYYIFGRRSNGSFDIRKLDGTKVNKGSINCKYLRLIDKRKSILTEKRTQVNL

SEQ ID NO: 15667 - protein, 416 aa, unidentified
  REGION 1..416: note = Human gut metagenome
MVYVLDKNGQPLMPTDRHRKVRLMLQSGQAKVIKRCPFTIQLTYDSGHQTQDISLGIDAGSKHIGISATTKTKVLYEADVELRNDIVDLLSSRRELRRGRRNRKTRYRPARFDNRRRRDGWLAPSIRQKIGTHLSIMTNVCKIIPISRITVETASFDIQKIKNPDIRGAEYQQGDQLGFWNVREYVLFRDGHTCQCCKGKSKDKILNVHHIESRKTGGNAPNNLITLCETCHTGYHKGTVQLPKAIKRGMRFKDAAFMGIMRWAFYEALKQQYEPIGIPVHNTYGYITKHTRIEHNLPKEHYVDARCISGNPGASPNGEYYYQKKVRCHNRQIHKLTILKGGVRKQNQAAYLVKGYRLFDKVSYQGKEYFVFGRRQSGFFDIRTLSGEKVNKGSLSCKKLKFIATRTYYLTERRAV

SEQ ID NO: 15668 - protein, 512 aa, unidentified
  REGION 1..512: note = Human gut metagenome
MSTVYVLNKDGKPLMPTTRGGHVRHLLKEQKARVVRTKPFTIQLLYETDDVVQLLYLGIDPGRTNIGVAVVKTDGTAVFTAHLETRNKEIPKLMKKRKNSRRAKRTNGRRCRRQRRAKANGTISKKCVKQDTAQNGSVSKRAKKIGVIKRHLPGCEKEVLCIGIKNKEAKFSNRVRPEGWLTPTANQLLQTHINLVKKIQKFLPISDVVLEINKFAFMQLDNPNIRKWQYQQGPLYQKANLEEAVSEMQEHHCLFCKNTIDHYHHVVPKHKNGSNTIGNIVGLCAKHHDLAHKDISWQEKLAKKKTGLNKKYGTLSILNQIIPALTKELSSLFPKHFFATNGKSTYDYRAAHGVSKDHWLDAYCIACSVLPNDVCDSDINNRVPYEFKQFRRHDRRALHKENMSRVYTLNGKKVATNRHKAVEQTTDSLEEFRQCQPNDVCKLKVKEHHPEYRNPKRNFPGCVFLVGKRTHVMQGTSGSHNGKADGYYDTNGNSYSSGKCKFVAKNEGIVFT

SEQ ID NO: 15669 - protein, 406 aa, unidentified
  REGION 1..406: note = Human gut metagenome
MVYVQDIDGKPMMPTTRHGKVRRLLKANKATVVNLCPFTIQLTYKSTDHKQPVTLGIDAGAKHIGFSATTEKEELFACETILRTDIVDLLSTRSQNRRTRRSRLRYRKPKFNNRVFSKKKGWVAPSVKQRIDSHLNEVNEIHKILPITKIVIEAAQFDTHKMKNPNISGIDYQNGEQLGFWNVREYVLFRDGHKCSYCKGKSKDPILNIHHIESRKTGGDSPSNLITLCETCHKEYHKGNIDLKVRRGKSLCGAAIMGIMKWRLYDELKSRYSNVSMTFGYITKYNRIKYGIEKSHTSDAFVISKNFNAKRIEYQYLKRLVRRHNRQIHKMKILKGGKKKNNQAPFEVFGFRLFDKVLYNNEINFIYGRRKSGNFNIRDFNGENPKDVSYKKLKLIRGKRHPIILK

SEQ ID NO: 15670 - protein, 415 aa, unidentified
  REGION 1..415: note = Human gut metagenome
MVYVLANDGQPLMPTERHGKVCRMLKSGIAKVVKKCPFTIQLQYESERNVQPVALGIDAGSKHVGVSATTKAKVLYESDVELRDDIVKLLATRRQLRRRRRSRKTRYRPARFDNRRRKEGWLAPSIRQKIESHLTVVANVCKILPVSQIIVETASFDIQKIKNPDIQGIEYQQGEQMDFWNIREYVLFRDGHTCQCCKGKSKDKVLNVHHIESRKTGGNAPNNLITLCEPCHKGYHNGTVTLPKNIKRGMKFKDAAFMGIMRWTFYNTLKEQYEPDIPVHYTYGYITKNTRINHNLPKGHCIDARCISGNPDAVSDGTYYYQKKVRCHNRQIHKQTILKGGIRKSNQAEYLVRGFRLFDKVRYQGREYFIFGRRKSGFFDIRTLSGEKVNKGSINVKRLTFVDTRKNYLTERRTV

SEQ ID NO: 15671 - protein, 465 aa, unidentified; identical to SEQ ID NO: 7154
  REGION 1..465: note = Human gut metagenome

SEQ ID NO: 15672 - protein, 512 aa, unidentified; identical to SEQ ID NO: 3493
  REGION 1..512: note = Human gut metagenome

SEQ ID NO: 15673 - protein, 433 aa, Hydrocoleum sp.
MSNTNYVFVIDTNKKPLQPCKPTVARRLLNSGKAAVWRRFPFTLILEKAVEPVEKSLIIKIDPGSKFTGIALLDGFKVIWMLEIQHRGSLISEKLQKRSQRRRARRTKNLRYRKPGNPNKKKPFGWLAPSVMHRVETIMTWVKRLIKFCPVKSISMELVRFDTQLIQNPEITGYQYQQGELAGYELREYLLEKWGRQCAYCGKTNTPLEIEHIHPKSKGGSDRVSNLTVACNKCNQLKSNRDVKEFLSAKPELLKRIQTQAKLPLKDAAAVNSCRWKLFNTLKTTGLTVITSSGGQTKFNRRKHKLPKAHCIDAACVGEVNQLNFHTTQALVAICKGQGGRQKAAVNKYGYPIRYNPLKPIKGWNSGDLALNIETGEVGRVNPRSKSNSFNFTVPGQKAKSVHVSKLKVVHKKDGYTYTFCPQLSINVEENSV

SEQ ID NO: 15674 - protein, 340 aa, Aneurinibacillus sp.; identical to SEQ ID NO: 10078

SEQ ID NO: 15675 - protein, 490 aa, unidentified; identical to SEQ ID NO: 3566
  REGION 1..490: note = Human gut metagenome

SEQ ID NO: 15676 - protein, 415 aa, Ruminococcus sp.; identical to SEQ ID NO: 2438

SEQ ID NO: 15677 - protein, 453 aa, unidentified
  REGION 1..453: note = Human gut metagenome
MSVAVVSKTGMLLMPTSEYRARKLLKSKKAIILGYHPFTIQLTEREAGYIQPVELCMDTGYIHIGTSVKSEKHEYLGEQIDTLTDERQKHDACRMYRRQRRNRKRYRQPRFNNRERDDGWIAPSLEHKKTIHIQAISRICKVMPVTDITLEMGNFDTQVLKAREEGRPLPQGLDYQHGERYGIATLREAVFTRDGYTCQCCGRAIKDGAILHVHHIVYRSQGGTNRMSNLITVCDKCHTPANHKPGGKLYGWKPKVASFKGATYMTTIQWKLYNEVKVLFPDIDIHITYGAETKERRRAFDITKSHVNDAFVMGQFHPKHRSKPVCYKKKRRNNRCLEKFYDAKYIDSRNGKTRTGQELFNGRISHNHKKDSENLHQYRRQKISTGKRTIRKQHYAIQPHDIVIFNGEKFETSGCHNNGTRVILLPQKKSVAIKKLNIYRYAGGYFKSAFNQK

SEQ ID NO: 15678 - protein, 418 aa, unidentified
  REGION 1..418: note = Human gut metagenome
MVYILNKHNEPLMPCSERKARLLLKDGMAIVYRKDIFTIKLINGSYGYKQHITLGIDCGSKHIGVSATTDKQELFSANAELRNDVVKLLSDRRMLRRNRRSRKTRYRKPRFNNRIVKNGWIAPSIKQKIQSHFNLVGFLHKLLPITNIVVETAAFDIQKINNPIISGSEYQQGEQLDFFNVREYILFRDGHICQHCKGKSKDKVLNVHHIESRKTGGDSPNNLITLCETCHKAYHRGEFELNIKRGKSFRDSAFMGIMRWKLYDELKLRYDNVSMTFGYITKYKRIKLGLDKEHYNDAYCICGNLAAKMLSTHHLIRFIPRHSRVLHIHKFSKGGVRRSASAPYWLNGGKPSKSGAMFTMFDKVKFNGVVCFISGSSNGYAALRDINWNKIDECKTVVTVNKLLLISRKYGGFIVEKK

SEQ ID NO: 15679 - protein, 454 aa, unidentified
  REGION 1..454: note = Sediment metagenome
MQKFKVKLKYVPTDAPQVCSSTNFVLNRDQSLSVQDKVLTLNNLDVDPLQHKGGQSLRISVNAYVFNQRGKPLMPCSARKARILLKKGEAKVIKNYPFIIQLKKATGEQTQKCFLGIDPGHANIGFSVISDKKEIVCGVLKLDNRTTKKLIERKMYHRNRRNRLWHRQKRFNNRFKKEGWLSPSTQRKFDTHISFINKIKKIIPIFSVIIEAGNFDIQKIENPDIANIQYQRGSLFEYNNIRNFLMTKEHGRCQLCQKEFSRGNSSHIHHIISKNNGGTDREKNLSLLHKKCHKRLHKQKLFHLLNVNRNYKAATFMNIVSIRFRSALPGCNITYGNETFVKRNFLGLEKSHYNDAFIIAGGNRQKKIYPIYLNQKHRNNRKLQIDRKGFRPSIRRKRYSIQPCDIISVNSKKYLVKGCFNYGTAVRCTDGVDNFDFGIKKIGNIFHSKSIYVA

SEQ ID NO: 15680 - protein, 445 aa, Petrotoga sp.; identical to SEQ ID NO: 7625

SEQ ID NO: 15681 - protein, 451 aa, unidentified; identical to SEQ ID NO: 2910
  REGION 1..451: note = Human gut metagenome

SEQ ID NO: 15682 - protein, 465 aa, unidentified; identical to SEQ ID NO: 8068
  REGION 1..465: note = Human gut metagenome

SEQ ID NO: 15683 - protein, 442 aa, unidentified; identical to SEQ ID NO: 2903
  REGION 1..442: note = Human gut metagenome

SEQ ID NO: 15684 - protein, 375 aa, unidentified
  REGION 1..375: note = Human gut metagenome
ANRHRDEGWITPSARPLVQMHMNDLKSMCKILPISHVTLERVAFDFQKLENENIKVWEYGKGKLYGYDSPEEYIHDVQNGKCLVCGKPHIDYLHHIIPRSKGGSDKVSNIAGLCYDCHYGPMGVHNCQNTQDRLPELKSEANKQYKVSLLNSVMPVLIEEMDKFCKANSIMFSICEGHDTAKVRDMYDLQKDHCIDGFAISLVDRNVKSVDVMPDRIYQKQRYKKKSKNIIQKRNCREYYDDKKLVAVNRHKGTDQKADSLEEYMNTYAETHTTDECKKHFDSLVVKPARRTYTFHKEWRICPFHIGDKVRYEKKNKIKGNTKVDTFICEGIRFVKDENKAEVKHNKTKSKKMKFCRVLESGCTPYVDYRKLALM

SEQ ID NO: 15685 - protein, 557 aa, unidentified; identical to SEQ ID NO: 11277
  REGION 1..557: note = Human gut metagenome

SEQ ID NO: 15686 - protein, 524 aa, unidentified
  REGION 1..524: note = Human gut metagenome
MEILRIDWKDICPTGQSGLPQKELFMRPVYVLDMNGKPLMPTCRFGKVRRMLKSGEAKVVDTLPFTIQLDRPTKTHVVQSVTLGCDPGRTNIGLAAVRSDGTDLYRSHCETRNKEIVDLMDTRRAARRASRRGERLTRKRLAAKHETATTFPDGRKLPGYEKPIMLKDIINTEARFNNRVRPAGWLTPTATQLLRTHLNLIKRISRILPVSDIALEINKFAFMQLDEPDKNKWNIDFQHGPLYGTGGLKATVRQLQDDTCLLCQENVIEHFHHLIPRSKRGDNTINNIAGLCQRCHEAVHKSADTAEKLSTLKKGQTKRYGGTSVLNQIIPKLVEELGKTYHEHLHLTYGWQTKEFRTKHKLEKTHDTDAYCIAAGTMQTVKPNIRTDVYEIKQFRRHNRANIHHQTERTYKLNGQTVARNRRKRTDQKTDSLAEWFENTVKQYGQQKAEHLRAGLKVRKSTRYYNSKDRVMPGAVFQYEGNRYVVTGQLSGGQYYRAYGKGNHNFPVKKIRIISLNRGLVYVA

SEQ ID NO: 15687 - protein, 431 aa, unidentified; identical to SEQ ID NO: 7992
  REGION 1..431: note = Human gut metagenome

SEQ ID NO: 15688 - protein, 423 aa, Anoxybacillus sp.
VLDTNKRPLAPCHEAVARKLLKQGKAAIYRRFPFTIILKKSVDESEIKATYRLKIDYGSRHTGLAILRGQEVVWLGQLDHRTDIKERIDKRRAFRRARRNRKTRYRKPRFLNRKRKEGWLPPSLESRMQNIKTWVERLRKICPIEHISYENAKFDTQLMRNPEINGVEYQQGTLQGYEVREYLLEKFGRKCCYCGKEGVPLEVEHIIPKSRGGTDRIDNLCLACRDCNQRKGSQTAEEFGYPHIQEMVKKTLKDASVVNATRWKAYEVLKQTGLDVECGTGARTKMNRIRLDLPKTHYFDACCVGESTPNHLYFKTKEVLFIKAKGRGSRSRTNLDRYGFPRGYLARQKFFFGFQTGDMVKAVVPRGKYQGVWFGEVACRKTGSFDIKGKDGKRIAQGINYRYVQVIQRFDGYAYGKGVAELA

SEQ ID NO: 15689 - protein, 406 aa, unidentified; identical to SEQ ID NO: 6031
  REGION 1..406: note = Human gut metagenome

SEQ ID NO: 15690 - protein, 424 aa, unidentified; identical to SEQ ID NO: 8578
  REGION 1..424: note = Human gut metagenome

SEQ ID NO: 15691 - protein, 406 aa, unidentified; identical to SEQ ID NO: 3980
  REGION 1..406: note = metagenome

SEQ ID NO: 15692 - protein, 424 aa, Moorena sp.
MRVFVLDNNKKPLDPCKPARARILLKGGRAKVFRRYPFTIIMQDLEGSECVTHEHQLKIDPGSKTTGLAIVQNNVVVWGAELTHRGSEIRESLTSRRQVRRDRRNRKTRYRKPRFLNRKKPDSWLAPSLMSRVHNIMTWVKKLIRICPVVGISQELVRFDTQKMQNPDISGMEYQQGELSGYEVREYLLEKWNRKCAYCETTNTQLEIEHIKPKSKGGSNRVSNLTLACRKCNQAKGNKEIEQFLSKKQDVLKFIRSFARQSLADTAAVNSTRWRLFHELKATGLCIETGSGGLTKYNRCRQNLPKTHWLDAANVGQVETLYVESYQPLLIVAKGHGTRQMCRTDKFGFPSRYLPRFKFVKGFQTGDIVKAIVTKGKKIGTYTGRIATRKTGSFNITTKNGLIQGISHKYCSIVHRKDGYSYSF

SEQ ID NO: 15693 - protein, 431 aa, Escherichia sp.; identical to SEQ ID NO: 3801

SEQ ID NO: 15694 - protein, 427 aa, Parasutterella sp.; identical to SEQ ID NO: 4733

SEQ ID NO: 15695 - protein, 412 aa, Moorena sp.
MNVVYVLNKHGNPLMPCGPRKARVLLKEGKARVVRRVPFTIQLLYGSSGYRQRVYAGRDRGLTQGVFACREGGKTLLRLQVTGRRDVSELLYLRATLRRGRRYRKTGYRPCRNQNRRRPEGWLPSSVAHLWYEHQKVRCLVESILPVTAWVEEVNKFDTRKMWDRNVQGKGYQEGPLKGKKDVRQYVLERDSHRCVLCGDPEDLETHHIVWRFRGGSDHPKNLVTLCKKCHDKVTAGEIEVKAVAESYRWPARLNALNPLFDALEAVKVAPGETKKARAGLDLGKEHWADAAALVYAAFGAKPDLADLPSLLQGRFVRTKNRQLHRANPSKGGRRAKAQGNRYLVSKSGVRFMRNDLVECEARGAKVVGYVNSLRSSGSVRICDWQGKELANVSANKLKKLQNRDSIAWEVS

SEQ ID NO: 15696 - protein, 430 aa, unidentified
  REGION 1..430: note = Human gut metagenome
LETRNKEIPKLMQDRKKARRARRTNGRRCRRQRRAKANGTISKKCVKQTTAQNGSVSKRAKDIGVIKRRLPGCEKDVLCIGIKNKETKFTNRTRPEGWLTPTANQLLQTHINLVKKIQKFLPISDVVLEVNKFAFMRLDNPNIQKWQYQQGPLYKKESLESAVSEIQEHHCLFCKKPIDHYHHVVPQHKNGSNTIGNIVGLCAKHHDLVHKDSAWEKKLAQKSTGLNKKYGALGVLNQIIPTLTNELSSLFPKHSFVTNGKSTYDYRAAHGVSKDHWLDAYCIACSVLPSNVCDSNINNHMPYVLKQFRRHDRRVLNNENMNRVYTLNNKAVAINRHKAKDQKTVSLEEFRKEHPDDVCKLKVKEHHPTYRNMNRNFPGSVFLVGKQIHVMQGIASSKDGKATKYNDTSATAIAAGKCKFVAKNTGILFV

SEQ ID NO: 15697 - protein, 430 aa, unidentified
  REGION 1..430: note = Human metagenome
MVFVLNRSKKPLNMITNAEARILLKKKLAVIHKIYPFTIRLRDNSCGSQDRAYTVKIDPGSRHTGIAIVDDKDQVAMLAEIEHRGHLIKKDLDSRRAVRRKRRSRKTRYRPVRFLNRTRPQGWLPPSIKSRAENVINFIRKYKKLINIDKVMIESVSFDVAQMVSDDCLIGTGYQQGNLYQNKLRSFIFSRSNGKCVYCGAKATEIDHVIPRAKGGTNSTYNLVASCRSCNKKKSNLSLKDFGKLMGKDYSHLKTKKLHKDAAIVQIARNYTIRKIKEIISNTISYVPWMTKCNRDQLGLPKEHYYDALSVGNVENYKFLTDKVLTLSAKGRGSRQMCRVDRYGFPRTSAKASKSVEGFQTGDIVKAVVTKGARQGEYLGRVAVRSKKSFNIETKNGLVKDIGYKYCHLIQRNDGYSYNYKKRNCDGKNK

SEQ ID NO: 15698 - protein, 442 aa, unidentified; identical to SEQ ID NO: 2903
  REGION 1..442: note = Human gut metagenome

SEQ ID NO: 15699 - protein, 457 aa, unidentified
  REGION 1..457: note = Human gut metagenome
VWLYQAVYNLGEGFLPSSEERTAFYWLLIYRKEHGIMQYVYVLNKQGEPLMPCSPGKARLLLKQQKACVVKRTPFTIKLLYGSAGYKQPITLGVDAGSKHVGLSASTEKRELYREEFTPRNDVVDLLSTRRQNRRSRRNRKTRYRASRFDNRVHGKHKGWLAPSVEVKIQEHITVIKRTCRILPVALVRVETAEFDTQRLKAMLEGKPLPVGTDYQLGEMCDEYNVRQYVLKRDNYTCQCCGAHPTEKKPVRLHVHHLESRHVGGNAPNNLITLCVACHKALHEGKITLDKGKKRGKPLRDAAFMGIMRNTLLARLKDELNIPVKQTYGYITKLLREKNKIPKSHVNDARCIAKAPNAKPCDTMLYTRALRHHNRQIHKAKILNGGIRKKNQAPYLVKGFRLWDKVRYNGEECFITGRRSSGYFALKKYDGTVISNSASYKKLMLLEAATNYITERS

SEQ ID NO: 15700 - protein, 493 aa, unidentified; identical to SEQ ID NO: 2644
  REGION 1..493: note = Human gut metagenome

SEQ ID NO: 15701 - protein, 570 aa, unidentified
  REGION 1..570: note = Human gut metagenome
MALRDFSSPEHCRADTKSWKTVLPLCTGLPPTQGYRLSLRNCMTHQERRHLMPEFIYILGMDGKPQMPTTRRRHVQKLLNTGRARIAEHVPFTIQLLYKNDPILQPVMLAEDPGRTNIGLTVLSLKGDLLLSAVTETRNKEITKLIDKRRACRRTSRNGERKARQRRAKRFGTTLKAGMLMRKLPKYDTDKFVTCKLIRNTESKFCNRKRPDGWLTPSARQLADTHINLIHKMQKYLPITDVAFEVNRFAFMLLKDPSVSGVDFQNGPLKGFDDLHDAVCELQDGTCLLCNRKIEHYHHIIPKSKNGSDTIDNIAGLCMCCHDKVHKNEKEAQRLQKKKKGLNKKYGALSVLNQAIPFICKRLEEEFGAEHVFYCTGRETAAVRNSFGYQKTKDNQLHEVDAWCIGILALGKIPKTLPDFSYTCRIRQFRRQDRSRIKAQTERTYKLEGKIVAKNRKKRTEQKTDSLEDWYQKQTALYGQKEADRMRSRLTAAKSQRRYNAPSRILPGTVFLYDGKRHVLSGQLTGGKYFRAVGDAKTNYPASKCRIVRKNEGLVFISQVITERVAVSHG

SEQ ID NO: 15702 - protein, 408 aa, unidentified; identical to SEQ ID NO: 6548
  REGION 1..408: note = Human gut metagenome

SEQ ID NO: 15703 - protein, 408 aa, unidentified; identical to SEQ ID NO: 8232
  REGION 1..408: note = Human gut metagenome

SEQ ID NO: 15704 - protein, 462 aa, unidentified; identical to SEQ ID NO: 15460
  REGION 1..462: note = Human gut metagenome

SEQ ID NO: 15705 - protein, 254 aa, unidentified
  REGION 1..254: note = Human gut metagenome
MLAGKPLPVGTDYQLGEMYDEYNVRQYVLKRDNYTCQCCGAHTTAKKAVKLHVHHLESRKVGGNAPSNLITLCTTCHNNLHKGKITLDGKKRGKTLRDAAFMGIMRNTLLTRLRNELNIPVQNTYGYITKLLREQNDIKKSHVNDARCISKHPLAEPCSVCYRTKAIRHHNRQIHKAKILKGGIRKANQAPYIVKGFRLWDKVLYNGQECFISGRRSSGYFALRKFDGTTITNSISFKKLRLLEPATNYLIERK

SEQ ID NO: 15706 - protein, 422 aa, unidentified; identical to SEQ ID NO: 5457
  REGION 1..422: note = Human gut metagenome

SEQ ID NO: 15707 - protein, 451 aa, unidentified; identical to SEQ ID NO: 13438
  REGION 1..451: note = Human gut metagenome

SEQ ID NO: 15708 - protein, 432 aa, unidentified; identical to SEQ ID NO: 6070
  REGION 1..432: note = Human gut metagenome

SEQ ID NO: 15709 - protein, 515 aa, unidentified; identical to SEQ ID NO: 8359
  REGION 1..515: note = Human gut metagenome

SEQ ID NO: 15710 - protein, 421 aa, unidentified; identical to SEQ ID NO: 4220
  REGION 1..421: note = Human gut metagenome

SEQ ID NO: 15711 - protein, 473 aa, unidentified; identical to SEQ ID NO: 3562
  REGION 1..473: note = uncultured beta proteobacterium

SEQ ID NO: 15712 - protein, 406 aa, unidentified; identical to SEQ ID NO: 4902
  REGION 1..406: note = Human gut metagenome

SEQ ID NO: 15713 - protein, 407 aa, Moorena sp.
MPCSPAKARRLLRAKKATIVDYRPFTIQLCWQCEGYTQDVTCGIDKGSRVTGLTCVGNATALLAAEIHHRQDVKAKMEDRRERRKSRRSRLWYRPRRFLNRASSKRSGRLPPSIKTNVEEIIRVVRQLPLPINALVIEDVQVDIARLNNPELRGSQYQDRTRLDENLRIACLMRDGYACQHCHKRGVRLEAHHIIYRERGGKDTLSNLLTLCEQCHQRLHQGKITLNVIGVSGRLDQTAQRTMQGKTYLYATLHALVPLNTVYGYETATYRKYRELPKTHIIDALCIATLGTGKVVAPPESNVYSIGFRPRQTRKQYHSLPQMGKGRVRYQVNEKLQGFRKGDLVLVKGKYVKLVNSIYSNGYLAFPRVKGEPNAARPHDCRILEREKTILWERIPVKDTQEKSNIR

SEQ ID NO: 15714 - protein, 411 aa, unidentified; identical to SEQ ID NO: 2663
  REGION 1..411: note = Human gut metagenome

SEQ ID NO: 15715 - protein, 549 aa, Streptomyces sp.; identical to SEQ ID NO: 14428

SEQ ID NO: 15716 - protein, 415 aa, unidentified
  REGION 1..415: note = Fermentation metagenome
MIVYVLNKYGKPLMPCKPSKARKLLKQGKAKVVKKSPFTIQLLYGSSGYKQPITLGVDAGSKFIGLSATTDKQELFSAEVDLRNDIVRLLSDRRQYRKSRRSRTTRYRKPRYNNRVKSKNKGWLAPSVENKIQAHFNIIDKTHQILPISKIIVEVASFDIQKIKNPDIQGKEYQQGEQLNFWNTREYVLWRDGHKCQGKKGCKGNILNVHHIESRKTGGNSPDNLITLCENCHKDYHNGKLKLNLKRGQSFKDATFMGIMRWTFYNRLKEIYPNVNMTYGYITKNTRINNKLGKAHRIDARCISGNPTVKPLNYWYRIKQVRKHNRQIHKAKILKGGLRKLNQAPYEVKGFRLFDKVKYNGKECFIFGRRSSGYFDLRRLDGEVIHRSANYKNLKLVDRRKSMLWERGEHGCSLT

SEQ ID NO: 15717 - protein, 544 aa, unidentified
  REGION 1..544: note = Human gut metagenome
MKQKKQKVMVYILNKKGKPLMPTTRCGHVRKLLNSKKAVVVNSNPFTIRLKYDTPNGVQDVFAGIDSGRENIGSGASNEDGDCLYLGELKTSNKSIKLKMTERAGFRKERRRHDRQNKQRKARKDHTEIQNGNADICRTTISCKSVQISYPAAEKSVTHKIIRGKEGKFANRHRDEGWITPSARQLVQMHMNDLKSMCKILPISHVTLERVAFDFQKLENENIKVWEYGKGKLYGYDSPEEYIHDVQNGKCLVCGKPHIDYLHHIIPRSKGGSDKVSNIAGLCYDCHYGPMGVHNCQNNTDRLPELKSEANKQYKVSLLNSVMPVLIEEMDKFCKANSIMFSICEGHDTAKVRDMYDLQKDHCIDGFAISLVDRNVKSVDVMPDRIYQKQRYKKKSKNIIQKRNCREYYDDKKLVAVNRHKGTDQKADSLEEYMNTYAETHTTDECKKHFDSLVVKPARRTYTFHKEWRICPFHIGDKVRYEKKNKIKGNTKVDTFICEGIRFVKDENKAEVKHNKTKSKKMKFCRVLESGCTPYVDYRKLALM

SEQ ID NO: 15718 - protein, 437 aa, unidentified
  REGION 1..437: note = Human oral metagenome
MNSHGHWREGQFSERKAAEMLNNQKEYAFVSDAEGKKLDPTIVQNAWRLVRQKKVTLIAKRPMTIQLKKVIDNPNDDEIRMGIDDGAKHVGLALVQKCKTKNKVIFIATMEQRNDVHKLMEQRKNYRRYRRYWKRYRKARFSNRVSVRRKGRIAPSILQKRQAVVRITDSLSKYIRIDSIYLEDVAIDVRVLTDEKRLYSWRYQQSNRLDENLRKATILRDNCKCQLCGNKNCRLEVHHITPRRMNGANTIGNLITLCSECHSNVTGREMEFAEQLYSKIGKKKNNVSLQYASHVMVGKTWLREELSKRVPVLLTIGGDTANKRIDWNLEKSHEIDAICITNLEPESVGVKSWNIKPLRHQRKTMKVKEILGFRHRDIVCYTFKNGEYHEGYVTALYPSEGKQKEGLNFLSPTKHCKRVNPKKCQRLDRPDKFLWLV

SEQ ID NO: 15719 - protein, 494 aa, unidentified; identical to SEQ ID NO: 4543
  REGION 1..494: note = Human gut metagenome

SEQ ID NO: 15720 - protein, 470 aa, unidentified
  REGION 1..470: note = Human gut metagenome
MSVFVVGLNGCRLMPVSERKARLLLDGGKASVYRKVPFTIKLNYKTGSTTQPGYLGIDTGSQHIGVSVVREDGTVLHKEEVSLRDSMTKRKLLETKASLRRGRRYRKTRYRHPKWRPKTKRVYCEVPDKKGRHWKKQKGTFTSGRPEGWLPPSLQSKTDHHIRWIRKLQGLLPEGYRLSIELGRFDPARMKDPGIHGDLYQNGPQYDYENVRACVLDRDRYTCQVCKKKGGKLHVHHILYRSQGASDNPQYMATVCSSCHTMENHLPGGILYQWMLEQKKFTRGLRDATFMNILGKRLRKAFPDAVFTYGNITKVDREVLNLPKSHGNDATAIALVRTGVASVKDKEPVLYIQQVRRKKRSLHEETPRKGRKEPNRKAARNSKNTKAVTFTKRRGGKKTSVTACLFDRVELNGKKGWISGFTGTSCYMKDAEDNYIRTSGKYNQVSLSKLRILHHCGNWVIGARKPLGKG

SEQ ID NO: 15721 - protein, 419 aa, unidentified
  REGION 1..419: note = Human gut metagenome
MVYVISQENKPLMPCSNPVARLLLKQGRAKVKKREPFTIKLTYETTNYTQDLTLGVDTGSGTIGAAVSKDNGDIVYMSEVVVRNNIADRMIRRSKYRRNRRSRKTRYRKARWLNRKNSIKSGRFSPTTISKFHSHVKEIEYIKSILPITTMVLETGQFDTHLMKNPSLANPKLKHWGYQKGTNYGFENTKAMVLNRDDYTCQHCKGKRKDSKLEVHHIIFRSQGGSDEESNLITLCHACHKALHSGKIKLKLNGKAKGNLKYATQMNSIRKQLFRYYPDATETFGYITKANRLNLGTDKEHYYDACVIATQGKPFTVKTNLYKKKCVPDGDFRKTKGIRSEQAITTDKICGFRKFDKVKYFGKEYFIKSRKSTGYATLMDIDGNTVDFSSMPRGNKTPKLRNCKRVSARTSQMVQIVSV

SEQ ID NO: 15722 - protein, 427 aa, Parasutterella sp.; identical to SEQ ID NO: 6030

SEQ ID NO: 15723 - protein, 427 aa, Moorena sp.; identical to SEQ ID NO: 14853

SEQ ID NO: 15724 - protein, 420 aa, unidentified
  REGION 1..420: note = Human gut metagenome
MVYVISKENKPLMPCSNAIARLLLKQGKAKVKRREPFTIKLTFETTNYTQDLTLGVDTGSGTIGTAVSKNNGDIIYMSEVIVRNDITDKMTQRAKYRRNRRNRKTRYRKARWLNRANSIRTNRFSPTMQSKLHSHVKEIKYIKSILPITTLVLETGQFDTHLMKNTTLANPKVRHWGYQKGVNYGFENTKAMVLNRDNYTCQCCRGKHKDSKLEVHHVIFRSNGGSDEQENLITLCHTCHKALHDGKLNISLTGKIKGTLKYATQMNSIRLQLLKQYPEAIETFGMVTKANRLKLGIEKDHHLDACVIANQGNPITFKTRSVYVKKCVSDGDFQKTKGVRSEQPITTGKICGFRKFDKVKYYGNEYFIKGRMSTGYVILMNIYGKKADFSHLPKGFKTPKLSNCKRISARNNWIIDELAI

SEQ ID NO: 15725 - protein, 512 aa, unidentified
  REGION 1..512: note = Human gut metagenome
MSTVYVLNKDGKPLMPTTRCGHVRHLLKEQKARVVASKPFTIQLLYKTNDVVQPLYLGIDPGRTNIGVAVVKADGTAVFTAHLETRNKEIPKLMKKRKDSRCARRTNGRRCRRQRRAKANGTISKKCVKHDTAQNGSVSKRAKEIGVIKRHLPGCEKEVLCIGIKNKEAKFNNRTRPAGWLTPTANQLLQTHINLIKKIQKLLPISDVVLEVNKFAFMQLDNPNIQKWQYQQGPLYQKANLEEAVSEMQEHHCLFCKKKIDHYHHVVPQHKNGSNTIDNIVGLCTKHHDLVHKDTAWHEKLTKKKTGLNKKYGALSVLNQIIPALTKELSSIFPKHFFVTTGKSTYDYRAAHGVSKDHWLDAYCIACSVLPNDVCDSSINNRVPYELKQFRRHDRRALHKENMSRVYTLNGKKVATNRHKATEQTADSLEEFRQNHPDDVCKLKVKENHSEYRNPKRNFPGCVFLVGKRTHVMQGTNGSHNGKADGYYDTNGNSYSSGKCKFVAKNEGIIFA

SEQ ID NO: 15726 - protein, 446 aa, unidentified
  REGION 1..446: note = Wastewater metagenome
MQKLRKRNTYTPTDAPQVRGNCGLQLNKEETLSVASSKTSLNNPEVDLSQHTAKRKVVVYVVSIDGNGLMPCTPAKAKKLMNKGLADVYKMYPFTIQLKFECENVVQEVDLGIDEGYSNIGFSAISPIKELISGTVILENKTSDRLTEKRMYRKGRNSKKWYRKPRFLNRKKRIGMLSPSVERKYQAHLKIIRLCQEILPISSITLESGNFDIQKINNPEIVGEGYQQGDMYCYQNMRSYLMARENGKCQLCGKEFSKGHPSHIHHILERSKKGSDMPKNLAILHKKCHIKLHKKGLKLSAPKTMKSETFMSTISKRFYRDLPDFKETFGYITFIKRNELGLEKTHFNDAFVIANGTNQERITPIIIRQKRRNNRALQMNRRGFKPSIRKQRYKIQPKDLVWIDGKKNVSLGTHNNGTRVIVEENKKSYSIKKIEKIYNFGTFTFY

SEQ ID NO: 15727 - protein, 415 aa, unidentified; identical to SEQ ID NO: 6843
  REGION 1..415: note = Human gut metagenome

SEQ ID NO: 15728 - protein, 424 aa, unidentified; identical to SEQ ID NO: 3434
  REGION 1..424: note = Human gut metagenome

SEQ ID NO: 15729 - protein, 244 aa, unidentified
  REGION 1..244: note = Human gut metagenome
MVYVQDIDGKPMMPTTRHGKVRRLLKDSKAVVVNTCPFTIKLMSKTSGYKQEIVLGVDAGTKHVGLSATTKSKELYSSEVILRSDIVELLSTRRESRRTRRNRLRYRKPRFNNRIKSKRTGWVAPSVRHRIDAHIRVIDNICSILPVSRVIVEVAQFDTQKIKNPDISGDEYQEGDQLGFWNVREYILARDGHKCQHCKGKSKDPILNVHHIESRKTGGDSPSNLITLPAPFCPFHLIISLMQT

SEQ ID NO: 15730 - protein, 443 aa, Anoxybacillus sp.; identical to SEQ ID NO: 10273

SEQ ID NO: 15731 - protein, 403 aa, unidentified
  REGION 1..403: note = Clostridiaceae bacterium UBA4969
RLLLKQHKAKVIKKYPFTIKLLYKTKTEYTQPLALGIDTGSSKIGSAVVDENNNVLYLSQVEVRNDITDKMKQRAKYRRNRRNRKTRYRKARWLNRKNSIKEDRFSPTIVSKINSHLKEINFVKSILPIQNVILETATFDPHALKNPAVLHNKWLYQKGVNYGFANTRAYVLDRDNYTCQYCKGKSKDSKLEVHHIIFRSQSGSDESKNLITLCKTCHGKLHNGKINLKKNGKVKGQLKHATQMNSIRQQLLRLLPEATETFGFITKEHRQLMKLPKEHYYDAVAIACLNNIGNTGLIGVNFKTKNILFKRCIADGDFQQTKGVRSEKRITTGKIQGFRKFDKVEYQGKEYFIKGRMSTGYAILMDIEGNKINLKPIPKFEKMKRMQARKSWIISQETIQNIC

SEQ ID NO: 15732 - protein, 426 aa, unidentified; identical to SEQ ID NO: 3614
  REGION 1..426: note = Human gut metagenome

SEQ ID NO: 15733 - protein, 420 aa, unidentified; identical to SEQ ID NO: 3288
  REGION 1..420: note = Human gut metagenome

SEQ ID NO: 15734 - protein, 438 aa, Clostridium sp.; identical to SEQ ID NO: 4933

SEQ ID NO: 15735 - protein, 443 aa, unidentified
  REGION 1..443: note = Human metagenome
MTKTLTKQTTQACVLDQHGKPLMPTKRLGKVYRLLKTKKAHIVSYEPFTIQLDYEPDTHIIQPMTLGVDSGAIHSGYSVANEQREYYSSEVIARDNISYRISDRHMYRQNRRSRKTRYRKPRFNNRKNKKKGWLPPSLEQKVAVQLNEIDHLHRHFPIETIIVEVAEFDIQKIKNPNISGKDYQQGTLQGYNIRNYLLEKHGRKCFYCDKEVSNFEVEHMIPKAKGGSNRIDNLTLSCHSCNQKKGTLTADEFIKRTLPVENAAKKLKQLSKEKRLFKYMAHMNATRWTLYNAINDKYSNVKITYGYVTKYNRIQAGLPKAHHIDAKCITGFSQVPSFDTTVVKTKMRRHNRQLHRATFSKGHVRKAASLPTVMFGFRLYDIVMYNNHQYYIKGRRSNGSFALVSVEGLKEENRTYKKLTFLAHTNAYLTNRYVNNEIVNANN

SEQ ID NO: 15736 - protein, 477 aa, Acidithiobacillus sp.; identical to SEQ ID NO: 5650

SEQ ID NO: 15737 - protein, 431 aa, Escherichia sp.; identical to SEQ ID NO: 3801

SEQ ID NO: 15738 - protein, 536 aa, Anaerostipes sp.; identical to SEQ ID NO: 2718

SEQ ID NO: 15739 - protein, 412 aa, unidentified
  REGION 1..412: note = Human gut metagenome
RRARRTNGRRHRRQRRAKANGTISKKCVKQDTAQSKNPSKRAKEIGIIKRRLPGYKKDVLCIGIKNKEAKYTNRTRPEGWLTPTANQLLQTHINLVRKMQKFLSISDVVLEVNKFAFMRLDNPDIQKWQYQQGPLYQKGSLENAVSEMQEHHCLFCDKPIDHYHHVVPQSENGSNTIANIVGLCAEHHNLVHKDAAWQKKLAEEKVGLNKKYGALSVLNQIIPALTNKLSVLFPKHFFVTAGKSTHDYRAAHGVSKDHWLDAYCIACSVLPSNVCDSNINNHMPYELKQFRRHDRRVLNNENMNRVYTLDNKAVAINQHKATEQEAASLEEFRKEHPNDVCKLKVKEHHPTYRNMNRNYPGSIFLVGKHVHIMQGIAGSKDGKATTYKDSNANSITASKCKFVAKNSGILFV

SEQ ID NO: 15740 - protein, 466 aa, unidentified
  REGION 1..466: note = Human gut metagenome
LSIKPLINIGEGVIYSSICTGLSLQTYQKRKEVPCMVYVLDINGQPLMPTTRHGKVRRLLNSHLAKVVKRCPFTIQLLYQSTKEIQPVSLGVDAGSKHIGMAATTEKKVVYQEELSARNDVVKLLSARRTLRRTRRNRKTRYRKPRFNNRVHSKHKGWLAPSVEVKIQEHITTIKRICQILPISEIQVETAEFDLQRLKAMEEGRTPPVGTDYQLGEQYDFYNTRQYVLHRDGYTCQCCGTHDNNIKLHVHHIESRQTGGDAPNNLIILCEHCHKALHEGKLELPKGKKRGKSYRDATFMGVMRKTLLERLKKEIDVPVEGTYGYITKYWRERAGLEKSHIHDAVCISQYPYAKPLDIYYLTKTVRHHNRQIHKSNFSKGGIRKRNQAPYLVKGFRLFDKVLYQGKEYFIFGRRATGYFDIRTLDGTKVNKGSISYKKLRIQDTAKAYLKEARAIPHMNKFTCVLA

SEQ ID NO: 15741 - protein, 408 aa, unidentified; identical to SEQ ID NO: 3192
  REGION 1..408: note = Human gut metagenome

SEQ ID NO: 15742 - protein, 512 aa, unidentified; identical to SEQ ID NO: 13347
  REGION 1..512: note = Human gut metagenome

SEQ ID NO: 15743 - protein, 430 aa, unidentified
  REGION 1..430: note = Human gut metagenome
MTWARRKILQKWKVAEMPNIKKYAFVLDAEGKQLDPTIEQNAWRQVRQHKAKLVSRFPMVIQLNKVVDIPNTDEIRCGIDDGANHVGIALVQKCQTRNKVLFKGIIEQRKDVKKKIEQRRSYRRYHRYHKHYRPARFNNRASSRRSGRLMPSIIQRKQATLRVIDRLRQWIRMDGYWLEDVKIDIRALTDGYKPYHWQYQKSNRLDTNLRIATIFRDNCKCMECGKENTRFEVHHITPKKKGGADTISNLITLCPKCHARTFGREMQFADKYYKMIGPSGHIGGLDDAQRVMQGKHWFREQLQSRATLVLTTGGDTANKREDWNIIKTHSNDAICIADLEPESVDIEEWSIKPMRRKSKAGVDEVCGFHHRDYVSYTYRNGETHAGYVTAMYPEIHALNFQAPTKHCKKANALKCRLIWRFNKIYWFKCA

SEQ ID NO: 15744 - protein, 411 aa, unidentified; identical to SEQ ID NO: 6901
  REGION 1..411: note = Human gut metagenome

SEQ ID NO: 15745 - protein, 390 aa, unidentified
  REGION 1..390: note = Human gut metagenome
MRGKPLMPCSPAKARHMLKAGKAVVVRRTPFTIKLTIATGETKQDVTLGVDAGARHVGISATTEKEEVFASEVKFRQDITGLLADRLAFRRARRNRKTRYRSPRFNNRVRSKHKGWLASSVENRIQAHMSRIDAVCRLLPVTKIVIEAASFDVQKIKNPTIEGTDYQQGDQLGFWNVREYVLFRDGHVCQHCHGRSRDKILNVHHLESRKTGGDAPNNLITLCETCHKAYHAGKIKLKVKRGQSFRAEAFMGIMRWTLLDRVRKTHPKLPVENTYGYLTKHKRIALGLPKTHCADAFCIAGNLKALRRGDFLFQQQTRKHNRQIHRCSILKGGVRKLNQAPFLVKGFRLFDKVRIGGQIGFVFGRRVRGIFNIRRLDKTVIGKDINCKKN

SEQ ID NO: 15746 - protein, 494 aa, unidentified; identical to SEQ ID NO: 2450
  REGION 1..494: note = Human gut metagenome

SEQ ID NO: 15747 - protein, 443 aa, unidentified
  REGION 1..443: note = Human gut metagenome
LTKDENRPSGRTTGLRAEQAEPAGIRKGDTLKVFVLNMRGKPLMPCSPAKARHMLKAGKAVVVRRTPFTIKLTIATGETKQDVTLGVDAGARHVGISATTEKEEVFASEVALRQDITGLLADRLAFRRARRNRKTRYRAPRFNNRVRSKHKGWLAPSVENRIQAHISRIEAVCRLLPVTKIVIETASFDIQKIRNPEVEGTGYQQGDQLGFWNVREYVLFRDGHICQHCRGRSKDPILNVHHLESRKTGGDAPNNLITLCETCHKAYHAGKIKLKVKRGQSFRAEAFMGIMRWTLLDRVRKTHPKLPVENTYGYLTKHKRIALGSPKTHCADAFCIAGNLKALRRGDFLFQQQTRKHNRQIHKCSILKGGVRKLNQAPFLVKGFRLFDKVRIGGQIGFVFGRRVRGTFNIRRLDKTVIGTDINCKKLSLLETRKTFLTELRKE

SEQ ID NO: 15748 - protein, 406 aa, unidentified; identical to SEQ ID NO: 4082
  REGION 1..406: note = Human gut metagenome

SEQ ID NO: 15749 - protein, 513 aa, Leptospirillum sp.
MLPQSRALEVPDADNREGQDETVRDNTPVRNIPEGRCFARSALRPQGQNNVRFDGGFVQVFVLDKKKKPLMPCHPARARELLREGRAVVHRIAPFTIRLKERIGGETSPFGVKLDPGSKTTGLAAAREEETDGEKTAHVLFQAEIHHRGSAIKKKLDQRRAFRRRRRSQLRYRTPRFDNRTRPDGWLPPSLRHRVDTTLAWVERLRRLVPVSELSQELVRFDMQKIENPEISGAEYQQGTLAGYEVREYLLEKWGRTCAYCGASDMPLEIDHIHPRSLGGSDRVSNLTLACRSCNLKKGNRPVGEFLAKTPERLSTILARAKAPLKDAAAVNTTRWALFQALKATGLPVETASGGRTKWNRTRLVLPKTHALDAACVGKVDRIEGWNRPCLSIKSTGRGSYQRTRLDAFGFPRGSLTRTKAHFGFQTGDQVMAIVTKGKKNGTYAGRVAVRSSGSFNIQTGSRVVQGISCKDCRLLQRADGYGYSIHPITEKGEAGEALSLPGMNAGLSRARG

SEQ ID NO: 15750 - protein, 414 aa, unidentified; identical to SEQ ID NO: 4264
  REGION 1..414: note = Human gut metagenome

SEQ ID NO: 15751 - protein, 480 aa, unidentified
  REGION 1..480: note = Human gut metagenome
LYTKPLDNIGEGSLPPSGEINLKGMTFMVYVKSIDGKALMPTSNAKARKLLKQKKAKVVSLRPFVVKLTYKTKTEYTQKLNLGVDSGYSNIGFSVIDAKQEYIAGEVKLLEGMKKRLLEKASYRRIRRSRLRYRKARWNNRVKSKKKGWLAPSLKHKLDTHIKFIDYLKNILPIGKITIEVANFDIQKMKDDLISGIDYQNGDMFGFWNVREFVLHRDGHKCQNPNCKHKDKKEQILKVHHIRYRSEGGSDRPENLITLCSKCHTPANHKKGKFLYDWCVNGKKVRGFKDATFMSMIRWYLVNDLKSKHNNVSITYGYITKNHRIQNGIEKSHLNDAFAIAKGTNQARTKDRFLVIQDRLKNRSLEKFYDSKIIDIRTGKKVSGGDLSCGRSTRNKNLNTENLRKYRGAKISKGQRRIRKQKYFYQPNDLVKYDGKVYTVKGTQNEGKYIALKEIKKVPKVELLIPYVFKKGLNWSYGLC

SEQ ID NO: 15752 - protein, 410 aa, unidentified
  REGION 1..410: note = metagenome
VTTILKTCFAAFNLAKVVVLMDAWDIIVVLNKRGKPLMPCSPAKARLLLKEKKAIVKRRTPFTIQLTIATGETKQPVSLGVDAGYKHVGLSASTEKAELYASEVELRQDITDLLSARRALRQSRRNRKTRYRAPRFDNRIRTKRKGWLAPSVENRINAHLSRIEAVLRLLPVTKITVETASFDLQLLKNPDISGKEYQEGEQLGFWNIREYVLCRDGHVCQHCYGRSKDPVLNVHHLESRRTGGDSPGNLITLCETCHKALHRGEITLKAKRGQSFRAEAFMGIMRWEVHNRLRALHPGIEVSNTYGYRTKHARIANGIAKSHCADAFCIAGNLGAERLCEFFFQKQTRRNNRQIHKLSILKGGIRKRNQAPFEVKGFRLFDKVACKGEEGFIFGRRSSGFFDVRKLDGT

SEQ ID NO: 15753 - protein, 415 aa, unidentified
  REGION 1..415: note = Human oral metagenome
MFVYVISKDGQPLMPTARFGKVRRLLRDKKAKVIRSCPFTIKLLYEPETSVVQEVVLGQDTGSKYVGTACVANDKVSYQSEVTLRDNIKKKMDSRRGSRRNRRQRKTRYRKPRFLNRANSTKEDRLSPSVKSKVQAHADEIEFCKKILPVSEMVFETGKFDTQLMEKPWIQKYKWAYQKGVNYGFANARAHALDRDNYTCQCCGKKHVRLEVHHITFRSQGGSDELDNLITLCEKCHSAIHDGKITLNAKGKRKRNLKHATQMSIIRSQLLKIYPEAIETFGFVTKTNRENLNLPKEHFIDACVIASGGEKFEQLDQLFKKRQVAKQNRQLCKGAHGEKKLPTGKIFGFKRFDKVKYLGEIYFVKGRRSSGAFVLMDIDNNSIDFRDRGGRQNPSYKLLERLNTRRSTLCISQRI

SEQ ID NO: 15754 - protein, 476 aa, unidentified; identical to SEQ ID NO: 3164
  REGION 1..476: note = Human gut metagenome

SEQ ID NO: 15755 - protein, 431 aa, unidentified
  REGION 1..431: note = Human gut metagenome
MPNKVYVINKHGRPLMPCSPAKARHLLDEGKAKVKKRTPFTIQLVYGSSGYTQEVILGVDAGSKTIGMSASTTKEELLSAEVKPRNDVVDLLSTRREFRRAQRNRKTRYRKPRFDNRVRSKHKGWLAPSVEVKIQEHITSIKRVCRILPVSKVVIETAEFDLQLLKAIADGKPVPQGEDYQQGEMYGHYNVRQYVLWRDGYTCQCCGAHATKKKEVRLHVHHLESRKVGGDAPDNQVTLCESCHEKLHKGLIAEKDFKKRKRRSTRDATFMGIMRKTLMQRLCSELPIPVVETRGYITKATREKLLVLPKSHINDALAIAQGKQGFNVGYLPGILQIDKIYTIRPVRHHNRQLYKATILKGGIRKSNQTEKYVFGYRLFDKVQFNGQDCFIWGRRTTGIFTIKTINGKMIKDGISFKKLKLVEKSTSYLIA

SEQ ID NO: 15756 - protein, 456 aa, unidentified
  REGION 1..456: note = Human gut metagenome
MSTCVCVLSNSGKRLMPTFRLGKVRHLLKDGKAKIVKHHPFTIQLLYDGKTNTQPIEICEDVGYNYIGISVKSQSHEYVSAQYDTLQDEKACHDSCRKLRRSRRNRLRYRKPRFDNRKRGEGWLAPSLKHKKELNVNVVKMYCAVMPITHATVEVGSFDTMLVKAIQEGKAIPEGADYQKGPRYNLATLREAVFYRDNYTCQVCGRKVADGAILHMHHMFYWKGRHGDSLNELLTVCEKCHTPANHQKGGKLYGFGENVKFADLSGAAFMNTVRWQIVNELYAAFGKDFVTVTYGAMTKEKRIALHLEKSHNNDAYAMGNCHPAHRCEFGHYQKRCRNNRVLEKFYDATYIDTRTGDKAKGKELFNGRISRNHKKDSEDLHKYRSKKVSKGRRSIRRQRYAIQPYDTVRLESKSYITSGCHNKGTRLLIPANGKSKSVAISKVQVVCHAGAWIQII

SEQ ID NO: 15757 - protein, 406 aa, unidentified; identical to SEQ ID NO: 2874
  REGION 1..406: note = Human gut metagenome

SEQ ID NO: 15758 - protein, 296 aa, unidentified
  REGION 1..296: note = Human gut metagenome
INAHLSRIEAVLRLLPVTKITVETASFDLQLLKNPDISGKEYQEGEQLGFWNIREYVLCRDGHVCQHCYGRSKDPVLNVHHLESRRTGGDSPGNLITLCETCHKALHRGEITLKAKRGQSFRAEAFMGIMRWEVLNRLKASHPELEVNNTYGYRTKHARIANDIAKSHCADAFCIAGNLGAERLGEFFFQKQTRRNNRQIHKLSILKGGIRKRNQAPFEVNGFRLFDKVACKGEEGFIFGRRSSGFFDVRKLDGTCISAGISYKKLHLLEKRRTYLTEIRKEKALPPLPGGSGLRA

SEQ ID NO: 15759 - protein, 457 aa, unidentified
  REGION 1..457: note = Human gut metagenome
VWLYQAVYNLGEGFLPSSEERTAFYWLLIYRKEHGIMQYVYVLNKHGEPLMPCSPGKARLLLKQQKACVVKRTPFTIKLLYGSAGYKQPITLGVDAGSKHVGLSASTEKRELYREEFTPRNDVVDLLSTRRQNRRSRRNRKTRYRAPRFDNRVHSKHKGWLAPSVEVKIQEHITVIKRICRILPITLVRVETAEFDTQRLKAMLKEKPLPVGTDYQLGEMYDEYNVRQYVLKRDNYTCQCCGAHPTEKKPVRLHVHHLESRHVGGNAPNNLITLCVACHKALHEGKITLEKGKKRGKPLRDAAFMGIMRNTLLARLKDELNIPVKQTYGYITKLLREKNKIPKSHVNDARCIAKAPNAKPCDTMLYTRALRHHNRQIHKAKILNGGIRKKNQAPYLVKGFRLWDKVRYNGEECFITGRRSSGYFALKKYDGTVISNSASYKKLMLLEAATNYITERS

SEQ ID NO: 15760 - protein, 418 aa, Anoxybacillus sp.
MVEENMTCFMQRKGENPMVFVLDTNKRPLAPCHEAVARKLLKQGKAAIYRRFPFTIILKKSVDESEIKATYRLKIDYGSRHTGLAILRGQEVVWLGQLDHRTDIKERIDKRRAFRRARRNRKTRYRKPRFLNRRRKDGWLPPSLESRVQNIQTWVNRLKKLCPIGYISYENAKFDTQLMRNPEINGVEYQQGTLQGYEVREYLLEKFGRKCCYCGKENVPLEVEHIIPKSRGGTDRVDNLCLACHDCNQRKGSKTAEEFGYPHIQKQVKESLKDTSAINSTRWKAYEVLKQTGLDVECGTGARTKMNRIRLDLPKTHYFDACCVGESTTNHLYFKTKEVLFIKAKGRGSRSRTNLDRPPCRKKFGTIGRMKTNIVEISPCSWGHEVDVSMVRKSPKDRRTPVAWCTTECRSRVGKHAG

SEQ ID NO: 15761 - protein, 369 aa, unidentified
  REGION 1..369: note = Human gut metagenome
VDTGSGTIGTAVSNDNSDIVYMSEVIVRNDITDKMTQRRKYRKNRRGRKTRYRKARWLNRANSTKTDRFSPTMQSKLHSHVKEIEYIKSILPITTMVFETGQFDTHLMKNPNLANPKVKHWGYQKGVNYGFENTKAMVLNRDNYTCQCCKGKHKDSKLEVHHIIFRSQGGSDEESNLITLCHTCHKDLHSGTINFKLKGKLKGNLKYATQMNSIRKQLFMIYPDAIETFGYVTKANRLVLGIDKEHYYDACTIATQGNAFNVKSNLYKKKCVSDGDFQKTKGIRSEQPIVTDKICGFRKFDKVRYFGNNYFIKGRMSTGYAVLMDIDGNKADFSAMPKGYKTPKMVKLKRIEARTTWMITTVEVTPNIA

SEQ ID NO: 15762 - protein, 467 aa, unidentified
  REGION 1..467: note = Human gut metagenome
VGDFGRGAAPQTTACSCLHYLLSQIKNTIERIAYQMVYVLNVNGVPLMPTDRHGKVRRLLKSKQARVVKRTPFTIQLLYDTQTCVQPLTLGVDAGSKHIGLSVSSENKEVYAGQIEPRQDVSKRLDERRQYRRSRRNRLRYRKPRFNNRTASKPKGWIAPSIACKIESHVTVIGQLHQILPITEIVVEVADFDTQKILNPDIQGKEYQTGPLFNSNLRQYTFARDGYTCQWCKGKSKNKILHVHHWNYWRGDHTNKPSSVITLCDVCNDSKNHKKDGFLYGWEPKITNNLKDAAFMNMSRWALYNRLKEIYPNVRLTYGYITKVVRSDHGLEKSHVNDALCIANHPNATRLPYCYLIKKNRIHNRQIHKANKLKGGRLKLNQAPHLVKGYCLNDIVKCNGQSYVITGRRSSGYFQLKSLKTGERLQSVSYKKIKLLEKAKYYTTERVARNGEAIPSTVKTVGFLALF

SEQ ID NO: 15763 - protein, 430 aa, unidentified
  REGION 1..430: note = Wastewater metagenome
MKAVFVLSNTKKPLMPCRPARARKLLTAGKAAVYRLHPFTIILHDRADGDVQDVEVKVDPGSKTTGIALVGHFEQQGAVVLFGANLNHRGQAIKNNLESRRSLRRGRRGRKTRYRQSRFLNRTRKAGWLPPSVESRVMNTESVINKLANRCPITSATVELVKFDMQQMVNPEVSGVEYQQGELAGYEVREYLLEKWNRTCAYCGTQHVPLQVEHIQPKAQGGSNRVSNLTLACQPCNQKKGSQPIDQFLQRQPDVLRKIKAQAKAPLKDAAAVNASRWALVNRLREWLPVTTGSGGRTKCNRTRQGYPKDHWIDAACVGESGEQVTIREGMKPLTITAKGRGSHQVVRTDKYGFPRGKAGRIKRIHGFSTGDIVKLVMAKGKYVGTYIARLAGIRLTGTLDIKTAAGTVGASWKNFTLIQRNDGFDYATI

SEQ ID NO: 15764 - protein, 442 aa, unidentified; identical to SEQ ID NO: 11618
  REGION 1..442: note = Human gut metagenome

SEQ ID NO: 15765 - protein, 413 aa, unidentified; identical to SEQ ID NO: 3220
  REGION 1..413: note = Human gut metagenome

SEQ ID NO: 15766 - protein, 425 aa, unidentified
  REGION 1..425: note = Human gut metagenome
MVYALNKDGQPLMPTDRHGKVKHLLKDGKAKVVKRCPFTIKLLYESTTHTQNLTLGVDTGSGTVGAAVSKDNGDIVYMSEVVVRNDITDKMTQRSKYRRNRRNRKTRYRKARWLNRKNSIRPDRFSPTMISKFHSHIKEIEYIRSILPITTMVFETGQFDTHLMKNPSLAGPDIRHWGYQKGSNYGFENTKAMVLNRDGYTCQYCKDRHKDRKLEVHHIMFRSKGGSDEESNLITLCRTCHKDLHSGKIRPDFKGKTKGTLKYATQMNSIRKQLFRSYPEAAETFGYITKANRLAIGVAKGHYYDACTIATQGKPFIVKTSLYKKKCVSDGDFQKTKGTRSEQPIVTDKICGFRKFDKVQYFGKEYFIKGRMSTGYAILMNIDGKKADFSTMPKGCKIPKMTKLKRVEARTTWMVTAVEVTPNIA

SEQ ID NO: 15767 - protein, 441 aa, Moorena sp.; identical to SEQ ID NO: 12415

SEQ ID NO: 15768 - protein, 374 aa, unidentified
  REGION 1..374: note = Human gut metagenome
SKRAKKIGVIKRHLPGCEKEVLCIGIKNKEAKFSNRTRPEGWLTPTANQLLQTHINLVKKIQKFLPISDVVLEINKFAFMRLDNPNVQKWQYQQGPLYQKASLEEAVSEMQEHHCLFCKNTIDHYHHVVPQHKNGSNTIGNIVGLCAKHHDLVHKDTSWQEKLAKKKTGLNKRYGALSVLNQIIPALTKELSSLFPKHFFATNGKSTYDYRAAHGVSKDHWLDAYCIAGSVLPNDACDNNINSHVPYELKQFRRHDRRALHKENMSRVYTLNGKSVATNRHKAIKQTTDSLEEFRQRQPNDVCKLKVKEHHPEYRNPKRSFPGCVFLVGKQTHVMQGTSGSHNGKADGYYDTNGNSYSSGKCKFVAKNEGIVFA

SEQ ID NO: 15769 - protein, 440 aa, Clostridium sp.; identical to SEQ ID NO: 10253

SEQ ID NO: 15770 - protein, 447 aa, Marinobacter sp.; identical to SEQ ID NO: 5861

SEQ ID NO: 15771 - protein, 442 aa, unidentified; identical to SEQ ID NO: 3218
  REGION 1..442: note = Human gut metagenome

SEQ ID NO: 15772 - protein, 442 aa, unidentified; identical to SEQ ID NO: 2903
  REGION 1..442: note = Human gut metagenome

SEQ ID NO: 15773 - protein, 406 aa, unidentified; identical to SEQ ID NO: 2752
  REGION 1..406: note = Human gut metagenome

SEQ ID NO: 15774 - protein, 453 aa, unidentified
  REGION 1..453: note = Human gut metagenome
MMTAVLSSIGVRLMPTTCFKARKLIESGKAVIHSYDPFTIRLTQRESGGTQPIEYCCDTGYQHIGISIKSAKHEYVGVQVDALKDEKKHHQDAMTYRRTRRNGKTRYRAARFDNRKATKSKGWLAPSIRHKKDIHLAQVQKYAKVFPITSIVFEMGEFDTQKLKAIEEGRHTPAGVEYQQGEQYGFDDVRNAVFTRDDYRCVCCGRGVKDGVILHVHHLKYRSLGGTNRMGNLVTVCDRCHTPANHQKGGLLWNLMDKYKVKNFKGATFMTSVRWQMYDELKVMFPDTEIHLTYGSRTKETRRLLGIRKSHINDAYSMGDFHPKHRSEHWLYTKKRRNNRVLAKFYDAKYIDSRDGKKKSGKDLFSGRTKRSRELNVENLHRYRQQKVSKGRVSVRRRHYPIQPGDTVIYEGRKYITKGVQNLGTYLKIGEKVVPVRKIRIHRYAGGYIRQMM

SEQ ID NO: 15775 - protein, 413 aa, unidentified
  REGION 1..413: note = Human gut metagenome
LKVFVLNMRGKPLMPCSPAKARHMLKAGKAVVVRRTPFTIKLTIATGETKQDVTLGVDAGARHVGISATTEKEEVFASEVALRQDITGLLADRLAFRRARRNRKTRYRAPRFNNRVRSKHKGWLASSVENRIQAHMSRIDAVCRLLPVTKIVIEAASFDVQKIKNPTIEGTDYQQGDQLGFWNVREYVLFRDSHICQHCRGRSKDPILNVHHLESRKTGGDAPNNLITLCETCHKAYHAGKIKLKVKRGQSFRAEAFMGIMRWTLLDRVRKTHPKLPVENTYGYLTKHKRIALGLPKTHCADAFCIAGNLKALRRGDFLFQQQTRKHNRQIHRCSILKGGVRKLNQAPFLVKGCRLFDKVRIGGQIGFVFGRRVRGTFNIRRLDKTVIGKDINCKKLRLLETRKTFLTELRKE

SEQ ID NO: 15776 - protein, 424 aa, unidentified
  REGION 1..424: note = Human gut metagenome
LVWNKRGKPLMPCSPAKARLLLKEKKAIVKRRTPFTIQLTIATGESKQPVTLGVDAGYKHVGLSASTEKAELYASEVELRQDVSDLLSARRALRQSRRNRKTRYRAPRFDNRIRTKRKGWLAPSVENRINAHLSRIGAILRLLPVTKITVETASFDTQLLKNPDISGKEYQEGEQLGFWNVREYVLFRDGHACQHCHGRSKDPVLNVHHLESRRTGGDSPGNLLTLCETCHKALHRREIKLKTKRGQSFRAEAFMGIMRWEVLNRLKASHPELEVHNTYGYRTKHTRIVNGIDKSHCADAFCIAGNLGAKRLGEFFFQKQTRRNNRQIHKLSILKGDIRKRNQAPFEVNGFRLFDKVACKGEEGFIFGRRSSGFFDVRKLDGTCISAGISYKKLHLLEKRRTYLTEIRKEEALPPPPEGRGLRA

SEQ ID NO: 15777 - protein, 529 aa, unidentified
  REGION 1..529: note = hot springs metagenome
VGHVAAAEPDVPERHSQFRETAVQSRSLTQGATARLRETYHLQKRCPDHRAPSTGGKKMLLFTIDRNGRPGHPTRRFDMIRKLVKQGRAKIIGGGTSGKPPVAMFLDREFDYSKTVSRKLIIVLDPGYQCIGFAICELKGRKVIVYCIGVLETRIPEIKELMAERRTHRRNRRYYSRCKKRRLSAKQGRVLTKFKVPRNVRAENRTNATLRHGIETHLNLYKKLLKFFPFPAEQVVFVMEDNVFDVRSMTWGKTYGTGYQKSPRVPAEKKCIICGAEDNLQKHHLIQRKRCGTDVQENLVYLCRDCHEDVHAGRVYIPVDGVKQWRALGTMNAIIGQLRKIRWLKFVPASDVAQMRKRLELEKSHANDALAAAAVFCNCPEIDKTHMIELTLAKFRRHNRARTHTVRDRLYKVNGEIVAKNRRKRTDQKEPSFADISPLPPEIQRKLKVYPGTKILNPLRKEMPTIAGDVWIHIPTGKRFVATGVVSQKYLYSPQLKKIVGKTYVKPEECRQVLHNEGMVVMYNSLYRN

SEQ ID NO: 15778 - protein, 458 aa, unidentified
  REGION 1..458: note = Human gut metagenome
MNTCVCVLSNNGERLMPTFRLGKVRRLLKDGKAKIVKHHPFTIQLLYDSKTNTQPIEICEDVGYNYIGISAKSKSHEYVSAQYDTLQDEKEHHDDCRKMRRTRRNRLRYRKPRFDNRKRGEGWLAPSLRHKKELNVNVVKMYCAVMPITHATVEVGSFDTMLVKAIQEGKVIPEGADYQKGPRYNLATLREAVFYRDNYVCKVCGRKATEGAILHMHHMFYWRGRHGNSLDELLTVCEKCHTPANHQKGGKLYGFGEDVKFTDLSGAAFMNTVRWQIVNELYAAFGKPFVTITYGAMTKEKRIALQLEKSHNNDAYAMGEFHPSCRCKFRHYQKRRRNNRVLEKFYDATYIDTRTGNKAKGKELFNGRISRNHKKDSENLHKYRAHKITKGRCSIRSKHYDIQSGDTVLYAGRKCITTGCFNKGKWLRIPVGSTAKSVAISKVKLINHVGAWKEGSSI

SEQ ID NO: 15779 - protein, 225 aa, unidentified
  REGION 1..225: note = Human gut metagenome
MPNKVYVINKHGRPLMPCSPAKARHLLDAGKAKVKKRTPFTIQLVYGSSGYTQEVILGVDDGSKTIGISASTKKEEVFAADVTPRNDVVNLLSARREFRRARRNRKTRYRKSRFDNRVRSKRKGWLAPSVEVKIQEHITSIKMVCRILPVSKVVIETAEFDLQLLKAIEEGKPVPQGEDYQQGEMYGHYNVRQYVLWRDNYTCQCCGAHATKKKEVRLHVHHLES

SEQ ID NO: 15780 - protein, 429 aa, Moorena sp.
MCNYVFVLDASHKPLNPCRPVTARKLLTAGKAAVYRRYPFTIILKKQVEAEPKPMSLKIDPGSKITGLAIVYGNQVVWSAEIEHRGSKIKSALDSRRAVRRSRRNRKCRYRKPRFNNRKRPEGWLAPSLQHRVATTMTWVLKLMKLTPIGGISQELVRFDTQKLQNPEISGIEYQQGELMGYEVREYLYQKWGRQCVYCGAKSVKLEVEHIIPKSKGGTNRVNNLTLACHRCNQAKGNLDARDFLSGKPDVLKRILGRAKQPLLDAAAVNSTRWQLYQSLKETGLSVAVGTGGRTKYNRIKLGLPKGHWVDAACVGEVATLKIVTRQPLLIKAMGHGCRQVIQMDKYGFPRKGYKPKHPVKGWKTGDIVNVVAGKNAGLKGVRIKTVRAKGNFDLIGADQDSSNKVNSASRNYIQCVHRQDGYYYSFAK

SEQ ID NO: 15781 - protein, 521 aa, unidentified; identical to SEQ ID NO: 11204
  REGION 1..521: note = Human gut metagenome

SEQ ID NO: 15782 - protein, 424 aa, unidentified; identical to SEQ ID NO: 3351
  REGION 1..424: note = Human gut metagenome

SEQ ID NO: 15783 - protein, 416 aa, unidentified
  REGION 1..416: note = Human gut metagenome
MVYVLDKNGQPLMPTDRHRKVRLMLQSGQAKVIKRCPFTIQLNYDSGHQTQEISLGIDAGSKHIGVSATTKIKVLYEVDVELRNDIVDLLSSRRELRRGRRNRKTRYRQAKFNNRRRGNGWLAPSIRQKIGTHLTVVKNICKILPISRIMVETASFDIQKIKNPDIQGAEYQQGDQLEFWNVREYVLFRDGHTCQCCKGKSKDKILNVHHIESRKTGGNAPNNLITLCETCHTGYHKGTVQLPKAIKRGIRFKDAAFMGIMRWVFYEALKQQYEPVGTPVHNTYGYITKHTRIAYNLPKEHYVDARCISGNPEASSNGEYYYQKKVRCHNRQMHKLTILKGGIRKQNQATYLVKGYRLFDKVSYQGKGYFVFGRRQSGFFDIRTLSGEKVNKGSLSCKKLKFIATRTHYLTERRAV

SEQ ID NO: 15784 - protein, 411 aa, unidentified; identical to SEQ ID NO: 3917
  REGION 1..411: note = Human gut metagenome

SEQ ID NO: 15785 - protein, 442 aa, unidentified; identical to SEQ ID NO: 2903
  REGION 1..442: note = Human gut metagenome

SEQ ID NO: 15786 - protein, 453 aa, Moorena sp.; identical to SEQ ID NO: 2687

SEQ ID NO: 15787 - protein, 420 aa, unidentified
  REGION 1..420: note = Human gut metagenome
MQYVYVLNKHGEPLMPCSPRKARLLLKQKKACVVKRTPFTIKLLYGSTGYKQPITLGVDAGSKHIGISAATEKYELYREEATPRNDVVDLLSARRAFRRSRRNRKTRYRAPRFDNRVHSKHKGWLAPSVEVKIQEHITLIKRVCRILPVTLVRVETAEFDTQRLKAMLEGKPLPVGTDYQLGEMYDEYNVRQYVLKRDNYTCQCCGAHPTKTKAVKLHVHHIETRRTGGNAPNNLITLCTACHKALHAGKVTLNGKKRGKPLKDAAFMGIMRKTLMERLLKELKIPVQETYGYITKYLREKHSIPKSHTNDARCISKNPLAIPCDTCYYTKAIRHHNRQLHKATILKGGIRKANQAPYTVKGYRLWDKVSYNGSECVITGRRTSGYFALKKLDGTVVSNSASYKKLRLLEVATNYITERR

SEQ ID NO: 15788 - protein, 419 aa, unidentified; identical to SEQ ID NO: 8591
  REGION 1..419: note = Human gut metagenome

SEQ ID NO: 15789 - protein, 431 aa, Escherichia sp.; identical to SEQ ID NO: 3801

SEQ ID NO: 15790 - protein, 443 aa, unidentified; identical to SEQ ID NO: 10351
  REGION 1..443: note = Human metagenome

SEQ ID NO: 15791 - protein, 460 aa, unidentified
  REGION 1..460: note = Human gut metagenome
MVAVVDLFGKPLMPTNEYRARRLLKQKKAKIFGYRPFTIQLTERKSTEIQPIELCMDTGYIHIGISAKSERHEYLGMQIDTLTDEKLKRDDKRQYRRQRRNRKRYRAPRFDNRRRKEGWIAPSLEHKKEIHIDAIQRICKVMPITDITLEMGNFDTHVLKAVEEGKPLPQGSDYQHGERYGIATLREAVFLRDGYKCQCCEKSVKDGAILHVHHIKYRSQGGTNRMSNLITVCDKCHTPKNHKPGGKLWNWKPKLAEFKGASYMTSIRWTLYNEVTALLPNSSVHITYGAKTKESRRKLDIKKSHVNDAYVMGLFCPKHRTKPVYFKKKRRNNRVLEKFYDAKYIDSRDGKKQSGQELFNGRINRNHRKDSENLHLYRKQKVTKGKRSIRNKHYPIQPHDILLYQKKKYENAGCHNNGSRVILLPEKKSVALKQLTIYQYAGGYYRVPYESNKKEERTGS

SEQ ID NO: 15792 - protein, 431 aa, unidentified; identical to SEQ ID NO: 11953
  REGION 1..431: note = Human gut metagenome

SEQ ID NO: 15793 - protein, 442 aa, unidentified; identical to SEQ ID NO: 3161
  REGION 1..442: note = Human gut metagenome

SEQ ID NO: 15794 - protein, 423 aa, Moorena sp.; identical to SEQ ID NO: 14011

SEQ ID NO: 15795 - protein, 470 aa, unidentified
  REGION 1..470: note = Human gut metagenome
MSVFVVGLNGCRLMPVSERKARLLLKGGKASVYRKVPFTIKLNYKTGSTVQPGYLGIDTGSQHIGVSVVQKDGTVLHKEEIGLRDSMSKRKLLESRASSRRGRRYRKTRYRHPKWKPKTKRIYNEKADRKGRHWKKQKNTFTSKRQAGWLPPSLQSKTDHHIQWIRKLLDLLPEGYRLSIELGRFDPARMKDPEIHGELYQKGPQYDYENVRAYVLARDGYTCRVCKKKGGKLHVHHILYRSRGASDNPKYMAAVCSKCHTTENHLPGGILYQWMKDQKKFTRGLRDATFMNILKKRLRKAFPDAVFTYGNITKADREKLELPKSHGNDATAIALVKTEVKSVKDEEPVIHIQQVRRKKRSLHEETPRKGRKEPNRTASRSDKNTKSVTVTKGNGEKKVSMIACLFDRVELDGKKGWITGFTGTSCYVKDKEDNYICTSSKYKQVSISRLRILHHCGNWAIGAEKPLGKG

SEQ ID NO: 15796 - protein, 456 aa, unidentified
  REGION 1..456: note = Human gut metagenome
MSTCVCVLGNNGERLMPTFRLGRVRHLLKDGKAKIIKHHPFTIQLLYDSKMNTQPIEICEDVGYNYIGISVKSQSHEYVSAQYDTLQDEKACHDSCRKYRRTRRNRLRYRKPRFDNRKRGDGWLAPSLEHKKQLNIRLIERYVSVIPITRATVEVGSFDTMLLQAIQKGESKPEGVDYQKGPRYNLATLREAVFYRDNYTCQVCGRKIADGAILHMHHMFYWKGRHGYQLDELVTACEKCHTPANHQKGGKLYGFGKDKKFANLSGAAFMNAVRWQIVDALHATYGKEFVTITYGAMTKEKRIILGIEKTHNNDAYAMGDYHPAHRCVFRHYQKRRRNNRVLEKFYDATYIDARTGNKAKGKELFNGRISRNHKKDSENFHKYRSKKVSKGRRSIRRQRYAIQPYDTVRLESKTYITSGCHNKGTRLLIPANGKSKSVAISKVQVVCHAGAWIQII

SEQ ID NO: 15797 - protein, 470 aa, Anaerostipes sp.; identical to SEQ ID NO: 2825

SEQ ID NO: 15798 - protein, 427 aa, Moorena sp.; identical to SEQ ID NO: 12009

SEQ ID NO: 15799 - protein, 415 aa, unidentified; identical to SEQ ID NO: 5374
  REGION 1..415: note = Human gut metagenome

SEQ ID NO: 15800 - protein, 453 aa, unidentified; identical to SEQ ID NO: 14710
  REGION 1..453: note = Human gut metagenome

SEQ ID NO: 15801 - protein, 431 aa, unidentified
  REGION 1..431: note = Human gut metagenome
MPNKVYVINKHGRPLMPCSPAKARHLLDAGKAKVKKRTPFTIQLVYGSSGYTQEVILGVDAGSKTIGMSASTTKEELLSAEVKPRNDVVDLLSTRREFRRARRNRKTRYRKPRFDNRVRSKHKGWLAPSVEVKIQEHITSIKMVCRILPVSKVVIETAEFDLQLLKAIEEGKPVPQGEDYQKGEMYGHYNVRQYVLWRDDYTCQCCGAHATKKKEVWLHVHHLESRKVGGDAPDNQVTLCESCHEKLHKGLITEKDFKKRKRRSTRDATFMGIMRKTLMQRLCSELPIPVVETRGYITKATREKLLVLPKSHTNDALAIAQGKQGFNVGYLPEILQIDKIYTIRPVRHHNRQLHKAAILKGGIRKSNQAGKYVFGYRLFDKVQFNGQDCFIWGRRTTGIFTIKTINGKMIKDGISFKKLKLVEKSTGYLIA

SEQ ID NO: 15802 - protein, 423 aa, Moorena sp.; identical to SEQ ID NO: 8374

SEQ ID NO: 15803 - protein, 421 aa, unidentified; identical to SEQ ID NO: 14103
  REGION 1..421: note = Human gut metagenome

SEQ ID NO: 15804 - protein, 415 aa, unidentified
  REGION 1..415: note = Human oral metagenome
MFVYVLSKTGQLLMPTTRFGKVRRLLRDKKAKVVRSCPFTIKLLYEPETSVVQEIVLGQDTGSKHVGTACVANNKVLYQSEVTLRDDIENKMDHRKGFRRNRRQRKTRYRKPRFLNRANSTKKDRLPPSVQHKVQAHVDEIEFCKKILPVNKLVFETGKFDTQLLEKPWLQKYKWAYQKGINYGFANSRAHALDRDNYTCQCCGKKHVRLEVHHIIFRSLGGSDELENLITLCEKCHAAIHDGKITLNLKGKRKRNLRHATQMSIIRSQLLKLYPDAIETFGYVTKANSENLGLLKEHYLDACVVASGDKEFKQSNWLFKKRRVSRQNRQLCKGARGEKKIPTGKILGFRKCDKVKYLNEICFIKSRRSSGYFTLMDIDSNTLDFRDRGGKKIPFYKLLERLNLQRSTLCIGHFV

SEQ ID NO: 15805 - protein, 424 aa, unidentified; identical to SEQ ID NO: 3434
  REGION 1..424: note = Human gut metagenome

SEQ ID NO: 15806 - protein, 431 aa, Escherichia sp.; identical to SEQ ID NO: 3801

SEQ ID NO: 15807 - protein, 424 aa, unidentified
  REGION 1..424: note = Human gut metagenome
MVYVISKDGNPLMSCCNVIARLLLKQGKAQVKKREPFTIKLNYETTNYLQNLTLGVDTGSRTIGTAVSNDNGDILYMSEVVVRNDITEKMTQRAKYRRNRRNRKTRYRKARWLNRANSIKNDRFSPTMRSKLYSHVKEIECIKSILPITQMVFETGQFDTHLMKNPSLANPRIRRWGYQKGPNYGYENTKAMVLNRDNYTCQCCKGKHKDSKLEIHHIVFRSKGGSDEASNLITLCHTCHKDLHSGKINPKLKGRIKGNLKFATQMNTIRKQLFRLYPNAIETFGYITKANRLQLGVNKEHYYDACTIATQGNRFTIKSNLYKKKCISDGDFQQTKGICSKQPIVTNKIHGFRKFDKVRYLGKNYFIKGRMSTGYAVLMDINGKKADFSNMPKGFKTPKMANFKRIEARTTWMTTTVMLTSNIA

SEQ ID NO: 15808 - protein, 512 aa, unidentified
  REGION 1..512: note = Human gut metagenome
MSTVYVLNKDGKPLMPTTRGGHVRHLLKEQKARVVRAKPFTIQLLYETNDVVQPLYLGIDPGRTNIGVAVVKANGTAVFTAHLETRNKEIPKLMQGRKKARRARRTNGRRCRRQRRAKANGTISKKCVKQTTAQNGSVSKRAKDIGVIKRRLPGCEKDVLCIGIKNKETKFTNRTRPEGWLTPTANQLLQTHINLVKKIQKFLPISDVVLEVNKFAFMRLDNPNIQKWQYQQGPLYKKESLESAVSEIQEHHCLFCKKPIDHYHHVVPQHKNGSNTIGNIVGLCAKHHDLVHKDSAWEKKLAQKSTGLYKKYGALGVLNQIIPTLTNELSSLFPKHSFVTNGKSTYDYRAAHGVSKDHWLDAYCIACSVLPSNVCDSNINNHMPYELKQFRRHDRRVLNNENMNRVYTLNNKAVAINRHKAKDQKTVSLEEFRKEHPDDVCKLKVKEHHPTYRNMNRNFPGSVFLVGKQIHVMQGIASSKDGKATKYNDTSATAIAAGKCKFVAKNTGILFV

SEQ ID NO: 15809 - protein, 442 aa, unidentified; identical to SEQ ID NO: 2903
  REGION 1..442: note = Human gut metagenome

SEQ ID NO: 15810 - protein, 428 aa, Enterococcus sp.; identical to SEQ ID NO: 4335

SEQ ID NO: 15811 - protein, 434 aa, unidentified; identical to SEQ ID NO: 5659
  REGION 1..434: note = Fermentation metagenome

SEQ ID NO: 15812 - protein, 396 aa, unidentified; identical to SEQ ID NO: 4508
  REGION 1..396: note = Human gut metagenome

SEQ ID NO: 15813 - protein, 452 aa, unidentified
  REGION 1..452: note = Ga0373628_0106757
MSKQTLQREFQNVPTGAPLACSSTTLPLNRDERTSVVGIVLSCNNPEVGLRKQTSGPKATVFVLSIDGSPLMPCTPTKARHLLEKEKAKVVSLNPFTIKLTFKCENKVQEVSLGIDSGYKHIGFSVITKTKEIVSGEVFLDDKTSKRLTERRVYRKRRRSRLRYRKQRSSNRNTPEGWLPPSVQRRFDTHINVIKRLKKLTPIRKITIETGAFDIQKLMDPEISGKEYQQGNLYGYNNLKAFLFSREHGKCQFCCKKINRGEKTHSHHIIPRSETGTDRPYNMALLHEYCHNKLHKDGLYKKLKAPKQYKAETFMSIVADKFKSALNCNVTYGYETAIKRDFLGVKKNHVNDAFVVTGGDSQDRCIPYKVEQKRTNNRVLQTNRKGFIPSIRRQRYEIQNRDFVWINGRKHLCGGVAGRGSEVYYFDGIEKKRVSIKKVSRFYSTGSLVWSN

SEQ ID NO: 15814 - protein, 413 aa, unidentified
  REGION 1..413: note = Human metagenome
MENKIEYCFVVDKDNQPLAPTKVNKGWYLVRKGRARLKSKYPMVIQLEKRVKLDENDKSYMTCGIDDGSAHVGLAIVQKCPIKNKVVFKGTIEQRQDVKHLIDVRRGYRRYHRYHKRYRPMRFNNRSSSKRIGRLAPSIKQKKDAILRILFQLNKWIDIKEYYLEDVCIDIRAMTDDYKPYKWQYQKSNRLDENLRKAAIIRDNYKCQECGKSNCKLEVHHIQARKYSGADTIGNLITLCSKCHQKTEGKEQDFEDKYFKIIGSKPKRFDYAMHVMQGKNYLRSKISELGLLHLTNGGETANKRIEWNIEKSHSNDAICITDSIPDSCNIKEWTIKPMRRKSKAKINNVLGIKHRDLVSYTYKNGETHTGYVTALYSKQLALNFQSRTKHCKKVNARKCRLLWQFNKIYWLEY

SEQ ID NO: 15815 - protein, 413 aa, unidentified; identical to SEQ ID NO: 11958
  REGION 1..413: note = Human gut metagenome

SEQ ID NO: 15816 - protein, 465 aa, unidentified
  REGION 1..465: note = Human gut metagenome
MSTCVCVLSNSGERLMPTFCLGKVRHLLKDGKAKIVKHHPFTIQLLYSSKTNIQPIEICEDVGYNYIGISVKGESHEYVSAQYDTLQDEKEHHDDCRKMRRTRRNKLRYRKPRFDNRKRNKGWLAPSLEHKKQLNISLIERYVSVIPITHATVEVGSFDTMLLQAIQKGEAKPEGADYQEGPRYNLATLREAVFYRDNYTCHVCGHKITNGAVLHMHHMFYWKGRHGYQLDELVTVCEKCHTPANHQKNGKLYGFGENVKFADLSGAAFMNTVRWQIVNELYAAFGKPFVTITYGAMTKEKRIALRLEKSHNNDAYAMGEFHPNLRCTFEHYEKVRRNNRILEKFYDSRYIDIRTGEIATGKALFNGRINRNHKKDSENLHKYRGKRTYAGHRALLRKKVNLNPGDLVSLNGETLIVHSTHTNKKGAVNVEFKTPAKNGRKSASLKKLKIVKAASFMHSAWEKVS

SEQ ID NO: 15817 - protein, 442 aa, unidentified; identical to SEQ ID NO: 2903
  REGION 1..442: note = Human gut metagenome

SEQ ID NO: 15818 - protein, 427 aa, Parasutterella sp.; identical to SEQ ID NO: 14928

SEQ ID NO: 15819 - protein, 377 aa, Moorena sp.; identical to SEQ ID NO: 6426

SEQ ID NO: 15820 - protein, 437 aa, unidentified
  REGION 1..437: note = Wastewater metagenome
MPCSEKRARLLLARGRACVHRLVPFVIRLTDRQLDTCTLQPLRIKLDPGSKTTGLALVRDTEHLNTDTGEIQRGVAVLSLIELVHRGRHISEALTARRQMRRRRRGCLRYRAPRFLNRGNKQRGWLAPSLQHRINTAMAWVARIRRWSPVTALSAELVRFDMQRLQNPEISGVEYQQGTLAGYEVREYLLAKWSRKCAYCGVENVPLQIDHVHPKAKGGTNRVSNLTLACGPCNARKSAQSVDAFLAKDPKRLTALLAQAKRPLKDAAAVNATRWALVGALKATGLPVETASGGCTKFNRSRLAIPKTHALDAVCVGAVSVVTNWQKPSLTIKCTGRGSYQRTRLDKYGFPRGYLMREKSVKGFKTGDLVRAIVPTGKKAGRHTGRVAIRKSGSFNIQTLAGVVQGIGYRHCRLLQRADGYGYFFNKAACDTAQKRE

SEQ ID NO: 15821 - protein, 367 aa, unidentified
  REGION 1..367: note = Human gut metagenome
TIGLSASAETEELLSAEVKPRNDVVDLLSTHREFRRARRNRKTRYRKPRFDNRVRSKHKGWLAPSVEVKIQEHITSIKRVCRILPVSKVVIETAEFDLQLLKAIADGKPVPQGEDYQKGEMYGHYNVRQYVLWRDDYTCQCCGAHATKKKEVRLHVHHLESRKVGGDAPDNQVTLCESCHEKLHKGLITAKDFKKRKRRSTRDATFMGIMRKTLMQMLCSELPIPVVKTRGYITKATREKLLVLPKSHTNDALAIAQGKRGFNVGYLPEIAQIDKICTIRPVRHHNRQLHKAAILTGGIRKSNQAEKYVFGYRLFDKVQFNGQDCFIWGRRTSGYFAVKTIDGKVIHNSASFKKLNLVERASNYLIA

SEQ ID NO: 15822 - protein, 465 aa, unidentified; identical to SEQ ID NO: 4641
  REGION 1..465: note = Human gut metagenome

SEQ ID NO: 15823 - protein, 416 aa, unidentified
  REGION 1..416: note = Human gut metagenome
MVYVLGQDGHPLMPTCRHGKVRRMLKSGMAKVVQRCPFTIQLQYESTTHTQKINLGIDAGSKTIGVSATTESKVLYESEVVLRNDIVELLSGRRALRNSRRSRKTRYRKPRFDNRKKPDGWLAPSIRQKIETHVTVVGNVMKILPVTKIIVETASFDIQKIKNPEIEGEGYQHGEQLDFWNVREYVLFRDGHTCQCCKGKSKDNILNVHHIESRKTGGNAPNNLITLCETCHKAYHKGIITLPNEIHRGMRFRDAAFMGIMRWAFYDRLKELYNPLGAEVINTYGYITKNTRIEHGLPKEHYVDARCISDNPAAKPLDHYYFQKKVRCHNRQIHKNTILKGGIRKRNQASYEVKGFRLYDQVLWKGQKCFIFGRRSTGRMDLRLLDGTHINASVGHKNLKLLSMRKNYLIEQRKAG

SEQ ID NO: 15824 - protein, 483 aa, unidentified
  REGION 1..483: note = Human gut metagenome
MKIYVIGLNGIGLAPTMPRKARLLLKNGRARIAFRQPFTIQLTYKTGCAHPKEMVIGIDTGSQHIGAGIISKETKQVVSKEEYELRSSMEKRSLLETRMTYRRGRRYRKVRYRHPKFKPATRRVYVEKLITQNKHQTHWKKQTNTFDSARPEGWLPPSIQSKLDHHIRIISRYQKALPKDIQLRIEVGRFDVQHMENPQIRGEMYQKGSMYEYENKKAFVFSRDGYTCKCCKCKAGSKRKDGTTVKLVVHHVDFRSQGASDNPKRLVTVCDRCHTTAAHKPGGILYDWMLKGKTFARGYRDTAIMNILRRRLWQEFPDAAFTYGNITAADRKILHIDKTHGNDAVAIAAHGMEGIKDIPNTTYYRQMRKQKRSLHEATPRKGRKEPNRTAKRNAKNTCVVKGIYLNDKVKAFGQTGWVTGFSGTSSVYIKNREGEYITVPGKNHKMVPLTELSVRTHCNNWAVSDIKTVSNRRDGNCDAEMCM

SEQ ID NO: 15825 - protein, 297 aa, unidentified
  REGION 1..297: note = Human gut metagenome
WLAPSVEVKIQEHITVIKRICRILPITLVRVETAEFDTQRLKAMLAGKPLPVGTDYQLGEMYDEYNVRQYVLKRDHYTCQCCGAHNTAEKVVKLHVHHLESRKTGGNAPSNLVTLCTTCHKNLHKGKVTLDGKERDKPLRDAAFMGIMRKTLMARLKEELPIPVQGTYGYITKMRREQNDIKKSHTNDARCISKHPLAEPCSVCYRTKAIRHHNRQTHKANFSKKCIRKRSQMPYLVEGFRLWDKVLYKGQECFVSGRRSSGSFALKKLDGTSISKGVTFKKLRLLEPATNYLIERM

SEQ ID NO: 15826 - protein, 411 aa, unidentified; identical to SEQ ID NO: 6244
  REGION 1..411: note = Human gut metagenome

SEQ ID NO: 15827 - protein, 493 aa, unidentified; identical to SEQ ID NO: 2644
  REGION 1..493: note = Human gut metagenome

SEQ ID NO: 15828 - protein, 446 aa, unidentified
  REGION 1..446: note = Human gut metagenome
VAFSLATIQKKEEGIMPNKVYVINKHGRPLMPCSPAKARHLLDAGKAKVKKRTPFTIQLVYGSSGYTQEVILGVDAGSKTIGMSASTTKEELLSAEVKPRNDVVDLLSTRREFRRARRNRKTRYRKPRFDNRVRSKHKEWLAPSVEVKIQEHITSIKRVCRILPVSKVVVETAEFDLQLLKAIADGKPVPQGEDYQQGEMYGHYNVRQYVLWRDGYTCKCCGAHTTKKKEVRLHVHHLESRKVGGDAPDNQVTLCESCHEKLHKGLIAEKDFKKRKRKSTRDATFMGIMRKTLMQRLCSELPIPVIETRGYITKATREKLLVLPKSHTNDALAIAQGKQGFNVGYLPGIEQIDKIYTIRPVRHHNRQLHKAAILKGGIRKSNQTGKYVFGYRLFDKVQFNGQDCFIWGRRTTGIFTIKTINGKMIKDGISFKKLKLVEKSTSYLIA

SEQ ID NO: 15829 - protein, 533 aa, unidentified
  REGION 1..533: note = Mouse gut metagenome
MSRGMTHPHFGVFPASNPADRCAKPRESNPPSGGVFIDRKEGIRVPVYVISSTGKPLMPSRRFVHVRLLLKEGKAKVVKTKPFTIQLLYESTEYTQPLYGGTDPGRTNIGEAVLDQCGTVQYAAHVESRNKDIPKLMENRAAHRSASRRGERKRRQRRAVANGTITFPLQKQWILPGCQKPITNKFIINSEAKFLNRKRPANWLTPTTNQLVQTHLNMVKKICSILPVTDWTLEINKFAFMLMEDGTIRGVDFQNGRMKGYPDVEAYIYAIQDGKCPFCGKTIEHYHHIKPRSEGGSNRPENLVGLCSDCHARIHKGDTEMAGLIDKLGEQKKYAALSVLNQAIPYIYQGLVEIFGEEHTHICYGWQTKEMYTKLKIPKTHSNDAICIAALGSGVVPPIQMTNPYEVKQCRRHNRAIVKAQRERTYKLFGETVAKNRHPRFKQEGPSLEDFVESIPAAYRQQVISVLKVTPSKRYYNTMDRDLPGTVFYYQGHRYVKSGQSSGGKDLRAYGMGSKNFPSAKVSIVPSGGLVYL

SEQ ID NO: 15830 - protein, 431 aa, unidentified
  REGION 1..431: note = Human gut metagenome
MPNKVYVINKHGRPLMPCSPAKARHLLDEGKAKVKKRTPFTIQLVYGSSGYTQEVILGVDAGSKTIGMSASTTKEELLSAEVKPRNDVVDLLSTRREFRRARRNRKTRYRKPRFDNRVRSKHKGWLAPSVEVKIQEHITSIKRVCRILPVSKVVIETAEFDLQLLKAIEEGKPVPQGEDYQQGEMYGHYNVRQYVLWRDGYTCQCCGAHATKKKEVRLHVHHLESRKVDGDAPDNQVTLCESCHEKLHKGLIAEKDFKKRKRKSTRDATFMGIMRKTLMQRLCSELPIPVIETRGYITKATREKLLVLPKSHTNDALAIAQGKQGFNVGYLPGIVQINKIYTIRPVRHHNRQLHKATILKGGIRKSNQTEKYVFGYRLFDKVQFNGQDCFIWGRRTTGIFTIKTINGKMIKDGISFKKLKPVEKSTGYLIA

SEQ ID NO: 15831 - protein, 588 aa, unidentified
  REGION 1..588: note = Human gut metagenome
VLALLQVLVIFRVQVQLIRLYSDISSEMIYNLVSIRERSFMKQKKQKVMVYILNKKGKPLMPTTRCGHVRKLLDSKKAVVVSSNPFTIRLKYDTPNGVQDVFAGIDSGRENIGSGASNEDGDCLYLGELKTSNKSIKIKMTERAGFRKERRRRDRQNKQRKARKDHTEIQNGNADICRTTISCKSVQISYPAAEKSVTHKIIRGKEGKFANRHRDEGWITPSARQLVQMHMNDLKSMCKILPISHVTLERVAFDFQKLENENIKAWEYGKGKLYGYDSPEEYIHDVQGGKCLICGKPHIDYLHHIIPRSKGGSNKVSNLAGLCYDCHYGPMGVHNCQDTQDRLPELKNEANKQYKVSLLNSVMPVLIEEMDKFCKANSIIFSICEGHDTAKVRDIYDLQKDHCVDGFAISLVGRNVKSVDVMPDRIHQKQRYKKKSKNIIKKRNCREYYDGKKLVAVNRHKGTDQKADSLEEYMNTYAETHTADECKKHFESLTVKPARRTYTFHKEGRICPFHIGDKVRYEKKNKIKGNTKVETFICEGIRFPKDENKAKVEHNKTKSKKMKFCRVLEPGCTPYICLLYTSPSPRDV

SEQ ID NO: 15832 - protein, 213 aa, unidentified
  REGION 1..213: note = Human gut metagenome
LQFYRKEHGIMQYVYVLNKHGEPLMPCSPGKARLLLKQQKACVVKRTPFTIKLLFGSAGYKQPITLGVDAGSKHVGLSASTEKRELYSEEFTPRSDVVELLSTRRQKRRSRRNRKTRYRVPRFDNRVHSKHKGWLAPSVEVKIQEHITVIKHICKILPISLVRVETAEFDTQRLKAMLAGKPLPVGTDYQLGEMYDEYNVRQYVLKRDHYTCQ

SEQ ID NO: 15833 - protein, 419 aa, unidentified; identical to SEQ ID NO: 6355
  REGION 1..419: note = Human gut metagenome

SEQ ID NO: 15834 - protein, 413 aa, unidentified
  REGION 1..413: note = Human metagenome
MPTTRLGKVYRLLKTQKAHIVSYEPFTIQLDYEPDTQVIQPMTLGVDSGAIHSGYSLTNEHREYYSAEVIARNDISNRLSERHMYRQNRRSRKTRYRQPRFNNRKNQKKGWLPPSLEQKVTVQVNEINHIHRYFPIDTIIVETAEFDIQKIKNPDISGIEYQQGTLQGYNIRNYLLEKHGRRCFYCGKAVSDFEVEHMFPKSKGGSNRIDNLTLSCHDCNEKKGTLTAEEFIQQTLPAKKATAKLKQLPQEKRLFKYMAYMNATRWALYDAIKERYPNVKMTYGYITKYNRIQVGLPKAHHIDAKCITGFPTVPSIDQTIVKVKMRRHNRQLHRATFSKGHVRKAACLPTTVFGFQLYDLVCFNNHRYYIKGRRSSGSFALVSVEGLKDENRSYKKLTLLAHTNTYLTNHYVH

SEQ ID NO: 15835 - protein, 398 aa, unidentified
  REGION 1..398: note = Human metagenome
AVIHKVYPFTIRLKDNSCVSQNRAYTVKLDPGSRHTGIAIVDDRDQVVMLAELEHRGHLIKRNMDSRRAVRRHRRNRNTRYRPARFLNRKIPKGWLAPSVKSRADNVINFIKKYKKLINIDKVMIEHVSFDTAQMSSNTKLYGVKYQQGPLYQQKLRSFIFSRSNGKCVYCGAQAEEIDHVIPRAKGGTNSVYNLVASCRACNQMKSNLSLKEFGKKINKNFSKLEPKKLPKDAAIVQAARNYMVKEVTKLVFNTTLHDAWMTKYNRDELGLPKEHYYDALSVGEVPNKFDFLTDKVFQISAKGRGSRQMCLMNKYGFPRTKSKGSKLVEGFQTGDMVKVIVPSGLKQGEYLGRVVVRSSKCFDVKTKTKTVQGIWHKYFHIVQRGDGYLYNYERRAI

SEQ ID NO: 15836 - protein, 431 aa, unidentified
  REGION 1..431: note = Human gut metagenome
MPNKVYVINKHGRPLMPCSPAKARHLLDAGKAKVKKRTPFTIQLVYGSSGYTQEVILGVDAGSKTIGVSALTKKEELFAANVIPRNDVVDLLSTRREFRRARRNRKTRYRKPRFDNRVRSKHKGWLAPSVEVKIQEHITTIRRVYGILPVSKVVVETAEFDLQLLKAIADGKPVPQGEDYQKGEMYGHYNVRQYVLWRDNYTCQCCGAHATKKKEVRLHVHHLESRKVGGDAPDNQVTLCESCHEKLHKGLIAEKDFKKRKRKSTRDATFMGIMRKTLMQRLCSELPIPVIETRGYITKATREKLLVLPKSHTNDALAIAQGKQGFNVGYLPGIVQINKIYTIRPVRHHNRQLHKATILKGGIRKSNQAGKYVFGYRLFDKVQFNGQDCFIWGRRTTGIFTIKTINGKMIKDGISFKKLKPVEKSTSYLIA

SEQ ID NO: 15837 - protein, 431 aa, unidentified
  REGION 1..431: note = Human gut metagenome
MPNKVYVINKHGRPLMPCSPAKARHLLDAGKAKVKKRTPFTIQLVYGSSGYTQEVILGVDAGSKTIGMSASTTKEELLSAEVKPRNDVVDLLSTRREFRRARRNRKTRYRKPRFDNRVRSKHKGWLAPSVEVKIQEHITSIKRVCRILPVSKVVVETAEFDLQLLKAIADGKPVPQGEDYQQGEMYGHYNVRQYVLWRDGYTCKCCGAHTTKKKEVRLHVHHLESRKVGGDAPDNQVTLCESCHEKLHKGLIAEKDFKKRKRKSTRDATFMGIMRKTLMQRLCSELPIPVVETRGYITKTTREKLLVLPKSHTNDALAIAQGKHGFNVGYLPGIEQIDKIYTIRPVRHHNRQLHKATILKGGIRKSNQAEKYVFGYRLFDKVQFNGQDCFIWGRRTSGYFVVKTIDGKVIHNSASFKKLRLVERASNYLIA

SEQ ID NO: 15838 - protein, 483 aa, Polaromonas sp.
MSGVGVAVFVLDNQGKALMPCTEKRARLLLARGRARVHRLVPLVIRLVDRQAAACDFQPLRIKLDPGSKTTGVALVRDVESVDASTGEIHSGVAVINLLDLVHRGRQISEALTARRQMRRRRRSNLRCRAPRFLNRGNKKSGWIAPSLQHRVDTAMAWVRRIQRWAPVRAISSELVRFDMQALQNPEISGVEYQQGTLFGYELREYLLEKWGRQCAYCDAKDTPLQIEHIRPKALGGSNRASNLTLACQCCNQKKAARSIEEFLAKDKKRLTGILAQAQKPLRDAAAVNVTRWALANALKATGLPVELASGGRTKFNRCTLGVPKTHALDAACVGQVRFIQDWSRPTLTLKAMGRGSYQRTRLDRFGFPRGYLMRGKRVQGFGTGDMVRADVPKGVKAGVHVGRVAVRASGSFNIQTHQGGISGVVQGISHKHCRVTQRNDGYGYFFNRADHTGREQVWPKASDAAHPALYLPAMNGRVSRAI

SEQ ID NO: 15839 - protein, 424 aa, unidentified
  REGION 1..424: note = Human gut metagenome
MVYVLSKEGTPLMPTNRRGRVRHLLDAGEAKAVKRCPFTIQLLYQSTTYTQEITLGVDAGSKTIGLSASTEKKELYASETRLRMDITDLLSVRRQFRRTRRNRKTRYRKARFNNRVHAKHKGWLAPGIEAKIGTHFRAVRDVCRILPVTEIIVETASFDIQKIKALENGEPVPEGTDYQEGDQLGFWNVREYVLWRDGYKCRCCNGKSKDQVLNVHHIESRKTGGDAPNNLATLCGYCHKQYHKGTILLPKSVRRGNSFRDAAFMGIMRRTFYNRLKEQYPRVAMTYGYITKNTRIRNSLPKTHYADARCIAGHPQAEPLEVYYFQKKVRCHNRQIHKSNILKGGKKKRNQAEYLVKGYRLYDRVRYQNREYYVFGRRASGFFDIRTLGGNKGNKGSVSCKKLRFLEPRKTMLIERRMQEREAV

SEQ ID NO: 15840 - protein, 419 aa, Geobacillus sp.; identical to SEQ ID NO: 3993

SEQ ID NO: 15841 - protein, 412 aa, unidentified; identical to SEQ ID NO: 4932
  REGION 1..412: note = Human gut metagenome

SEQ ID NO: 15842 - protein, 443 aa, Tepidimonas sp.
MAVFVLDRRKKPLMPCSEKRARLLLERGRARVHRLVPFTIRLVDRTQEESALQPLLVKLDPGSKTTGIAVVREDESADEETGEIQRQVHVLWLAQLVHRGQQISETLAVRRAFRRRRRGANLRYRAPRFLNRSRPKGWLAPSLRHRVETTLSWVRRLQRLAPISGISQELVRFDPQALENPEISGIEYQQGTLAGYEVREYLLEKWGRQCAYCGATDVPLQIEHIHPKARGGSDRVSNLTLACAPCNHAKGAQDVRVFLAKDPQRLARILEQAKRPLHDAAAVNSTRWSLFEALKATGLPVETGSGARTKFNRVRLGLPKTHALDAVCVGVTHAVFDWDRPTLQIKATGRGGYQRTRLDRFGFPRGYLTRQKRHFGFQTGDMVRAEVPKGKKTGTYVGRVAVRASGSFNIQTREEVIQGIAHRYCTLLQRADGYGYSWIKRAC

SEQ ID NO: 15843 - protein, 384 aa, Lactobacillus sp.
  REGION 334..337: note = misc_feature - Xaa can be any naturally occurring amino acid
VINRQGEPLMPCKQQKCRKLLQAGRAKVVKKEPFTIQLLFGSTGYKQPVSIGVDSGQHHIGLAVTSQDKVLFQGEVSLRQDVKKLLDTRRAYRNGRRNRNTRYRPPRFLNRAKPVGWLPPSVASKVQHNINWIQRMQAVLPKADLHIEVGKFDMAKMKQPDITGLGYQQGDKYGYETTKQYVLARDNYTCQICQGKSKDPKLKIHHIIYRSTGGTNQVSNLLTVCANCHTLANHQPGGKLYALQAKQFQSHRSLKGATFMNILRRRLFMAFPAAKFQYGAQTTLDRAKLDLPKAHYNDAVTISGIQKITQRPTAVVMFHQFRKKKRSLHEATAXXXXVKYPILRVNVMLKTRNFQTAFILMTMCNYLTDKRGISVGSAAKRLVM

SEQ ID NO: 15844 - protein, 419 aa, unidentified; identical to SEQ ID NO: 4877
  REGION 1..419: note = Human gut metagenome

SEQ ID NO: 15845 - protein, 456 aa, unidentified; identical to SEQ ID NO: 13864
  REGION 1..456: note = Human gut metagenome

SEQ ID NO: 15846 - protein, 441 aa, unidentified; identical to SEQ ID NO: 6900
  REGION 1..441: note = Human gut metagenome

SEQ ID NO: 15847 - protein, 420 aa, unidentified
  REGION 1..420: note = Human gut metagenome
MQYVYVLSKHGEPMMPCSPGKARLLLKRQKACVVRRTPFTIKLLYGSAGYKQPITLGVDAGSKHVGLSASTEKRELYREEFTPRNDVVELLSTRRQNRRSRRNRKTRYRAPRFDNRVHSKHKGWLAPSVEVKIQEHITIIKRICKILPISLVRVETAEFDTQRLKAMLAGKPLPVGTDYQLGEMYDEYNVRQYVLKRDNYTCQCCGAHTTAKKLVKLHVHHLESRKTGGNAPSNLVTLCTTCHKNLHKGKVTLDGKERGKPLRDAAFMGIMRKTLMARLKEELPIPVQGTYGYITKMRREQNDIKKSHTNDARCISKHPLAEPCSVCYRTKANRHHNRQTHKANFSKKGIRKRSQMPYLVEGFRLWDKVLYKGQECFVSGRRSSGSFTLKKLDGTSVSKGVTFKKLRLLEPATNYLIERM

SEQ ID NO: 15848 - protein, 428 aa, unidentified; identical to SEQ ID NO: 15093
  REGION 1..428: note = Human gut metagenome

SEQ ID NO: 15849 - protein, 419 aa, Geobacillus sp.; identical to SEQ ID NO: 3993

SEQ ID NO: 15850 - protein, 442 aa, unidentified
  REGION 1..442: note = Human gut metagenome
MSTSVFVLDKKHRPLMPCRPARARRLLRAGRARVVKRFPFVIRLVDRTVEQSEVQPVLIKLDPGSRETGAAVVRDDEKKRHHALAFFVIKHRGGAIRDALKARSAFRRRRRSQNLRCRSPRFLNRVKPKGWLPPSLRHRVETTLSFVRRMCRYLPVSGIATELVKFDSQKLQNPEVSGVKYQQGTLFEYEVREYLLEKFGRKCVYCGAEGVPLNIDHVVPRAKGGSNRVSNLVLACVSCNQKKGARSLEDFLKGKPEVLARVRRELKTPLRDAAAVNATRWVLFNELKATGLPVETGSGALTKLNRHAFGVEKEHWLDALCVGRLNGVVTRKGLNVLEIRCMGRGSRQRTRLTKYGFPRGYLMRQKCVHGFATGDMVEANVPKGKKAGLWRGRVAVRVSGSFNIQTPKGVIQGVGWKHCRLISHNDGYGYAWLGHAPHSSPA

SEQ ID NO: 15851 - protein, 456 aa, Halomonas sp.; identical to SEQ ID NO: 5133

SEQ ID NO: 15852 - protein, 414 aa, unidentified
  REGION 1..414: note = Human gut metagenome
MPCSPAKARLLLKEKKAIVKRRTPFTIQLTIATGETKQPVGLGVDAGYKHVGLSASTDKAELYASQVELRQDITDLLSARRALRRARRNRKTRYRAPRFNNRIRTKRKGWLAPSVENRINAHLSRIEAVLRLLPVTKITVETASFDMLLLKNPDIAGKEYQEGEQLGFWNVREYVLFRDGHVCQHCYGRSKDPVFNVHHLESRRTGGDSPGNLITLCETCHEALHRGEIALKTKRGHSFRAEAFMGMMRWEVLNRLKASHSELEVNNTYGYRTKHARIVNGIDKSHCADAFCIAGNLGAERLCEFFFQKQTRRNNRQIHKLSILKGGIRKRNQTPFEIKGFRLFDKVACKGEESFIFGRRSSGYFDVRKLDGTRISAGISCKKLRLLEKRRTYLTEIRKEEALPPLPEGRGLRA

SEQ ID NO: 15853 - protein, 420 aa, unidentified; identical to SEQ ID NO: 12818
  REGION 1..420: note = metagenome

SEQ ID NO: 15854 - protein, 413 aa, unidentified
  REGION 1..413: note = Human gut metagenome
MTNYAFVLDTNNKQLAPTKEQKGWFLIRKKRATLVSKYPMVIQLKKKIPDKEICKDEFRCGIDDGGLHVGIALVQKCQTRNKVVFKGIIEQRNDVKHLIDVRRGYRRYHRYHKRYRQVRFNNRKSSKRKGRIAPSILQKRQATIRVINQLNKWINIMNYWLEDVAIDIQALTDGYKSYRWQYQKSNRLDENIRKAVILRDDCKCMECGKSNCRLEVHHIKPKRLKGSNTLGNLITLCTKCHQKTEGIEELYMNRYFALLNSCDNKNLNYAQHVMIGKKWLREQLSILGMLHLTSGGDTANKRTDWDIAKSHSNDAVCITDLRPDTCEIKEWVIKPMRRQSKAKTDNVLGIKHRDLVEYTFRNGETHRGYVTALYPEQNALNFQSPTKHCKKVNARKCKVLWKYSKIYWLDNVS

SEQ ID NO: 15855 - protein, 470 aa, unidentified; identical to SEQ ID NO: 2825
  REGION 1..470: note = Human gut metagenome

SEQ ID NO: 15856 - protein, 420 aa, unidentified
  REGION 1..420: note = Human gut metagenome
MQYVYVLNKHGEPLMPCSPRKTRLLLKQNKASVVKRTPFTIKLLYGSTGYKQPVTLGVDAGSKHIGISATTEKYELYREEATPRNDVVDLLSARRAFRRNRRHRKTRYRAPRFSNRVHSKHKGWLAPSVEVKIQEHITLIKRVCRILPITLVRVETAEFDTQRLKAMLEGKPMPVGTDYQIGEMYNEYNVRQYVLKRDNYTCQCCGAHSTKTKGIKLHVHHIETRRTGGNAPNNLVTLCTVCHKALHAGKVTLDGKKRGKPLKDAAFMGIMRKTLMERLHKNLKIPVQETCGYITKYLREKNSISKSHTNDARCISKNPLAIPCGTCYYTKAVRHHNRQLHKATILKGGIRKANQAPYIVKGYRLWDKVSYNGTECFITGRRISGYFALKKFDGTVVSNSASYRKLRLLEASTNYITERK

SEQ ID NO: 15857 - protein, 415 aa, unidentified; identical to SEQ ID NO: 6534
  REGION 1..415: note = Human gut metagenome

SEQ ID NO: 15858 - protein, 447 aa, unidentified; identical to SEQ ID NO: 5937
  REGION 1..447: note = Human gut metagenome

SEQ ID NO: 15859 - protein, 431 aa, unidentified
  REGION 1..431: note = Human gut metagenome
MPNKVYVINKHGRPLMPCSPAKARHLLDAGKAKVKKRTPFTIQLVYGSSGYTQEVILGVDAGSKTIGVSALTKKEELFAANVIPRNDVVDLLSTRREFRRARRNCKTRYRKPRFDNRVRSKHKGWLAPSVEVKIQEHITAIRRVCGILPVSKVVVETAEFDLQLLKAIEKGKPVPQGEDYQQGEMYGHYNVRQYVLWRDDYTCQCCGAHTTKKKEVRLHVHHLESRKTGGDAPSNLITLCDSCHEKLHKGLIAEKDFKKRKRRSTWDATFMGIMRKTLMQRLCSELPIHVVETRGYITKATREKLLVLPKSHINDALAIAQGKHGFNVGYLPGILQIDMIYTIRPVRHHNRQLHKATILKGGIRKSNQTGKYVFGYRLFDKVQFNGQDCFIWGRRTTGIFTIKTINGKMIKDGISFKKLKPVEKSTSYLIA

SEQ ID NO: 15860 - protein, 512 aa, unidentified
  REGION 1..512: note = Human gut metagenome
MSTIYVLNKDGKPLMPTTRGGHVRHLLKEQKARVVTSNPFTIQLLYETDDVVQPLYLGIDPGRTNIGVAVVKADGTAVFTAHLETRNKEIPKLMKKRKNSRRARRTNGRRCRRQRRAKANGTISKKCVKQDTAQNGSVSKRAKKIGVIKRHLPGCEKEVLCIGIKNKEAKFSNRVRPEGWLTPTANQLLQTHINLVKKIQKFLPISDVVLVVNKFAFMQLDNPNIQKWQYQQGPLYQKANLEEAVSEMQEHHCLFCKKPIAHYHHVVPQSENGSNTIGNIVGLCTKHHDLVHKDTEWQKKLAKKKTGLNKKYGALSVLNQIIPALTKELSSLFPKHFFATNGKSTYDYRAAHGVSKDHWLDAYCIACSVLADDVCDNNIHSHVPYELKQFRRHDRRALHKENMSRVYTLNGKSVATNRHKATEQTTDSLEEFRQRQPNDVCNLKVKEHHPTYRNMNRNYPGSVFLIGKQVHVMQGIAGSKDGEATTYKDTNANSIAAGKCKFVAKNSGILFV

SEQ ID NO: 15861 - protein, 483 aa, unidentified
  REGION 1..483: note = Human gut metagenome
LRDGITTKTKEASELTVLEELLSKTEYIYVLGTDGRPQMPTKRKRHVLKLLNTGKARIAEKVPFTIQLKYDNIPVLQPIILAADPGRTNIGVTALSPFGDLMFAAVIETRNKEIKKLMADRKSHRQASRRGERKARQRLAKKYGTMIKAGMVMRKLPQYAADKFVTCNVIRNTEARFCNRKRCSDWLTPTVNHLAQTHLNVIKKISRYLPVTDIAIEVNRFAFMQMENPNASGVDFQNGPLRGFDDVKAAIREQQNGKCLMCKNDIEHFHHMVPLSKGSSDTIQNQVGLCPKCHAKAHTEQTFKKKLKDKKSGLLKKYGALSALNQSIPFICKDLLAEYGKEHVHFCTGKETSLIRTSLGYEKTKDNQMHEVDAYCIGLASLELEDIKLQSFVNTYKIKQFRRQDRSIIHHQTERSYYLDEQKIVTNRKPRFEQTGNALSDWYKKQVKACDKAKADKMLNTLKVKKSARSYNSEGRLMPGAVF

SEQ ID NO: 15862 - protein, 427 aa, Parasutterella sp.; identical to SEQ ID NO: 4250

SEQ ID NO: 15863 - protein, 412 aa, unidentified; identical to SEQ ID NO: 14932
  REGION 1..412: note = Fermentation metagenome

SEQ ID NO: 15864 - protein, 496 aa, Streptomyces sp.; identical to SEQ ID NO: 4777

SEQ ID NO: 15865 - protein, 406 aa, unidentified; identical to SEQ ID NO: 7944
  REGION 1..406: note = metagenome

SEQ ID NO: 15866 - protein, 447 aa, unidentified; identical to SEQ ID NO: 5309
  REGION 1..447: note = Human gut metagenome

SEQ ID NO: 15867 - protein, 515 aa, unidentified
  REGION 1..515: note = Human gut metagenome
MTHQERRHLMPEYIYVLGMDGRPQMPTTRRRHVQKLLNIGKARIAEHVPFTIQLLYKNDPVLQSVMLAEDPGRTNIGLAVLSLEGDLLLSAVTETRNKEIAKLMLDRRKNRRASRNGERKARQRLAKKFGTVIKAGMLMRKLPKYAADKFVTCNLIRNTESRFCNRKRPEGWLNPTVNHLVETHIHLIHKMQKYLPVTDIAFEVNRFAFLLLEDPSVSGVDFQNGPLKGYDNLKDAVYDLQDGKCLMCGHEIEHYHHIVPRAKDGSNTLGNIAGLCKCCHDKVHKDAEFKKKLKDCKKGLDQKYGALSALNQAIPFICKRLEEEFGKEHIFYCTGRDTARVRNSLGYQKTKESQLHEVDAWCIGLLAVGKAPESLPDFSQTHRIRQFRRRDRSLIQAQVERTYKMNGKTVAKNRKKRMDQRTDSLEEWYQKQVRSVGKKEAERKRSQLTVVKSYRRYNELGRIMAGAILIYQGKRYVLQNRITNGQYYHVFGSEKNIPAKKCMIEKHNEGLVFLS

SEQ ID NO: 15868 - protein, 416 aa, unidentified
  REGION 1..416: note = Human gut metagenome
MVYVLSQHGQPLMPTENHAKVRALLKHGKAKVIQGCPFTIQLLYESTTHTQKINLGIDAGSKTIGVSATTESKVLYESEVVLRNDIVELLSGRRALRRSRRNRKTRYRKPRLDNRRRPDGWLALSIRQKIKTHVTVVENVMKILPVTKIIVETASFDIQKIKNPEIEGAEYQYGEQLDFWNVREYVLFRDGHTCQCCKGKSKDNILNVHHIESRKTGGNAPNNLITLCETCHKAYHKGVITLPKEIHRGMRFRDAAFMGIMRWAFYDRLKELYTPFGVEVINTYGYITKNTRIEHGLPKEHYVDARCISGNPAAKPLGHYYFQKKVRCHNRQIHKNTILKGGIRKRNQASYEVKGFRLYDQVLWKGQKCFIFGRRSTGRMDLRLLDGTHINASVGHKNLKLLSMRKNYLIEQRKAG

SEQ ID NO: 15869 - protein, 427 aa, Moorena sp.; identical to SEQ ID NO: 4447

SEQ ID NO: 15870 - protein, 424 aa, Enterococcus sp.; identical to SEQ ID NO: 4034

SEQ ID NO: 15871 - protein, 456 aa, unidentified; identical to SEQ ID NO: 11534
  REGION 1..456: note = Human gut metagenome

SEQ ID NO: 15872 - protein, 460 aa, unidentified
  REGION 1..460: note = Human gut metagenome
MVAVVDLFGKPLMPTNEYRARRLLKQKKAKIFGYRPFTIQLTERKSTEIQPIELCMDTGYIHIGISAKSERHEYLGMQIDTLTDEKLKRDDKRQYRRQRRNRKRYRAPRFDNRRRKEGWIAPSLEHKKEIHIDAIQRICKVMPITDITLEMGNFDTHVLKAVEEGKPLPQGSDYQHGERYGIATLREAVFLRDGYKCQCCEKSVKDGAILHVHHIKYRSQGGTNRMSNLITVCDKCHTPKNHKPGGKLWNWKPKLAEFKGVSYMTSIRWTLYNEVTALLPNSSVHITYGARTKESRRKLDIKKSHVNDAYVMGLFCPKHRTKSVYFKKKRRNNRVLEKFYDAKYIDSRDGKKQSGQELFNGRISRNHRKDSENLHLYRKQKVTKGKRSIRNKHYPIQPHDILLYQKKKYENAGCHNNGSRVILLPEKKSVALKQLTIYQYAGGYYRVPYESNKKEERTGS

SEQ ID NO: 15873 - protein, 515 aa, unidentified
  REGION 1..515: note = Human gut metagenome
MTALEEKLSKTEYIYVLGFDGKPQMPTRRKRHVLKLLKTGRARIAEDIPFTIRLTYRNAPVLQPVTLAEDPGRTNIGAAVLSPLGGLLFAAVIETRNKEIKKLMADRKKSRQASRRGERKARQRLAKRYGSMVKSGMVMRKLPMYAADRFVTCKFIRNTQARFCNRKRCPDWITPTVQHLVQTHLNIIRKISRYLPVTDIAFEVNRFAFMHMENPEAMGVDFQNGPLKGYGDVKEAIRTQQHGKCLMCKKPIAHFHHIVPRSRGGSDTIQNLAGLCPECHTKVHTDTAFRKDFDEKKSGQLKKYGALSALNQAVPFICKKLLEEYGEEHVHFCGGLDTSLIRTALGFEKTKKNQMHEVDAYCIGLAALEVNEVETPAFDHTFQIRQFRRQDRSIIHHQTGRSYYQGKEKVAQNRKPGFEQKTTALSQWYKEQVRIHGEKEAEKLRSQLRVEKSCRHYNDMDRFLPGAVFLYEGKRYVLSGRITNGKYLRACGQGMKNFPAAECTFIRHNAGLVFI

SEQ ID NO: 15874 - protein, 555 aa, unidentified
  REGION 1..555: note = Human gut metagenome
VIEQKRDACVPSGDGTPGFFQSRDPAEQAPSLGRPFYRHAQAYTRCRDTVYPCGTAWHIYERRHLMPYIYVLGMDGKPQMPTTRRRHVQKLLDTGRARIASHVPFTIQLLYKNNPVLQPVTLAEDPGRTNIGLAALSLKGDLLFSAKVETRNKEIAKLMEKRKQCRRASRNGERKARQRLAKKFGTMLKAGLLMRKLPQYAADKFITCHVIQNTQARFSNRRRPDGWLTPSARHLVQTHVNLVHLMQKYLPVTDIGLEVNRFAFMQLEDPSISGVGFQNGPLKGFDDLHAAVRDLQDGKCLLCKKEIEHFHHIVPRSRHGSNTIGNIAGLCTKCHEKVHKDEKAGKRLKDKKKGLDKKYGALSILNQAIPFICKELETEFGKEHVHYCTGRETSLVRRSLGYHKTKEEQYHEVDAWCIGALSLDSIPEKTPAFEEVHTIMQFRRQDRAIINAQTSRTYKLDGESVAWNRKKRTDQKNDSLEDWYLKQVQIHGQKEADRMRSHLTVKISKRRYNNPERMLPGAVFLYKGKRYVMKGQHCNGVYLQAVGMGSKDFPV

SEQ ID NO: 15875 - protein, 403 aa, unidentified
  REGION 1..403: note = Clostridiales bacterium UBA3578
MPTTPCKARKLLKQGKVKVVKREPFTIQLLYATGETKQDITLGVDAGSKIIGLSATTDKQELFSAEVELRNDIVDLLSTRREFRRTRRNRLRYRKPRFLNRVYSKNKGWLAPSVENKIQTHLKIISKIHEILPISKIIIEVASFDIQKIKNPDIEGKQYQQGEQLGFWNVREYVLWRDGYKCQGKKGCKNKILNVHHIESRKTGGNSPSNLITLCESCHKDYHAGKLKLNLKRGQSFKDAAFMGIMRWTFYNKLKEIYSNVKITYGYITKNTRIQNNLPKEHRIDALCISGNPNVKRLDYWYYIKQVRRHNRQIHKANILKGGKKKLNQAPYLVKGFRLFDKVKYKGEECFIFGRRSSGYFDLRKLDGTVIHRSANCKDLKLISKSKTLLWERRIDVAVSSHD

SEQ ID NO: 15876 - protein, 451 aa, Moorena sp.; identical to SEQ ID NO: 2390

SEQ ID NO: 15877 - protein, 469 aa, Moorena sp.; identical to SEQ ID NO: 3785

SEQ ID NO: 15878 - protein, 323 aa, unidentified
  REGION 1..323: note = metagenome
TRYRAPRFDNRIRTKRKGWLAPSVENRINAHLSRIEAVLRLLPVTKITVETASFDLQLLKNPDISGKEYQEGEQLGFWNIREYVLCRDGHVCQHCYGRSKDPVLNVHHLESRRTGGDSPDNLLTLCETCHKALHRGEITLKTKRGQSFRAETFMGIMRWEVLNRLKASHSELKVHNTYGYLTKHARIENGIAKSHGADAFCIAGNLGAERLGEFFFQKQTRRNNRQIHKLSILKGALRKRNQAPFEVKGFRLFDKVSCKGEEGFIFGRRSSGYFDVRKLDGTRISAGISYKKLHLLEKRQTYLIEIRKEEAFPPLPEGRGLRA

SEQ ID NO: 15879 - protein, 440 aa, Moorena sp.; identical to SEQ ID NO: 6580

SEQ ID NO: 15880 - protein, 515 aa, unidentified; identical to SEQ ID NO: 4456
  REGION 1..515: note = Human gut metagenome

SEQ ID NO: 15881 - protein, 311 aa, Microcoleus sp.; identical to SEQ ID NO: 8988

SEQ ID NO: 15882 - protein, 406 aa, Desulfosporosinus sp.
MAYVVNKDGSPLMPCTSVIARLLLKQGKAKCIRKVPFTIKLSYQTTNYAQDITLGVDTGSGTIGSSVIKDNGDVIYMSQIEIRNDISDKLKQRSKYRRNRRNRKTRYRKVRGLNRKKSIKKDRFSPTMTSKIKSHVKEIKFVKTILPISKVILETATFDPHALKNPAVLNNKWLYQKGINYGFANTKAYVLDRDNHTCQHCKGKSKDSKLEVHHIVFRRNGGSDESSNLITLCKTHHDHLHSGNITLKGGKTKGHLKHATQMNSIRVQLLSLLPSAEETFGFVTKEHRQLLNLPKEHHMDAVVIASQGNAVNFKTNVILFKRCICDGDYQQSKGVRSEQRIPTGKIQGFRKFDKVKYLGSEYFIKGRMSTGYAILMDSKGIKVTLKPIPKFSKMERIQARKSWIIS

SEQ ID NO: 15883 - protein, 465 aa, unidentified
  REGION 1..465: note = Human gut metagenome
MSTCVCVLSNNGERLMPTFRLGKVRHLLKDGKAKIVKHHPFTIQLLYDSKTNTQPIEICEDVGYNYIGISVKSQSHEYVSAQYDTLQDEKACHDSCRKLRRTRRNRLRYRKPRFDNRKRSEGWLAPSLKHKKELNVNVVKMYCAVMPITHATVEVGSFDTMLVKAIEEGKATPESADYQKGPRYKLATLREAVFYRDNYTCQVCGRKANEGAILHVHHMFYWKGRHGNSLSELITVCEKCHTPANHQKGGKLFGFGEDIKFANLSGAAFMNTVRWQIVNVLYAAFGKPFVTFTYGAMTKEKRIALHLEKSHNNDAYAMGSFHPVNRCAFEHYEKVKRNNRILEKFYDSQYIDTRTGELTNGKSLFNGRISRSHKKDSENLHKYRGKRICKGHRALRRKKLALNPGDLVSLNGEILVVHGTHTKKNGSVNVEFKTPSRGGKKSASLKKLKIVKTSNLMHSAWTKVS

SEQ ID NO: 15884 - protein, 418 aa, unidentified
  REGION 1..418: note = gut metagenome
MVYVLSKPGQPLMPTENHAKVRVLLKQQKAKVIANCPFTIQMLYNSTDYAQPISLGIDAGSKHIGVSATTENKVLYESDVTLRNDIVDLLSARRTLRRARRNRKTRYREPRFMNRTHSKKQGWLVPSIRQKIDSHMTVVDKTCKLLPITNIVVETASFDIQKIKNPDISSIDYQQCEQLGFWNVREYVLFRDGHKCQCCHGKSKDPILNVHHIESRRTGGNAPNNLITLCETCHKGYHKGTVILPKTIHRGMRFKDAAFMGIMRWAFYNRLKELYASKHISVSMTYGYITKNTRIEHHLPKEHFVDARCISGHPDAIPPKEVFYQKKVRCHNRQIHKLTINKGGIRKRNQAVYEVKGFRLYDTVLWKGKKCFIFGRRSTGYMDLRLIDGIHINASAGYKNLKLLRKQSNYLIEQRKVS

SEQ ID NO: 15885 - protein, 406 aa, unidentified; identical to SEQ ID NO: 3498
  REGION 1..406: note = metagenome

SEQ ID NO: 15886 - protein, 413 aa, unidentified; identical to SEQ ID NO: 2636
  REGION 1..413: note = Human gut metagenome

SEQ ID NO: 15887 - protein, 477 aa, Lactobacillus sp.
MASMDNIVEGQQRNSALGLPMRIAAGSMIAGKGGKMEYENANRVFLLNKDGKPLMPCRPRKARLLLKSGKAFVVKKYPFTIQLKYGSYGYKQKVSLGVDTGQRHIGFAVTSQDKVLHQSEVELRQDVHKNLYTRRVYRRGRRNRKTRYRQARFLNRVHGKRDGSWLPPSVKGKASHNIAWIKRYLAVLPNPDLHIEVGKFDMAKMVNPAISGKQYQEGSLHGWKNYEYYVLARDEYTCQLCHKHGEGVKLVVHHIVYRSQGGTDRVDNLITLCTNCHTTKNHQPGGKLYKWMKAKKKVTKQLKGATFMNILRKRLMTAFPEASCQYGYQTFFDRKKFNLPKGHFTDAIAISGIKSVGQMPETVAMISQFRKKKRSLHEATARKGRKEPNRTSKRNAKNTKYARGLWLNDYVHVIGTNLRGYVQSYLSKGAYVRLSDGLDNYVIKDGKNYISTKLCKLITHNGNWQKAEQKLLLYEFK

SEQ ID NO: 15888 - protein, 420 aa, unidentified; identical to SEQ ID NO: 11268
  REGION 1..420: note = Human gut metagenome

SEQ ID NO: 15889 - protein, 431 aa, unidentified
  REGION 1..431: note = gut metagenome
MPNKVYVINKHGRPLMPCSPAKARHLLDAGKAKVKKRTPFTIQLVYGSSGYTQEVILGVDAGSKTIGMSASTTKEELLSAEVKPRNDVVDLLSTRREFRRARRNRKTRYRKPRFDNRVRSKHKGWLAPSVEVKIQEHITSIKRVCRILPVSKVVIETAEFDLQLLKAIEEGKPVPQGEDYQQGEMYGHYNVRQYVLWRDGYTCQCCGAHATKKKEVRLHVHHLESRKVDGDAPDNQVTLCESCHEKLHKGLIAEKDFKKRKRKSTRDATFMGIMRKTLMQRLCSELPIPVIETRGYITKATREKLLVLPKSHTNDALAIAQGKQGFNVGYLPGIVQINKIYTIRPVRHHNRQLHKATILKGGIRKSNQTEKYVFGYCLFDKVQFNGQDCFIWGRRTTGIFTIKTINGKMIKDGISFKKLKPVEKSTGYLIA

SEQ ID NO: 15890 - protein, 428 aa, unidentified; identical to SEQ ID NO: 3484
  REGION 1..428: note = Human gut metagenome

SEQ ID NO: 15891 - protein, 417 aa, unidentified
  REGION 1..417: note = Human gut metagenome
MPCSPAKARLLLKERKAIVKRRTPFTIQLTIATGEAKQPVTLGVDSGYKHIGLSATTEQAELYASEVELRQDITDLLSARLALRRSRRSRKTRYRAPRFDNRVASKRKGWLAPSVENRITAHMSRVEAVMRVLPVTAITVETAAFDTQLLKDPDITGEAYQQGEQLGFWNVREYVLFRDGHVCQHCRGKSKDPILNVHHIESRRTGGDAPNNLITLCETCHKAFHRGEIELKVKRGKSFKAETFMGIMRWPLFERLKKSHPELSVRNTYGYLTKHKRISYGIAKSHCADAYCIADNLGAKRLEGFFFQKQTRKHSRQIHKLSILKGGLRKKNQAPYEVKGLRLFDKVICKGEEAFIFGRRTSGSFDVRRLDGTRISAGINYKKLRLLEPRTTYLTEFRKEAALPPLHECRGFRAEFL

SEQ ID NO: 15892 - protein, 442 aa, unidentified; identical to SEQ ID NO: 4522
  REGION 1..442: note = Human gut metagenome

SEQ ID NO: 15893 - protein, 443 aa, Anoxybacillus sp.; identical to SEQ ID NO: 2702

SEQ ID NO: 15894 - protein, 428 aa, unidentified
  REGION 1..428: note = Human gut metagenome
MNLFMVYVISQDGKPLMPCSNPIARLLLKQGKAKVKKREPFTIKLTYETTNYVQDLTLGVDTGSGTIGTAVGKDNGDIVYMSEVTVRNDITGKMTQRAKYRRNRRNRKTRYRKSRWLNRANSIKKDRFSPTMQSKFHSHVKEIEYIKSILPITEMVFETGQFDTHLMKNPSLSNPKVKHWGYQKGTNYGFENTKVFVLNRDNYTCQCCKGKHKDSKLEVHHIVFRSQGGSDEESNLITLCHTCHKDLHSGKINPKLSGKVKGNLKYATQMNSIRKQLFRLYPNAIETFGYVTKANRLHLGVDKEHYYDACTIATQGNAFNVKSNLYKKKCVSDGDFQKTKGIRSEQPVVTDKICGFRKFDKVRYFGNDYFIKGRMSTGYAILMDIDGNKIDFSAMPKGYKTPKMVNLKRLEARSTWMITTVEVTPNIA

SEQ ID NO: 15895 - protein, 411 aa, Vibrio crassostreae
MFVFVLNKNGEPLMPCKPQKARVLLKRGDAKVIKRTPFTIKLIGGSSGYKQPLVAGMDTGSKTVGCAVVGLGKVIYQSQVALRQDVSKKMKLRAMYRRSRRGRKCRYRPARWLNRSSMRATGRLAPSLKSKLDSHLRERDFVESILPISEWRVETASFDIHRICNPEVTGAGYQNGQQKDFYNVKAYVLHRDGYQCQSGRKGKHSNKLHVHHIIFRSKGGTDTPSNLLTLCEMCHNDLHSGQFELKAKKSRTKYATEVGIIKSRLKSKWSFIETFGYETKFKREQILGLPKEHYLDAVAICLEDGEYVEQNPTVYFKRHVAKGDYQLTKGARSEKRIPVGKLFGLKKHDLISTPQGTGFVKGKRSSGYFALETITGGKVHASVNVKKNTVRLSARTTTLIQVYGGGNSPHS

SEQ ID NO: 15896 - protein, 442 aa, unidentified
  REGION 1..442: note = Human gut metagenome
MGEGLQPDASPSRQNLRVFVLNKRGQPLMPCSPAKARLLLKEKKAVVMRRTPFTIQLTQATGETVQPVKLGVDAGSKFIGLSASTDKAELYASEVELRTDVVDLLSSRRELRRARRNRKTRYRAPRFNNRVHSKNKGWLAPSVENKINAHLSRVDAVRQLLPVTKIVVETASFDIQKIKNPDIEGADYQWGEQLGFWNVREYVLFRDGHRCCHCHGKSKAPILNVHHLESRKTGGDAPNNLITLCETCHKAYHAGKIVLKAKRGQAFRDAAFMGIMRWTFFNRLKAQCPELDVRNTYGYLTKNTRIRHGLDKSHHTDAFCIAGNLGAKRLGEYFFQKQTRKHNRQIHKMSILKGGVRKRQQAPYEVKGFRLFDKVRYGSREAFIFGRRNSGYFDIRLLKGEKVSPAISYKYLQLLESRKTFLTQLIKEDAIPPATEVAGFLA

SEQ ID NO: 15897 - protein, 418 aa, unidentified; identical to SEQ ID NO: 12237
  REGION 1..418: note = Human gut metagenome

SEQ ID NO: 15898 - protein, 416 aa, unidentified
  REGION 1..416: note = Bioreactor metagenome
MLVYVLNKHGKPLMPCKPSKARKLLKQGKAKITQREPFTIQLIYGSSGYKQPITLGIDAGSKFIGVSATTEKQELFSAEVELRNDIVQLLSERRQYRRSRRYRKTRYRKPRFSNRVRSKNKCWLAPSIENKIQTHLKIVEKVHKILPITKIITEVASFDIQKIKNPNIEGVEYQQGEQLGFWNVREYVLWRDNHTCQICKGKSKDNRLNVHHIESRQTGGNAPNNLITLCETCHNKYHKGELNVKLKRGQSFRDTAFMGIMRWTFYNRLKNIYPNVELTYGYITKNTRITHKLPKSHRIDALCISGNPKAKQLDYWYYIKQVRKHNRQIHKAKILRGGIRKLNQAPYLVKGFRLFDKVKYKGQECFIFGRRSSGYFDLRKLDGTVIHRSASYKDLKLLSKRKTLLWERREGVSSPT

SEQ ID NO: 15899 - protein, 475 aa, unidentified
  REGION 1..475: note = Human gut metagenome
MVAVVTSTGKPLMPTSAYRARKLLKKGRAVIFKYRPYFTIQLVDRADGEVQEVEYKSDTGSVHVGISVCTEKKELLSEQRDLLENEPEHHNDRKKNRRTRRNRKRYRKPRFDNRKKKPQEGHEKWLPPTLLHKMEVQVRLFREFCRVVPVTSACFEMGKFDTQALKAVSKGEPVPEGEGYQKGERYGTDTLRAAVFLRDGHTCRFCGRSVKDGAILHVHHVGYWKGDRTDRLANLASACEQCHTPANHGKNGILYGKEPEFKTLKDASYMTSVRWIMLDEIKKAAPGVRVSVTYGVTTKRKRQELHLPKSHVNDAFSMASFHPQKRSDTEYWKKIPRHDRVLQRFYDAVYLDTRDGSEKKGSELSNGRISRNHKKDSENLHRYRGYKVSKGHNSIRRGASSLKPGSIVMYKGEKMTVHGTHTRYVTDKDGKTVKKVNVQFTRPASDGKKSASLKKCTPVSRVYNTGWKRYWPDKK

SEQ ID NO: 15900 - protein, 451 aa, Moorena sp.
MVYVINFEGKPLMPTTNAKARKLLNQKKATVKKVNPFIIQLLYKTDTEYIQTITLGIDSGYLNIGFSAITDSKELIVGEVKLLQGMKDRLLEKSQYRRIRRQRLRYRKPRWNNRKIRQGWLAPSLQHKLNTHLKFIDYLNSILPIRNIVLEVANFDIQKIKNPDISGVEYQQGEQMGFWNVREYVLHRDGHKCQNPNCKNKSKEQILEIHHIKYKSEGGSDAPSNLITLCNKCHTSPNHKKGKFLYDWCENGKKVRGFRDATFMSMIRWYLLEQLKEKYTNIKATYGYLTKNHRIEHGIEKSHFNDAFAIAKGVNQVRNLEIFKVEQSRLNNRSLEKFYDAKYIDNRTGEKVSASELNCGRRTRNKNLNSENLRMFRGQKISKGQRRIRKQKSLYQPNDLIKYNGNVYTVKGSQNEGKYIALKEIKKVPNVELIKPYIFKKGLNWSHGLSW

SEQ ID NO: 15901 - protein, 399 aa, unidentified
  REGION 1..399: note = Human gut metagenome
ARLLLKQQKACVVRRTPFTIKLLYGSAGYKQPITLGVDAGSKHVGLSASTEKRELYREEFAPRNDVVELLSTRRQNRRSRRNRKTRYRAPRFDNRVHSKHKGWLAPSVEVKIQEHITIIKRICKILPISLVRVETAEFDTQRLKAMLAGKPLPVGTDYQLGEMYDEYNVRQYVLKRDNYTCQCCGAHTTAKKLVKLHVHHLESHKTGGNAPSNLITLCTTCHKNLHKGKVTLDGKERGKPLRDAAFMGIMRKTLMARLKKELPIPVQGTYGYITKMRREQNDIKKSHTNDARCISKHPLAEPCSVCYRTKAIRHHNRQTHKANFSKKGIRKRSQMPYLVEGYRLWDKVLYKEQECFVSGRRSSGSFTLKKLDGTSVSKGVTFKKLRLLEPATNYLIERM

SEQ ID NO: 15902 - protein, 499 aa, unidentified
  REGION 1..499: note = Human gut metagenome
MRYVYVLDVDGKPLMPTCRFGKVRRMLKSGQAKAVDTLPFTIQLTYKPRTRILQPVTLGQDPGRTNIGMAAVRFDGKELGRFHCLTRNKEIPKLMADRMATRRASRRGERLARKRLARKLHTTAKHLEGRMLPGCSEPIAVKDIINTESRFNNRLRPEGWLTPTATQLLRTHINLFVRLAKILPVTDVAIELNKFAFMQLDNPEMKKREIDFCHGPLCGTGGLEAAVKEQQDGKCLLCGKESIGHYHHIVPRSRRGSNTIANIAGLCPKCHELVHKDADTAERLTEMKTGLTKKYGGTSVLNQIIPKLVETLADLFPGHFHVTNGWNTKEFREKHHLEKDHDVDAYCIACSHLKPEETLVETEPFEILQFRKHNRAIIHHQTERTYKLDGVTVAKNRKKRMEQKTDSLEDWYVDMAKEHGKTQADAMRSRLTVIKSTRYYNTPGRMMPGTVFLYEGKRYVMTGQITNGKYYRAYDQEKRNFPAVKVRILTKNTGLVFVA

SEQ ID NO: 15903 - protein, 419 aa, Anoxybacillus sp.; identical to SEQ ID NO: 5328

SEQ ID NO: 15904 - protein, 512 aa, unidentified; identical to SEQ ID NO: 7636
  REGION 1..512: note = Human gut metagenome

SEQ ID NO: 15905 - protein, 424 aa, unidentified
  REGION 1..424: note = Human gut metagenome
MRVFVLNMRGEPLMPCSQRKARLLLKSNKAVIYKYNPFTIQLAYATGEAKQGCRIGVDTGSKHIGLAVTSEDKVMWKAEVELRQDVKSKIDKRRMYRGNRRYRKTRYRKPRFLNRKREPKWLPPSLQNRVNHTFHWIDVLSSLVPNPNLHIEVGKFDTAKMINPEINGVDYQHGQTYGFYNERYFVFARDNYTCQCCGKSKDKILNTHHIIYRSNGGTNRVDNLITICTDCHTSQNHKKGGILYEWQEQHKKVTQYKEPPFMNTLRRRIFTAYPDAKITYGSETTPKRKDMGLNKTHYNDAIIISGINDINENDEEWLLIKQFRKKKRSLHEATARKGRKKPNSSQVRNSKNTPYYKGLYLNDKVVVFGKSGYITGFTSDGAYIKDGDDNYITLPNKNYKQVGISKMKFECHNNNWQYIVKNAV

SEQ ID NO: 15906 - protein, 427 aa, Moorena sp.
MAVFVLDRRGRPLMPCSEKRARLLLARGRARVHRVVPFVIRLTDRLAEDSAYQSLRVKLDPGSKVTGVALVRMFDEGVAVLNLFDLVHRGRQISEALTARRAFRRRRRSANLRYRAPRFNNRTRREGWLAPSLQHRVDTTMSWVRRLMRWAPVSALSMELVRFDMQAMQKPEISGVEYQQGELLGYEVREYLLEKWGRQCAYCDDEGVPLQIEHIVARARGGSNRVSNLTLACEPCNCRKGSLDVREFVKDEQRLKRILARAKAPLRDAAAVNSTRWALASALKETELAVELASGGRTKWNRTRFHIPKAHALDAVCVGEVETVQGWKRPTLEVKCAGRGSYQRTRLTAQGFPRGYLMRTKRVHGFQTGDRVKAVVPSGKKVGTYVGRVAVRATGSFNIQTSQGVVQGISHRHCKVIQRADGYGYSH

SEQ ID NO: 15907 - protein, 515 aa, unidentified; identical to SEQ ID NO: 13314
  REGION 1..515: note = Human gut metagenome

SEQ ID NO: 15908 - protein, 406 aa, unidentified; identical to SEQ ID NO: 3157
  REGION 1..406: note = Human gut metagenome

SEQ ID NO: 15909 - protein, 423 aa, unidentified; identical to SEQ ID NO: 3951
  REGION 1..423: note = Human gut metagenome

SEQ ID NO: 15910 - protein, 456 aa, Halomonas sp.; identical to SEQ ID NO: 2773

SEQ ID NO: 15911 - protein, 431 aa, unidentified; identical to SEQ ID NO: 2952
  REGION 1..431: note = Human gut metagenome

SEQ ID NO: 15912 - protein, 424 aa, unidentified; identical to SEQ ID NO: 8578
  REGION 1..424: note = Human gut metagenome

SEQ ID NO: 15913 - protein, 412 aa, unidentified
  REGION 1..412: note = Human gut metagenome
MVYVISSNGQPLMPTENHAKVRILLKTQKAKVIKKCPFTIQLTYNSTNYTQPVSLGVDAGSKHIGLSATTKDKVLFESDVELRNDIVDLLSARRQNRRARRNRKTRYRKPRFSNRRRKDGWLSPSVQSKVDTHLTAVRKVHEILPVSKIIVEVASFDIQKIKNPAISGADYQKGEQMGFWNVREYVLFRDGHECQCCHGRSKDMILNVHHIESRKTGGDAPNNLITLCESCHTGYHKDTVKLPKTIHRGMSFRDACFMGIMRWAFYNKLKEIYSNVSLTYGYITKTIRIENDLPKNHCIDARCISGNPLASSDGTVYYQKKVRDHNRQIHKNTILKGGIRKRNQAPYEVMGFRLYDKVRWKGKNCFIFGRRSTGRMDLRLLNGTKVNSSVGYKNLRLLEMRKNMLIELRKVV

SEQ ID NO: 15914 - protein, 462 aa, unidentified; identical to SEQ ID NO: 9356
  REGION 1..462: note = Human gut metagenome

SEQ ID NO: 15915 - protein, 408 aa, Sulfobacillus sp.
MFVYVLNKHGNPLIPCSPRKARILLKAGKAIVVNRTPFTVQLLYGSSGYKQEVSLGVDAGTKPVGLSATTEKQVLYEAEGELCTDIPAWLAMRREFRRNRRPRKTRYRPARFPHRRRKAGGLPPAIQHQVATHVKVIKQVTKILPIMGITVEVAQFDTPLLKNPEVSGAAYQHGEQMGFWNVREYVFYRDHHTCQGCQGKSGDKILHGHHRESRKTGGDAPNNLVTWGETCHHKIHQEGLEDQIQRKTASLRDATQMTILRWFIYHGITAEYPQAKLTDGYITKNTRMTHGLAKSHIVDARCISGNPDAIPIAQTFLIKQVRGQNRQLHKVTILKGGVRKANKAPRHVLGFPLFDKVCVTTVGNVSSLEGVPAVTLICDYSMGQKCLPGSVTRNSRGLRQPRHFEQNH

SEQ ID NO: 15916 - protein, 430 aa, Moorena sp.; identical to SEQ ID NO: 3328

SEQ ID NO: 15917 - protein, 431 aa, unidentified
  REGION 1..431: note = Human gut metagenome
MPNKVYVINKHGRPLMPCSPAKARHLLDAGKAKVKKRTPFTIQLVYGSSGYTQEVILGVDAGSKTIGMSASTTKEELLSAEVKPRNDVVDLLSTRREFRRARRNRKTRYRKPRFDNRVRSKHKGWLAPSVEVKIQEHITAIRRVCGILPVSKVVVETAEFDLQLLKAIEEGKPVPQGEDYQQGEMYGHYNVRQYVLWRDGYTCQCCGAHATKKKEVRLHVHHLESRKVGGDAPDNQVTLCESCHEKLHKGLITAKDFKKRKRRSTRDATFMGIMRKTLMQRLCSELPIPVIETRGYITKATREKLLVLPKSHTNDALAIAQGKQGFNVGYLPEIAQIDKICTIRPVRHHNRQLHKATILKGGIRKSNQAEKYVFGYRLFDKVQFNGQDCFIWGRRTSGYFVVKTIDGKVIHNSASFKKLRLVERASNYLIA

SEQ ID NO: 15918 - protein, 430 aa, unidentified
  REGION 1..430: note = Human gut metagenome
MPKVYVLNRHGRPLMPCTPAKARHLLDAGKAKVRHRTPFTIQLLYGSTGYTQEVILGVDAGSKTIGLSAATETEELFSAEVKPRNDVVELMSARRQFRRARRNRTTRYRKPRFDNRVRSKHKGWLAPSVEVKIQEHMTAIRRACAILPVSKVVVETAEFDLQLLKAVAEGKPVPQGEDYQKGEMYGHYNVRQYVLWRDSYTCRICGMHGSVRKGVPLHVHHLESRRVGGDAPDNLVTLCTACHDKLHKGIIMAADIKKRKRRSTRDATFMGIMRMTLLRRLREQLPVPVVETRGYITKATRENLLVLPKSHTNDALAIAHGPQGFRAEYLPNIRQADRLYTIRPVRHHNRQLHKATILKGGVRKANQAEKYICGFRLYDKVLYNGIECFVWGRRTSGSFLLRQLSGEKVKDGVSYKHLKLLERSQSYLVA

SEQ ID NO: 15919 - protein, 456 aa, unidentified
  REGION 1..456: note = Human gut metagenome
MSTCACVLSKNGERLMPTIRLGKVRRLLKDGKAKIVKHHPFTIQLLYDSKTNTQPIEICEDVGYNYIGISVKSKSHEYVSAQYDTLQDEKEHHDDCRKYRRTRRNRLRYRKPRFDNRKRSEGWLAPSLEHKKQLNIRLIERYVSVIPITRATVEVGSFDTMLLQAIQKGESKPEGVDYQKGPRYNLATLREAVFYRDNYTCQVCGRKIADGAILHMHHMFYWKGRHGYQLDELVTACEKCHTPANHQKGGKLFGFGEDKEFANLSGAAFMNAVRWQIVNALYATYGKEFVTITYGAMTKEKRIALQLEKTHSNDAYAMGDYYLAHRCVFRHYQKRRRNNRVLEKFYDATYIDARTGNKAKGKELFNGRINRNHKKDSENFHKYRSKKVSKGRRSIRRQRYAIQPYDTVRLEGKTYITSGCHNKGTRLLIPANGKSKSVAISKVQVVCHAGAWIQII

SEQ ID NO: 15920 - protein, 408 aa, unidentified; identical to SEQ ID NO: 6548
  REGION 1..408: note = Human gut metagenome

SEQ ID NO: 15921 - protein, 417 aa, unidentified
  REGION 1..417: note = metagenome
MIYVRSKEGSVLMPTERCGKIGYLLRHGKAHVVSRVPFVVQLDYDSTTYTQDVSLGIDAGSKHIGVSASSEKKEMLAAQVELRSDIVNLLSTRRELRQTRRNRKTRYRKARFDNRKKKDGWLAPSVEQKIESHLKVIRLVHKILPITKATIEVAQFDAQKIKNPYIKGDEYQQGEQMGFWNVREYVLARDGHKCVHCKGKSKDPILNVHHLESRKTGGNSPSNLVTLCETCHKAYHRGEFDLKIKRGSSLRDAAVMNIMRWAVYERAKAEFGNVHLTYGYITKHTRIENGIAKTHAADAFCIAKNVHAMRLSSFFMCRCVPRHTRALHVANPKKCGIRRNTIASHKIGKSNFQRFDMVRWMGKECFIFGSTHGRPVLRDIDGLQVANQPSVNIKTIKFLKRLKNNILMEEKNFRRLN

SEQ ID NO: 15922 - protein, 423 aa, Moorena sp.; identical to SEQ ID NO: 2845

SEQ ID NO: 15923 - protein, 430 aa, Moorena sp.; identical to SEQ ID NO: 3328

SEQ ID NO: 15924 - protein, 413 aa, unidentified; identical to SEQ ID NO: 12223
  REGION 1..413: note = Human gut metagenome

SEQ ID NO: 15925 - protein, 426 aa, unidentified; identical to SEQ ID NO: 5945
  REGION 1..426: note = Human gut metagenome

SEQ ID NO: 15926 - protein, 515 aa, unidentified
  REGION 1..515: note = Human gut metagenome
MTTLEERLSKTEYIYVLGFDGKPQMPTRRKRHVLKLLKTGRARIAEDIPFTIRLTYRNAPVLQPVTLAEDPGRTNIGAAVLSPLGDLLFAAVIETRNKEIKKLMADRKKSRQASRRGERKARQRLAKRYGSMLKSGMIMRKLPMYAADKFVACKFIRNTQARFCNRKRCTDWITPTVQHLVQTHLNIIRKISRYLPVTDIAIEVNRFAFMHMENPKAVGVDFQNGPLKGYDDVKEAIRTQQHGKCLMCKKPIAHFHHIVPRSRGGSDTIQNLAGLCTEFHTKVHTDTAFRKDFDEKKSGQLKKYGALSALNQAVPFICKKLLEEYGEEHVHFCRGLDTSLIRTALGFEKTKKNQMHEVDAYCIGLAALEVNEVAAPAFDHTFQIRQFRRQDRSIIHHQTGRSYYQGKEKVAQNRKPGFEQKTTALSQWYKEQVRIHGEKEAEKLRSQLRVEKSCRHYNDMDRFLPGAVFLYEGKRYVLSGRITNGKYLRACGQGMKNFPAAECTFIRHNAGLVFI

SEQ ID NO: 15927 - protein, 420 aa, unidentified
  REGION 1..420: note = Human gut metagenome
MQYVYVLNKHGEPLMPCSPRKARLLLKQKKAYVIKRTPFTVKLLYGSAGYKQPVTLGVDAGSKHIGISATTEKHELYREEATPRNDVVDLLSARRAFRRSRRNRKTRYRAPRFNNRVHSKHKGWLAPSVEVKIQEHITLIKHACRILPVTLVRVETAEFDTQRLKAMLEGKPLPVGTDYQLGEMYDEYNVRQYVLKHDNYTCQCCGAHSTKTKGVKLHVHHIETRRTGGNAPNNLITLCKACHKALHAKKVTLDGKKRGKPLKDAAFMGIMRKTLMERLRKELKIPVQGTYGYITKYLREKNGIPKSHTNDARCISKNPLAIPCDTCYYTKAVRHHNRQLHKATILKGGIRKANQAPYIVKGYRLWDKVAYNGTECFITGRRTSGYFALKELDGTVVSNSISYKKLRLLEAATNYIIERK

SEQ ID NO: 15928 - protein, 453 aa, Nostoc sp.; identical to SEQ ID NO: 3348

SEQ ID NO: 15929 - protein, 375 aa, unidentified
  REGION 1..375: note = Human gut metagenome
MQYVYVLNKHGEPLMPCSPGKARLLLKQQKAHVVKRTPFTIKLLYGSTGYKQPITLGVDAGNKHVGLSASTEKREFYCEEFTPRNDVVDLLSTRKQSRRSRRNRKTRYRAPRFDNRVHSKHKGWLAPSVEVKIQEHITVIKRICRILPVALVRVETAEFDTQRLKAMLEGKPLPVGTDYQLGEMYDEYNVRQYVLKRDHYTCQCCGAHTTTKKTVKLHVHHLESRKVGGNAPSNLITLCTTCHDALHKGKVSLDGKERGKPLRDAAFMGIMRKALMARLREELPIPVQGTYGYITKMRREQNDIKSHVNDARCISKHPLAEPCSVCYRTKAIRHHNRQTHKANFSKGGIRKRSQMPYVVEGYRLWDKVLYKGQEC

SEQ ID NO: 15930 - protein, 421 aa, unidentified
  REGION 1..421: note = Human oral metagenome
MFVYVLDENGQPLMPTSRFGKVRRLLRDKKAKVVKRCPFTIKLLYEPETKIVQDIVLGVDTGSKYVGVACVGNDKVLYQSQVELRDDIKRKMDSRRMYRKSRRYRKTRYRKPRFLNRGNSTKKDRYCPTIISKFHGHEREIEFCKKILPIKDTILETGKFDTQLMEKPWLREHKWAYQKGVNYGYANAREHALVRDNYTCQCCGKKNCRVEAHHIVFRSKNGSNDLENYITLCEDCHKAVHLGEIELKLNGKRKSDLRHATQMSIIRSMLLKKYPDAIETHGFVTKANRENLNIDKEHYLDACVIASGGLAFEPSDILYRKRCVPTQNRCLSQGIRAEKKIPTGKVHGFKRYDKVKYFGVICFVSARRTRGDFVLMGIDTNTIDFRDIGGVQNPSYKFIKRLNARRSVLCMLQRIEKGGGN

SEQ ID NO: 15931 - protein, 338 aa, Moorena sp.; identical to SEQ ID NO: 4723

SEQ ID NO: 15932 - protein, 419 aa, unidentified; identical to SEQ ID NO: 6355
  REGION 1..419: note = Human gut metagenome

SEQ ID NO: 15933 - protein, 421 aa, unidentified
  REGION 1..421: note = Human gut metagenome
MDGDPLDPTHPAKARILLKQKKAKVIRRLPFTIKLTYEIKNPKTQKYTLGVDTGFSKLGTAVINEKDEVVYLSEVTLRNNIKNIMQNRSQNRRARRNRNTRYRKPRWLNRKNSIKEDRYSPTMISKFNSHMKEIKFIKSILPISTINLELAKFDNHALNNPLVKYNKWMYQKGLKFGFANTKAFILNRDKYTCQYCKTKQGTLEVHHIIFRSNGGSDEPDNLITLCRNCHKELHLGKFSLKNTKGLKRKNKQAAATQMNILRSMIIKKFNLSFTETYGFITKEVRQYLNLPKEHYFDGVAICYCDKVNKSKVFFKTNLVNLKRCISKGSYKRQKFTRGKMINLPKGKMQGFKRYDTVEYFGKRYFIMSRMSSGFAKLADINLNIIDFSFLGKGRKTPKLKNLKRISSRKSWITDQKIIQNI

SEQ ID NO: 15934 - protein, 415 aa, Bacillus sp.; identical to SEQ ID NO: 2431

SEQ ID NO: 15935 - protein, 428 aa, Enterococcus sp.; identical to SEQ ID NO: 4335

SEQ ID NO: 15936 - protein, 431 aa, Escherichia coli; identical to SEQ ID NO: 4170

SEQ ID NO: 15937 - protein, 524 aa, unidentified
  REGION 1..524: note = Human gut metagenome
MEILRIDWKDICPTGQSGLPQKELFMRPVYVLDMNGKPLMPTCRFGKVRRMLKSGEAKVVDTLPFTIQLDRPTKTHVVQSVTLGCDPGRTNIGLAAVRSDGTDLYRSHCETRNKEIVDLMDTRRAARRASRRGERLTRKRLAAKHETATTFPDGRKLPGYEKPIMLKDIINTEARFNNRVRPAGWLTPTATQLLRTHLNLIKRISRILPVSDIALEINKFAFMQLDEPDKNKWNIDFQHGPLYGTGGLKATVRQLQDDTCLLCQENVIEHFHHLIPRSKRGDNTINNIAGLCQRCHEAVHKSADTAEKLSTLKKGQTKRYGGTSVLNQIIPKLVEELGKTYHEHLHLTYGWQTKEFRTKHKLEKTHDTDAYCIAAGTMQTVKPNIRTDVYEIKQFRRHNRANIHHQTERTYKLNGQTVARNRRKRTDQKTDSLAEWFENTVKQYGQQKAEHLRAGLKVRKSTRYYNSKDRVMPGAVFQYEGNRYVVTGQLSGGQYYRAYGKGNQNFPAKKIRIISLNRGLVYVA

SEQ ID NO: 15938 - protein, 470 aa, Thermoanaerobacterium sp.; identical to SEQ ID NO: 15617

SEQ ID NO: 15939 - protein, 417 aa, unidentified
  REGION 1..417: note = metagenome
MPCSPAKARLLLKEKKAIVKRRTPFTIQLTIATGEAKQPVTLGVDSGYKHIGLSATTEKVELYASEVELRQDITDLLSARLALRRSRRSRKTRYRAPRFDNRVANKREGRLAPSVENRIAAHMSRVEAVMRVLPVTAITVETAAFDTQLLKNPDIAGAAYQQGEQLGFWNVREYVLFRDGHVCQHCRGKSKDPILNVHHIESRRTGGDAPNNLITLCETCHKAFHRGEIKLKVRRGKSFKAETFMGIMRWTLLERLKKAHPELRVRNTYGYLTKHKRISHGIAKSHCADAYCIADNLGAKRLEGFFFQKQTRKHNRQIHKLLILKGGLKKKNQAPYEVKGFRLFDKVICKGEEAFIFGRRTSGSFDVRRLDGTRISAGINYKKLRLLEPRTTYLTEFRKEAALPPLHKCRGVCAEFL

SEQ ID NO: 15940 - protein, 415 aa, unidentified
  REGION 1..415: note = Human gut metagenome
MENEMAYCFVVDKNNRPLAPTKVNKGWYLVRKGRAKIKSRYPMVIQLEKEVEPDKYDESRMVVGIDDGSAHVGLAIVQKCPTKNKVVFKGTIEQRQNVKHLMDVRRGYRRYHRHHKRYRQARFNNRHSSKRSGRLAPSIKQKKDAILRVLYQLNRWIDIQEYCLEDVCIDIRAMTDGHNPYKWKYQKSNRLDENLRKAAIIRDGCKCQECGKSNCVLEVHHIRARKYGGADTIGNLITLCSGCHQKTEGREREFEDRYFKIIGSKPKRFDYAMHVMQGKNYLREKISELGPLHLTNGGETANKRIDWNIEKSHSNDAICITNCNPDTCDVKEWIIKPMRRKSKAKTDNVLGIRHRDLVSYTYKNGEIHTGYVTALYPELLALNFQSKTKHCKKVNARKCRLLWKFDKIYWLEQRV

SEQ ID NO: 15941 - protein, 466 aa, unidentified; identical to SEQ ID NO: 3943
  REGION 1..466: note = Mouse gut metagenome

SEQ ID NO: 15942 - protein, 418 aa, Moorena sp.
MQNYVFVIDTNKQPLNPISPKKARRLLDKGKAAVFRMYPFTIILKTAINNPTISPCQIKIDPGSKVTGFALVQNNQILWGMELEHRGGLIKKKLESRKAVRRGRRNRNTRYRKPRFLNRRRPPGWLTPSLDHRILTIGTWVKRLIKFCPVNEIWVEKVKFDTQKMQNPEINDVEYQQGELAGYEVREYLLEKWGRECTYCGQQNVPLQIEHISPKSFGGSNRVSNLCLACEKCNQRKGNKPIEEFLKKKPSLLQKIKSKAKQPLKDAAAVNTTRNKLVKVLQKIKPVVTGTGAQTKYNRTKLGFPKEHWIDAACVGDIEALQLRTNQPLLVTCKGQGGRQKAALNKYGYPIRHNPLRPIKGWTTGDIAKHQKLGIGKVTPRSKGSFGFTPLGIKGYKSCKPQDLSAVHRKDGYTYSFC

SEQ ID NO: 15943 - protein, 571 aa, unidentified
  REGION 1..571: note = Human gut metagenome
VIEQKQDACVPSGDGTPGFFQSRDTAEQAPSLGRPFYRHAQAYTRCGDTVYPCGTAWHIYERRHLMPYIYVLGMDGKPQMPTTRRRHVQRLLDTGRARIVSPVPFTIQLLYKNDPVLQPVTLAEDPGRTNIGLAALSLKGDLLFSAKVETRNKEIAKLMDKRRQSRRVSRNGERKARQRLARKFGTMLKAGMLMRKLPQYAADKFITCHVIRNTQARFSNRKRPDGWLTPSARHLVQTHINLVRKMGRYLPVTDVALEVNRFAFMQMEDPSISGVDFQNGPLKGFDDLHAAVRELQDGKCLLCKKEIEHFHHIVPRSRHGSNTIGNIAGLCTKCHEKVHKDEKAGKRLKDKKKGLDKKYGALSILNQAIPFICKELETEFGKEHVHYCTGRETSQVRRSLGYHKTKEEQYHEVDAWCIGALSLDSIPEKAPAFEEVHTIMQFRRQDRALIKAQTSRSYKLDGETVAWNRKKRTDQKNDSLEDWYQKQVQLHGQKEAGRMRSRLTVKISQRRYNNPERMLPGAVFLYKGKRYVMKGQHCNGVYLQAVGMGSRDFPVKECTIIKRNQGLVFLS

SEQ ID NO: 15944 - protein, 419 aa, unidentified
  REGION 1..419: note = Human gut metagenome
LGQPLMPTKDHRKVRLLLDSGAAVVVKRTPFTIRLTTKAKSYVQPIILGVDAGSKTIGLSASTETEELFAAEVTPRNDVVDNLSTRREFRRSRRNRKTRYREPRFNNRVRSKHKGWLAPSVEVKIQEHITAVKRVCALLPVGKIVVETAEFDLQLLKAVEAGLPVPQGEDYQKGEMLGHYNIRQYVLWRDGYTCRCCGTHGKGVKFHVHHLESRKTGGNAPDNLVTLCDGCHKKFHKGIITPDILKKRKRRSTRDAAFMGIMRKTLMERLRAELAIQVVETKGYITKYTRVELLKLEKTHTNDALAIAQGRRGFGVEELTTIPQSDYIYRIRPVRHHNRQLHKATILPGGIRKSNQAPRYVRGFRLFDKVSYLGEDCFIWGRRSSGSFLLKLLDGTKVKDGVGYKRISLLERSASYLIS

SEQ ID NO: 15945 - protein, 490 aa, unidentified; identical to SEQ ID NO: 3566
  REGION 1..490: note = Human gut metagenome

SEQ ID NO: 15946 - protein, 447 aa, unidentified; identical to SEQ ID NO: 5309
  REGION 1..447: note = Human gut metagenome

SEQ ID NO: 15947 - protein, 416 aa, unidentified
  REGION 1..416: note = Human gut metagenome
MPCSPAKARHLLDEGKAKIKKRTPFTIQLVYGSSGYTQEVILGVDAGSKTIGMSTSTKKEEVFAADVTPRNDVVDLLSTRREFRRARRNRKTRYRKPRFNNRVRSKHKGWLAPSVEVKIQEHITSIKMVCRILPVSKVVVETAEFDLQLLKAIEEGKPVPQGEDYQQGEMYGHYNVRQYVLWRDNYTCQCCGAHLTKKKEVRLHVHHLESRKVGGNAPGNLVTLCDRCHEKLHKGLITEKDLKKRKHRSTRDATFMGIMRKTLMQRLCSELPIPVAETRGYITKATREKLLVLPKSHTNDALAIAQGKQGFNVGYLPGIEQIDKIYTIRPVRHHNRQLHKAAILKGGIRKSNQAEKYVFGYRLFDKAQFNGQDCFIWGRRTSGYFVVKTIDGKVIHNSASFKKLRLVERASNYLIA

SEQ ID NO: 15948 - protein, 452 aa, unidentified; identical to SEQ ID NO: 3042
  REGION 1..452: note = uncultured beta proteobacterium

SEQ ID NO: 15949 - protein, 442 aa, Anaerostipes sp.; identical to SEQ ID NO: 2903

SEQ ID NO: 15950 - protein, 451 aa, unidentified; identical to SEQ ID NO: 2910
  REGION 1..451: note = Human gut metagenome

SEQ ID NO: 15951 - protein, 442 aa, unidentified; identical to SEQ ID NO: 6360
  REGION 1..442: note = Human gut metagenome

SEQ ID NO: 15952 - protein, 227 aa, Eubacterium sp.; identical to SEQ ID NO: 14371

SEQ ID NO: 15953 - protein, 426 aa, unidentified
  REGION 1..426: note = Mouse gut metagenome
MQVYVLNKHGQPLMPCSPAKARRLLEAGKAKVIKRTPFTIQLLYGSTGYKQTIIHGVDAGSKTIGMSASTKSVELFAEEVTPRNDVVKNLSTRREFRRARRNRKTRYRKPRFSNRVHSKHKGWLAPSVEVKIQEHITAIQKVCAILPISKVVVETAEFDLQLLKAVADGKPVPEGEDYQKGEMLGQYNVRQYVLWRDGYTCQCCGAHGDGVKLHVHHKESRKVGGNAPDNLVTLCDKCHKGFHEGTISLTKLVKRGRKSTRDAAFMGIMRKTLMERLSAALPISVVETKGYITKGTRTELLKLPKSHINDALAIAQGKHGFGITEPTAIARADRQYTVKPIRHHNRQLHKATVLKGGIRKSNQAAKYVNGFRLFDKVTYQGQECFIWGRRTSGSFLLRTLDGAKVKDGVGAKYLKLLERSSNYLIA

SEQ ID NO: 15954 - protein, 493 aa, unidentified; identical to SEQ ID NO: 3781
  REGION 1..493: note = Human gut metagenome

SEQ ID NO: 15955 - protein, 396 aa, unidentified; identical to SEQ ID NO: 5072
  REGION 1..396: note = Human gut metagenome

SEQ ID NO: 15956 - protein, 393 aa, Moorena sp.; identical to SEQ ID NO: 6115

SEQ ID NO: 15957 - protein, 325 aa, unidentified
  REGION 1..325: note = metagenome
MYCAVMPITHATIEVGSFDTMLVKAIQEGKAIPEGADYQKGPRYNLATLREAVFYRDNYVCKVCGRKATEGAILHMHHMFYWKGRHGNSLDELLTVCEKCHTPANHQKSGKLYGFGENVKFADLSGAAFMNTVRWQIVNELYAAFGKDFVTVTYGAMTKEKRIALHLEKSHNNDAYAMGEFHPNCRCTFEHYEKVRRNNRILEKFYDSRYIDIRTGEIATGKELFNGRINRNHKKDSENLHKYRGKRLYKGHRALVRKKVNFNPGDLVSLNGEVLVVHGTHTNKKGAVNVEFKTPAKNGRKSANLKKLKIVKAAGSIHPAWEKVS

SEQ ID NO: 15958 - protein, 331 aa, unidentified
  REGION 1..331: note = Human gut metagenome
LSTRRQNRRSRRNRKTRYRAPRFDNRVHSKHKGWLAPSVEVKIQEHITVIKRICRILPITLVRVETAEFDTQRLKAMLKGKPLPVGTDYQLGEMYDEYNVRQYVLKRDNYTCQCCGAHPTEKKPIRLHVHHIESRHVGGNAPNNLITLCVACHKALHEGKITLDKGKKRGKPLRDAAFMGIMRNTLLARLKDELNIPVKQTYGYITKLLREKNKIPKSHVNDARCIAKAPNAKPCDTMLYTRALRHHNRQIHKAKILKGGIRKKNQAPYLVKGFRLWDKVRYNGEECFITGRRSSGYFALKKYDGTVISNSASYKKLMLLEAATNYITERS

SEQ ID NO: 15959 - protein, 514 aa, unidentified
  REGION 1..514: note = Human gut metagenome
MSVLVIGRNGRALMPTNPRKARLLLKKKTASVVCRHPFTIQLLYKTGCATQEGCIGIDTGSQHIGVGITCGDRVILKDEHALRSSMEKRSLLATRTVMRRGRRYRKVRYRKPKWRHHTKRMYFEKANRRGQHWRKVKTTTQSPRLKGWLPPSLQSKCDHHFRIIDRYLKYLPDPITRNLVIEAGRFDMARMNDPTIHGEMYQRGPMYDAENLRAYIFARDNYQCACCKAKAGTTRKADGTTVKLVAHHILFRSRGATDNPKYIISVCDHCHTTKAHQPGGILYSWMENNKKVARGLRDATFMNILRKRLFARYPQAAFTYGNITAADRKQLRLPKNHANDAVAISLFGKEASTVKNICQTMHYKQIRKSKRSLHEAIPRKGRKNPNTKAVRNKKNTTQVNGFKLWDSVLADGKKLFICSFTGTSAYLIDKNGCYISQPGKTYKQCPLSKLKRLHPNVDILPRINPWDSLDYNNITTPYRSGYSMIFQDLATIGVPHLGWYFLAAGQMPVPISLS

SEQ ID NO: 15960 - protein, 416 aa, Moorena sp.; identical to SEQ ID NO: 7050

SEQ ID NO: 15961 - protein, 512 aa, unidentified; identical to SEQ ID NO: 3057
  REGION 1..512: note = Human gut metagenome

SEQ ID NO: 15962 - protein, 407 aa, unidentified
  REGION 1..407: note = Human gut metagenome
MVYVQDINGNPLMPTTRHGKVRRLLKNNKAVVVNLCPFTIRLTYETTNYKQEIVLGVDAGTKHVGLSATTKSKELYSSEVILRNDIVDLLSTRRELRRTRRNRLRYRKPRFDNRIKSKRPGWVAPSVKYKIDAHIRVIDNVCSILPISSIVIEVAQFDTQKIKNPNISGKEYQEGDQLGFWNVREYVLARDGHKCQYCKGKSKSKILNVHHIESRKTGGDSPSNLITLCETCHKEYHKGNIDLKIKRGKSLRDAAVMGIMKWRLYEELKYKYDRVSMTFGYVTKYNRINHGIEKSHVSDAFVISKNFNAKRLNFSYKIKLVRRHNRQIHKMKIQKGGTKRPNQSPFEIFGFRLFDRVRFDSKFYFIYGRRKTGSFNIRDINGENKKDVIYKKLKLSRCKRFMIQIEM

SEQ ID NO: 15963 - protein, 447 aa, unidentified; identical to SEQ ID NO: 5316
  REGION 1..447: note = Human gut metagenome

SEQ ID NO: 15964 - protein, 427 aa, Moorena sp.
MQNYVFVIDTNKQPLNPIPPKKARRLLDKGKAAVFRMYPFTIILKTAIKNATISPCQIKIDPGSKITGFALVQNNQVIWGMELEHRGGLIKKKLESRRAVRRGKRNRHTRYRKPRFLNRKHSESWLPPSLEHRILTIETWVKRLIKFCPINEIWIERVKFDTQKMQNPEISGVEYQQGELAGYEVREYLLEKWGRECTYCGKQSVPLQIEHIHPKCKGGSARVSNLCLACEKCNQRKGNKPIEEFLKKKPSLLQKIKTKAKQPLRDAAAVNATRNKLVKVLKNIKPIITGTGAQTKYNRTKLGFSKEHWIDAACVGDIETLVLRVYQPLLVTCKGQGGRQKAALNKYGYPIRHNPLKPIKGWVTGDIAKHQKLGIGKVTPRTKGSFGFTPLGMKGYKSCKPQDLSAIHRKDGYTYSFCKHLPESTGQ

SEQ ID NO: 15965 - protein, 442 aa, unidentified
  REGION 1..442: note = Human gut metagenome
MSTSVFVLDKKHRPLMPCRPARARRLLRAGRARVVKRFPFVIRLVDRTVEQSEVQPVLIKLDPGSRETGAAVVRDDGKKRHHALAFFVIEHRGGAIRDALKARSAFRRRRRSQNFRCRSPRFLNRVKPKGWLPPSLRHRVETTLSFVRRMCRYLPVSGIATELVKFDSQKLQNPEVSGVKYQQGTLFEYEVREYLLEKFGRKCVYCGAEGVPLNIDHVVPRAKGGSNRVSNLVLACVSCNQKKGARSLEDFLKGKPEVLARVRRELKTPLRDAAAVNATRWVLFNELKATGLPVETGSGALTKLNRHAFGVEKEHWLDALCVGRLNGVVTRKGLNALEIRCMGRGSRQRTRLTKYGFPRGYLMRQKCVHGFATGDMVEANVPKGKKAGLWRGRVAVRVSGSFNIQTPKGVIQGVGWKHCRLISHNDGYGYAWLGHAPHSSPA

SEQ ID NO: 15966 - protein, 465 aa, unidentified; identical to SEQ ID NO: 6728
  REGION 1..465: note = Human gut metagenome

SEQ ID NO: 15967 - protein, 589 aa, Streptomyces sp.; identical to SEQ ID NO: 8594

SEQ ID NO: 15968 - protein, 414 aa, unidentified; identical to SEQ ID NO: 4015
  REGION 1..414: note = metagenome

SEQ ID NO: 15969 - protein, 431 aa, unidentified
  REGION 1..431: note = Human gut metagenome
MPNKVYVINKHGRPLMPCSPAKARHLLDEGKAKIKKRTPFTIQLVYGSSGYTQEVILGVDAGSKTIGMSASTTKEELLSAEVKPRNDVVDLQSTRREFRRARRNRKTRYRKPRFDNRVRSKHKGWLAPSVEVKIQEHITSIKMVCRILPVSKVVIETAEFDLQLLKAIADGKPVPQGEDYQQGEMYGHYNVRQYVLWRDDYTCQCCGTHATKKKEVRLHVHHLESRKVGGDAPDNQVTLCESCHEKLHKGLITEKDFKKRKRRSTRDATFMGIMRKTLMQMLCSELPIPVVETRGYITKATREKLLVLPKSHTNDALAIAQGKRGFNVGYLPGIIQTDKIYTIRPVRHHNRQLHKAAILKGGIRKSNQVGKYVFGYRLFDKVQFNEQDCFIWGRRTTGIFTIKTINGKMIKDGISFKKLKLVEKSTGYLIA

SEQ ID NO: 15970 - protein, 425 aa, unidentified; identical to SEQ ID NO: 13021
  REGION 1..425: note = Human gut metagenome

SEQ ID NO: 15971 - protein, 449 aa, Syntrophothermus sp.
MWTYSVKLTYPQGGLLMVYVLSKDREPLMPTKRYGKVRRLLKNNKAKVIRRKPFTIQLLYETTTYTQPITLGIDSGYNYIGFSAVTEKEELISGEVTLLQDISERLKERAMYRRQRRNRLRYRKPRFDNRRKPEGWLPPSIQHKYDSHVRFTNLISSILPITKVVIEVASFDIQKTKNPDIEGVGYQNGEQKGFYNLREYILYRDNYACQLCGKGNLPLEVHHIGYWKQDRTDRPSNLITLCINCHTPENHLRSGKLWGWQPKLQPFKEATFMSIVRWKLVNTLGCKYTYGYVTKAKRKALMLEKTHYNDAFIIAGGSNQKRVEPIYFEQVRRNNRSLEKFYDAKYIDTRTGKPATGQELFNGRRVRNKNYNTENLRKYRGQKLFKGRRSIRKQRYFYQPKDVVIYEGQKYIVKGVQNRGAYIKLEGLPKPVRIELVKPYLFRKGFCAV

SEQ ID NO: 15972 - protein, 388 aa, Ammonifex sp.; identical to SEQ ID NO: 12259

SEQ ID NO: 15973 - protein, 451 aa, unidentified; identical to SEQ ID NO: 12558
  REGION 1..451: note = Human gut metagenome

SEQ ID NO: 15974 - protein, 464 aa, unidentified
  REGION 1..464: note = Fermentation metagenome
MAGKVLLLKTYCNIGEVNLPPLWGEFIRKDLIFMVYVISIEGKPLMPTNNAKARLLLKQKKAKVKTVRPFIIQLLYKTKNYTQPVILGIDSGYLNIGFSAVTDKKELISGEVELLKGQTERLKERTMYRRQRRNRKRYRKPRFDNRKIDKGWLAPSIKHKLESHIRFIGYLKTILPVTNTIVEIANFDIQKIKNPSISGEEYQEGKQKGFYNLREYIFHRDNHTCQICKAKDKPLEIHHIGYYKKDRSDRPDNLITLCINCHTSANHKEGGILYGLKPKLGPFKEETFMTTIRRRLIKELNCKYTYGYITKGKRIEQELEKTYFNNAFIIAGGKKQIRTEPIKFRQIRRNNRSLEKFYDAKYIDIRTGEKVSGQELYNGRTVRNKNYNTENLHKYREEKISKGRRSIRKQRYFYQPNDLVKYEGKIYTVKGTQNSGKYAALKGIKKVPKVELLQPYRFRKGFAC

SEQ ID NO: 15975 - protein, 431 aa, unidentified
  REGION 1..431: note = Bioreactor metagenome
MVYVLSIEGKPLMPTNRRGKIRRLLKEGKAKVVKVKPFTIQLLYQTKEYTQPITLGIDSGYTYIGFSAITEKRELISGEVNLRNDVSELIKEKHMYRRIRRNRLRYRKPRFNNRKRKEGWLAPSIQHKLDSHVRFIQKLKTILPITNIIVEVANFDTQKIKNPNIGGIEYQQGEQKGFWNIREYVLYRDNYICQLCGKQGIPLEVHHIGYWIPDRTDRPDNLITLCIKCHTPKNHQEGGKLWGMKPKSKPLKEATFMSTVRWKLVNTLSCKHTYGYITKSKRIILGLEKTHYNDAFCIAGGTNQERITPIMFEQIKRNNRSLEKFYDAKYVDIRTGKILSGQELFSGRRCRNKNLNSENLHKYRGHKQSKGRRSIRTQRYFYQPKDIVTYDRKQYIVKGIQSKGSYIKLEGLSKPVKVELVKPYIFRKGIC

SEQ ID NO: 15976 - protein, 454 aa, Moorena sp.
LDVPECNIGQVAITLAIGDFSMSKNSVFVLDTNRKPCNPVHPAVARKLLTQRKAAVFRRYPLTIILKEESKNQPKELRIKIDPGAKITGLALVSDTNIVWCAELEHRGFQIKDNLSDRRARRRSRRNRKTRYRQPRFLNRKRRDGWLPPSLMSRVFNIESWVKKLCRLAPISTISMELVRFDTQKMVNPEINGIEYQKGELFGYEIREYLLEKFNRTCVYCNTKEGPFNLDHFYPKSKGGSDRVSNLVLSCVKCNQKKDNQLPVDFLRDQPKLLALIEKQRKQPLADTAAVNATRWKLKETLEAMGLPVEVGSGGLTKFNRKRLGISKSHWTDAACVGTSTPDSLNIKGYQPLLIKAMGRGSRQMVNSDKYGFPIVAPKLRQKSFFGFQTGDIVKAVVKKGKKIGTYVGRVAVRKTGSFNIKTKTELIQGISHKYCQHTHKSDGFSYGFGEVVQ

SEQ ID NO: 15977 - protein, 413 aa, unidentified
  REGION 1..413: note = Human gut metagenome
MDSSGESRDTCFFVNYKRGLTLPKTELDSMSKRKLMESRSSLRRGRRHRKTRYRHPKWRLKAKRVYYETPDRKGRHWKKQKITFASKRPQGWLPPSLQSKTDHHIQWIKKLQDLLPDGYRLSIELGRFDPARMKDTEIHGDLYQKGPQYDYENVRAYVLDRDRYTCQVCGKKGGKLHIHHILYRSHGATDNPQYMATICSDCHSTENHQPGGILYQWMQEQKKFTRGLRDATFMNILRKRLMKAFPKATFTYGNITKADREKLKIPKSHGNDATAIAIVKTGIMTVKDNEPVIYIQQVRRKKRSLHEETPRKGRKEPNRKASRYNKNTKAVTVTKRKNKKRISITGCLFDRVELNGKKGWISGFTDKSCYIKDENDQYIRISPKYKQVSLSKLKILHHCGNWVIGARRSLGKG

SEQ ID NO: 15978 - protein, 428 aa, Sutterella sp.
LKVFVLNMRGRPLMPCSPAKARHLLKAGKAVVRRRTPFTIQLRIATGETKQSVTLGVDAGAKHVGLSAATEKEEVFAPEVELRQDITGLLAARLSLRRERRQRKTRYRAPRFLNRVRSKHKGWLAPSVENRIQAHLSRIDAICGLLPVTKIVIETASFDIQKIKHPDVEGTDYQQGDQLGFWNVREYVLFRDGHVCQHCHGHAKDKILNVHHLESRQTGGDAPNNLITLCERCHKACHAGKIKLKVKRGQSFREEAFIGIMRWTLLDRVRKAHPGLPVENTYGYLTKNTRITLGPPKAHCVDAYCIAGNLKAVRRGVHLYQRQVRKHNRQIHKCTVLSKTLKDGTKIGYRKLNQTPHLVKNFRLFDKVRCLGQTGFIFGRRSSGYFDVRRLDGVKISSCINYRKLTLLEKRGTCLTELRKEDGASSPV

SEQ ID NO: 15979 - protein, 451 aa, unidentified
  REGION 1..451: note = Human gut metagenome
MSVAVISKTGIVLMPTSEYRARKLLDSGKAIIYGYRPFTIQLTERETGDVQPVELCVDTGYIHIGVSVKSEKHEYLGLQVDTLTDEKAKHDDRRMYRRQRRNRKRYRKSRFDNRKRKSGWLAPSLEHKKEINLQIITAICGVYPIADITLEMGNFDTQVLKAKEEGKQIPQGTDYQHGERYGIATLREAVFTRDGYKCQCCGRGIKDGAILHAHHIQYRSQGGTNRMSNLITVCEKCHTPANHKPGGKLYGWKPKIASFKDATYMTAVRWQLYRKVKEMFPGIHVKITYGAETKERRRILDIKKSHVNDAFVMGQFHPKHRSLPVLYKKKRRNNRCLEKFYDAKYIDSRNGKTRSGQELFNGRISRNHKKDSENLHRYRKKKVSRGKRNIRVQRYKIQPHDIVLFDGKKYETTGCHNKGTRAILLPEKKSKSVEKLTIYKYAGGYYPSKFA

SEQ ID NO: 15980 - protein, 286 aa, unidentified
  REGION 1..286: note = Human gut metagenome
KWQYQQGPLYQKASLEEAVSEMQEHHCLFCKNTIDHYHHVVPQSENGSNTIGNIVGLCTKHHDLVHKDTSWQEKLAKKKTGLNKRYGALSVLNQIIPALTKELSSLFPKHFFATNGKSTYDYRAAHGVSKDNWLDAYCIAGSVLPNDACDNNINNHVPYELKQFRRHDRRALHKENMGRVYTLNGKSVATNRHKAIKQTTDSLEEFRQRQPNDVCKLKVKEHHPEYRNPKRNFPGCVFLVGKHTHVMQGTSGSHNGKADGYYDTNGNSYSSGKCKFVVKNEGIVFT

SEQ ID NO: 15981 - protein, 518 aa, unidentified
  REGION 1..518: note = Human gut metagenome
LANLKLIDELLEKTEYIYVLGTDGKPQMPTNRKVRVRSLFKSGLAKIVDTVPFTIRLLYENDAVLQPITIAEDPGRTNIGAAVLTQLGDLVFSAVVETRNKSIKKLMSDRKAYRQASRRGERKARQRLAKRHGSMIKAGMIMRKLPQYAADKFVTCKIIKNTEARFCNRKRMPDWLTPTVNHLVQTHINLIKKVEKYLPITDVAIEVNRFAFMQMENPDASGVDFQNGPLKGFDDVKAAICEQQHGKCLMCKNDIEHFHHIVPRSKGGSDTIQNQAGLCKKCHAKVHTDAEFQAKFKDKKEGLIKKYGALSALNQAIPFICKELLEIYSVEHVHFCTGKDTSLIRSSLGYEKTKDNQMHEVDAYCIGLAAIGADKAKRPDFNNVFKIKQFRRQDRQLVHYQKERTYYLDGKKIATNRNPRFEQKGDALSDWYKEQIKIYGQYEAEKMRSRLTVKKSKRSYNTTKRLMPGCVFYYDGQRHVMAGQSSYGRYLRAYNCGTKDFPASKCQVIQFNTGLVFV

SEQ ID NO: 15982 - protein, 408 aa, unidentified; identical to SEQ ID NO: 4614
  REGION 1..408: note = Human gut metagenome

SEQ ID NO: 15983 - protein, 423 aa, Arthrospira sp.; identical to SEQ ID NO: 3091

SEQ ID NO: 15984 - protein, 432 aa, Moorena sp.
MSSVFVLAPDRQPLDPCHPARARQLLDAGRAAVFRRFPFTIILHDRTRAASVVHEHRLKIDPGSKTTGLALLAGTRVLWAAAVTHRGRRITAALRSRHAIRRGRRQRQTRYRPPRFLNRTRPVGWLAPALHSRVANVMTWVERLRRLCPLTALSQELVRFDMQQMQHAEMRGVEYQHGELAGYEVREYLLEKWHRTCAYCDAKDVPLEVEHIIPKARGGSNRVSNLTLACVPCNRKKGARSAAECGLPQVQAQARRPLHDAAAVNATRWRLSQALHATGLPVETGTGGRTQYNRSRLGIAKSHWGDAACVGASTPDTLRVRGIQPVGIRAMGHGSRQRCRVDAHGFPQGHRARQKHYGGMQTGDIVQAVVPTGKYAGTWTNRVVVKASGWFDLVIDGKKASVNQRHCTRLWAADGYTYTLPAGAGTAVSSPR

SEQ ID NO: 15985 - protein, 515 aa, unidentified; identical to SEQ ID NO: 5111
  REGION 1..515: note = Human gut metagenome

SEQ ID NO: 15986 - protein, 415 aa, unidentified
  REGION 1..415: note = Human gut metagenome
MVNRIEYCFVVDKNNKPLAPTKINKGWYLIRKGRAKLKSKYPMVIQLEKEVESDEGDKSHIVCGIDDGSSCVGLAIVQKCLTKNKVVFKGTIEQRQDVKHLMDVRRGYRKYRRYHKRYRQARFNNRSSSKSTCRSAPSIKQKKDAVLRVLYQLNKWVNIQEYYLEDVCIDIRAMVDGYKPYRWQYQKSNRLDENIRKATILRDGCRCQECGKSNCRLEVHHIRARRYGGADTIGNLITLCEKCHDKTKGKEKCFEEKYFNMIKSKPKRFDYAMHVMQGKTYLREKISELGILHLTNGGDTANKRIEWNIVKTHSNDAICIADGIPDTCDIKEWIIKPMRRKSKAKADNVLGIKHRDLVTYTYKNGETHTGYVTALYPEQLALNFQSKTKHCKKVNARKCRLLWKFNKIYWLEQCV

SEQ ID NO: 15987 - protein, 545 aa, unidentified
  REGION 1..545: note = Human gut metagenome
VQFAWWLCHPKPSDNIEDVNHETALMLLQIKAGTETFGTAPCGSGPKAEGVSPERKAMNTVAVVTNTNKPLMPTSPYRARKLLSSGKAKIVKHRPFTILLVNRSDGNVQEIEYKSDTGYLHVGISVCSEKREFVREQRDLLPDEKEKHNDRRKYRRTRRNRKRYRKARFDNRIGKIRKAEKNKHVWLPPSLEHKVDAQVQLFLRLYQVMPVKRAVFEMGQFDPALMKALEKGEAAPQGIDYQMGERYQIATRRAAVFTRDRYACVFCGRSIKDHAILHVHHIGFWKQDRSNRLDNLATCCEQCHTSENHRPGGILYGVEPKLESLASATYMNVVRFELLRRLKEAAPDVEFHISYGAKTSVIRKQRSISKSHTNDAYCLGQYFPKLRAEEIGFQKIRRNDRILQKFYDAEYLDSRDGTTKKGKELTNGRISRNHMKDHKNLHQYRGKKLSKGRITIRRGRSSLKPGGLVRFDGEVLTVHGTHRSRKKNKAGHIKVSVNVEFERPSKTGRKSAALSKCQIISQSYNTGWKQIQLRKEEQGRIAAVV

SEQ ID NO: 15988 - protein, 458 aa, Moorena sp.
MSNVFMLDTYEKPLDPVHPGHARLLLKQGKASVWRRFPFTLILKDEVKEPVVQPLRLKLDPGSRTTGIAIVNDASGEVVFAAELTHRGHKVKERLDSRRAVRRNRRARKTRYRKARWQNRRRRQGWLAPSFESRLANVLTWVHRLSRYCPISAISMELVRFDMQMMDNAEISGVKYQQGTLQGYEVREYLLEKWNRQCAYCGKKEVPLEVEHIVPRAKGGTDRVSNLTLACEPCNKAKGTQDITMFLKKKPDVLRHIQALQKGTLKDATAVNSTRWALFERVKATGLPIECGSGGLTKYNRTMRGLEKTHWLDAANVGKSTPDILNGRGIVPLFISATGHGSRQMCRMNKYGFPRTKPKHAKKVQGFQTGDMIKAVVPDGAKKGSYVGKVAIRATGSFNVTTATQTIEGINARHCRIIHRGDGYSYGFGEGASHPSPKKGGPLSSLASRHRVSRGRVL

SEQ ID NO: 15989 - protein, 415 aa, unidentified
  REGION 1..415: note = Human gut metagenome
MVYVLANDGQPLMPTERHGKVCRMLKSGIAKVVKKCPFTIQLQYESERNVQPVALGIDAGSKHVGVSATTKAKVLYESDVELRDDIVKLLATRRQLRRRRRSRKTRYRPARFDNRRRKEGWLAPSIRQKIGSHLTVVANVCKILPVSQIIVETASFDIQKIKNPDIQGIEYQQGEQMDFWNIREYVLFRDGHTCQCCKGKSKDKVLNVHHIESRKTGGNAPNNLITLCETCHKGYHNGTVTLPKNIKRGMKFKDAAFMGIMRWTFYNTLKEQYEPDIPVHYTYGYITKNTRINHNLPKGHCIDARCISGNPDAVSDGTYYYQKKVRCHNRQIHKQTILKGGIRKSNQAEYLVRGFRLFDKVRYQGREYFIFGRRKSGFFDIRTLSGEKVNKGSISVKKLTFVDTRKNYFIERRTV

SEQ ID NO: 15990 - protein, 451 aa, unidentified; identical to SEQ ID NO: 6577
  REGION 1..451: note = Human gut metagenome

SEQ ID NO: 15991 - protein, 418 aa, unidentified; identical to SEQ ID NO: 5724
  REGION 1..418: note = metagenome

SEQ ID NO: 15992 - protein, 431 aa, Escherichia sp.; identical to SEQ ID NO: 10059

SEQ ID NO: 15993 - protein, 447 aa, unidentified; identical to SEQ ID NO: 5316
  REGION 1..447: note = Human gut metagenome

SEQ ID NO: 15994 - protein, 276 aa, unidentified
  REGION 1..276: note = Human gut metagenome
VVGNNLLSIKPLINIGKGVIYSSICTGLSLQTYQKRKEVPYMVYVLDIDGQPLMPTTRHGKVRRLLNSHLAKVVKRCPFTIQLLYQSTKETQPVSLGVDAGSKHIGMAATTEKKVVYQEELFPRNDVVKLLSARRTLRRTRRNRKTRYRKPRFNNRVHSKHKGWLAPSVEVKIQEHITTIKRICQILPISEIQVETAEFDLQRLKAMKEGKTLPVGTDYQLGEQYDFYNTRQYVLHRDGYTCQCCGTHDNNIKLHMHHIESRQTGGDAPNNLITLC

SEQ ID NO: 15995 - protein, 414 aa, unidentified
  REGION 1..414: note = Human gut metagenome
MPCSPAKARLLLKEKKAIVKRRTPFTIQLTIATGESKQPVTLGVDAGYKHVGLSASTEKAELYASEVELRQDVSDLLSARRALRQSRRNRKTRYRAPRFNNRLRTKRKGWLAPSVENRINAHLSRIEAVLRLLPVTKITVETASFDLQLLKNPDISGKEYQEGEQLGFWNVREYVLFRDGHVCQHCHGRSKDPVLNVHHLESRRTGGDSPGNLITLCETCHKALHRSEITLKTKRGQSFRAEAYMGLMRWEVLNRLKTSHPGLEVHNTYGYRTKYTRIVNGIDKSHCADAFCIAGNLGAERLGEFFFQKQTRRNNRQIHKLSILKGGIRKRNQAPFEVNGFRLFDKVACKGEEGFIFGRRSSGYFDVRKLDGTCISAGISYKKLHLLEKRRTYLTEIRKEEALPPLPEGSGLRA

SEQ ID NO: 15996 - protein, 493 aa, unidentified; identical to SEQ ID NO: 2644
  REGION 1..493: note = Human gut metagenome

SEQ ID NO: 15997 - protein, 512 aa, unidentified; identical to SEQ ID NO: 3769
  REGION 1..512: note = Human gut metagenome

SEQ ID NO: 15998 - protein, 512 aa, unidentified
  REGION 1..512: note = Human gut metagenome
MSTIYVLNKDGKPLMPTTRGGHVRHLLKEQKARVVRAKPFTIQLLYETNDAVQPLYLGIDPGRTNIGVAVVKANGTAVFTAHLESRNKEILKLMQDRKKARRARRTNGRRHRRQRRAKANGTISKKCVKQDTAQSKNPSKRAKEIGVIKRRLPGHKKDLLCIGIKNKEAKYTNRARPEGWLTPTAIQLLQTHINLVKKIQKFLPISDVVLEVNKFAFMRLDNPDIQKWQYQQGPLYQKGSLENAVSEMQEHHCLFCDKPIDHYHHVVPQSENGSNTIANIVGLCSEHHNLVHKDAAWQKKLAEEKVGLNKKYGALSVLNQIIPALTNKLSVLFPKHFFVTTGKSTHDYRESHSVSKDHWLDAYCIACSVLPSNVCDSNINNHVPYELKQFRRHDRRTLHKENMSRVYTLNGKAVATNRHKAIKQTTDSLEEFRQSHPGDICKLKVKEHHPAYRNLNRNHPGSVFFVGEQAHVMQSIVASKDGKATRYKDTNVNKIAAGQCRFVAKNEGIVFT

SEQ ID NO: 15999 - protein, 428 aa, unidentified; identical to SEQ ID NO: 15007
  REGION 1..428: note = Human gut metagenome

SEQ ID NO: 16000 - protein, 447 aa, Marinobacter sp.; identical to SEQ ID NO: 6487

SEQ ID NO: 16001 - protein, 515 aa, unidentified; identical to SEQ ID NO: 5111
  REGION 1..515: note = Human gut metagenome

SEQ ID NO: 16002 - protein, 405 aa, Pseudomonas sp.; identical to SEQ ID NO: 7991

SEQ ID NO: 16003 - protein, 256 aa, unidentified
  REGION 1..256: note = Human gut metagenome
LLFYRKEHGIMQYVYVLNKHGEPLMPCSPGKARLLLKQQKACVVRRTPFTIKLLYGSAGYKQPITLGVDAGSKHVGLSASTEKRELYSEEFTPRSDVVKLLSTRKQNRRSRRYRKTRYRAPRFDNRVHSKHKGWLAPSVEVKIQEHITVIKRICKILPISLVRVETAEFDTQRLKAMLAGKPLPVGTDYQLGEMYDEYNVRQYVLKRDHYTCQCCGAHNTAEKVVKLHVHHLESRKTGGNAPSNLVTLCTTCHKNL

SEQ ID NO: 16004 - protein, 437 aa, Moorena sp.
VFVLDKRKKPLMPCSEKRARRMLERGRARVHRLVPFTIRLVDRTQAESVVQPVVVKLDPGATTTGMALARVEEGNAEPTHHVLHLAELPHRGRAIRAAMRQRAAFRRRRRGKNLRYRPARFDNRRKPKGWLAPSLRHRVETVVSWVARYRRFVPVSQVAMERVRFDTHALAAPEVAAKGGIAYQQGTLAGFEIREYLLEKWERSCAYCDARDVPLQIEHIIARSRGGSDRVSNLTLACEPCNRRKDAQAVETFLAHDPKRLARIQANLQKPLDGAAAMNATRWALWRMLCATGLPVECATGGRTKWNRSRLDIPKTHALDAACVGVVGRVANWQRPTLAIRCTGRGAYSRTRLTAHGFPRGHLTRQKRHYGFQTGDLVRAVVAEGVHAGTWIGRVAVRATGSFNIRIGTQTRQGICWRNCIVLQHGDGYAYETSSQR

SEQ ID NO: 16005 - protein, 414 aa, unidentified; identical to SEQ ID NO: 11301
  REGION 1..414: note = Human gut metagenome

SEQ ID NO: 16006 - protein, 460 aa, unidentified; identical to SEQ ID NO: 3778
  REGION 1..460: note = Human gut metagenome

SEQ ID NO: 16007 - protein, 431 aa, unidentified
  REGION 1..431: note = Human gut metagenome
MPNKVYVINKHGRPLMPCSPAKARHLLDAGKAKVKKRTPFTIQLVYGSSGYTQEVILGVDAGSKTIGMSASTTKEELLSAEVKPRNDVVDLLSTRREFRRARRNRKTRYRKPRFDNRVRSKHKGWLAPSVEVKIQEHITAIKMVCRILPVSKVVIETAEFDLQLLKAIADGKPVPQGEDYQKGEMYGHYNVRQYVLWRDDYTCQCCGAHATKKKEVRLHVHHLESRKVGGDAPDNQVTLCESCHEKLHKGLITEKDFKKRKRRSTRDATFMGIMRKTLMQRLCSELPIPVIETRGYITKATREKLLVLPKSHTNDALAIAQGKQGFNVGYLPEIAQIDKIYTIRPVRHHNRQLYKATILKGGIRKSNQTKKYVFGYRLFDKVQFNGQDCFIWGRRTTGIFTIKTINGKMIKDGISFKKLKLAEKSTSYLIA

SEQ ID NO: 16008 - protein, 427 aa, Moorena sp.; identical to SEQ ID NO: 12009

SEQ ID NO: 16009 - protein, 470 aa, unidentified; identical to SEQ ID NO: 2825
  REGION 1..470: note = Human gut metagenome

SEQ ID NO: 16010 - protein, 408 aa, Moorena sp.
MLVYVINKNGNPLMPCKPAKARKLLRAGKAKIVNRCPFTIQLQWDCEENVQPVTLGIDKGSHYTGLCSVGFGQILLSGIINHRTDIKDKMTARRGNRCQRRYRKWYRPKRFLNRATSKHSGRLQPSIKANAEEVIRVVRQIPLPLSQIVIEDVQVDIARLNNPDLLGIEYQRSNRLDENLRIATLMRDKYQCISCGKKKVQLQAHHIVPQNQGGKDTIKNLITLCQSCHNKVHQGQITLHADGISGFKDQIAQRTMQGKSFIYQILENFAPVFKVFGYQTASFRKYLSLPKEHDVDALCVATLDKGTKVPYHRDNFYTIKFRPRQTRRCYYDLPQKGKGRVPYQVNAELDGFRKGDVVRVKGKWIKQINSIYSNGRLAFARIKGEPNSAKPLDCQLLRRGLTIIWTHS

SEQ ID NO: 16011 - protein, 415 aa, unidentified; identical to SEQ ID NO: 3582
  REGION 1..415: note = Human gut metagenome

SEQ ID NO: 16012 - protein, 428 aa, unidentified
  REGION 1..428: note = Human gut metagenome
MYVYVLNQHGEPLMPCSPRKARIMLRDHKATVVRRTPFTIRLLHRSSEYRQDITLGVDAGSKFIGLSACTESKELFAAEVKPRNDVVDLLSTRRELRCSRRSRKTRYRAARFNNRVHSKHKGWLAPSVEVKIQEHITAIKRTCAILPISMVIVETAEFDTQRLKAMLEGKPLPVGTDYQLGEMYDEYNVRQYVLKRDNYTCQCCGIQSTDKAPVKFAVHHKESRHVGGNAPNNLITLCEKCHRLLHAGVITLEEGKRKRGKSFRDAAFMGIMRKTLMQRLRSELSIPVKETYGYITKLLRETHAIQKSHVNDAQCIARVPDARPSDTLYRIRAVRHHNRQLHKVNPIKGGIRKRNQAPYKVFGFRLWDKVLFNGQECFITGRRVSGYFALKNFDGKKVHTGASYMALTIVESSTSYLIERRTAVSSRG

SEQ ID NO: 16013 - protein, 419 aa, Anaerostipes sp.; identical to SEQ ID NO: 6355

SEQ ID NO: 16014 - protein, 515 aa, unidentified
  REGION 1..515: note = Human gut metagenome
MTALEERLSKTEYIYVLGFDGKPQMPTRRKRHVLKLLKTGRARIAEDIPFTIRLTYRNAPVLQPVTLAEDPGRTNIGAAVLSPLGDLLFAAVIETRNKEIKKLMTDRQKSRQASRRGERKARQRLAKRYGSMVKSGMVMRKLPMYAADRFVTCKFIRNTQARFCNRKRCPDWITPTVQHLVQTHLNIIRKISRYLPVTDIAFEVNRFAFMHMENPEAIGVDFQNGPLKGYGDVKEAIRTQQHGKCLMCKKPIAHFHHIVPRSRGGSDTIQNLAGLCPECHTKVHKDTAFRKDFDEKKSGQLKKYGALSALNQAVPFICKKLLEEYGEEHVHFCRGLDTSLIRTALGFEKTKKDQMHEVDAYCVGLAALEVNEVETPAFDHTFQIRQFRRQDRSIIHHQTGRSYYQGKEKVAQNRKPGFEQKTTALSQWYEEQVRIHGEKEAEKIRSQLRVEKSCRHYNDMDRFLPGAVFLYEGKRYVLSGRITNGKYLRACGQGMKNFPAAECTFIRHNAGLVFI

SEQ ID NO: 16015 - protein, 279 aa, unidentified
  REGION 1..279: note = Human gut metagenome
TKITVETASFDLQLLKNPNISGKEYQEGEQLGFWNIREYVLFRDGHVCQHCHGRSKDPVLNVHHLESRRTGGDSPGNLITLCETCHRALHRGEMKLRAKRGQSLRAEAFMGIMRWEVLGRLKTSHPELEVNNTYGYRTKHVRIRNGIAKSHCADAFCIAGNLGAERLGEFFFQKQTRRNNRQIHKLSILKGGIRKRNQAPFEVKGFRLFDKVACKGEEGFIFGRRSSGFFDVRKLDGTRISAGLSCKKLHLLEKRQTYIKEIRKEEALPPLPDGRDLRA

SEQ ID NO: 16016 - protein, 570 aa, unidentified
  REGION 1..570: note = Human gut metagenome
LRSARMALRDFSSPEHCRADTKSWKTVLPLCTGLPPTQGYRLSLRNCMTHQERRHLMPEFIYILGMDGKPQMPTTRRRHVQKLLNTGRARIAEHVPFTIQLLYKNDPILQPVMLAEDPGRTNIGLTVLSLKGDLLLSAVTETRNKEITKLIDKRRACRRTSRNGERKARQRRAKRFGTTLKAGMLMRKLPKYDTDKFVTCKLIRNTESKFCNRKRPDGWLTPSARQLADTHINLIHKMQKYLPITDVAFEVNRFAFMLLKDPSVSGVDFQNGPLKGFDDLHDAVCELQDGTCLLCNRKIEHYHHIIPKSKNGSDTIDNIAGLCMCCHDKVHKNEKEAQRLQKKKKGLNKKYGALSVLNQAIPFICKRLEEEFGAEHVFYCTGRETAAVRNSFGYQKTKDNQLHEVDAWCIGILALGKIPKTLPDFSYTCRIRQFRRQDRSRIKAQTERTYKLEGKIVAKNRKKRTEQKTDSLEDWYQKQTALYGQKEADRMRSRLTAAKSQRRYNAPSRILPGTVFLYDGKRHVLSGQLTGGKYFRAVGDAKTNYPASKCRIVRKNEGLVFISQVITERV

SEQ ID NO: 16017 - protein, 493 aa, unidentified; identical to SEQ ID NO: 3154
  REGION 1..493: note = Human gut metagenome

SEQ ID NO: 16018 - protein, 512 aa, unidentified
  REGION 1..512: note = Human gut metagenome
MSTVYVLNKDGKPLMPTTRGGHVRHLLKEQKARVVRAKPFTIQLLYETNDVVQPLYLGIDPGRTNIGVAVVKANGTAVFTAHLETRNKEIPKLMQDRKKARRARRTNGRRCRRQRRAKANGTISKKCVKQTTAQNGSVSKRAKDIGVIKRRLPGCEKDVLCIGIKNKETKFTNRTRPEGWLTPTANQLLQTHINLVKKIQKFLPISDVVLEVNKFAFMRLDNPNIQKWQYQQGPLYKKESLESAVSEIQEHHCLFCKKPIDHYHHVVPQHKNGSNTIGNIVGLCAKHHDLVHKDSAWEKKLAQKSTGLNKKYGALGVLNQIIPTLTNELSSLFPKHSFVTNGKSTYDYRAAHGVSKDHWLDAYCIACSVLPSNVCDSNINNHMPYELKQFRRHDRRVLNNENMNRVYTLNNKAVAINRHKAKDQKTVSLEEFRKEHPDDVCKLKVKEHHPTYRNMNRNFPGSVFLVGKQIHVMQGIASSKDGKATTYKDSNANSITVSKCKFVAKNSGILFV

SEQ ID NO: 16019 - protein, 431 aa, unidentified; identical to SEQ ID NO: 11677
  REGION 1..431: note = Human gut metagenome

SEQ ID NO: 16020 - protein, 426 aa, unidentified
  REGION 1..426: note = Human gut metagenome
MVYVQNHLGQPLMPTQDHRKVRLLLKAGAAVVVRRTPFTIRLTTRTKTYVQPVILGVDAGSKTVGMSAATHEEEVFAAELTPRNDVVKNLADRRKFRSSRRGRTTRYRQPRFNNRVHSKHKGWLAPSVEVKIQEHITSIKRACELLPIGKVVVETAEFDLQLLKSIADGMPVPQGEDYQKGEMYGFYNVRQYVFFRDGYTCQCCGAHGKGIKFHTHHLESRKTGGNAPDDLVTVCDKCHKAFHAGLITDAKLKKRRRKSTRDAAFMGIMRKTLLQRLRAELPIPVVETRGYITKATRERLLKLPKSHTNDALAIAMGRHGFGIEEVTYMPQSDRIYQIKPVRHHNRQLHKALPKKGGRRQRSQGPKYVQGFRRFDKVLYRGQECFIWGLRTRGYFQLKLLNGTKVHESAKASELILLEHSSGYLIA

SEQ ID NO: 16021 - protein, 408 aa, unidentified
  REGION 1..408: note = Human gut metagenome
MVYVQDIDGKPMMPTTRHGKVRRLLKANKATVVNLCPFTIRLTYATSGYKQEIVLGVDAGTKHVGLSATTKSKELYSSEVILRNDIVELLSTRRELRRTRRNRLRYRKPRFNNRIKSKRTGWVAPSVRHRIDAHIRVIDNICSTLPISRIIVEIAQFDTQKIKNPDISGNEYQEGDQLGFWNVREYVLARDGHKCQHCKGKSKDPILNVHHIESRKTGGDSPSNLITLCETCHKEYHKGKIDLRVKRGKSLRDAAVMGIMKWKLYEELKSRYDNVSMTFGYITKYNRIKYGIEKYHISDAFVISKNFNALRLEYHYKVRLVRRHNRQIHKQKVLKGGAKKPNQSPFEVFGFRLFDRVMFEGNYYFIFGRRKSGSFNIRDINGGNQRNVTYKKLKLSIGKRFMIQKEMN

SEQ ID NO: 16022 - protein, 430 aa, unidentified
  REGION 1..430: note = Human gut metagenome
MPNKVYVINKHGRPLMPCSPAKARHLLDAGKAKVKKRTPFTIQLVYGSSGYTQEVILGVDAGSKTIGMSASTTKEELLSAEVKPRNDVVDLLSTRREFRRARRNRKTRYRKPRFDNRVRSKHKGWLAPSVEVKIQEYITSIKRVCRILPVSKVVIETAEFDLQLLKAIADGKPVPQGEDYQKGEMYGHYNVRQYVLWRDGYTCQCCGAHTTKKKEVRLHVHHLESRKVGGDAPDNQVTLCESCHEKLHKGLIAEKDFKKRKRKSTRDATFMGIMRKTLMQMLCSELPIPVVKTRGYITKATREKLLVLPKSHTNDALAIAQGKQGFNVGYLPEILQIDKIYTIRPVRHHNRQLHKAAILTGGIRKSNQTEKYVFGYRLFDKVQFNGQDCFIWGRTTGIFTIKTINGKMIKDGISFKKLKLVEKSTGYLIA

SEQ ID NO: 16023 - protein, 451 aa, unidentified; identical to SEQ ID NO: 2436
  REGION 1..451: note = Human gut metagenome

SEQ ID NO: 16024 - protein, 512 aa, unidentified; identical to SEQ ID NO: 5549
  REGION 1..512: note = Human gut metagenome

SEQ ID NO: 16025 - protein, 420 aa, unidentified; identical to SEQ ID NO: 3288
  REGION 1..420: note = Human gut metagenome

SEQ ID NO: 16026 - protein, 418 aa, unidentified; identical to SEQ ID NO: 4327
  REGION 1..418: note = Human gut metagenome

SEQ ID NO: 16027 - protein, 546 aa, unidentified; identical to SEQ ID NO: 12293
  REGION 1..546: note = Human gut metagenome

SEQ ID NO: 16028 - protein, 445 aa, unidentified
  REGION 1..445: note = Human gut metagenome
LYRYFPTIVILKDVDARKLSGLSSYRIKIDPGAKYTGIAIVRDDTNEFMYAMQIEHRGEQIKKNLDTRRNARGDRRSRETGYRRPKWGNQCTAKEQRQSYDSRRDENWLPPSVKSTADNIISWVRRLSRWINITNCSFESVRFDTQLMENPEIEGVEYQQGTLYGYEVKEYLLEKYGHTCQYCGGKSSDPILEWEHMIPRSRGGSDRLKNATLACHNCNQDKGNHTLEEWQTILQDRLPKERGKQKELDQMRQKYVQQVMEGKAPLKGLRYAAWVNSSRRYSQRHLYLRFPELECSSGGRTKYNRNALGYPKEHHYDALCVGKIPEDGFVDWTHGYYLYAKATGRGTRLRGQLNGCGVIISKWKNRSKTAFGFQTGDLVVANVPKDTKYKYKGRFVGRVMIRKSGSFDIRTLSGELVTVNAKFCRLLQNNSGYQMMIKRAIPLGD

SEQ ID NO: 16029 - protein, 470 aa, unidentified
  REGION 1..470: note = Human gut metagenome
MSVFVVGLNGCRLMPVSERKARLLLKGGKASVYRKVPFTIKLNYKTGSTVQPGYLGIDTGSQHIGVSVVQKDGTVLHKEEIGLRDSMSKRKLLESRASSRRGRRYRKTRYRHPKWKPKTKRIYNEKADRKGRHWKKQKNTFTSKRQAGWLPPSLQSKTDHHIQWIRKLLDLLPEGYRLSIELGRFDPARMKDPGIHGELYQKGPQYDYENVRAYVLARDGYTCRVCKKNGGKLHVHHILYRSRGASDDPKYMAAVCSNCHTTENHLPGGILYQWMQDQKKFTRGLRDATFMNILKKRLRKAFPDAVFTYGNITKADREKLELPKSHGNDATAIALVKTEVPSVKDEEPVIHIQQVRRKKRSLHEETPRKGRKEPNRTASRIDKNTKSVTVTKGSGEKKASMTACLFDRVELDGKKGWITGFTGTSCYVKDKEDSYICTSPKYKQVSISRLRILHHCGNWAIGAEKPLGKG

SEQ ID NO: 16030 - protein, 461 aa, Parasutterella sp.; identical to SEQ ID NO: 3646

SEQ ID NO: 16031 - protein, 522 aa, Moorena sp.
MGAVFVVDKNGKPLMPTYSKPKVRRMLKDGRAEIFRHEPFTIQLTQRAGGYTQPVHYDTDSGYQYAGVSVKSEKHEFLHMQADMLEDEKGRYDDRRKYRCTRRNRLRHRPPRFDNRRKGEGWIAPSLAHRLENQVRLFQTMCGVCPITEAHIEVGRFDAQALDAVEKGLPLPEGIDYQHGPRYAFDTIREAVFARDQHTCQCCGASPSKKPGTILVVHHALYWKGDHTDRLPGLLTLCTNCHTSANHQKGGKLRGLAPNAATANKAPAAFMNVVRWMMRDRFQADGVPTTITYGAATKRERLSRNVAKTHANDAYCIGEFRPKHRSLEIHIAKRRRNDRRLEKFRDATYIDARDGSIKSGKELSSGRTKRKEPRHGAKDLRRFRLKQLTKGCNAVRRKRYEIRPDDLVRTTDGRVYTVNGTQNRGATLQLRTTKTVLLTALVPKTGKEKELLPVETGQKLALKGRKEKHEVLSVDLASGKAVMRWYMGVKPENVTLLTGTYGGWTVVPAQAVNTCKKGETEK

SEQ ID NO: 16032 - protein, 431 aa, unidentified
  REGION 1..431: note = Human gut metagenome
MPNKVYVINKHGRPLMPCSPAKARHLLDAGKAKVKKRTPFTIQLVYGSSGYTQEVILGVDAGSKTIGMSASTTKEELLSAEVKPRNDVVDLLSARREFRRARRNRKTRYRKPRFDNRVRSKHKGWLAPSVEVKIQEHITSIKRVCRILPVSKVVIETAEFDLQLLKAIADGKPVPQGEDYQKGEMYGHYNVRQYVLWRDDYTCQCCGAHATKKKEVRLHVHHLESRKVGGDAPDNQVTLCESCHEKLHKGLIAEKDFKKRKRRSTRDATFMGIMRKTLMQRLCSELPIPVVKTRGYITKATREKLLVLPKSHTNDALAIAQGLQGFRVGYLPGIVQIDKIYTIRPVRHHNRQLHKAAILKGGIRKSNQAEKYVFGYRLFDKVQFNGQDCFIWGRRTSGYFVVKTIDGKVIHNSASFKKLNLVERASNYLIA

SEQ ID NO: 16033 - protein, 424 aa, Moorena sp.; identical to SEQ ID NO: 8578

SEQ ID NO: 16034 - protein, 512 aa, unidentified
  REGION 1..512: note = Human gut metagenome
MSTVYVLNKDGKPLMPTTRGGHVRHLLKEQKARVVRAKPFTIQLLYETNDVVQPLYLGIDPGRTNIGVAVVKANGTAVFTAHLETRNKEVPKLMQDRKKARRARRTNGRRCRRQRRAKANGTISKKCVKQDTAQSKNPSKRAKEIGIIKRRLPGYKKDVLCIGIKNKEAKYTNRTRPEGWLTPTANQLLQTHINLVRKMQKFLPISDVVLEVNKFAFMRLDNPDIQKWQYQQGPLYQKGSLENAVSEMQEHHCLFCDKPIDHYHHVVPQSENGSNTIANIVGLCAEHHNLVHKDAAWQKKLAEEKVGLNKKYGALSVLNQIIPALTNKLSVLFPKHFFVTAGKSTHDYRAAHGVSKDHWLDAYCIACSVLPSNVCDSNINNHMPYELKQFRRHDRRVLNNENMNRVYTLDNKAVAINRHKATEQEAASLEEFRKEHPNDVCKLKVKEHHPTYRNMNRNFPGSVFLVGKQIHVMQGIASSKDGKATTYKDSNANSITASKCKFVAKNSGILFV

SEQ ID NO: 16035 - protein, 279 aa, unidentified
  REGION 1..279: note = Human gut metagenome
PLYQKGSLENAVSEMQEHHCLFCDKPIDHYHHVVPQSENGSNTIANIVGLCAEHHNLVHKDAAWQKKLAEEKVGLNKKYGALSVLNQIIPTLTNKLSVLFPKHFFVTTGKSTHDYRESHSVSKDHWLDAYCIACSVLPSNVCDSNINNHVPYELKQFRRHDRRALHKENMSRVYTLNGKAVATNRHKAIKQTTDSLEEFRQSHPGDVCKLKVKEHHPAYRNLNRNHPGSVFFVGEQAHVMQSIVASKDGKATRYKDTNVNKIAAGQCRFVAKNEGIVFT

SEQ ID NO: 16036 - protein, 421 aa, unidentified
  REGION 1..421: note = Human gut metagenome
MRGQPLMPCSPAKARHLLKAGNAVVKRRTPFTIQLRIATGETKQNVTLGVDAGAKHVGLSATTEKEEVFASEVELRQDITGLLAARLSLRRDRRHRKTRYRAPRFLNRVRSKHKGWLAPSVENRIQAHMSRIDAVCRLLPVTKIVIETASFDIQKIKDPSVEGTDYQQGDQLGFWNVREYVLFRDGHVCQHCHGRSKDKILNVHHLESRQTGGDAPNNLITLCETCHKAYHAGKIKLKVKRGQSFRAEAFMGIMRWTLLDRVRKAHPGLPVENTYGYLTKHTRITHGLPKTHCVDAYCIAGNLKAVRRGVHLYQRQVRKHNRQIHKCTVLSKTLKDGTKIGYRKLNQTPHLVKSFRLFDKVRCLGQTGFIFGRRSSGYFDVRRLDGVKISSCISYRKLTLLEKRSTCLTELRKEDGASSPV

SEQ ID NO: 16037 - protein, 410 aa, Geobacillus sp.; identical to SEQ ID NO: 4122

SEQ ID NO: 16038 - protein, 413 aa, unidentified
  REGION 1..413: note = Human gut metagenome
LKVFVLNMRGKPLMPCSPAKARHMLKAGKAFVVRRTPFTIKLTIATGETKQDVTLGVDAGARHVGISATTEKEEVFASEVKFRQDITGLLADRLAFRRARRNRKTRYRAPRFNNRVRSKHKGWLAPSVENRIQAHMSRIEAVCRLLPVTKIVIETASFDIQKIRNPEVEGTGYQQGDQLGFWNVREYVLFRDGHICQHCRGRSKDPILNVHHLESRKTGGDAPNNLITLCETCHKAYHAGKIKLKVKRGHSFRAEAFMGIMRWTLLNRMRKAHPSLPVENTYGYLTKHKRIALGLPKTHCADAFCIAGNLKALRRGDFLFQQQTRKHNRQIHKCSILKGGVRKLNQAPFLVKGFRLFDKVRIGGQIGFVFGRRVRGTFNIRRLDKTVIGTDINCKKLSLLETRKTFLTELRKE

SEQ ID NO: 16039 - protein, 412 aa, unidentified; identical to SEQ ID NO: 3155
  REGION 1..412: note = Human gut metagenome

SEQ ID NO: 16040 - protein, 437 aa, Sulfobacillus sp.
MVFVLDKQKKPLMPCSEKRARLLLERRRARVVNIVPFTIRLVDRLRENSVLQDMRLKLDPGSKTTGMAITLDGIHGTHVVFLGEIVHKSGIQARLEARRAVRRGRRFRHTRYRAARFQNRTRKDGWLPPSLAARVNQTLRTVDKIRAHAPITAMSVEHVRFDTQKLENPEIVGVEYQQGTLLGYEVREYLLEKWGRTCVYCGATDVPLQVEHIIPKRRGGSNRMSNLTLACKPCNLQKGKQTAAEFGHPDVQVHARQPLKDAALMNATRWRLYHQLQATSLPVEGGSGGRTKKQRIAHDLPKEHYYDALCVGKSTPAQFLTLPAFVQIWSAKGRGNRQRCRTDKHGFPIRHLSRQKHHFGFQTGDLVQAVIPHGKYAGTWTGRATVKASGSIRIVTSIGVHPTTSYRYGHVLQRGNGWVYTQKPSNQERGKAASSPA

SEQ ID NO: 16041 - protein, 442 aa, unidentified; identical to SEQ ID NO: 2903
  REGION 1..442: note = Human gut metagenome

SEQ ID NO: 16042 - protein, 460 aa, unidentified; identical to SEQ ID NO: 5845
  REGION 1..460: note = Human gut metagenome

SEQ ID NO: 16043 - protein, 496 aa, unidentified; identical to SEQ ID NO: 2063
  REGION 1..496: note = Human gut metagenome

SEQ ID NO: 16044 - protein, 451 aa, unidentified; identical to SEQ ID NO: 7526
  REGION 1..451: note = Human gut metagenome

SEQ ID NO: 16045 - protein, 515 aa, Actinoplanes sp.; identical to SEQ ID NO: 9031

SEQ ID NO: 16046 - protein, 425 aa, Nodularia sp.; identical to SEQ ID NO: 3113

SEQ ID NO: 16047 - protein, 406 aa, Moorena sp.
MRVFVLNKNRQPLDPCKPARARIILSTGKAKVYRRYPFTIILTEEIEEPITHTHQLKIDPGAKTSGLAIVQNSRVVWGGELTHRGFQIRDALTSRRQLRRARRNRKTRYRKPRFLNRPWSEGWLAPSLMSRVYNILTWVKKLTRLCPITGFSQELVRFDTQKLQNPEISGIEYQQGTLYGYELREYLLEKWNRKCAYCGTTDTQLEIEHIKPLSKGGSDRVYNLAIACHSCNQAKSNQEVEHFLSGKPDVLRRVKAQAKRPLADAASVNATRWKLYHELKSIGLPVEVGSGGLTKFNRCRQNLPKTHWLDAANVGKIETLVIEVTHPLIITAKGHGTRQLCRTNKYGFPIRYCSRTKVHKGFQTGDIVRAVVTKGKKIGTYVGRVATRKSGSFNISTKSGCAACSK

SEQ ID NO: 16048 - protein, 381 aa, unidentified
  REGION 1..381: note = Human gut metagenome
LRVFVLNKRGKPLMPCSPAKARHLLKEKKAIVVRRTPFTIQLTIATGESKQPVSLGVDAGYKYVGLSASTEKAELYASEVELRQGITDLLSARRALRRARRNRKTRYRAPRFDNRIRTKRKGWLAPSVENRINAHLSRIEAVLRLLPVTKITVETASFDMQRLKNPDISGKEYQEGEQLGFWNVREYVLFRDGHVCRHCHGRSKDPVLNVHHLESRRTGSDSPDNLITLCETCHKALHRGEITLKAKRGQSFRAETFMGIMRREVLDRLKASHPKLEVQNTYGYRTKHARISNGIAKSHCADAFCIAGNLGAKRLGEFLFQKQTRRNNRQIHKLSILKGGIRKRNQAPFEAKGFRLFDKVACQGEEGFIFGRRSSGSFDVR

SEQ ID NO: 16049 - protein, 477 aa, Acidithiobacillus sp.; identical to SEQ ID NO: 3862

SEQ ID NO: 16050 - protein, 483 aa, unidentified
  REGION 1..483: note = Human gut metagenome
MKKVKASGRSGSDTPRDAPQVPCNCGRKDEREEQQGTKREPKRLNDAVRSLDVAHPGAEGHRPIHKNNKPKAYACVLHRDGTPLTPTKIGKAKALVRGGRARVVRHNPFTVRLTNETTKHAPEMTLGIDAGYSHVGYSIVSEEARREYFRGTLEQETGKTGNPTSERLTERAMYRRQRRNRLWHRGKRFDNRRNMVGKYPPSIERKYLTHVNLWRMWAKLVPIIGTVVEVGKFDIQAAMNPDVQGVGYQQGPIFGYVNVKAYVMAREKGVCQLCGDLVLGQKVNLHHVRPRSRGGSDRADNLALLHEECHKRLHREGLEKQLKKPKKFVAETFMSSVWRRFPKDIPHCRLTFGCLTAYFRQENGIAKSHADDAFIIAGGDRAFARCGEAWVVVQHRRNDRQLQWNQIRRMGSGGRRIRRGRKPYHSGDLVWVDGEMKVCKGMTGDRVALGFKKSPAGNNSPVTVSAKKIAKHYRNNYEWRLQA

SEQ ID NO: 16051 - protein, 419 aa, unidentified; identical to SEQ ID NO: 4131
  REGION 1..419: note = Human gut metagenome

SEQ ID NO: 16052 - protein, 446 aa, Moorena sp.; identical to SEQ ID NO: 2419

SEQ ID NO: 16053 - protein, 375 aa, unidentified; identical to SEQ ID NO: 5583
  REGION 1..375: note = Human gut metagenome

SEQ ID NO: 16054 - protein, 428 aa, unidentified
  REGION 1..428: note = Human gut metagenome
LKVFVLNMRGRPLMPCSPAKARHLLKAGKAVVRRRTPFTIQLRIATGETKQNVTLGVDAGAKHVGLSAATEKEEVFASEVELRQDITGLLAARLSLRRERRQRKTRYRAPRFLNRVRSKHKGWLAPSVENRIQAHMSRIDAVCRLLPVTKIVIETASFDIQKIKDPSVEGTDYQQGDQLGFWNVREYVLFRDGHVCQHCHGHAKDKILNVHHLESRQTGGDAPNNLITLCERCHKACHAGKIKLKVKRGQSFREEAFMGIMRWTLLDRVRKAHPGLPVENTYGYLTKNTRITQGLPKAHCVDAYCIAGNLKAVRRGVHLYQRQVRKHNRQIHKCTVLSKTLKDGTKIGYRKLNQTPHLVKNFRLFDKVRCLGQIGFIFGRRSSGYFDVRRLDGVKLSPSISWRKLTLLEKRSTYLTELRKEDGASSPV

SEQ ID NO: 16055 - protein, 443 aa, unidentified
  REGION 1..443: note = Human gut metagenome
LTKDENRPSGRTTGLRAEQAEPAGIRKGDTLKVFVLNMRSKPLMPCSPAKARHMLKAGKAFVVRRTPFTIKLTIATGETKQDVTLGVDAGARHVGISATTEKEEVFASEVALRQDITGLLADRLAFRRARRNRKTRYRAPRFNNRVRSKNKGWLAPSVENRIQAHISRIDAVCRLLPVTKIVIETASFDVQKIKNPTIEGTDYQQGDQLGFWNVREYVLFRDGHVCQHCHGRSRDKILNVHHLESRKTGGDAPNNLITLCETCHKAYHAGKIKLKVKRGQSFRAEAFMGIMRWTLLDRVRKTYPKLPVENTYGYLTKHKRIALGLPKTHCADAFCIAGNLKALRRGDFLFQQQTRKHNRQIHRCSILKGGVRKLNQAPFLVKGFRLFDKVRIGGQIGFVFGRRVRGIFNIRRLDKTVIGTDINCKKLSLLETRKTFLTELRKE

SEQ ID NO: 16056 - protein, 401 aa, unidentified
  REGION 1..401: note = metagenome
MVYVQGIDGSPLMPTTRHGKVRRLLKSKKAAVVNLCPFTIRLLYDTTSYNQEIVLGVDAGTKHVGLSATTKSKELYASEVILRSDVVDLLSTRRELRRIRRNRLRYRKPRFMNRIKSKKRGWVAPSVRQKIDSHIRIIGFVYSILPVSKLIIEVAQFDTQKIKNPEISGKEYQKGEQLGFWNVREYVLARDNHKCQHCKGKSKDPILNVHHIESRKTGGNSPSNLITLCETCHKEFHKGNIKLKVKRSDSLRDAAVMGIMKWKLYDKLKSLYPNVKMTFGYITKYNRINHGIEKSHVSDAFVISRNFDSERLGYYYKRKLVRRHNRQIHKMKIMKGGIRKMNQAPFKVFGFRLFDKVIFQNKVYFIYARRVRGVFNKENKKDIYYKKLRYISHGLISVEID

SEQ ID NO: 16057 - protein, 415 aa, Bacillus sp.; identical to SEQ ID NO: 2671

SEQ ID NO: 16058 - protein, 426 aa, Moorena sp.
MSNSTNYVFVLDAKKKPLAPCKPAMARSLLKSRKAKVFKHYPFTIILNKLVAVDFQGLQLKIDPGSKQTGFAIVTQSEEVIFAMVLIHRGQQIKNALERRLTLRRGRRHRKTRYRKCRFFNRQRKKGWLPPSLRHRVLTVETWVNRLCKLSPVSSLAMELVKFDTQKIQNPEISGVEYQKGELFGYDVREYLLEKWGRSCAYCGATDTPLEVEHIVPRSKGGSNRVSNLAIACHQCNQNKGAMDIREFLENKPSILARVLKVAKTPLKDAAAVNSTRTQIFETLTATGLPMITGSGAGTKYNRRRLNLAKEHWIDAACIGEVEKLTMLTSQPLVVTAMGHGCRQMVQMDKYGFPRIGYKAKKPVPGWKTGDIINVIKGQNAGLKGVRIKTVRSKGNFDIRQGDKILSVSRNHIQPVHRRDGYNYSF

SEQ ID NO: 16059 - protein, 415 aa, unidentified
  REGION 1..415: note = Human metagenome
MLVYVLDKNGQPLMPTQRFSKVRRLLKEKKAKVVRSCPFTIKLLYEPKTKIVQDIVLGVDTGSKYVGVACVGNDKVLYQSQIELRDDIKKKMDSRRMYRRGRRQRKTRYRKPRFLNRGNSIRKDRYCPTIISKFHGHEREIEFCKKLLPVKYTILETAKFDTQLMEKPWLQAHKWAYQKGVNYGYANAREHALVRDNYTCQCCGKKNCRVEAHHIVFRSKNGSNALENYITLCEDCHKAVHLGKIELKLKGKHRSTLRYATQMSVIRSMLLKKYPDAVETFGYVTKANRENLGIGKDHYLDACVIASGGLEFEPLDTLYRKKCIPSQSRQLCKGVRGERKLPKGKVHGFKRYDKVKYLGIICFIKARRVSGQFTLMDIDSNNLDFRDMGGVQNPSYKALERLNVRKSSLCIRQKI

SEQ ID NO: 16060 - protein, 404 aa, Salipiger sp.; identical to SEQ ID NO: 12547

SEQ ID NO: 16061 - protein, 447 aa, unidentified; identical to SEQ ID NO: 8397
  REGION 1..447: note = Human gut metagenome

SEQ ID NO: 16062 - protein, 406 aa, unidentified
  REGION 1..406: note = Human gut metagenome
MVYINDIDGRPLMPTKRHGKVRWLLKENKAVVINLCPFTIQLTYKSTDHKQPVTLGIDAGAKHIGFSATAEKEELFACETTLRTDIVDLLSTRLQNRRTRRSRLRYRKPRFNNRGSSKKKGWVAPSVKQRIDSHLNEVNEIHKILPITKIVIEVAQFDTQKMKNHDISGSDYQNGEQLGFWNVREYVLFRDGHKCSHCKGKSKDPVLNVHHLESRKTGGDSPSNLVTLCESCHKAFHKGEIELKKKRGKSLRDAAVMGIMKWKLYEELKSRYDNVSMTFGYITKYNRIKYGIEKSHTSDAFVISRNFNAKRIERQYLKRLVRRHNRQIHKMKILKGGKKKNNQAPFEVFRFRLFDKVLYNNEICFIYGRRKSGNFNIRDFNGENPKDVSYKKLKLIRGKMHPIILK

SEQ ID NO: 16063 - protein, 439 aa, Aeromonas sp.; identical to SEQ ID NO: 5240

SEQ ID NO: 16064 - protein, 429 aa, Moorena sp.; identical to SEQ ID NO: 9624

SEQ ID NO: 16065 - protein, 471 aa, unidentified
  REGION 1..471: note = Human gut metagenome
MSVFVVGLNGCRLMPTSERKARLLLKQGKAFVEQKVPFTIRLNYKTGSTTQLGYLGIDTGSQHIGVSVVREDGTVLHKEEIGLRDSMSKRKLLEAKASLRRGRRYRKTRYRHPKWRPKTKRVYCEVPDRKGRHWQKKKITFTSKRPKGWLPPSLQSKTDHHIRWIKKLQDLLPEGYRLSIELGRFDPARMKNPEIHGDLYQKGPQYDYENVRAYVLDRDRYTCQICKKKGGKLHVHHILYRSHGATDDPQYMVTVCSDCHSAQNHLPGGILYQWMQEQKRFSRGLRDATFMNILRKRLIRAFPEAVFTYGNVTKVDREKLKLPKSHGNDATAIALVKTGITAVKDKESVICIQQVRRKKRSLHEETPRKGRKEPNRTAARNNKNTKAVTVTKRQNKKKVSMTGCLFDRVELNGKKGWISGFTGKSCYVKDADDQYLSTSPKYKQVSLSKLRILHHCGNWIIIGAKKTLGKG
